United States Patent Application Publication US 2017/0114356 A1 - sequence listing, part 48

SEQ ID NO: 64873 - DNA, 2934 bp, Zea Mays
cgcctgttttgccaaattcctcgtttggttccacgccggacgcatcctcccacgctcgggccgggcgcgtgaacccctcgccgccgtcgcagtcccgttgccggagggcgagagggacgagaaagaagagggcaagatgaagacgaccaaggggggcaaggcgatgaaccccacagacgcgttccgcaaggagcagcggaagaaggagctcaagcggaacaaaaaggaaaggaagaaagtgcgggatgttggcattttgaaaaaggatccggaggctatatgggagcagattgagaaattggagaagatgacactttgcctctttgaattgctagctactttggccctgttttcaacatgaggctgatggtgctctggacaaggctaggaagcataagaaaagacagcttgaggatacatacaatcttattgttaagaaacgaatatgaacagaaaatgaaagagaagggtgaacaaccgattatgttcagccatcttgcaccaccaaagaggcggcctacaggagatgaagatggtagagctaatcctaagcccgaggactctgtttactatcatccaaccttaaatccatctggagcaccgccacctggaaaacctccgatgtacaaatcatctatagggccaaggatcccaccgccttcctcatccagcactggggcctcatcttccatgtcagagtctgaagcaggtccaacgaccctgccaccccctccaccaccaccgccattgccagacacctcagagtccattgatccacctgctcctcctttccctttgcctccactcccgccactgcccccaccaccacctaaacctaacagtgacgcagcattgccaggcttacctctgcctcctcctggtccacctctgagagaatctgtatcaggtcatacagtacttccgccgccactgcctccatcacagaggtcttcaaatccaccaccagcatctagtgcgaatgaaagcaaaacagattctgcttgggtatctactttggatctcttttgcatatttactagtgcttctaatccatttgttaatgcatcaaacccctttccctattgttcaaatgtttggatactggcctttgtgactttgtctgatgtaaccttgtttgcagcccttagttgtgttgcctccaccacccccgccacctgggttgtcaccaaaatcatatgacatggaggctgctggcacttcaaaggacactcctggacttaaagaagatactgcagcgagagtcttaccaccaccgcctccacctagtttgccgcctttacctccaatgcaatctgatatgctatctcctggagtcatgagattaccaccacctccgccaccaccagattcaaggccatcgcttatggctcctggtgttagcaggccccctccacctcctccaggattcccccgtctcaaatgccaataccaccatatgcatcctgtttggttcagctttttttttgactagcttttccgagaatctagctgtggggagaatctggctgtgtagagaatctgagtattattaggattatgtgcggaggaagataaagttgtccatgtggctcaggatctatacagtgacagattactactattgcgacgactcaaccgattatatgtttatgttgattttgaatggtttttacccaaacgaattttatagaagctggctgaaaagctgagtgtttagcagtccgcagcagcttttggtggtcagaagctgcgaaaaaccgaaacaaacagggacatggtgtcctccctggtccgccaccgatgcttaggcctccatttttgctaggaccctctatgcaactagatgagcttgctgcctttgccccaaggcctcagttacctcagcagccatcatatgtaaagtcggctgccccaacagttgttaagagaccattagcacagcacactcctgagctgacggctatggttcctgcatcagttcgtgtcaagagagaatctgcgctccccaaaccaaaaccaaaggtgcagcagcagcagcagctatcaacagcatccatttcaaggccttcagtgaccctcataagaagtgatgctcggccttcttcagcggcacccaagccgccaagtatggacgactcctacttggcattcttggaagatatgaaggaactaggggcacttgatgggtaactcatagagtaactgcctgagtgcacttaacagcttaattcatggaaaacctggacatgggaccttttttttttgcaatgtggtaaatggatagtctctgctcagtcaaccggagctgccgcggagaaagaaaatcatgcagtagtttaattgaaaacccgggaaaacgattgtagtctggctgctggagacctaaaggctctttgtggcccaactgtacacgtttgagatatttggaacttgaatagctgctggctctagcgaaggatatcttacaggtgctctttatgattcatgattgcactggctgatttgcagataataccattacaccagtcgtggggaggactactgttgtgccttaatttttgtatggtgcatttgccttgaaaaccatgacggagttgctgtcctgggaccccatgtaaacttgtgacattcacaaatgtcggtattggttctatagactatagtccggcgacattactggatacgagccacggcttctatataaaagtttcgtgctttctgtgctgaaatctgaaattaacagttttttatttggccagatgggaatatctgtttgcaaactgtgtaacgtatgatgcgatatgcctgcaaagtggcctcatctggccatctttgtacgtgagtcgcactaacatatgatgagtctatggcagattcatgtttcaggcctccacgtcttctgaaggaatcgtcgaagaatttgtcagttcaaac

SEQ ID NO: 64874 - DNA, 2894 bp, Zea Mays
cgcctgttttgccaaattcctcgtttggttccacgccggacgcatcctcccacgctcgggccgggcgcgtgaacccctcgccgccgtcgcagtcccgttgccggagggcgagagggacgagaaagaagagggcaagatgaagacgaccaaggggggcaaggcgatgaaccccacagacgcgttccgcaaggagcagcggaagaaggagctcaagcggaggctgatggtgctctggacaaggctaggaagcataagaaaagacagcttgaggatacatacaatcttattgttaagaaacgtaaggaatatgaacagaaaatgaaagagaagggtgaacaaccgattatgttcagccatcttgcaccaccaaagaggcggcctacaggagatgaagatggtagagctaatcctaagcccgaggactctgtttactatcatccaaccttaaatccatctggagcaccgccacctggaaaacctccgatgtacaaatcatctatagggccaaggatcccaccgccttcctcatccagcactggggcctcatcttccatgtcagagtctgaagcaggtccaacgaccctgccaccccctccaccaccaccgccattgccagacacctcagagtccattgatccacctgctcctcctttccctttgcctccactcccgccactgcccccaccaccacctaaacctaacagtgacgcagcattgccaggcttacctctgcctcctcctggtccacctctgagagaatctgtatcaggtcatacagtacttccgccgccactgcctccatcacagaggtcttcaaatccaccaccagcatctagtgcgaatgaaagcaaaacagattctgcttgggtatctactttggatctcttttgcatatttactagtgcttctaatccatttgttaatgcatcaaacccctttccctattgttcaaatgtttggatactggcctttgtgactttgtctgatgtaaccttgtttgcagcccttagttgtgttgcctccaccacccccgccacctgggttgtcaccaaaatcatatgacatggaggctgctggcacttcaaaggacactcctggacttaaagaagatactgcagcgagagtcttaccaccaccgcctccacctagtttgccgcctttacctccaatgcaatctgatatgctatctcctggagtcatgagattaccaccacctccgccaccaccagattcaaggccatcgcttatggctcctggtgttagcaggccccctccacctcctccaggattcccccgtctcaaatgccaataccaccatatgcatcctgtttggttcagctttttttttgactagcttttccgagaatctagctgtggggagaatctggctgtgtagagaatctgagtattattaggattatgtgcggaggaagataaagttgtccatgtggctcaggatctatacagtgacagattactactattgcgacgactcaaccgattatatgtttatgttgattttgaatggtttttacccaaacgaattttatagaagctggctgaaaagctgagtgtttagcagtccgcagcagcttttggtggtcagaagctgcgaaaaaccgaaacaaacagggacatggtgtcctccctggtccgccaccgatgcttaggcctccatttttgctaggaccctctatgcaactagatgagcttgctgcctttgccccaaggcctcagttacctcagcagccatcatatgtaaagtcggctgccccaacagttgttaagagaccattagcacagcacactcctgagctgacggctatggttcctgcatcagttcgtgtcaagagagaatctgcgctccccaaaccaaaaccaaaggtgcagcagcagcagcagctatcaacagcatccatttcaaggccttcagtgaccctcataagaagtgatgctcggccttcttcagcggcacccaagccgccaagtatggacgactcctacttggcattcttggaagatatgaaggaactaggggcacttgatgggtaactcatagagtaactgcctgagtgcacttaacagcttaattcatggaaaacctggacatgggaccttttttttttgcaatgtggtaaatggatagtctctgctcagtcaaccggagctgccgcggagaaagaaaatcatgcagtagtttaattgaaaacccgggaaaacgattgtagtctggctggagatgtctgaacaagctgtacaagctcaagctgggagatatttgtggcccaacttgaatagctggagaccttttgcacacttgaatagctgtacaagctggagacctaaaggctctttgtggcccaactgtacacgtttgagatatttggaacttgaatagctgctggctctagcgaaggatatcttacaggtgctctttatgattcatgattgcactggctgatttgcagataataccattacaccagtcgtggggaggactactgttgtgccttaatttttgtatggtgcatttgccttgaaaaccatgacggagttgctgtcctgggaccccatgtaaacttgtgacattcacaaatgtcggtattggttctatagactatagtccggcgacattactggatacgagccacggcttctatataaaagtttcgtgctttctgtgctgaaatctgaaattaacagttttttatttggccagatgggaatatctgtttgcaaactgtgtaacgtatgatgcgatatgcctgcaaagtggcctcatctggccatctttgtacgtgagtcgcactaacatatgatgagtctatggcagattcatgtttcaggcctccacgtcttctgaaggaatcgtcgaagaatttgtcagttcaaac

SEQ ID NO: 64875 - DNA, 3280 bp, Zea Mays
gcctgttttgccaaattcctcgtttggttccacgccggacgcatcctcccacgctcgggccgggcgcgtgaacccctcgccgccgtcgcagtcccgttgccggagggcgagagggacgagaaagaagagggcaagatgaagacgaccaaggggggcaaggcgatgaaccccacagacgcgttccgcaaggagcagcggaagaaggagctcaagcggaacaaaaaggaaaggaagaaagtgcgggatgttggcattttgaaaaaggatccggaggctatatgggagcagattgagaaattggagaagatgagtaagtaaactagctgcattgggaaaaacgaatcagaaagtgatgaagtgatctttgtaagaagtttatagtcactttcataaaccttaagttctatatacaattatgcatatatcaagagatcatgttacttacttgttctgctttagttatgacaacatagttcatttgatctgtagccatagcattatttgcacattgttcgtcaacatttgctaaacactcatacactattgtttttcccctaacttagtttgaatgcaaattttagttgatttgactcttgcagttggctaattatctctctggtctggtctttctagtatgaccctattgttgaaacaactcactttgcctctttgaattgctagctactttggccctgttttcaacatgaggctgatggtgctctggacaaggctaggaagcataagaaaagacagcttgaggatacatacaatcttattgttaagaaacgaatatgaacagaaaatgaaagagaagggtgaacaaccgattatgttcagccatcttgcaccaccaaagaggcggcctacaggagatgaagatggtagagctaatcctaagcccgaggactctgtttactatcatccaaccttaaatccatctggagcaccgccacctggaaaacctccgatgtacaaatcatctatagggccaaggatcccaccgccttcctcatccagcactggggcctcatcttccatgtcagagtctgaagcaggtccaacgaccctgccaccccctccaccaccaccgccattgccagacacctcagagtccattgatccacctgctcctcctttccctttgcctccactcccgccactgcccccaccaccacctaaacctaacagtgacgcagcattgccaggcttacctctgcctcctcctggtccacctctgagagaatctgtatcaggtcatacagtacttccgccgccactgcctccatcacagaggtcttcaaatccaccaccagcatctagtgcgaatgaaagcaaaacagattctgcttgggtatctactttggatctcttttgcatatttactagtgcttctaatccatttgttaatgcatcaaacccctttccctattgttcaaatgtttggatactggcctttgtgactttgtctgatgtaaccttgtttgcagcccttagttgtgttgcctccaccacccccgccacctgggttgtcaccaaaatcatatgacatggaggctgctggcacttcaaaggacactcctggacttaaagaagatactgcagcgagagtcttaccaccaccgcctccacctagtttgccgcctttacctccaatgcaatctgatatgctatctcctggagtcatgagattaccaccacctccgccaccaccagattcaaggccatcgcttatggctcctggtgttagcaggccccctccacctcctccaggattcccccgtctcaaatgccaataccaccatatgcatcctgtttggttcagctttttttttgactagcttttccgagaatctagctgtggggagaatctggctgtgtagagaatctgagtattattaggattatgtgcggaggaagataaagttgtccatgtggctcaggatctatacagtgacagattactactattgcgacgactcaaccgattatatgtttatgttgattttgaatggtttttacccaaacgaattttatagaagctggctgaaaagctgagtgtttagcagtccgcagcagcttttggtggtcagaagctgcgaaaaaccgaaacaaacagggacatggtgtcctccctggtccgccaccgatgcttaggcctccatttttgctaggaccctctatgcaactagatgagcttgctgcctttgccccaaggcctcagttacctcagcagccatcatatgtaaagtcggctgccccaacagttgttaagagaccattagcacagcacactcctgagctgacggctatggttcctgcatcagttcgtgtcaagagagaatctgcgctccccaaaccaaaaccaaaggtgcagcagcagcagcagctatcaacagcatccatttcaaggccttcagtgaccctcataagaagtgatgctcggccttcttcagcggcacccaagccgccaagtatggacgactcctacttggcattcttggaagatatgaaggaactaggggcacttgatgggtaactcatagagtaactgcctgagtgcacttaacagcttaattcatggaaaacctggacatgggaccttttttttttgcaatgtggtaaatggatagtctctgctcagtcaaccggagctgccgcggagaaagaaaatcatgcagtagtttaattgaaaacccgggaaaacgattgtagtctggctgctggagacctaaaggctctttgtggcccaactgtacacgtttgagatatttggaacttgaatagctgctggctctagcgaaggatatcttacaggtgctctttatgattcatgattgcactggctgatttgcagataataccattacaccagtcgtggggaggactactgttgtgccttaatttttgtatggtgcatttgccttgaaaaccatgacggagttgctgtcctgggaccccatgtaaacttgtgacattcacaaatgtcggtattggttctatagactatagtccggcgacattactggatacgagccacggcttctatataaaagtttcgtgctttctgtgctgaaatctgaaattaacagttttttatttggccagatgggaatatctgtttgcaaactgtgtaacgtatgatgcgatatgcctgcaaagtggcctcatctggccatctttgtacgtgagtcgcactaacatatgatgagtctatggcagattcatgtttcaggcctccacgtcttctgaaggaatcgtcgaagaatttgtcagttcaaac

SEQ ID NO: 64876 - DNA, 2897 bp, Zea Mays
caaattcctcgtttggttccacgccggacgcatcctcccacgctcgggccgggcgcgtgaacccctcgccgccgtcgcagtcccgttgccggagggcgagagggacgagaaagaagagggcaagatgaagacgaccaaggggggcaaggcgatgaaccccacagacgcgttccgcaaggagcagcggaagaaggagctcaagcggaacaaaaaggaaaggaagaaagtgcgggatgttggcattttgaaaaaggatccggaggctatatgggagcagattgagaaattggagaagatgaaggctgatggtgctctggacaaggctaggaagcataagaaaagacagcttgaggatacatacaatcttattgttaagaaacgaatatgaacagaaaatgaaagagaagggtgaacaaccgattatgttcagccatcttgcaccaccaaagaggcggcctacaggagatgaagatggtagagctaatcctaagcccgagatacttctcatgtttatactacaggactctgtttactatcatccaaccttaaatccatctggagcaccgccacctggaaaacctccgatgtacaaatcatctatagggccaaggatcccaccgccttcctcatccagcactggggcctcatcttccatgtcagagtctgaagcaggtccaacgaccctgccaccccctccaccaccaccgccattgccagacacctcagagtccattgatccacctgctcctcctttccctttgcctccactcccgccactgcccccaccaccacctaaacctaacagtgacgcagcattgccaggcttacctctgcctcctcctggtccacctctgagagaatctgtatcaggtcatacagtacttccgccgccactgcctccatcacagaggtcttcaaatccaccaccagcatctagtgcgaatgaaagcaaaacagattctgcttgggtatctactttggatctcttttgcatatttactagtgcttctaatccatttgttaatgcatcaaacccctttccctattgttcaaatgtttggatactggcctttgtgactttgtctgatgtaaccttgtttgcagcccttagttgtgttgcctccaccacccccgccacctgggttgtcaccaaaatcatatgacatggaggctgctggcacttcaaaggacactcctggacttaaagaagatactgcagcgagagtcttaccaccaccgcctccacctagtttgccgcctttacctccaatgcaatctgatatgctatctcctggagtcatgagattaccaccacctccgccaccaccagattcaaggccatcgcttatggctcctggtgttagcaggccccctccacctcctccaggattcccccgtctcaaatgccaataccaccatatgcatcctgtttggttcagctttttttttgactagcttttccgagaatctagctgtggggagaatctggctgtgtagagaatctgagtattattaggattatgtgcggaggaagataaagttgtccatgtggctcaggatctatacagtgacagattactactattgcgacgactcaaccgattatatgtttatgttgattttgaatggtttttacccaaacgaattttatagaagctggctgaaaagctgagtgtttagcagtccgcagcagcttttggtggtcagaagctgcgaaaaaccgaaacaaacagggacatggtgtcctccctggtccgccaccgatgcttaggcctccatttttgctaggaccctctatgcaactagatgagcttgctgcctttgccccaaggcctcagttacctcagcagccatcatatgtaaagtcggctgccccaacagttgttaagagaccattagcacagcacactcctgagctgacggctatggttcctgcatcagttcgtgtcaagagagaatctgcgctccccaaaccaaaaccaaaggtgcagcagcagcagcagctatcaacagcatccatttcaaggccttcagtgaccctcataagaagtgatgctcggccttcttcagcggcacccaagccgccaagtatggacgactcctacttggcattcttggaagatatgaaggaactaggggcacttgatgggtaactcatagagtaactgcctgagtgcacttaacagcttaattcatggaaaacctggacatgggaccttttttttttgcaatgtggtaaatggatagtctctgctcagtcaaccggagctgccgcggagaaagaaaatcatgcagtagtttaattgaaaacccgggaaaacgattgtagtctggctgctggagacctaaaggctctttgtggcccaactgtacacgtttgagatatttggaacttgaatagctgctggctctagcgaaggatatcttacaggtgctctttatgattcatgattgcactggctgatttgcagataataccattacaccagtcgtggggaggactactgttgtgccttaatttttgtatggtgcatttgccttgaaaaccatgacggagttgctgtcctgggaccccatgtaaacttgtgacattcacaaatgtcggtattggttctatagactatagtccggcgacattactggatacgagccacggcttctatataaaagtttcgtgctttctgtgctgaaatctgaaattaacagttttttatttggccagatgggaatatctgtttgcaaactgtgtaacgtatgatgcgatatgcctgcaaagtggcctcatctggccatctttgtacgtgagtcgcactaacatatgatgagtctatggcagattcatgtttcaggcctccacgtcttctgaaggaatcgtcgaagaatttgtcagttcaaac

SEQ ID NO: 64877 - DNA, 2513 bp, Zea Mays
gacgcatcctcccacgctcgggccgggcgcgtgaacccctcgccgccgtcgcagtcccgttgccggagggcgagagggacgagaaagaagagggcaagatgaagacgaccaaggggggcaaggcgatgaaccccacagacgcgttccgcaaggagcagcggaagaaggagctcaagcggaacaaaaaggaaaggaagaaagtgcgggatgttggcattttgaaaaaggatccggaggctatatgggagcagattgagaaattggagaagatgaaggctgatggtgctctggacaaggctaggaagcataagaaaagacagcttgaggatacatacaatcttattgttaagaaacgaatatgaacagaaaatgaaagagaagggtgaacaaccgattatgttcagccatcttgcaccaccaaagaggcggcctacaggagatgaagatggtagagctaatcctaagcccgaggactctgtttactatcatccaaccttaaatccatctggagcaccgccacctggaaaacctccgatgtacaaatcatctatagggccaaggatcccaccgccttcctcatccagcactggggcctcatcttccatgtcagagtctgaagcagcccttagttgtgttgcctccaccacccccgccacctgggttgtcaccaaaatcatatgacatggaggctgctggcacttcaaaggacactcctggacttaaagaagatactgcagcgagagtcttaccaccaccgcctccacctagtttgccgcctttacctccaatgcaatctgatatgctatctcctggagtcatgagattaccaccacctccgccaccaccagattcaaggccatcgcttatggctcctggtgttagcaggccccctccacctcctccaggattcccccgtctcaaatgccaataccaccatatgcatcctgtttggttcagctttttttttgactagcttttccgagaatctagctgtggggagaatctggctgtgtagagaatctgagtattattaggattatgtgcggaggaagataaagttgtccatgtggctcaggatctatacagtgacagattactactattgcgacgactcaaccgattatatgtttatgttgattttgaatggtttttacccaaacgaattttatagaagctggctgaaaagctgagtgtttagcagtccgcagcagcttttggtggtcagaagctgcgaaaaaccgaaacaaacagggacatggtgtcctccctggtccgccaccgatgcttaggcctccatttttgctaggaccctctatgcaactagatgagcttgctgcctttgccccaaggcctcagttacctcagcagccatcatatgtaaagtcggctgccccaacagttgttaagagaccattagcacagcacactcctgagctgacggctatggttcctgcatcagttcgtgtcaagagagaatctgcgctccccaaaccaaaaccaaaggtgcagcagcagcagcagctatcaacagcatccatttcaaggccttcagtgaccctcataagaagtgatgctcggccttcttcagcggcacccaagccgccaagtatggacgactcctacttggcattcttggaagatatgaaggaactaggggcacttgatgggtaactcatagagtaactgcctgagtgcacttaacagcttaattcatggaaaacctggacatgggaccttttttttttgcaatgtggtaaatggatagtctctgctcagtcaaccggagctgccgcggagaaagaaaatcatgcagtagtttaattgaaaacccgggaaaacgattgtagtctggctggagatgtctgaacaagctgtacaagctcaagctgggagatatttgtggcccaacttgaatagctggagaccttttgcacacttgaatagctgtacaagctggagacctaaaggctctttgtggcccaactgtacacgtttgagatatttggaacttgaatagctgctggctctagcgaaggatatcttacaggtgctctttatgattcatgattgcactggctgatttgcagataataccattacaccagtcgtggggaggactactgttgtgccttaatttttgtatggtgcatttgccttgaaaaccatgacggagttgctgtcctgggaccccatgtaaacttgtgacattcacaaatgtcggtattggttctatagactatagtccggcgacattactggatacgagccacggcttctatataaaagtttcgtgctttctgtgctgaaatctgaaattaacagttttttatttggccagatgggaatatctgtttgcaaactgtgtaacgtatgatgcgatatgcctgcaaagtggcctcatctggccatctttgtacgtgagtcgcactaacatatgatgagtctatggcagattcatgtttcaggcctccacgtcttctgaaggaatcgtcgaagaatttgtcagttcaaac

SEQ ID NO: 64878 - DNA, 3002 bp, Zea Mays
cgcatcctcccacgctcgggccgggcgcgtgaacccctcgccgccgtcgcagtcccgttgccggagggcgagagggacgagaaagaagagggcaagatgaagacgaccaaggggggcaaggcgatgaaccccacagacgcgttccgcaaggagcagcggaagaaggagctcaagcggaacaaaaaggaaaggaagaaagtgcgggatgttggcattttgaaaaaggatccggaggctatatgggagcagattgagaaattggagaagatgacactttgcctctttgaattgctagctactttggccctgttttcaacatgaggctgatggtgctctggacaaggctaggaagcataagaaaagacagcttgaggatacatacaatcttattgttaagaaacgtaaggaatatgaacagaaaatgaaagagaagggtgaacaaccgattatgttcagccatcttgcaccaccaaagaggcggcctacaggagatgaagatggtagagctaatcctaagcccgaggtatggactctgtttactatcatccaaccttaaatccatctggagcaccgccacctggaaaacctccgatgtacaaatcatctatagggccaaggatcccaccgccttcctcatccagcactggggcctcatcttccatgtcagagtctgaagcaggtccaacgaccctgccaccccctccaccaccaccgccattgccagacacctcagagtccattgatccacctgctcctcctttccctttgcctccactcccgccactgcccccaccaccacctaaacctaacagtgacgcagcattgccaggcttacctctgcctcctcctggtccacctctgagagaatctgtatcaggtcatacagtacttccgccgccactgcctccatcacagaggtcttcaaatccaccaccagcatctagtgcgaatgaaagcaaaacagattctgcttgggtatctactttggatctcttttgcatatttactagtgcttctaatccatttgttaatgcatcaaacccctttccctattgttcaaatgtttggatactggcctttgtgactttgtctgatgtaaccttgtttgcagcccttagttgtgttgcctccaccacccccgccacctgggttgtcaccaaaatcatatgacatggaggctgctggcacttcaaaggacactcctggacttaaagaagatactgcagcgagagtcttaccaccaccgcctccacctagtttgccgcctttacctccaatgcaatctgatatgctatctcctggagtcatgagattaccaccacctccgccaccaccagattcaaggccatcgcttatggctcctggtgttagcaggccccctccacctcctccaggattcccccgtctcaaatgccaataccaccatatgcatcctgtttggttcagctttttttttgactagcttttccgagaatctagctgtggggagaatctggctgtgtagagaatctgagtattattaggattatgtgcggaggaagataaagttgtccatgtggctcaggatctatacagtgacagattactactattgcgacgactcaaccgattatatgtttatgttgattttgaatggtttttacccaaacgaattttatagaagctggctgaaaagctgagtgtttagcagtccgcagcagcttttggtggtcagaagctgcgaaaaaccgaaacaaacagggacatggtgtcctccctggtccgccaccgatgcttaggcctccatttttgctaggaccctctatgcaactagatgagcttgctgcctttgccccaaggcctcagttacctcagcagccatcatatgtaaagtcggctgccccaacagttgttaagagaccattagcacagcacactcctgagctgacggctatggttcctgcatcagttcgtgtcaagagagaatctgcgctccccaaaccaaaaccaaaggtgcagcagcagcagcagctatcaacagcatccatttcaaggccttcagtgaccctcataagaagtgatgctcggccttcttcagcggcacccaagccgccaagtatggacgactcctacttggcattcttggaagatatgaaggaactaggggcacttgatgggtaactcatagagtaactgcctgagtgcacttaacagcttaattcatggaaaacctggacatgggaccttttttttttgcaatgtggtaaatggatagtctctgctcagtcaaccggagctgccgcggagaaagaaaatcatgcagtagtttaattgaaaacccgggaaaacgattgtagtctggctggagatgtctgaacaagctgtacaagctcaagctgggagatatttgtggcccaacttgaatagctggagaccttttgcacacttgaatagctgtacaagctggagacctaaaggctctttgtggcccaactgtacacgtttgagatatttggaacttgaatagctgctggctctagcgaaggatatcttacaggtgctctttatgattcatgattgcactggctgatttgcagataataccattacaccagtcgtggggaggactactgttgtgccttaatttttgtatggtgcatttgccttgaaaaccatgacggagttgctgtcctgggaccccatgtaaacttgtgacattcacaaatgtcggtattggttctatagactatagtccggcgacattactggatacgagccacggcttctatataaaagtttcgtgctttctgtgctgaaatctgaaattaacagttttttatttggccagatgggaatatctgtttgcaaactgtgtaacgtatgatgcgatatgcctgcaaagtggcctcatctggccatctttgtacgtgagtcgcactaacatatgatgagtctatggcagattcatgtttcaggcctccacgtcttctgaaggaatcgtcgaagaatttgtcagttcaaac

SEQ ID NO: 64879 - DNA, 2371 bp, Zea Mays
cgcatcctcccacgctcgggccgggcgcgtgaacccctcgccgccgtcgcagtcccgttgccggagggcgagagggacgagaaagaagagggcaagatgaagacgaccaaggggggcaaggcgatgaaccccacagacgcgttccgcaaggagcagcggaagaaggagctcaagcggaacaaaaaggaaaggaagaaagtgcgggatgttggcattttgaaaaaggatccggaggctatatgggagcagattgagaaattggagaagatgagtaagtaaactagctgcattgggaaaaacgaatcagaaagtgatgaagtgatctttgtaagaagtttatagtcactttcataaaccttaagttctatatacaattatgcatatatcaagagatcatgttacttacttgttctgctttagttatgacaacatagttcatttgatctgtagccatagcattatttgcacattgttcgtcaacatttgctaaacactcatacactattgtttttcccctaacttagtttgaatgcaaattttagttgatttgactcttgcagttggctaattatctctctggtctggtctttctagtatgaccctattgttgaaacaactgtatgtctcaggcatcttaaaatatcagtgtattagcatgggattaccaaatatgtatgtactgacctcatgaagcattatattttgcagcactttgcctctttgaattgctagctactttggccctgttttcaacatgaggctgatggtgctctggacaaggctaggaagcataagaaaagacagcttgaggatacatacaatcttattgttaagaaacgaatatgaacagaaaatgaaagagaagggtgaacaaccgattatgttcagccatcttgcaccaccaaagaggcggcctacaggagatgaagatggtagagctaatcctaagcccgaggactctgtttactatcatccaaccttaaatccatctggagcaccgccacctggaaaacctccgatgtacaaatcatctatagggccaaggatcccaccgccttcctcatccagcactggggcctcatcttccatgtcagagtctgaagcaggtccaacgaccctgccaccccctccaccaccaccgccattgccagacacctcagagtccattgatccacctgctcctcctttccctttgcctccactcccgccactgcccccaccaccacctaaacctaacagtgacgcagcattgccaggcttacctctgcctcctcctggtccacctctgagagaatctgtatcaggtcatacagtacttccgccgccactgcctccatcacagaggtcttcaaatccaccaccagcatctagtgcgaatgaaagcaaaacagattctgcttgggttcctgcatcagttcgtgtcaagagagaatctgcgctccccaaaccaaaaccaaaggtgcagcagcagcagcagctatcaacagcatccatttcaaggccttcagtgaccctcataagaagtgatgctcggccttcttcagcggcacccaagccgccaagtatggacgactcctacttggcattcttggaagatatgaaggaactaggggcacttgatgggtaactcatagagtaactgcctgagtgcacttaacagcttaattcatggaaaacctggacatgggaccttttttttttgcaatgtggtaaatggatagtctctgctcagtcaaccggagctgccgcggagaaagaaaatcatgcagtagtttaattgaaaacccgggaaaacgattgtagtctggctgctggagacctaaaggctctttgtggcccaactgtacacgtttgagatatttggaacttgaatagctgctggctctagcgaaggatatcttacaggtgctctttatgattcatgattgcactggctgatttgcagataataccattacaccagtcgtggggaggactactgttgtgccttaatttttgtatggtgcatttgccttgaaaaccatgacggagttgctgtcctgggaccccatgtaaacttgtgacattcacaaatgtcggtattggttctatagactatagtccggcgacattactggatacgagccacggcttctatataaaagtttcgtgctttctgtgctgaaatctgaaattaacagttttttatttggccagatgggaatatctgtttgcaaactgtgtaacgtatgatgcgatatgcctgcaaagtggcctcatctggccatctttgtacgtgagtcgcactaacatatgatgagtctatggcagattcatgtttcaggcctccacgtcttctgaaggaatcgtcgaagaatttgtcagttcaaac

SEQ ID NO: 64880 - DNA, 2255 bp, Zea Mays
aaaacgaatcagaaagtgatgaagtgatctttaggctgatggtgctctggacaaggctaggaagcataagaaaagacagcttgaggatacatacaatcttattgttaagaaacgtaaggaatatgaacagaaaatgaaagagaagggtgaacaaccgattatgttcagccatcttgcaccaccaaagaggcggcctacaggagatgaagatggtagagctaatcctaagcccgaggactctgtttactatcatccaaccttaaatccatctggagcaccgccacctggaaaacctccgatgtacaaatcatctatagggccaaggatcccaccgccttcctcatccagcactggggcctcatcttccatgtcagagtctgaagcaggtccaacgaccctgccaccccctccaccaccaccgccattgccagacacctcagagtccattgatccacctgctcctcctttccctttgcctccactcccgccactgcccccaccaccacctaaacctaacagtgacgcagcattgccaggcttacctctgcctcctcctggtccacctctgagagaatctgtatcaggtcatacagtacttccgccgccactgcctccatcacagaggtcttcaaatccaccaccagcatctagtgcgaatgaaagcaaaacagattctgcttggcccttagttgtgttgcctccaccacccccgccacctgggttgtcaccaaaatcatatgacatggaggctgctggcacttcaaaggacactcctggacttaaagaagatactgcagcgagagtcttaccaccaccgcctccacctagtttgccgcctttacctccaatgcaatctgatatgctatctcctggagtcatgagattaccaccacctccgccaccaccagattcaaggccatcgcttatggctcctggtgttagcaggccccctccacctcctccaggattcccccgtctcaaatgccaataccaccatatggtgtcctccctggtccgccaccgatgcttaggcctccatttttgctaggaccctctatgcaactagatgagcttgctgcctttgccccaaggcctcagttacctcagcagccatcatatgtaaagtcggctgccccaacagttgttaagagaccattagcacagcacactcctgagctgacggctatggttcctgcatcagttcgtgtcaagagagaatctgcgctccccaaaccaaaaccaaaggtgcagcagcagcagcagctatcaacagcatccatttcaaggccttcagtgaccctcataagaagtgatgctcggccttcttcagcggcacccaagccgccaagtatggacgactcctacttggcattcttggaagatatgaaggaactaggggcacttgatgggtaactcatagagtaactgcctgagtgcacttaacagcttaattcatggaaaacctggacatgggaccttttttttttgcaatgtggtaaatggatagtctctgctcagtcaaccggagctgccgcggagaaagaaaatcatgcagtagtttaattgaaaacccgggaaaacgattgtagtctggctggagatgtctgaacaagctgtacaagctcaagctgggagatatttgtggcccaacttgaatagctggagaccttttgcacacttgaatagctgtacaagctggagacctaaaggctctttgtggcccaactgtacacgtttgagatatttggaacttgaatagctgctggctctagcgaaggatatcttacaggtgctctttatgattcatgattgcactggctgatttgcagataataccattacaccagtcgtggggaggactactgttgtgccttaatttttgtatggtgcatttgccttgaaaaccatgacggagttgctgtcctgggaccccatgtaaacttgtgacattcacaaatgtcggtattggttctatagactatagtccggcgacattactggatacgagccacggcttctatataaaagtttcgtgctttctgtgctgaaatctgaaattaacagttttttatttggccagatgggaatatctgtttgcaaactgtgtaacgtatgatgcgatatgcctgcaaagtggcctcatctggccatctttgtacgtgagtcgcactaacatatgatgagtctatggcagattcatgtttcaggcctccacgtcttctgaaggaatcgtcgaagaatttgtcagttcaaac

SEQ ID NO: 64881 - DNA, 2539 bp, Zea Mays
cctgttttcaacatgaggctgatggtgctctggacaaggctaggaagcataagaaaagacagcttgaggatacatacaatcttattgttaagaaacgtaaggaatatgaacagaaaatgaaagagaagggtgaacaaccgattatgttcagccatcttgcaccaccaaagaggcggcctacaggagatgaagatggtagagctaatcctaagcccgaggactctgtttactatcatccaaccttaaatccatctggagcaccgccacctggaaaacctccgatggccaaggatcccaccgccttcctcatccagcactggggcctcatcttccatgtcagagtctgaagcaggtccaacgaccctgccaccccctccaccaccaccgccattgccagacacctcagagtccattgatccacctgctcctcctttccctttgcctccactcccgccactgcccccaccaccacctaaacctaacagtgacgcagcattgccaggcttacctctgcctcctcctggtccacctctgagagaatctgtatcaggtcatacagtacttccgccgccactgcctccatcacagaggtcttcaaatccaccaccagcatctagtgcgaatgaaagcaaaacagattctgcttggcccttagttgtgttgcctccaccacccccgccacctgggttgtcaccaaaatcatatgacatggaggctgctggcacttcaaaggacactcctggacttaaagaagatactgcagcgagagtcttaccaccaccgcctccacctagtttgccgcctttacctccaatgcaatctgatatgctatctcctggagtcatgagattaccaccacctccgccaccaccagattcaaggccatcgcttatggctcctggtgttagcaggccccctccacctcctccaggattcccccgtctcaaatgccaataccaccatatgcatcctgtttggttcagctttttttttgactagcttttccgagaatctagctgtggggagaatctggctgtgtagagaatctgagtattattaggattatgtgcggaggaagataaagttgtccatgtggctcaggatctatacagtgacagattactactattgcgacgactcaaccgattatatgtttatgttgattttgaatggtttttacccaaacgaattttatagaagctggctgaaaagctgagtgtttagcagtccgcagcagcttttggtggtcagaagctgcgaaaaaccgaaacaaacagggacatggtgtcctccctggtccgccaccgatgcttaggcctccatttttgctaggaccctctatgcaactagatgagcttgctgcctttgccccaaggcctcagttacctcagcagccatcatatgtaaagtcggctgccccaacagttgttaagagaccattagcacagcacactcctgagctgacggctatggttcctgcatcagttcgtgtcaagagagaatctgcgctccccaaaccaaaaccaaaggtgcagcagcagcagcagctatcaacagcatccatttcaaggccttcagtgaccctcataagaagtgatgctcggccttcttcagcggcacccaagccgccaagtatggacgactcctacttggcattcttggaagatatgaaggaactaggggcacttgatgggtaactcatagagtaactgcctgagtgcacttaacagcttaattcatggaaaacctggacatgggaccttttttttttgcaatgtggtaaatggatagtctctgctcagtcaaccggagctgccgcggagaaagaaaatcatgcagtagtttaattgaaaacccgggaaaacgattgtagtctggctggagatgtctgaacaagctgtacaagctcaagctgggagatatttgtggcccaacttgaatagctggagaccttttgcacacttgaatagctgtacaagctggagacctaaaggctctttgtggcccaactgtacacgtttgagatatttggaacttgaatagctgctggctctagcgaaggatatcttacaggtgctctttatgattcatgattgcactggctgatttgcagataataccattacaccagtcgtggggaggactactgttgtgccttaatttttgtatggtgcatttgccttgaaaaccatgacggagttgctgtcctgggaccccatgtaaacttgtgacattcacaaatgtcggtattggttctatagactatagtccggcgacattactggatacgagccacggcttctatataaaagtttcgtgctttctgtgctgaaatctgaaattaacagttttttatttggccagatgggaatatctgtttgcaaactgtgtaacgtatgatgcgatatgcctgcaaagtggcctcatctggccatctttgtacgtgagtcgcactaacatatgatgagtctatggcagattcatgtttcaggcctccacgtcttctgaaggaatcgtcgaagaatttgtcagttcaaac

SEQ ID NO: 64882 - DNA, 472 bp, Zea Mays
atgctgcaagtaacactgtatggctgcataatggagggtttgcattgccgtcatgacctcgtactgtgtagttgctgttgaatcagtcgggcgacaaatccccatagctttcctggacagagttaaggaagacttcaccaaaaagtatggaggcgggaaagcagctactgctgcagcgaacagcttgaagagggagtttggaccaaagcttaaagagcacatgcagtactgtgtggaccaccctgaggaggttagcaagcttgccaaggtgaaggcccaagtctccgaagtcaaaggagttatgatggaaaacattgagaaggttcttgaccgtggtgagaagattgagctgctagttgacaaaactgaaaatctgcgttctcaggtatccaatgccgagaaataggggaagtaataacaataagaaagaaagcagcttctttatgcaatctaggatcaatggaagcaagcc

SEQ ID NO: 64883 - DNA, 369 bp, Zea Mays
atgacctcgtactgtgtagttgctgttgaatcagtcgggcgacaaatccccatagctttcctggacagagttaaggaagacttcaccaaaaagtatggaggcgggaaagcagctactgctgcagcgaacagcttgaagagggagtttggaccaaagcttaaagagcacatgcagtactgtgtggaccaccctgaggaggttagcaagcttgccaaggtgaaggcccaagtctccgaagtcaaaggagttatgatggaaaacattgagaaggttcttgaccgtggtgagaagattgagctgctagttgacaaaactgaaaatctgcgttctcagggacgagcccagctgtacggacataacctagatcgg

SEQ ID NO: 64884 - DNA, 195 bp, Zea Mays
atgtcatgttccgacacaatcagacactaccgtctctcaagggttttgtttacacgacagaagcaagcaaacccagcacagcagcctagctatctgcctacacgtttgctccggcaaatctttggagcgaaatttaaatcttggcttggcaccggaggaagtaaacacacacacacaccacgcggtaagcagtaa

SEQ ID NO: 64885 - DNA, 222 bp, Zea Mays
cacaaatcacacacaccaataatttttgcagcggcaatactattaccaaattttacaagttacaaaaattttacattattttatcggagtggttacaaaagtataagtttgaaatatatgctagctcatgggaccatcctcaataagaagtatagaagaagtacttagacttataagaaggccgagcccaccggcacttaacaccatcacagcagcataagg

SEQ ID NO: 64886 - DNA, 579 bp, Zea Mays
catttttgtaaatcatgttttgatacttcaccagaagtacctatataggtgtggatagcaaggaaggcaatgcatcaaaaggttccaagcaactcctataaaccgaatgcacatttcactagacttaaagtgtgcagaaattatttgaaaacacaaggaaggggttgcatgcaccggggcttgcctgggtaacactaggttagtgtttgttaggtgtcgatcacttgaagaccatcctttgtcccgatacttgcttcgtctgtccatctccagttccgttcatcagcaccatcttgtggtcgatcagttctggttctccgcatcgcgtggttaattcacgtacctgaatgaaatgcattatgcacatgaatgcatatagaccggaatatttcaaacctaaataggactacgcgatagtgaattaaacacctagcggcgaggcgttgtacaattttgtacggaaacacttgttatcgacgtatgactaagtgcgatagtcatgcctttttagcttaaccaaatttcattcaaacattatagagttctacaaacgaccttctaaacaaacacagatctaac

SEQ ID NO: 64887 - DNA, 689 bp, Zea Mays
gacaaatataactacgacacgtaagctcacaataggataatcatcgcgacaactatatttatccaatccaactattccttatactcacgggaaataaatggatctgcttaccatgtccgaatcgactcggagctatgatttcgacaaggctatccggtttgagccattcatcgaacaccatgcgtgcgtcgatctccccaaaatcaaacaatcaatatttggcaagaacatcggtgccgatcttcccaacacgcgatgagcactggtccacacattttgccgaatagggagctgcaggggcgcacgaccagcgggcacgaggaaacgacgatagtggggagcgagcaatttcgcgcgcacgacaacgcgatggaggcgaactgaatagagagcttcgcggcagcacacgtaggaacaacggaacgctacgcgcgcgacgcaaaggcgagcaggaatttgggcgccgagcaggaagacaggggcgagctcgaggagatgtcgagctgataacgagcgcgctagaacctgggcaccagagcagcgcaaccgccaggcccgaacagggatcgaggcaggggcttggctgggacgtgacatgggagggctccggccatggatgaaagctgggcaagcaggacgccgtggggatggagagggactcggcaggacgcgtcggctgaagaacgcag

SEQ ID NO: 64888 - DNA, 2387 bp, Zea Mays
agtacttctgcggatgaaaccaaacctaagcctagccgagccgccctcccaaatcattagcctccctccccttcgtttgtttgtttgattgattggcgagtaacaactaccactacctgcaaccgcagcaatctcccctcgccaactccgtctcgggttaaccattcgtcattgccgaggaggaggcccggtcgtcgtgtgaggtgttctggatctcggatggcgtcggccaagtcgtcgcggcggcggcgatggcggagtgcagctcgccgacaagcttaagattttcaagaccgacaacttcgatcccgacgcctacgtgcagtccaagtgccagaccatgaacgagaaggaaataagacatctgtgttcctatctccaagacctaaagaaggcttcagctgaagagatgcgtagaagtgtttacgcaaattatgctgcatttatcagaacatctaaggagatatcagaccttgaaggggaactactgtcaattagaaatctgcttaatacacaggcagctttaattcatggtctatctgaaggagttcagatagattcattgacttcaggccctgaaggttctgcagaagacgacatatccaatgttgaagatcaggagccttcagaaatacagaaatggtctgcagatttccctgatatgcttgatgttttgctagctgagcgaagagtggatgaagcactggatgcactggatgaagcagaacgggttgctgttgatgcaaaacgaaaacagactctaactgcagctgaagttttggctttgaaaagatcaatctctgataatcgtcagaggctggcagatcagcttgctgaagctgcttgtcagtcttccactcgtggtattgagcttcgagctgcggcttctgccctcaaaagacttggtgatggcccccgagctcacagcctcttactcagtgcacataatcaaaggcttcaatgcaatatgcaaactatacatccatctagcacttcatacggtggggcatacactgcagcacttgctcaacaagttttttcagtcatagctcaggcactaagtgactctgtggatgtgtttggtgacgagtcatgctacgcgtctgaactagtaacgtgggctaccaagcaggttatgtcctttgcactcctggtaaagaggcatgtgttgtcctcttgtgcagctgctggaggcttgagggcagctgcagaatgtgttcagatatcacttggccattgttctttgctggaagctcgtggtctgtctgtttcatctgtcctcctcaaacaattcaagcccagtctagagcaagcgttagatgctaacttgaggagaattgaggagagtactgctgcactagcagcagctgataactggatactcacatatcccccaactggtattcgtccattaactagattgtctgctgctaatttggcacttcagcctaagctctctagcagcggacaccgtttcaattcaatggttcaggatttctttgaggacgttgcaccactacttagcttgcaattaggtggttcaacaatggatgggatcacacaaattttcaattcatatgtaaacttgcttataaatgctttacctggttccatggatgatgaagctaacttagatggtttaggtaataagattgttagaatggcagagactgaagagcagcagttagctttattagctaatgcatctttactagctgaggagttgctacctagagcagctatgaagttatcatcaataaaccagtctatggatgatttgtgtaaaagaggaacagataaacaaagccgtgtacctgagcaacgtgaatggaaaagaaaactacatcgaatggtggacaggttgagagatagtttttgcaggcagcatgctcttgaacttatatttacagatgaaggtgatactcatctcagcgcagaaatgtatatcagcatggacaatactgttgaagaaccagagtgggttccatctccaattttccaggaactgtatgcaaagttaaacaggatggcaagcattgctgcagaaatgtttgttggtagagaaagatttgctactttactaatgatgcgcctcactgagacagtcatactgtggctctcagaggaccaggccttttgggaagagattgaacagggggctaagcctttaggccccctaggtctacaacagttctacctggacatgcaatttgtcatcatatttgggcaaggtcgttttctctctagacatgtacatcaagtcattttggacgtcattgatagagcaatggctgcattttctgctactggaatgaaccctgatagcctgctgccctctgtagcctacagtaattgcaactggcagccagtagtaacctaaacaaatt

SEQ ID NO: 64889 - DNA, 2325 bp, Zea Mays
cgccctcccaaatcattagcctccctccccttcgtttgtttgtttgattgattggcgagtaacaactaccactacctgcaaccgcagcaatctcccctcgccaactccgtctcgggttaaccattcgtcattgccgaggaggaggcccggtcgtcgtgtgaggtgttctggatctcggatggcgtcggccaagtcgtcgcggtcgcggcccgcgggccactcgggggtgttcccggtgggcagcgccgccgcggtggggagcgggggcgggggaggcggcggcggcgatggcggagtgcagctcgccgacaagcttaagattttcaagaccgacaacttcgatcccgacgcctacgtgcagtccaagtgccagaccatgaacgagaagaacatctaaggagatatcagaccttgaaggggaactactgtcaattagaaatctgcttaatacacaggcagctttaattcatggtctatctgaaggagttcagatagattcattgacttcaggccctgaaggttctgcagaagacgacatatccaatgttgaagatcaggagccttcagaaatacagaaatggtctgcagatttccctgatatgcttgatgttttgctagctgagcgaagagtggatgaagcactggatgcactggatgaagcagaacgggttgctgttgatgcaaaacgaaaacagactctaactgcagctgaagttttggctttgaaaagatcaatctctgataatcgtcagaggctggcagatcagcttgctgaagctgcttgtcagtcttccactcgtggtattgagcttcgagctgcggcttctgccctcaaaagacttggtgatggcccccgagctcacagcctcttactcagtgcacataatcaaaggcttcaatgcaatatgcaaactatacatccatctagcacttcatacggtggggcatacactgcagcacttgctcaacaagttttttcagtcatagctcaggcactaagtgactctgtggatgtgtttggtgacgagtcatgctacgcgtctgaactagtaacgtgggctaccaagcaggttatgtcctttgcactcctggtaaagaggcatgtgttgtcctcttgtgcagctgctggaggcttgagggcagctgcagaatgtgttcagatatcacttggccattgttctttgctggaagctcgtggtctgtctgtttcatctgtcctcctcaaacaattcaagcccagtctagagcaagcgttagatgctaacttgaggagaattgaggagagtactgctgcactagcagcagctgataactggatactcacatatcccccaactggtattcgtccattaactagattgtctgctgctaatttggcacttcagcctaagctctctagcagcggacaccgtttcaattcaatggttcaggatttctttgaggacgttgcaccactacttagcttgcaattaggtggttcaacaatggatgggatcacacaaattttcaattcatatgtaaacttgcttataaatgctttacctggttccatggatgatgaagctaacttagatggtttaggtaataagattgttagaatggcagagactgaagagcagcagttagctttattagctaatgcatctttactagctgaggagttgctacctagagcagctatgaagttatcatcaataaaccagtctatggatgatttgtgtaaaagaggaacagataaacaaagccgtgtacctgagcaacgtgaatggaaaagaaaactacatcgaatggtggacaggttgagagatagtttttgcaggcagcatgctcttgaacttatatttacagatgaaggtgatactcatctcagcgcagaaatgtatatcagcatggacaatactgttgaagaaccagagtgggttccatctccaattttccaggaactgtatgcaaagttaaacaggatggcaagcattgctgcagaaatgtttgttggtagagaaagatttgctactttactaatgatgcgcctcactgagacagtcatactgtggctctcagaggaccaggccttttgggaagagattgaacagggggctaagcctttaggccccctaggtctacaacagttctacctggacatgcaatttgtcatcatatttgggcaaggtcgttttctctctagacatgtacatcaagtcattttggacgtcattgatagagcaatggctgcattttctgctactggaatgaaccctgatagcctgctgccctctgtagcctacagtaattgcaactggcagccagtagtaacctaaacaaatt

SEQ ID NO: 64890 - DNA, 2296 bp, Zea Mays
ctccccttcgtttgtttgtttgattgattggcgagtaacaactaccactacctgcaaccgcagcaatctcccctcgccaactccgtctcgggttaaccattcgtcattgccgaggaggaggcccggtcgtcgtgtgaggtgttctggatctcggatggcgtcggccaagtcgtcgcggtcgcggcccgcgggccactcgggggtgttcccggtgggcagcgccgccgcggtggggagcgggggcgggggaggcggcggcggcgatggcggagtgcagctcgccgacaagcttaagattttcaagaccgacaacttcgatcccgacgcctacgtgcagtccaagtgccagaccatgaacgagaaggaaataagacatctgtgttcctatctccaagacctaaagaaggcttcagctgaagagatgcgtagaagtgtttacgcaaattatgctgcatttatcagaacatctaaggagatatcagaccttgaaggggaactactgtcaattagaaatctgcttaatacacaggcagctttaattcatggtctatctgaaggagttcagatagattcattgacttcaggccctgaaggttctgcagaagacgacatatccaatgttgaagatcaggagccttcagaaatacagaaatggtctgcagatttccctgatatgcttgatgttttgctagctgagcgaagagtggatgaagcactggatgcactggatgaagcagaacgggttgctgttgatgcaaaacgaaaacagactctaactgcagctgaagttttggctttgaaaagatcaatctctgataatcgtcagaggctggcagatcagcttgctgaagctgcttgtcagtcttccactcgtggtattgagcttcgagctgcggcttctgccctcaaaagacttggtgatggcccccgagctcacagcctcttactcagtgcacataatcaaaggcttcaatgcaatatgcaaactatacatccatctagcacttcatacggtggggcatacactgcagcacttgctcaacaagttttttcagtcatagctcaggcactaagtgactctgtggatgtgtttggtgacgagtcatgctacgcgtctgaactagtaacgtgggctaccaagcaggttatgtcctttgcactcctggtaaagaggcatgtgttgtcctcttgtgcagctgctggaggcttgagggcagctgcagaatgtgttcagatatcacttggccattgttctttgctggaagctcgtggtctgtctgtttcatctgtcctcctcaaacaattcaagcccagtctagagcaagcgttagatgctaacttgaggagaattgaggagagtactgctgcactagcagcagctgataactggatactcacatatcccccaactggtattcgtccattaactagattgtctgctgctaatttggcacttcagcctaagctctctagcagcggacaccgtttcaattcaatggttcaggatttctttgaggacgttgcaccactacttagcttgcaattaggtggttcaacaatggatgggatcacacaaattttcaattcatatgtaaacttgcttataaatgctttacctggttccatggatgatgaagctaacttagatggtttaggtaataagattgttagaatggcagagactgaagagcagcagttagctttattagctaatgcatctttactagctgaggagttgctacctagagcagctatgaagttatcatcaataaaccagtctatggatgatttgtgtaaaagaggaacagataaacaaagccgtgtacctgagcaacgtgaatggaaaagaaaactacatcgaatggtggacaggttgagagatagtttttgcaggcagcatgctcttgaacttatatttacagatgaaggtgatactcatctcagcgcagaaatgtatatcagcatggacaatactgttgaagaaccagagtgggttccatctccaattttccagtcatactgtggctctcagaggaccaggccttttgggaagagattgaacagggggctaagcctttaggccccctaggtctacaacagttctacctggacatgcaatttgtcatcatatttgggcaaggtcgttttctctctagacatgtacatcaagtcattttggacgtcattgatagagcaatggctgcattttctgctactggaatgaaccctgatagcctgctgccctctgtagcctacagtaattgcaactggcagccagtagtaacctaaacaaatt

SEQ ID NO: 64891 - DNA, 3084 bp, Zea Mays
gccagtgtggtaccggtacccttccctcactctcccggttctttcccggcgctggattcagatccgcacgcttctccatttccgtaaagctccgtgcctcctcctcgtctcttcactccaaatccaccgaggccatcgcctgggccccggggaaacccctcgcgctcgtggccctgtgagcagccgcagccatggcgcagccgctcgtcgtgaagaaagacgacgatctcgacgaggaagagtactactcgccattcctgggcatagagaagggcgccgtgctgcaggaggcccgagtcttccatgaccctcagctcgacgcgcggcgatgctgccaggttatcaccaagctcctgtacctgctcaaccagggtgatacctttaccaaggttgaggctacagaggtcttctttgcaacgaccaagctgttccagtctaaagatgcgggccttaggaggatggtgtacctcatgatcaaggaactctcaccttcagccgatgaggtcatcatagtaacaagctctttgatgaaggacatgaatagcaaaactgatatgtaccgtgcaaatgctattagagttctttgtcgtattattgactcaacccttctcacccaaatcgagaggtatttgaagcaagccattgttgacaagaatcctgttgttgccagtgcggcccttgttagtggcatctacttgcttcaaacgagtccggaagttgtaaaaagatggagcaatgaagttcaagaggctgtgcagtcaagagctgctcttgtgcaatttcatgcccttgctcttcttcaccaaattagacaaaatgatcggttggctgtcagcaagcttgtcactagcttgaccaggggttcagttcgctctccgttggcccagtgcctacttattcgctacactagccaggtgattagagagtctggtgtgtaccaaggtggagatcgtcctttctttgatttccttgagtcctgtctccggaataaagcagaaatggtcatacttgaggctgcaagagcaattacagaactgaatggtgtcacaagccgagagcttacacctgcaattactgtgctgcagttgttcttaagttcatccaaacctgttctcagatttgcagctgttcgcacacttaacaaggttgcatcaactcatcctttggctgtcacaaattgtaacatagacatggagagcttaatctctgatcagaacaggagcgttgcaacccttgcaattacaacactgttgaagacaggcaatgagtcaagtgttgatcgtttaatgaaacagatgaccaactttatgtcagacatagctgatgagtttaagattgttgttgttgaagcaataagatccctgtgcttgaagttccctctgaaatatcgctcattgatgaacttcttgagtaatattctacgggaagagggaggattcgagtacaagaaagccatagttgattcaattattatactcattagagatattcctgatgcgaaggaaagcggtttatttcacttatgcgaattcatagaagactgtgaattcacctatttgtccactcagatacttcactttttgggaaatgaaggccccaaaacatcagatcccagtaaatacatacgctatatatacaatagggtgatacttgaaaatgctacagttcgagctagtgcagtcagcacattggcaaaatttggtgccttggttgactcactcaagcctcgcatatttgtgctcctgagacgctgcctgtttgatggagatgacgaggtgcgcgatagagcgaccctttacctcaaattgttaggtggggaagctacagtgggtgagacagagaaggatgtgaatgaatttctcttcggctcacttgatgttccattagtaaacttggagacgagtctgcggaattatgaaacaaaatcccaaccccttgcggagaaaaagtctacaggcaagaaatcagcaggtccagcatctgctgtcagtggctctgtttctacagttgatgcttcgtatgagaagcttctttcgtccattccggaattcgctgattttggaaagctttttaagtcatctgcacctgtagaattgactgaagctgagaccgaatactcagtgaatgttgtgaagcatatttttgatcgacatgttgtgctccaatacaactgtaccaatacaattcctgaacaattgcttgaacaggttattgttttggttgatgcttctgaggctgacgaatttttagaagttgcttcaaagcctttagaatcattaccatatgattctcctgggcagacctttgtggcttttgaaaatccagaaggtgtcattgccaccggcaagttctcaaatatcctgaaattctttgttaaggaggttgatccatccacgggtgaagctgaagatgatggtgtcgaggatgagtaccagcttgaagatcttgaaatcgtttctgctgattatatgttgaaggtgggagtatctaacttccgaaatgcctgggaaaacatggatccagagactgagcgagttgacgagtatgggcttggagtaagggagagtttggctgaggctgtaagtgctgttataagcatccttggcatgcagccttgtgagggaactgacgtggtcccaagcaattcaaggtcgcacacttgtctgctctctggtgtgtttattggcaacgtgaaagtcttggtgagactgtcatttggaattagtgcaccgaaggaggtggccatgaagctggcagttagatctgacgatccagagatcagtgacaggatccacgaaattgtcgctaatggctaaaaacaatggtagtatcttttttttactccttttcttttggctttcatgctacgggaagtttgaggggattcaattaattagagtatatgtaagtttggtttccagtcgaatctatcattcgttgcaccatcattcttccttgacacagtacaccagtttttggttgttttggatctgtacaattttccttatatactgaggacttaaaatagtatacgcaataatatgcaggtaaagttttgctggaaaaaatgagcatattgccccc

SEQ ID NO: 64892 - DNA, 2955 bp, Zea Mays
ctgtctcgtctcgtttcttcgttgcgcacctccggttgtgtgtgcccttgcgtgcgttcgtgcgcgcgtagtactactcgccattcctgggcatagagaagggcgccgtgctgcaggaggcccgagtcttccatgaccctcagctcgacgcgcggcgatgctgccaggttatcaccaagctcctgtacctgctcaaccagggtgatacctttaccaaggttgaggctacagaggtcttctttgcaacgaccaagctgttccagtctaaagatgcgggccttaggaggatggtgtacctcatgatcaaggaactctcaccttcagccgatgaggtcatcatagtaacaagctctttgatgaaggacatgaatagcaaaactgatatgtaccgtgcaaatgctattagagttctttgtcgtattattgactcaacccttctcacccaaatcgagaggtatttgaagcaagccattgttgacaagaatcctgttgttgccagtgcggcccttgttagtggcatctacttgcttcaaacgagtccggaagttgtaaaaagatggagcaatgaagttcaagaggctgtgcagtcaagagctgctcttgtgcaatttcatgcccttgctcttcttcaccaaattagacaaaatgatcggttggctgtcagcaagcttgtcactagcttgaccaggggttcagttcgctctccgttggcccagtgcctacttattcgctacactagccaggtgattagagagtctggtgtgtaccaaggtggagatcgtcctttctttgatttccttgagtcctgtctccggaataaagcagaaatggtcatacttgaggctgcaagagcaattacagaactgaatggtgtcacaagccgagagcttacacctgcaattactgtgctgcagttgttcttaagttcatccaaacctgttctcagatttgcagctgttcgcacacttaacaaggttgcatcaactcatcctttggctgtcacaaattgtaacatagacatggagagcttaatctctgatcagaacaggagcgttgcaacccttgcaattacaacactgttgaagacaggcaatgagtcaagtgttgatcgtttaatgaaacagatgaccaactttatgtcagacatagctgatgagtttaagattgttgttgttgaagcaataagatccctgtgcttgaagttccctctgaaatatcgctcattgatgaacttcttgagtaatattctacgggaagagggaggattcgagtacaagaaagccatagttgattcaattattatactcattagagatattcctgatgcgaaggaaagcggtttatttcacttatgcgaattcatagaagactgtgaattcacctatttgtccactcagatacttcactttttgggaaatgaaggccccaaaacatcagatcccagtaaatacatacgctatatatacaatagggtgatacttgaaaatgctacagttcgagctagtgcagtcagcacattggcaaaatttggtgccttggttgactcactcaagcctcgcatatttgtgctcctgagacgctgcctgtttgatggagatgacgaggtgcgcgatagagcgaccctttacctcaaattgttaggtggggaagctacagtgggtgagacagagaaggatgtgaatgaatttctcttcggctcacttgatgttccattagtaaacttggagacgagtctgcggaattatgaaccttcggatgtaccttttgatatttcatctgtttcgaaggaaacaaaatcccaaccccttgcggagaaaaagtctacaggcaagaaatcagcaggtccagcatctgctgtcagtggctctgtttctacagttgatgcttcgtatgagaagcttctttcgtccattccggaattcgctgattttggaaagctttttaagtcatctgcacctgtagaattgactgaagctgagaccgaatactcagtgaatgttgtgaagcatatttttgatcgacatgttgtgctccaatacaactgtaccaatacaattcctgaacaattgcttgaacaggttattgttttggttgatgcttctgaggctgacgaatttttagaagttgcttcaaagcctttagaatcattaccatatgattctcctgggcagacctttgtggcttttgaaaatccagaaggtgtcattgccaccggcaagttctcaaatatcctgaaattctttgttaaggaggttgatccatccacgggtgaagctgaagatgatggtgtcgaggatgagtaccagcttgaagatcttgaaatcgtttctgctgattatatgttgaaggtgggagtatctaacttccgaaatgcctgggaaaacatggatccagagactgagcgagttgacgagtatgggcttggagtaagggagagtttggctgaggctgtaagtgctgttataagcatccttggcatgcagccttgtgagggaactgacgtggtcccaagcaattcaaggtcgcacacttgtctgctctctggtgtgtttattggcaacgtgaaagtcttggtgagactgtcatttggaattagtgcaccgaaggaggtggccatgaagctggcagttagatctgacgatccagagatcagtgacaggatccacgaaattgtcgctaatggctaaaaacaatggtagtatcttttttttactccttttcttttggctttcatgctacgggaagtttgaggggattcaattaattagagtatatgtaagtttggtttccagtcgaatctatcattcgttgcaccatcattcttccttgacacagtacaccagtttttggttgttttggatctgtacaattttccttatatactgaggacttaaaatagtatacgcaataatatgcaggtaaagttttgctggaaaaaatgagcatattgccccc

SEQ ID NO: 64893 - DNA, 1192 bp, Zea Mays
gaaccgaaattgtgagtctattcgggttcggttcctaattttttttgaaaatttcggttctcatttttcaaaacctgaaatttcacaaactcgaatagaccgaaccgaattaacctaatagaccgaatgtcaagctctccacatcgtcgtgttcccatgactggcgttcggccacatgatcacgtttctggacctctccaagcggctggcgcggcgcggccacgccgtcaccttcgtctccacgccgaggaacgccgccaagctgcagggctccatcccgctggagctcgcggcgcacctatgcatcgtcaggctggacctgcccggcgtcgatggcctccccgagggcgccgagtcaaccgccgacgtccttccgaagaaggtcgggctcctccagaaggcgttcgacggcctcgccgcgccgttcgagcgccttgccatcggggctgtgctgccgccggctaggcgtccgcgttctcgaggaagctcgactggatcgtcctcgacttcgctcagaactggatctggccaattgctgaacagcataagaccatctggaccttagggtcggctcgtccgcggtcctaactagagggattgcatgtttacacaagcccctgtatggttgtacagacctgaccagggtcagcggaccgtccacaggtgctaaaatattttgggcagagactatgtgttgggggtctgcttcgtcgccgaaggtcccataagaataaacaccttcggaagatcgacacagaagcaaagccgaagctgccaatcagagagcttcatagcgtactaccggatgtaccgacttaaagatgaaatgaccaatcggtccatgatagcttgtattatgattgtaatcatttgtaaagggcatgaatgtaattcctcacaggctgcgtcctgtgcctataaatggatgaacagtacccctgtactgttcacgctatcttgtattcgctcgtgcgccacgcttggatttttgccttctatcaagccgaaggcacaaatgtaattaaatattgtctttatctattcaagattatataatgaagatatgtgaatgatgttatatgattattcatgttatcttcatgtttcatatgctctgtctttcattaacgtataccgtgatgatgaaggtacgtccttcatgaccttcgtccgaagatcgttatatcctaag

SEQ ID NO: 64894 - DNA, 6140 bp, Zea Mays
cgcacgttcgccgtccgcgccttcggcttccgcagttcgcacagctgacagcagtccattcaccgtccgcgcctccggtcaccgcacagtacgacgcgcttccgaggaggttagagcgttggctgctatggcgccgcctcgcgtcaccaggaagaaggggaagggcgccggcggcaagaccgacctgcgtcccgaccggaagcagttcaaaaggcaccacaaggaggatgcagccgctgagcagggggatggcaacggagagcggcagcagtcggcagcgccgggttctgcagcgctcctcgccgcagcttctgacgaagctgactttccaagagggggacacagcctcctgagcaaggatgagatggcggaggctcgtgcggaggcggagcaggatttcgagagggaggcgaagaaggggaagggaaaaaggaagaggagtggcggcgagtcgtctggttttggcgtggatgacgacttggggatactcttcggtggggccaccactgggaagctcccacgctttgctaatcgcatcacagtaaagaatatttcaccaaatatgaagctctggggtgttgtaattgaggttaaccagaaagatattgtgttaagtctacctggtggaattagaggctttgttcgctcagaggatgtttgcgacattgctttgcaggaaaatcgtaaggatagtgggaacaatttatgcgcagaagttgttcatgttggtcagcttgttccttgtatagtcctacgagtcgacgatgatagtagagaaggaaaagtaaacaaacgggtttggctatcattgcgattaagcctattgtacaagggacttgccctggatggcttgcaggaaggaatggtacttactgcccaagtcaaaagcatcgaggatcatggttacattcttcattttggagtatcttcctttagcggatttatgcagaaggatgacaaagaagatgtgaagactgagcgccgacaactgatgcaatgtgttgtgaaggcgattgacaaaactcgggccattgttcacttgagttctgatgaagacttgctttctaaatctactattaaggatctgaaaggcctttctattgatcatttgattcctgggatgatggttaatgcacgtgtccattcatttcttgaaaatggactcatgttatcatttcttacttatttcagtggaacagttgatatttttaatttgttgaattccttcccctctggtaattggaaagatgattacagtaagaataagaaggtaaatgctcgcatcctgttcgttgatccatcaacaagagcagttgggcttacattgaacaaacatttacttcatcttgaagtaccccctattaatctaaaagctggagatatctacgataaatcaaaggtgctgagggtagataaaaaggccggtctctttcttgaaataccttctccaactccatcacctggatttattagtatacgtgatgtgtcagacaaggatgcaaaaaacttggagaagttcaaggaaggcagtagcttacgtgtccgtatacttggagtgcggaatcttgaaggagttgcaataggcaccataaaagacagtgcttttgaagggtctgttttcactcatgatgatgttaaacctggaatgttagtgagagctaaggttgctactgttgagccattcggtgctattgtacagttttcaagtggcgtgaaagcactttgtccgcttcctcacatgtcagagttggaacatgttgttaaaccaccaaagaaatttaaggttggagctgagcttcttttccgtgtgttgggctgcaaatccaagagagttacagtgacatacaagaagtctctggtgaaatcaaaacttgatgtgctttcatcatatgctgatgcaaaaattggtttagtgactcatggatggattactcatattgaaaagcacggttgctttgtaaaattctacaatggagttcaaggttttgttagcagatctgaccttggattagaggctggaactgaagcagaaaatgtttatcatgttggccaagtggtcaaatgtagaattatcaatgtgatccctgcttcaaggaaactaaatgttagttttgtcatatcccataataggattgctccaatagacactccaaagttgggcagtattgtctctggtgttgtggaacggcttactcctgcagctgttgttgttagtgtaaatggcttctccaaggggacaatactgaatgaacatttggcagaccatcatggtcaagctgctcagttgaagaatgtgttgaaacctgggcacgagttcaaccaactcttagttctcgatactgaaggtcaaaatttagttctttcggcaaagcactcacttataaattgtgcaaatgacattccttcagagatatcacagatgcatcctggtgttgtagttcatggttacatctgcaacattattgaagctggttgttttgtccgtttcctcggacatttgactggtttctctcccaaggacaaagcagttgataggtggatagaaaagctttctgatgcgttctatgttggccagtcagttcggagtcatatactcagcgtaaatgcagaaactgctagagtaaaactcgcacttcaacagtcaatgtgctcctcaatggattcttcatttattcagggatactttcttctggatcagaagattgcagcattgaagtactcaagcaatgactgggctcgccattttggcattggtagcttagttgaggcggaggtgggagctatagaagaatatggtattatccttaacttcaaagaccatctggatactgttggtttaatcgagcaccatcaacttggtggcagtagtgtggaagtgggatcttctgtgaagggtcttgttttggatttatctgatggagttgttaacttgtccgtcaaaccagagctaattgacagtgtcagaattgttggaaaaaagaagaaacgccaaagggccgtagttgcagacttggagcttcatgaggaagtgaatgcagtcgtggaaataatcaaagacagctatatggtcctttccatccctgagtacaattatgcaattgggttttcaccactgatggattataactcacaactgcttccccaccaccactatgataatggacaacgcattactgtggttgttggaaatatcccaagttctgactcttctggaagacttatcttactaccaaaagcttcagcacagtattcttccctctctgattctaaaagggctaagaagaaatcaggctacaaaattgggtcacttgttgaagcagagattattgatatcaaaccgcttgagcttctactgaaatttggtggcaatcttcatggaagaatccatattactgagattcttgaagaggattctgctgagcatccctttagtgaactcagaatagggcaaaagcttactgccagaattgtttcagaggctgaaccttctggaaagagtggcaaaaaattcaaatgggaattgtctattaggccatgtatagtcaatggagagtttgctcaaaaagaacaaaatcacaccacaaatgggattgtacgtgcttatgttgtcaaggtggataaggaatgggtctggttaactgtatcaagaaatgttatggctcatttatttttacttgatagttcttccgagcccagcgaactgaaagaattccagcagcgctttagtgttggccaagcagtgaaaggtcgtgttatcagtgtgaaccaggagaaaaggttacttcggttgaaggcacttgataaccaatgcacacaaccgaatatagatgaaacacaagaaccaaagtcctctgtgtttggacaaacaaaacaaggagatatcattggtggacgtgttcaaaaaattctacctggtgttggtgggctcgtcgttcagattggacctcatctccatgggagggttcattatactgaaattgttgactcttgggtgtctgaacccttgtctggattccatgagggccagtttgtgaagtgcaaggtcctgtctgtgagccgctcatcagaaggatcacttcgagttgatctatcactccgttcatcaaacctgatcagagactctaacaactcaagactagatgatctggaaacctgtacctcccggattgagaagatcaaggatctgctccctggaactgagattaagggctatgtgaagaacgtgaattccaaaggatgttttattatgctttctcgaatggttgatgctaggattactctatcaaatttatcagatgaatatgttgaaaatccacagaaggatttccccgttggaatgcttgtacacggaaggatcctgtctacagacccatcatcagggagagttgaggcatcacttaggaagaccactggttcaaaattggaaaagctggatgatattagttatagtgacttgcatgttggggatatcgttgatggccaagttaagcgggtggaatcctttggattattcgttacaattcggagaagtgaattggttggtctgtgccatgtatcagaactttctgatgaacctgtcgttgatattaactcttgctataaagctggtgatatggttaaagccaaaattctgaagattgatgagacgcggcatcgagtatcacttggaatgaagaagtcatactttgattctgatctgactgctgacacaaatgatgatgaaagtgctcttatggacatcagcgttgcccctcagatggttgaatatcataacagaaatttagttcaccgcaaagcagaaccaagggcttctgttctgcctcttcaggtttccttggatgaatcggaaggttccgacctagaggataatattagtaatacatgtcttgaaattgctaatggaactgaagcaaatgctaaaaagagtgataaacagttaaagaaggaagcaagaaaacaaagggaactagaaatcagtgctatggaggaaagggctttgcaggaagatataccacaaactccagatgattttgagaagttagttaggagctccccaaatagtagttttatctggataaagtatatggcaactttgttagatcttgcagatgttgagaaagcacgtgcagtagctgagagggctttaaaaacaataatccccagagaagaagaagagaaactaaatgtttgggtagcatatttcaatctggaaaatgaatacggtagtccaagggaggatgctgtgaaaaaggtattccaaagagccttgcaatattgtgatcccaaaaagctgcacttggctcttcttgcgatgtacgagaggaccgaacagtatgagcttgcagatgaacttctagacagaatgaccaaaaggttcaaaacttcctgcaagatatggttatgccgcattcagtttgctctcaagcaagaattcaaatgtggggtgcctgaagaaggaagatccagatttgaactaatattgcgggagtacccaaaaagaacagacctttggagtgtttatctagaccaagaaatccgccttggtgacgtagaagttatacgggcattgtttgagagggtgacttgtctgaccctacctccaaaaaagatgcagttcttgttcaagaagtatcttaatttcgagaagtcactgggtaaagacaacgaaagaattcagcttgtgcaacagaaggcaatcgaatatgttcagagttcactgccgtcacaagacaactcttgaactacatggagacttaataagcccacaaacaatcattaggaaataccagtcgtactgtagatgtgatctctttgatgactccttgaacattattgtgaaaaggtcaatgtaaaatgtgggctgttcaaaattttgtttgaaacctttatataagttatgagtctagtatgtcatgtttcacccaattttttggaaggaactattctaagccggatctggttcgaatattgaccttttctatctgtggtattgactgatgaggcacaattgaatgggtaactgtctgtgctactctgtcacacccgggtttcggacaccaagacacgggcgcgaacataatcacctggtgttgctgggatcaggtcttacacatatgatgaatcatgacacatgatcgaat

SEQ ID NO: 64895 - DNA, 6481 bp, Zea Mays
cgccgtccgcgccttcggcttccgcagttcgcacagctgacagcagtccattcaccgtccgcgcctccggtcaccgcacagtagtgaatccattcgtcgtccgtgcctccgatcaccatacaaccgtgaccgttagcagcaccttgatttttgcgcgtcctccgccactggtggcagcgacgcgcttccgaggaggttagagcgttggctgctatggcgccgcctcgcgtcaccaggaagaaggggaagggcgccggcggcaagaccgacctgcgtcccgaccggaagcagttcaaaaggcaccacaaggaggatgcagccgctgagcagggggatggcaacggagagcggcagcagtcggcagcgccgggttctgcagcgctcctcgccgcagcttctgacgaagctgactttccaagagggggacacagcctcctgagcaaggatgagatggcggaggctcgtgcggaggcggagcaggatttcgagagggaggcgaagaaggggaagggaaaaaggaagaggagtggcggcgagtcgtctggttttggcgtggatgacgacttggggatactcttcggtggggccaccactgggaagctcccacgctttgctaatcgcatcacagtaaaggttggagacagcgaaatcaagataacagcagcagaagcaagcagggctagaagcaaaattgaatggtccagcagcggaatcgagggcttgttttggacagtttcagttgctagaatatggtacaagttatgcacctcgatgcacattaagattaagaatatttcaccaaatatgaagctctggggtgttgtaattgaggttaaccagaaagatattgtgttaagtctacctggtggaattagaggctttgttcgctcagaggatgtttgcgacattgctttgcaggaaaatcgtaaggatagtgggaacaatttatgcgcagaagttgttcatgttggtcagcttgttccttgtatagtcctacgagtcgacgatgatagtagagaaggaaaagtaaacaaacgggtttggctatcattgcgattaagcctattgtacaagggacttgccctggatggcttgcaggaaggaatggtacttactgcccaagtcaaaagcatcgaggatcatggttacattcttcattttggagtatcttcctttagcggatttatgcagaaggatgacaaagaagatgtgaagactgagcgccgacaactgatgcaatgtgttgtgaaggcgattgacaaaactcgggccattgttcacttgagttctgatgaagacttgctttctaaatctactattaaggatctgaaaggcctttctattgatcatttgattcctgggatgatggttaatgcacgtgtccattcatttcttgaaaatggactcatgttatcatttcttacttatttcagtggaacagttgatatttttaatttgttgaattccttcccctctggtaattggaaagatgattacagtaagaataagaaggtaaatgctcgcatcctgttcgttgatccatcaacaagagcagttgggcttacattgaacaaacatttacttcatcttgaagtaccccctattaatctaaaagctggagatatctacgataaatcaaaggtgctgagggtagataaaaaggccggtctctttcttgaaataccttctccaactccatcacctggatttattagtatacgtgatgtgtcagacaaggatgcaaaaaacttggagaagttcaaggaaggcagtagcttacgtgtccgtatacttggagtgcggaatcttgaaggagttgcaataggcaccataaaagacagtgcttttgaagggtctgttttcactcatgatgatgttaaacctggaatgttagtgagagctaaggttgctactgttgagccattcggtgctattgtacagttttcaagtggcgtgaaagcactttgtccgcttcctcacatgtcagagttggaacatgttgttaaaccaccaaagaaatttaaggttggagctgagcttcttttccgtgtgttgggctgcaaatccaagagagttacagtgacatacaagaagtctctggtgaaatcaaaacttgatgtgctttcatcatatgctgatgcaaaaattggtttagtgactcatggatggattactcatattgaaaagcacggttgctttgtaaaattctacaatggagttcaaggttttgttagcagatctgaccttggattagaggctggaactgaagcagaaaatgtttatcatgttggccaagtggtcaaatgtagaattatcaatgtgatccctgcttcaaggaaactaaatgttagttttgtcatatcccataataggattgctccaatagacactccaaagttgggcagtattgtctctggtgttgtggaacggcttactcctgcagctgttgttgttagtgtaaatggcttctccaaggggacaatactgaatgaacatttggcagaccatcatggtcaagctgctcagttgaagaatgtgttgaaacctgggcacgagttcaaccaactcttagttctcgatactgaaggtcaaaatttagttctttcggcaaagcactcacttataaattgtgcaaatgacattccttcagagatatcacagatgcatcctggtgttgtagttcatggttacatctgcaacattattgaagctggttgttttgtccgtttcctcggacatttgactggtttctctcccaaggacaaagcagttgataggtggatagaaaagctttctgatgcgttctatgttggccagtcagttcggagtcatatactcagcgtaaatgcagaaactgctagagtaaaactcgcacttcaacagtcaatgtgctcctcaatggattcttcatttattcagggatactttcttctggatcagaagattgcagcattgaagtactcaagcaatgactgggctcgccattttggcattggtagcttagttgaggcggaggtgggagctatagaagaatatggtattatccttaacttcaaagaccatctggatactgttggtttaatcgagcaccatcaacttggtggcagtagtgtggaagtgggatcttctgtgaagggtcttgttttggatttatctgatggagttgttaacttgtccgtcaaaccagagctaattgacagtgtcagaattgttggaaaaaagaagaaacgccaaagggccgtagttgcagacttggagcttcatgaggaagtgaatgcagtcgtggaaataatcaaagacagctatatggtcctttccatccctgagtacaattatgcaattgggttttcaccactgatggattataactcacaactgcttccccaccaccactatgataatggacaacgcattactgtggttgttggaaatatcccaagttctgactcttctggaagacttatcttactaccaaaagcttcagcacagtattcttccctctctgattctaaaagggctaagaagaaatcaggctacaaaattgggtcacttgttgaagcagagattattgatatcaaaccgcttgagcttctactgaaatttggtggcaatcttcatggaagaatccatattactgagattcttgaagaggattctgctgagcatccctttagtgaactcagaatagggcaaaagcttactgccagaattgtttcagaggctgaaccttctggaaagagtggcaaaaaattcaaatgggaattgtctattaggccatgtatagtcaatggagagtttgctcaaaaagaacaaaatcacaccacaaatgggattgtacgtgcttatgttgtcaaggtggataaggaatgggtctggttaactgtatcaagaaatgttatggctcatttatttttacttgatagttcttccgagcccagcgaactgaaagaattccagcagcgctttagtgttggccaagcagtgaaaggtcgtgttatcagtgtgaaccaggagaaaaggttacttcggttgaaggcacttgataaccaatgcacacaaccgaatatagatgaaacacaagaaccaaagtcctctgtgtttggacaaacaaaacaaggagatatcattggtggacgtgttcaaaaaattctacctggtgttggtgggctcgtcgttcagattggacctcatctccatgggagggttcattatactgaaattgttgactcttgggtgtctgaacccttgtctggattccatgagggccagtttgtgaagtgcaaggtcctgtctgtgagccgctcatcagaaggatcacttcgagttgatctatcactccgttcatcaaacctgatcagagactctaacaactcaagactagatgatctggaaacctgtacctcccggattgagaagatcaaggatctgctccctggaactgagattaagggctatgtgaagaacgtgaattccaaaggatgttttattatgctttctcgaatggttgatgctaggattactctatcaaatttatcagatgaatatgttgaaaatccacagaaggatttccccgttggaatgcttgtacacggaaggatcctgtctacagacccatcatcagggagagttgaggcatcacttaggaagaccactggttcaaaattggaaaagctggatgatattagttatagtgacttgcatgttggggatatcgttgatggccaagttaagcgggtggaatcctttggattattcgttacaattcggagaagtgaattggttggtctgtgccatgtatcagaactttctgatgaacctgtcgttgatattaactcttgctataaagctggtgatatggttaaagccaaaattctgaagattgatgagacgcggcatcgagtatcacttggaatgaagaagtcatactttgattctgatctgactgctgacacaaatgatgatgaaagtgctcttatggacatcagcgttgcccctcagatggttgaatatcataacagaaatttagttcaccgcaaagcagaaccaagggcttctgttctgcctcttcaggtttccttggatgaatcggaaggttccgacctagaggataatattagtaatacatgtcttgaaattgctaatggaactgaagcaaatgctaaaaagagtgataaacagttaaagaaggaagcaagaaaacaaagggaactagaaatcagtgctatggaggaaagggctttgcaggaagatataccacaaactccagatgattttgagaagttagttaggagctccccaaatagtagttttatctggataaagtatatggcaactttgttagatcttgcagatgttgagaaagcacgtgcagtagctgagagggctttaaaaacaataatccccagagaagaagaagagaaactaaatgtttgggtagcatatttcaatctggaaaatgaatacggtagtccaagggaggatgctgtgaaaaaggtattccaaagagccttgcaatattgtgatcccaaaaagctgcacttggctcttcttgcgatgtacgagaggaccgaacagtatgagcttgcagatgaacttctagacagaatgaccaaaaggttcaaaacttcctgcaagatatggttatgccgcattcagtttgctctcaagcaaggcaaggatgttgagtacatcaaagccattgtaaaccgtgcacttctaagtttgccacacagaaagcgcataaaattcctctcacaaactgctattctagaattcaaatgtggggtgcctgaagaaggaagatccagatttgaactaatattgcgggagtacccaaaaagaacagacctttggagtgtttatctagaccaagaaatccgccttggtgacgtagaagttatacgggcattgtttgagagggtgacttgtctgaccctacctccaaaaaagatgcagttcttgttcaagaagtatcttaatttcgagaagtcactgggtaaagacaacgaaagaattcagcttgtgcaacagaaggcaatcgaatatgttcagagttcactgccgtcacaagacaactcttgaactacatggagacttaataagcccacaaacaatcattaggaaataccagtcgtactgtagatgtgatctctttgatgactccttgaacattattgtgaaaaggtcaatgtaaaatgtgggctgttcaaaattttgtttgaaacctttatataagttatgagtctagtatgtcatgtttcacccaattttttggaaggaactattctaagccggatctggttcgaatattgaccttttctatctgtggtattgactgatgaggcacaattgaatgggtaactgtctgtgctactctgtcacacccgggtttcggacaccaagacacgggcgcgaacataatcacctggtgttgctgggatcaggtcttacacatatgatgaatcatgacacatgatcgaat

SEQ ID NO: 64896 - DNA, 6321 bp, Zea Mays
cgccgtccgcgccttcggcttccgcagttcgcacagctgacagcagtccattcaccgtccgcgcctccggtcaccgcacagtagtgaatccattcgtcgtccgtgcctccgatcaccatacaaccgtgaccgttagcagcaccttgatttttgcgcgtcctccgccactggtggcagcgacgcgcttccgaggaggttagagcgttggctgctatggcgccgcctcgcgtcaccaggaagaaggggaagggcgccggcggcaagaccgacctgcgtcccgaccggaagcagttcaaaaggcaccacaaggaggatgcagccgctgagcagggggatggcaacggagagcggcagcagtcggcagcgccgggttctgcagcgctcctcgccgcagcttctgacgaagctgactttccaagagggggacacagcctcctgagcaaggatgagatggcggaggctcgtgcggaggcggagcaggatttcgagagggaggcgaagaaggggaagggaaaaaggaagaggagtggcggcgagtcgtctggttttggcgtggatgacgacttggggatactcttcggtggggccaccactgggaagctcccacgctttgctaatcgcatcacagtaaagaatatttcaccaaatatgaagctctggggtgttgtaattgaggttaaccagaaagatattgtgttaagtctacctggtggaattagaggctttgttcgctcagaggatgtttgcgacattgctttgcaggaaaatcgtaaggatagtgggaacaatttatgcgcagaagttgttcatgttggtcagcttgttccttgtatagtcctacgagtcgacgatgatagtagagaaggaaaagtaaacaaacgggtttggctatcattgcgattaagcctattgtacaagggacttgccctggatggcttgcaggaaggaatggtacttactgcccaagtcaaaagcatcgaggatcatggttacattcttcattttggagtatcttcctttagcggatttatgcagaaggatgacaaagaagatgtgaagactgagcgccgacaactgatgcaatgtgttgtgaaggcgattgacaaaactcgggccattgttcacttgagttctgatgaagacttgctttctaaatctactattaaggatctgaaaggcctttctattgatcatttgattcctgggatgatggttaatgcacgtgtccattcatttcttgaaaatggactcatgttatcatttcttacttatttcagtggaacagttgatatttttaatttgttgaattccttcccctctggtaattggaaagatgattacagtaagaataagaaggtaaatgctcgcatcctgttcgttgatccatcaacaagagcagttgggcttacattgaacaaacatttacttcatcttgaagtaccccctattaatctaaaagctggagatatctacgataaatcaaaggtgctgagggtagataaaaaggccggtctctttcttgaaataccttctccaactccatcacctggatttattagtatacgtgatgtgtcagacaaggatgcaaaaaacttggagaagttcaaggaaggcagtagcttacgtgtccgtatacttggagtgcggaatcttgaaggagttgcaataggcaccataaaagacagtgcttttgaagggtctgttttcactcatgatgatgttaaacctggaatgttagtgagagctaaggttgctactgttgagccattcggtgctattgtacagttttcaagtggcgtgaaagcactttgtccgcttcctcacatgtcagagttggaacatgttgttaaaccaccaaagaaatttaaggttggagctgagcttcttttccgtgtgttgggctgcaaatccaagagagttacagtgacatacaagaagtctctggtgaaatcaaaacttgatgtgctttcatcatatgctgatgcaaaaattggtttagtgactcatggatggattactcatattgaaaagcacggttgctttgtaaaattctacaatggagttcaaggttttgttagcagatctgaccttggattagaggctggaactgaagcagaaaatgtttatcatgttggccaagtggtcaaatgtagaattatcaatgtgatccctgcttcaaggaaactaaatgttagttttgtcatatcccataataggattgctccaatagacactccaaagttgggcagtattgtctctggtgttgtggaacggcttactcctgcagctgttgttgttagtgtaaatggcttctccaaggggacaatactgaatgaacatttggcagaccatcatggtcaagctgctcagttgaagaatgtgttgaaacctgggcacgagttcaaccaactcttagttctcgatactgaaggtcaaaatttagttctttcggcaaagcactcacttataaattgtgcaaatgacattccttcagagatatcacagatgcatcctggtgttgtagttcatggttacatctgcaacattattgaagctggttgttttgtccgtttcctcggacatttgactggtttctctcccaaggacaaattgataggtggatagaaaagctttctgatgcgttctatgttggccagtcagttcggagtcatatactcagcgtaaatgcagaaactgctagagtaaaactcgcacttcaacagtcaatgtgctcctcaatggattcttcatttattcagggatactttcttctggatcagaagattgcagcattgaagtactcaagcaatgactgggctcgccattttggcattggtagcttagttgaggcggaggtgggagctatagaagaatatggtattatccttaacttcaaagaccatctggatactgttggtttaatcgagcaccatcaacttggtggcagtagtgtggaagtgggatcttctgtgaagggtcttgttttggatttatctgatggagttgttaacttgtccgtcaaaccagagctaattgacagtgtcagaattgttggaaaaaagaagaaacgccaaagggccgtagttgcagacttggagcttcatgaggaagtgaatgcagtcgtggaaataatcaaagacagctatatggtcctttccatccctgagtacaattatgcaattgggttttcaccactgatggattataactcacaactgcttccccaccaccactatgataatggacaacgcattactgtggttgttggaaatatcccaagttctgactcttctggaagacttatcttactaccaaaagcttcagcacagtattcttccctctctgattctaaaagggctaagaagaaatcaggctacaaaattgggtcacttgttgaagcagagattattgatatcaaaccgcttgagcttctactgaaatttggtggcaatcttcatggaagaatccatattactgagattcttgaagaggattctgctgagcatccctttagtgaactcagaatagggcaaaagcttactgccagaattgtttcagaggctgaaccttctggaaagagtggcaaaaaattcaaatgggaattgtctattaggccatgtatagtcaatggagagtttgctcaaaaagaacaaaatcacaccacaaatgggattgtacgtgcttatgttgtcaaggtggataaggaatgggtctggttaactgtatcaagaaatgttatggctcatttatttttacttgatagttcttccgagcccagcgaactgaaagaattccagcagcgctttagtgttggccaagcagtgaaaggtcgtgttatcagtgtgaaccaggagaaaaggttacttcggttgaaggcacttgataaccaatgcacacaaccgaatatagatgaaacacaagaaccaaagtcctctgtgtttggacaaacaaaacaaggagatatcattggtggacgtgttcaaaaaattctacctggtgttggtgggctcgtcgttcagattggacctcatctccatgggagggttcattatactgaaattgttgactcttgggtgtctgaacccttgtctggattccatgagggccagtttgtgaagtgcaaggtcctgtctgtgagccgctcatcagaaggatcacttcgagttgatctatcactccgttcatcaaacctgatcagagactctaacaactcaagactagatgatctggaaacctgtacctcccggattgagaagatcaaggatctgctccctggaactgagattaagggctatgtgaagaacgtgaattccaaaggatgttttattatgctttctcgaatggttgatgctaggattactctatcaaatttatcagatgaatatgttgaaaatccacagaaggatttccccgttggaatgcttgtacacggaaggatcctgtctacagacccatcatcagggagagttgaggcatcacttaggaagaccactggttcaaaattggaaaagctggatgatattagttatagtgacttgcatgttggggatatcgttgatggccaagttaagcgggtggaatcctttggattattcgttacaattcggagaagtgaattggttggtctgtgccatgtatcagaactttctgatgaacctgtcgttgatattaactcttgctataaagctggtgatatggttaaagccaaaattctgaagattgatgagacgcggcatcgagtatcacttggaatgaagaagtcatactttgattctgatctgactgctgacacaaatgatgatgaaagtgctcttatggacatcagcgttgcccctcagatggttgaatatcataacagaaatttagttcaccgcaaagcagaaccaagggcttctgttctgcctcttcaggtttccttggatgaatcggaaggttccgacctagaggataatattagtaatacatgtcttgaaattgctaatggaactgaagcaaatgctaaaaagagtgataaacagttaaagaaggaagcaagaaaacaaagggaactagaaatcagtgctatggaggaaagggctttgcaggaagatataccacaaactccagatgattttgagaagttagttaggagctccccaaatagtagttttatctggataaagtatatggcaactttgttagatcttgcagatgttgagaaagcacgtgcagtagctgagagggctttaaaaacaataatccccagagaagaagaagagaaactaaatgtttgggtagcatatttcaatctggaaaatgaatacggtagtccaagggaggatgctgtgaaaaaggtattccaaagagccttgcaatattgtgatcccaaaaagctgcacttggctcttcttgcgatgtacgagaggaccgaacagtatgagcttgcagatgaacttctagacagaatgaccaaaaggttcaaaacttcctgcaagatatggttatgccgcattcagtttgctctcaagcaaggcaaggatgttgagtacatcaaagccattgtaaaccgtgcacttctaagtttgccacacagaaagcgcataaaattcctctcacaaactgctattctagaattcaaatgtggggtgcctgaagaaggaagatccagatttgaactaatattgcgggagtacccaaaaagaacagacctttggagtgtttatctagaccaagaaatccgccttggtgacgtagaagttatacgggcattgtttgagagggtgacttgtctgaccctacctccaaaaaagatgcagttcttgttcaagaagtatcttaatttcgagaagtcactgggtaaagacaacgaaagaattcagcttgtgcaacagaaggcaatcgaatatgttcagagttcactgccgtcacaagacaactcttgaactacatggagacttaataagcccacaaacaatcattaggaaataccagtcgtactgtagatgtgatctctttgatgactccttgaacattattgtgaaaaggtcaatgtaaaatgtgggctgttcaaaattttgtttgaaacctttatataagttatgagtctagtatgtcatgtttcacccaattttttggaaggaactattctaagccggatctggttcgaatattgaccttttctatctgtggtattgactgatgaggcacaattgaatgggtaactgtctgtgctactctgtcacacccgggtttcggacaccaagacacgggcgcgaacataatcacctggtgttgctgggatcaggtcttacacatatgatgaatcatgacacatgatcgaat

SEQ ID NO: 64897 - DNA, 6295 bp, Zea Mays
gccgtccgcgccttcggcttccgcagttcgcacagctgacagcagtccattcaccgtccgcgcctccggtcaccgcacagtagtgaatccattcgtcgtccgtgcctccgatcaccatacaaccgtgaccgttagcagcaccttgatttttgcgcgtcctccgccactggtggcagcgacgcgcttccgaggaggttagagcgttggctgctatggcgccgcctcgcgtcaccaggaagaaggggaagggcgccggcggcaagaccgacctgcgtcccgaccggaagcagttcaaaaggcaccacaaggaggatgcagccgctgagcagggggatggcaacggagagcggcagcagtcggcagcgccgggttctgcagcgctcctcgccgcagcttctgacgaagctgactttccaagagggggacacagcctcctgagcaaggatgagatggcggaggctcgtgcggaggcggagcaggatttcgagagggaggcgaagaaggggaagggaaaaaggaagaggagtggcggcgagtcgtctggttttggcgtggatgacgacttggggatactcttcggtggggccaccactgggaagctcccacgctttgctaatcgcatcacagtaaagaatatttcaccaaatatgaagctctggggtgttgtaattgaggttaaccagaaagatattgtgttaagtctacctggtggaattagaggctttgttcgctcagaggatgtttgcgacattgctttgcaggaaaatcgtaaggatagtgggaacaatttatgcgcagaagttgttcatgttggtcagcttgttccttgtatagtcctacgagtcgacgatgatagtagagaaggaaaagtaaacaaacgggtttggctatcattgcgattaagcctattgtacaagggacttgccctggatggcttgcaggaaggaatggtacttactgcccaagtcaaaagcatcgaggatcatggttacattcttcattttggagtatcttcctttagcggatttatgcagaaggatgacaaagaagatgtgaagactgagcgccgacaactgatgcaatgtgttgtgaaggcgattgacaaaactcgggccattgttcacttgagttctgatgaagacttgctttctaaatctactattaaggatctgaaaggcctttctattgatcatttgattcctgggatgatggttaatgcacgtgtccattcatttcttgaaaatggactcatgttatcatttcttacttatttcagtggaacagttgatatttttaatttgttgaattccttcccctctggtaattggaaagatgattacagtaagaataagaaggtaaatgctcgcatcctgttcgttgatccatcaacaagagcagttgggcttacattgaacaaacatttacttcatcttgaagtaccccctattaatctaaaagctggagatatctacgataaatcaaaggtgctgagggtagataaaaaggccggtctctttcttgaaataccttctccaactccatcacctggatttattagtatacgtgatgtgtcagacaaggatgcaaaaaacttggagaagttcaaggaaggcagtagcttacgtgtccgtatacttggagtgcggaatcttgaaggagttgcaataggcaccataaaagacagtgcttttgaagggtctgttttcactcatgatgatgttaaacctggaatgttagtgagagctaaggttgctactgttgagccattcggtgctattgtacagttttcaagtggcgtgaaagcactttgtccgcttcctcacatgtcagagttggaacatgttgttaaaccaccaaagaaatttaaggttggagctgagcttcttttccgtgtgttgggctgcaaatccaagagagttacagtgacatacaagaagtctctggtgaaatcaaaacttgatgtgctttcatcatatgctgatgcaaaaattggtttagtgactcatggatggattactcatattgaaaagcacggttgctttgtaaaattctacaatggagttcaaggttttgttagcagatctgaccttggattagaggctggaactgaagcagaaaatgtttatcatgttggccaagtggtcaaatgtagaattatcaatgtgatccctgcttcaaggaaactaaatgttagttttgtcatatcccataataggattgctccaatagacactccaaagttgggcagtattgtctctggtgttgtggaacggcttactcctgcagctgttgttgttagtgtaaatggcttctccaaggggacaatactgaatgaacatttggcagaccatcatggtcaagctgctcagttgaagaatgtgttgaaacctgggcacgagttcaaccaactcttagttctcgatactgaaggtcaaaatttagttctttcggcaaagcactcacttataaattgtgcaaatgacattccttcagagatatcacagatgcatcctggtgttgtagttcatggttacatctgcaacattattgaagctggttgttttgtccgtttcctcggacatttgactggtttctctcccaaggacaaagtaagattttttcagctccatcattctttttgttgttttgaaaagaatgtctaatttttcttgtttcacaaaggcagttgataggtggatagaaaagctttctgatgcgttctatgttggccagtcagttcggagtcatatactcagcgtaaatgcagaaactgctagagtaaaactcgcacttcaacagtcaatgtgctcctcaatggattcttcatttattcagggatactttcttctggatcagaagattgcagcattgaagtactcaagcaatgactgggctcgccattttggcattggtagcttagttgaggcggaggtgggagctatagaagaatatggtattatccttaacttcaaagaccatctggatactgttggtttaatcgagcaccatcaacttggtggcagtagtgtggaagtgggatcttctgtgaagggtcttgttttggatttatctgatggagttgttaacttgtccgtcaaaccagagctaattgacagtgtcagaattgttggaaaaaagaagaaacgccaaagggccgtagttgcagacttggagcttcatgaggaagtgaatgcagtcgtggaaataatcaaagacagctatatggtcctttccatccctgagtacaattatgcaattgggttttcaccactgatggattataactcacaactgcttccccaccaccactatgataatggacaacgcattactgtggttgttggaaatatcccaagttctgactcttctggaagacttatcttactaccaaaagcttcagcacagtattcttccctctctgattctaaaagggctaagaagaaatcaggctacaaaattgggtcacttgttgaagcagagattattgatatcaaaccgcttgagcttctactgaaatttggtggcaatcttcatggaagaatccatattactgagattcttgaagaggattctgctgagcatccctttagtgaactcagaatagggcaaaagcttactgccagaattgtttcagaggctgaaccttctggaaagagtggcaaaaaattcaaatgggaattgtctattaggccatgtatagtcaatggagagtttgctcaaaaagaacaaaatcacaccacaaatgggattgtacgtgcttatgttgtcaaggtggataaggaatgggtctggttaactgtatcaagaaatgttatggctcatttatttttacttgatagttcttccgagcccagcgaactgaaagaattccagcagcgctttagtgttggccaagcagtgaaaggtcgtgttatcagtgtgaaccaggagaaaaggttacttcggttgaaggcacttgataaccaatgcacacaaccgaatatagatgaaacacaagaaccaaagtcctctgtgtttggacaaacaaaacaaggagatatcattggtggacgtgttcaaaaaattctacctggtgttggtgggctcgtcgttcagattggacctcatctccatgggagggttcattatactgaaattgttgactcttgggtgtctgaacccttgtctggattccatgagggccagtttgtgaagtgcaaggtcctgtctgtgagccgctcatcagaaggatcacttcgagttgatctatcactccgttcatcaaacctgatcagagactctaacaactcaagactagatgatctggaaacctgtacctcccggattgagaagatcaaggatctgctccctggaactgagattaagatgaatatgttgaaaatccacagaaggatttccccgttggaatgcttgtacacggaagacccatcatcagggagagttgaggcatcacttaggaagaccactggttcaaaattggaaaagctggatgatattagttatagtgacttgcatgttggggatatcgttgatggccaagttaagcgggtggaatcctttggattattcgttacaattcggagaagtgaattggttggtctgtgccatgtatcagaactttctgatgaacctgtcgttgatattaactcttgctataaagctggtgatatggttaaagccaaaattctgaagattgatgagacgcggcatcgagtatcacttggaatgaagaagtcatactttgattctgatctgactgctgacacaaatgatgatgaaagtgctcttatggacatcagcgttgcccctcagatggttgaatatcataacagaaatttagttcaccgcaaagcagaaccaagggcttctgttctgcctcttcaggtttccttggatgaatcggaaggttccgacctagaggataatattagtaatacatgtcttgaaattgctaatggaactgaagcaaatgctaaaaagagtgataaacagttaaagaaggaagcaagaaaacaaagggaactagaaatcagtgctatggaggaaagggctttgcaggaagatataccacaaactccagatgattttgagaagttagttaggagctccccaaatagtagttttatctggataaagtatatggcaactttgttagatcttgcagatgttgagaaagcacgtgcagtagctgagagggctttaaaaacaataatccccagagaagaagaagagaaactaaatgtttgggtagcatatttcaatctggaaaatgaatacggtagtccaagggaggatgctgtgaaaaaggtattccaaagagccttgcaatattgtgatcccaaaaagctgcacttggctcttcttgcgatgtacgagaggaccgaacagtatgagcttgcagatgaacttctagacagaatgaccaaaaggttcaaaacttcctgcaagatatggttatgccgcattcagtttgctctcaagcaaggcaaggatgttgagtacatcaaagccattgtaaaccgtgcacttctaagtttgccacacagaaagcgcataaaattcctctcacaaactgctattctagaattcaaatgtggggtgcctgaagaaggaagatccagatttgaactaatattgcgggagtacccaaaaagaacagacctttggagtgtttatctagaccaagaaatccgccttggtgacgtagaagttatacgggcattgtttgagagggtgacttgtctgaccctacctccaaaaaagatgcagttcttgttcaagaagtatcttaatttcgagaagtcactgggtaaagacaacgaaagaattcagcttgtgcaacagaaggcaatcgaatatgttcagagttcactgccgtcacaagacaactcttgaactacatggagacttaataagcccacaaacaatcattaggaaataccagtcgtactgtagatgtgatctctttgatgactccttgaacattattgtgaaaaggtcaatgtaaaatgtgggctgttcaaaattttgtttgaaacctttatataagttatgagtctagtatgtcatgtttcacccaattttttggaaggaactattctaagccggatctggttcgaatattgaccttttctatctgtggtattgactgatgaggcacaattgaatgggtaactgtctgtgctactctgtcacacccgggtttcggacaccaagacacgggcgcgaacataatcacctggtgttgctgggatcaggtcttacacatatgatgaatcatgacacatgatcgaat

SEQ ID NO: 64898 - DNA, 6235 bp, Zea Mays
cggcttccgcagttcgcacagctgacagcagtccattcaccgtccgcgcctccggtcaccgcacagtagtgaatccattcgtcgtccgtgcctccgatcaccatacaaccgtgaccgttagcagcaccttgatttttgcgcgtcctccgccactggtggcagcgacgcgcttccgaggaggttagagcgttggctgctatggcgccgcctcgcgtcaccaggaagaaggggaagggcgccggcggcaagaccgacctgcgtcccgaccggaagcagttcaaaaggcaccacaaggaggatgcagccgctgagcagggggatggcaacggagagcggcagcagtcggcagcgccgggttctgcagcgctcctcgccgcagcttctgacgaagctgactttccaagagggggacacagcctcctgagcaaggatgagatggcggaggctcgtgcggaggcggagcaggatttcgagagggaggcgaagaaggggaagggaaaaaggaagaggagtggcggcgagtcgtctggttttggcgtggatgacgacttggggatactcttcggtggggccaccactgggaagctcccacgctttgctaatcgcatcacagtaaagaatatttcaccaaatatgaagctctggggtgttgtaattgaggttaaccagaaagatattgtgttaagtctacctggtggaattagaggctttgttcgctcagaggatgtttgcgacattgctttgcaggaaaatcgtaaggatagtgggaacaatttatgcgcagaagttgttcatgttggtcagcttgttccttgtatagtcctacgagtcgacgatgatagtagagaaggaaaagtaaacaaacgggtttggctatcattgcgattaagcctattgtacaagggacttgccctggatggcttgcaggaaggaatggtacttactgcccaagtcaaaagcatcgaggatcatggttacattcttcattttggagtatcttcctttagcggatttatgcagaaggatgacaaagaagatgtgaagactgagcgccgacaactgatgcaatgtgttgtgaaggcgattgacaaaactcgggccattgttcacttgagttctgatgaagacttgctttctaaatctactattaaggatctgaaaggcctttctattgatcatttgattcctgggatgatggttaatgcacgtgtccattcatttcttgaaaatggactcatgttatcatttcttacttatttcagtggaacagttgatatttttaatttgttgaattccttcccctctggtaattggaaagatgattacagtaagaataagaaggtaaatgctcgcatcctgttcgttgatccatcaacaagagcagttgggcttacattgaacaaacatttacttcatcttgaagtaccccctattaatctaaaagctggagatatctacgataaatcaaaggtgctgagggtagataaaaaggccggtctctttcttgaaataccttctccaactccatcacctggatttattagtatacgtgatgtgtcagacaaggatgcaaaaaacttggagaagttcaaggaaggcagtagcttacgtgtccgtatacttggagtgcggaatcttgaaggagttgcaataggcaccataaaagacagtgcttttgaagggtctgttttcactcatgatgatgttaaacctggaatgttagtgagagctaaggttgctactgttgagccattcggtgctattgtacagttttcaagtggcgtgaaagcactttgtccgcttcctcacatgtcagagttggaacatgttgttaaaccaccaaagaaatttaaggttggagctgagcttcttttccgtgtgttgggctgcaaatccaagagagttacagtgacatacaagaagtctctggtgaaatcaaaacttgatgtgctttcatcatatgctgatgcaaaaattggtttagtgactcatggatggattactcatattgaaaagcacggttgctttgtaaaattctacaatggagttcaaggttttgttagcagatctgaccttggattagaggctggaactgaagcagaaaatgtttatcatgttggccaagtggtcaaatgtagaattatcaatgtgatccctgcttcaaggaaactaaatgttagttttgtcatatcccataataggattgctccaatagacactccaaagttgggcagtattgtctctggtgttgtggaacggcttactcctgcagctgttgttgttagtgtaaatggcttctccaaggggacaatactgaatgaacatttggcagaccatcatggtcaagctgctcagttgaagaatgtgttgaaacctgggcacgagttcaaccaactcttagttctcgatactgaaggtcaaaatttagttctttcggcaaagcactcacttataaattgtgcaaatgacattccttcagagatatcacagatgcatcctggtgttgtagttcatggttacatctgcaacattattgaagctggttgttttgtccgtttcctcggacatttgactggtttctctcccaaggacaaagtaaatgcagaaactgctagagtaaaactcgcacttcaacagtcaatgtgctcctcaatggattcttcatttattcagggatactttcttctggatcagaagattgcagcattgaagtactcaagcaatgactgggctcgccattttggcattggtagcttagttgaggcggaggtgggagctatagaagaatatggtattatccttaacttcaaagaccatctggatactgttggtttaatcgagcaccatcaacttggtggcagtagtgtggaagtgggatcttctgtgaagggtcttgttttggatttatctgatggagttgttaacttgtccgtcaaaccagagctaattgacagtgtcagaattgttggaaaaaagaagaaacgccaaagggccgtagttgcagacttggagcttcatgaggaagtgaatgcagtcgtggaaataatcaaagacagctatatggtcctttccatccctgagtacaattatgcaattgggttttcaccactgatggattataactcacaactgcttccccaccaccactatgataatggacaacgcattactgtggttgttggaaatatcccaagttctgactcttctggaagacttatcttactaccaaaagcttcagcacagtattcttccctctctgattctaaaagggctaagaagaaatcaggctacaaaattgggtcacttgttgaagcagagattattgatatcaaaccgcttgagcttctactgaaatttggtggcaatcttcatggaagaatccatattactgagattcttgaagaggattctgctgagcatccctttagtgaactcagaatagggcaaaagcttactgccagaattgtttcagaggctgaaccttctggaaagagtggcaaaaaattcaaatgggaattgtctattaggccatgtatagtcaatggagagtttgctcaaaaagaacaaaatcacaccacaaatgggattgtacgtgcttatgttgtcaaggtggataaggaatgggtctggttaactgtatcaagaaatgttatggctcatttatttttacttgatagttcttccgagcccagcgaactgaaagaattccagcagcgctttagtgttggccaagcagtgaaaggtcgtgttatcagtgtgaaccaggagaaaaggttacttcggttgaaggcacttgataaccaatgcacacaaccgaatatagatgaaacacaagaaccaaagtcctctgtgtttggacaaacaaaacaaggagatatcattggtggacgtgttcaaaaaattctacctggtgttggtgggctcgtcgttcagattggacctcatctccatgggagggttcattatactgaaattgttgactcttgggtgtctgaacccttgtctggattccatgagggccagtttgtgaagtgcaaggtcctgtctgtgagccgctcatcagaaggatcacttcgagttgatctatcactccgttcatcaaacctgatcagagactctaacaactcaagactagatgatctggaaacctgtacctcccggattgagaagatcaaggatctgctccctggaactgagattaagggctatgtgaagaacgtgaattccaaaggatgttttattatgctttctcgaatggttgatgctaggattactctatcaaatttatcagatgaatatgttgaaaatccacagaaggatttccccgttggaatgcttgtacacggaaggatcctgtctacagacccatcatcagggagagttgaggcatcacttaggaagaccactggttcaaaattggaaaagctggatgatattagttatagtgacttgcatgttggggatatcgttgatggccaagttaagcgggtggaatcctttggattattcgttacaattcggagaagtgaattggttggtctgtgccatgtatcagaactttctgatgaacctgtcgttgatattaactcttgctataaagctggtgatatggttaaagccaaaattctgaagattgatgagacgcggcatcgagtatcacttggaatgaagaagtcatactttgattctgatctgactgctgacacaaatgatgatgaaagtgctcttatggacatcagcgttgcccctcagatggttgaatatcataacagaaatttagttcaccgcaaagcagaaccaagggcttctgttctgcctcttcaggtttccttggatgaatcggaaggttccgacctagaggataatattagtaatacatgtcttgaaattgctaatggaactgaagcaaatgctaaaaagagtgataaacagttaaagaaggaagcaagaaaacaaagggaactagaaatcagtgctatggaggaaagggctttgcaggaagatataccacaaactccagatgattttgagaagttagttaggagctccccaaatagtagttttatctggataaagtatatggcaactttgttagatcttgcagatgttgagaaagcacgtgcagtagctgagagggctttaaaaacaataatccccagagaagaagaagagaaactaaatgtttgggtagcatatttcaatctggaaaatgaatacggtagtccaagggaggatgctgtgaaaaaggtattccaaagagccttgcaatattgtgatcccaaaaagctgcacttggctcttcttgcgatgtacgagaggaccgaacagtatgagcttgcagatgaacttctagacagaatgaccaaaaggttcaaaacttcctgcaagatatggttatgccgcattcagtttgctctcaagcaaggcaaggatgttgagtacatcaaagccattgtaaaccgtgcacttctaagtttgccacacagaaagcgcataaaattcctctcacaaactgctattctagaattcaaatgtggggtgcctgaagaaggaagatccagatttgaactaatattgcgggagtacccaaaaagaacagacctttggagtgtttatctagaccaagaaatccgccttggtgacgtagaagttatacgggcattgtttgagagggtgacttgtctgaccctacctccaaaaaagatgcagttcttgttcaagaagtatcttaatttcgagaagtcactgggtaaagacaacgaaagaattcagcttgtgcaacagaaggcaatcgaatatgttcagagttcactgccgtcacaagacaactcttgaactacatggagacttaataagcccacaaacaatcattaggaaataccagtcgtactgtagatgtgatctctttgatgactccttgaacattattgtgaaaaggtcaatgtaaaatgtgggctgttcaaaattttgtttgaaacctttatataagttatgagtctagtatgtcatgtttcacccaattttttggaaggaactattctaagccggatctggttcgaatattgaccttttctatctgtggtattgactgatgaggcacaattgaatgggtaactgtctgtgctactctgtcacacccgggtttcggacaccaagacacgggcgcgaacataatcacctggtgttgctgggatcaggtcttacacatatgatgaatcatgacacatgatcgaat

SEQ ID NO: 64899 - DNA, 6227 bp, Zea Mays
cagctgacagcagtccattcaccgtccgcgcctccggtcaccgcacagtagtgaatccattcgtcgtccgtgcctccgatcaccatacaaccgtgaccgttagcagcaccttgatttttgcgcgtcctccgccactggtggcagcgacgcgcttccgaggaggttagagcgttggctgctatggcgccgcctcgcgtcaccaggaagaaggggaagggcgccggcggcaagaccgacctgcgtcccgaccggaagcagttcaaaaggcaccacaaggaggatgcagccgctgagcagggggatggcaacggagagcggcagcagtcggcagcgccgggttctgcagcgctcctcgccgcagcttctgacgaagctgactttccaagagggggacacagcctcctgagcaaggatgagatggcggaggctcgtgcggaggcggagcaggatttcgagagggaggcgaagaaggggaagggaaaaaggaagaggagtggcggcgagtcgtctggttttggcgtggatgacgacttggggatactcttcggtggggccaccactgggaagctcccacgctttgctaatcgcatcacagtaaagaatatttcaccaaatatgaagctctggggtgttgtaattgaggttaaccagaaagatattgtgttaagtctacctggtggaattagaggctttgttcgctcagaggatgtttgcgacattgctttgcaggaaaatcgtaaggatagtgggaacaatttatgcgcagaagttgttcatgttggtcagcttgttccttgtatagtcctacgagtcgacgatgatagtagagaaggaaaagtaaacaaacgggtttggctatcattgcgattaagcctattgtacaagggacttgccctggatggcttgcaggaaggaatggtacttactgcccaagtcaaaagcatcgaggatcatggttacattcttcattttggagtatcttcctttagcggatttatgcagaaggatgacaaagaagatgtgaagactgagcgccgacaactgatgcaatgtgttgtgaaggcgattgacaaaactcgggccattgttcacttgagttctgatgaagacttgctttctaaatctactattaaggatctgaaaggcctttctattgatcatttgattcctgggatgatggttaatgcacgtgtccattcatttcttgaaaatggactcatgttatcatttcttacttatttcagtggaacagttgatatttttaatttgttgaattccttcccctctggtaattggaaagatgattacagtaagaataagaaggtaaatgctcgcatcctgttcgttgatccatcaacaagagcagttgggcttacattgaacaaacatttacttcatcttgaagtaccccctattaatctaaaagctggagatatctacgataaatcaaaggtgctgagggtagataaaaaggccggtctctttcttgaaataccttctccaactccatcacctggatttattagtatacgtgatgtgtcagacaaggatgcaaaaaacttggagaagttcaaggaaggcagtagcttacgtgtccgtatacttggagtgcggaatcttgaaggagttgcaataggcaccataaaagacagtgcttttgaagggtctgttttcactcatgatgatgttaaacctggaatgttagtgagagctaaggttgctactgttgagccattcggtgctattgtacagttttcaagtggcgtgaaagcactttgtccgcttcctcacatgtcagagttggaacatgttgttaaaccaccaaagaaatttaaggttggagctgagcttcttttccgtgtgttgggctgcaaatccaagagagttacagtgacatacaagaagtctctggtgaaatcaaaacttgatgtgctttcatcatatgctgatgcaaaaattggtttagtgactcatggatggattactcatattgaaaagcacggttgctttgtaaaattctacaatggagttcaaggttttgttagcagatctgaccttggattagaggctggaactgaagcagaaaatgtttatcatgttggccaagtggtcaaatgtagaattatcaatgtgatccctgcttcaaggaaactaaatgttagttttgtcatatcccataataggattgctccaatagacactccaaagttgggcagtattgtctctggtgttgtggaacggcttactcctgcagctgttgttgttagtgtaaatggcttctccaaggggacaatactgaatgaacatttggcagaccatcatggtcaagctgctcagttgaagaatgtgttgaaacctgggcacgagttcaaccaactcttagttctcgatactgaaggtcaaaatttagttctttcggcaaagcactcacttataaattgtgcaaatgacattccttcagagatatcacagatgcatcctggtgttgtagttcatggttacatctgcaacattattgaagctggttgttttgtccgtttcctcggacatttgactggtttctctcccaaggacaaagcagttgataggtggatagaaaagctttctgatgcgttctatgttggccagtcagttcggagtcatatactcagcgtaaatgcagaaactgctagagtaaaactcgcacttcaacagtcaatgtgctcctcaatggattcttcatttattcagggatactttcttctggatcagaagattgcagcattgaagtactcaagcaatgactgggctcgccattttggcattggtagcttagttgaggcggaggtgggagctatagaagaatatggtattatccttaacttcaaagaccatctggatactgttggtttaatcgagcaccatcaacttggtggcagtagtgtggaagtgggatcttctgtgaagggtcttgttttggatttatctgatggagttgttaacttgtccgtcaaaccagagctaattgacagtgtcagaattgttggaaaaaagaagaaacgccaaagggccgtagttgcagacttggagcttcatgaggaagtgaatgcagtcgtggaaataatcaaagacagctatatggtcctttccatccctgagtacaattatgcaattgggttttcaccactgatggattataactcacaactgcttccccaccaccactatgataatggacaacgcattactgtggttgttggaaatatcccaagttctgactcttctggaagacttatcttactaccaaaagcttcagcacagtattcttccctctctgattctaaaagggctaagaagaaatcaggctacaaaattgggtcacttgttgaagcagagattattgatatcaaaccgcttgagcttctactgaaatttggtggcaatcttcatggaagaatccatattactgagattcttgaagaggattctgctgagcatccctttagtgaactcagaatagggcaaaagcttactgccagaattgtttcagaggctgaaccttctggaaagagtggcaaaaaattcaaatgggaattgtctattaggccatgtatagtcaatggagagtttgctcaaaaagaacaaaatcacaccacaaatgggattgtacgtgcttatgttgtcaaggtggataaggaatgggtctggttaactgtatcaagaaatgttatggctcatttatttttacttgatagttcttccgagcccagcgaactgaaagaattccagcagcgctttagtgttggccaagcagtgaaaggtcgtgttatcagtgtgaaccaggagaaaaggttacttcggttgaaggcacttgataaccaatgcacacaaccgaatatagatgaaacacaagaaccaaagtcctctgtgtttggacaaacaaaacaaggagatatcattggtggacgtgttcaaaaaattctacctggtgttggtgggctcgtcgttcagattggacctcatctccatgggagggttcattatactgaaattgttgactcttgggtgtctgaacccttgtctggattccatgagggccagtttgtgaagtgcaaggtcctgtctgtgagccgctcatcagaaggatcacttcgagttgatctatcactccgttcatcaaacctgatcagagactctaacaactcaagactagatgatctggaaacctgtacctcccggattgagaagatcaaggatctgctccctggaactgagattaaggattactctatcaaatttatcagatgaatatgttgaaaatccacagaaggatttccccgttggaatgcttgtacacggaaggatcctgtctacagacccatcatcagggagagttgaggcatcacttaggaagaccactggttcaaaattggaaaagctggatgatattagttatagtgacttgcatgttggggatatcgttgatggccaagttaagcgggtggaatcctttggattattcgttacaattcggagaagtgaattggttggtctgtgccatgtatcagaactttctgatgaacctgtcgttgatattaactcttgctataaagctggtgatatggttaaagccaaaattctgaagattgatgagacgcggcatcgagtatcacttggaatgaagaagtcatactttgattctgatctgactgctgacacaaatgatgatgaaagtgctcttatggacatcagcgttgcccctcagatggttgaatatcataacagaaatttagttcaccgcaaagcagaaccaagggcttctgttctgcctcttcaggtttccttggatgaatcggaaggttccgacctagaggataatattagtaatacatgtcttgaaattgctaatggaactgaagcaaatgctaaaaagagtgataaacagttaaagaaggaagcaagaaaacaaagggaactagaaatcagtgctatggaggaaagggctttgcaggaagatataccacaaactccagatgattttgagaagttagttaggagctccccaaatagtagttttatctggataaagtatatggcaactttgttagatcttgcagatgttgagaaagcacgtgcagtagctgagagggctttaaaaacaataatccccagagaagaagaagagaaactaaatgtttgggtagcatatttcaatctggaaaatgaatacggtagtccaagggaggatgctgtgaaaaaggtattccaaagagccttgcaatattgtgatcccaaaaagctgcacttggctcttcttgcgatgtacgagaggaccgaacagtatgagcttgcagatgaacttctagacagaatgaccaaaaggttcaaaacttcctgcaagatatggttatgccgcattcagtttgctctcaagcaaggcaaggatgttgagtacatcaaagccattgtaaaccgtgcacttctaagtttgccacacagaaagcgcataaaattcctctcacaaactgctattctagaattcaaatgtggggtgcctgaagaaggaagatccagatttgaactaatattgcgggagtacccaaaaagaacagacctttggagtgtttatctagaccaagaaatccgccttggtgacgtagaagttatacgggcattgtttgagagggtgacttgtctgaccctacctccaaaaaagatgcagttcttgttcaagaagtatcttaatttcgagaagtcactgggtaaagacaacgaaagaattcagcttgtgcaacagaaggcaatcgaatatgttcagagttcactgccgtcacaagacaactcttgaactacatggagacttaataagcccacaaacaatcattaggaaataccagtcgtactgtagatgtgatctctttgatgactccttgaacattattgtgaaaaggtcaatgtaaaatgtgggctgttcaaaattttgtttgaaacctttatataagttatgagtctagtatgtcatgtttcacccaattttttggaaggaactattctaagccggatctggttcgaatattgaccttttctatctgtggtattgactgatgaggcacaattgaatgggtaactgtctgtgctactctgtcacacccgggtttcggacaccaagacacgggcgcgaacataatcacctggtgttgctgggatcaggtcttacacatatgatgaatcatgacacatgatcgaat

SEQ ID NO: 64900 - DNA, 6486 bp, Zea Mays
cattcaccgtccgcgcctccggtcaccgcacagtagtgaatccattcgtcgtccgtgcctccgatcaccatacaaccgtgaccgttagcagcaccttgatttttgcgcgtcctccgccactggtggcagcgacgcgcttccgaggaggttagagcgttggctgctatggcgccgcctcgcgtcaccaggaagaaggggaagggcgccggcggcaagaccgacctgcgtcccgaccggaagcagttcaaaaggcaccacaaggaggatgcagccgctgagcagggggatggcaacggagagcggcagcagtcggcagcgccgggttctgcagcgctcctcgccgcagcttctgacgaagctgactttccaagagggggacacagcctcctgagcaaggatgagatggcggaggctcgtgcggaggcggagcaggatttcgagagggaggcgaagaaggggaagggaaaaaggaagaggagtggcggcgagtcgtctggttttggcgtggatgacgacttggggatactcttcggtggggccaccactgggaagctcccacgctttgctaatcgcatcacagtaaaggttggagacagcgaaatcaagataacagcagcagaagcaagcagggctagaagcaaaattgaatggtccagcagcggaatcgagggcttgttttggacagtttcagttgctagaatatggtacaagttatgcacctcgatgcacattaagattaagaatatttcaccaaatatgaagctctggggtgttgtaattgaggttaaccagaaagatattgtgttaagtctacctggtggaattagaggctttgttcgctcagaggatgtttgcgacattgctttgcaggaaaatcgtaagtgggaacaatttatgcgcagaagttgttcatgttggtcagcttgttccttgtatagtcctacgagtcgacgatgatagtagagaaggaaaagtaaacaaacgggtttggctatcattgcgattaagcctattgtacaagggacttgccctggatggcttgcaggaaggaatggtacttactgcccaagtcaaaagcatcgaggatcatggttacattcttcattttggagtatcttcctttagcggatttatgcagaaggatgacaaagaagatgtgaagactgagcgccgacaactgatgcaatgtgttgtgaaggcgattgacaaaactcgggccattgttcacttgagttctgatgaagacttgctttctaaatctactattaaggatctgaaaggcctttctattgatcatttgattcctgggatgatggttaatgcacgtgtccattcatttcttgaaaatggactcatgttatcatttcttacttatttcagtggaacagttgatatttttaatttgttgaattccttcccctctggtaattggaaagatgattacagtaagaataagaaggtaaatgctcgcatcctgttcgttgatccatcaacaagagcagttgggcttacattgaacaaacatttacttcatcttgaagtaccccctattaatctaaaagctggagatatctacgataaatcaaaggtgctgagggtagataaaaaggccggtctctttcttgaaataccttctccaactccatcacctggatttattagtatacgtgatgtgtcagacaaggatgcaaaaaacttggagaagttcaaggaaggcagtagcttacgtgtccgtatacttggagtgcggaatcttgaaggagttgcaataggcaccataaaagacagtgcttttgaagggtctgttttcactcatgatgatgttaaacctggaatgttagtgagagctaaggttgctactgttgagccattcggtgctattgtacagttttcaagtggcgtgaaagcactttgtccgcttcctcacatgtcagagttggaacatgttgttaaaccaccaaagaaatttaaggttggagctgagcttcttttccgtgtgttgggctgcaaatccaagagagttacagtgacatacaagaagtctctggtgaaatcaaaacttgatgtgctttcatcatatgctgatgcaaaaattggtttagtgactcatggatggattactcatattgaaaagcacggttgctttgtaaaattctacaatggagttcaaggttttgttagcagatctgaccttggattagaggctggaactgaagcagaaaatgtttatcatgttggccaagtggtcaaatgtagaattatcaatgtgatccctgcttcaaggaaactaaatgttagttttgtcatatcccataataggattgctccaatagacactccaaagttgggcagtattgtctctggtgttgtggaacggcttactcctgcagctgttgttgttagtgtaaatggcttctccaaggggacaatactgaatgaacatttggcagaccatcatggtcaagctgctcagttgaagaatgtgttgaaacctgggcacgagttcaaccaactcttagttctcgatggatatttgatcacattgctaatttttccaactgattttctaataccggtctgcagatactgaaggtcaaaatttagttctttcggcaaagcactcacttataaattgtgcaaatgacattccttcagagatatcacagatgcatcctggtgttgtagttcatggttacatctgcaacattattgaagctggttgttttgtccgtttcctcggacatttgactggtttctctcccaaggacaaagcagttgataggtggatagaaaagctttctgatgcgttctatgttggccagtcagttcggagtcatatactcagcgtaaatgcagaaactgctagagtaaaactcgcacttcaacagtcaatgtgctcctcaatggattcttcatttattcagggatactttcttctggatcagaagattgcagcattgaagtactcaagcaatgactgggctcgccattttggcattggtagcttagttgaggcggaggtgggagctatagaagaatatggtattatccttaacttcaaagaccatctggatactgttggtttaatcgagcaccatcaacttggtggcagtagtgtggaagtgggatcttctgtgaagggtcttgttttggatttatctgatggagttgttaacttgtccgtcaaaccagagctaattgacagtgtcagaattgttggaaaaaagaagaaacgccaaagggccgtagttgcagacttggagcttcatgaggaagtgaatgcagtcgtggaaataatcaaagacagctatatggtcctttccatccctgagtacaattatgcaattgggttttcaccactgatggattataactcacaactgcttccccaccaccactatgataatggacaacgcattactgtggttgttggaaatatcccaagttctgactcttctggaagacttatcttactaccaaaagcttcagcacagtattcttccctctctgattctaaaagggctaagaagaaatcaggctacaaaattgggtcacttgttgaagcagagattattgatatcaaaccgcttgagcttctactgaaatttggtggcaatcttcatggaagaatccatattactgagattcttgaagaggattctgctgagcatccctttagtgaactcagaatagggcaaaagcttactgccagaattgtttcagaggctgaaccttctggaaagagtggcaaaaaattcaaatgggaattgtctattaggccatgtatagtcaatggagagtttgctcaaaaagaacaaaatcacaccacaaatgggattgtacgtgcttatgttgtcaaggtggataaggaatgggtctggttaactgtatcaagaaatgttatggctcatttatttttacttgatagttcttccgagcccagcgaactgaaagaattccagcagcgctttagtgttggccaagcagtgaaaggtcgtgttatcagtgtgaaccaggagaaaaggttacttcggttgaaggcacttgataaccaatgcacacaaccgaatatagatgaaacacaagaaccaaagtcctctgtgtttggacaaacaaaacaaggagatatcattggtggacgtgttcaaaaaattctacctggtgttggtgggctcgtcgttcagattggacctcatctccatgggagggttcattatactgaaattgttgactcttgggtgtctgaacccttgtctggattccatgagggccagtttgtgaagtgcaaggtcctgtctgtgagccgctcatcagaaggatcacttcgagttgatctatcactccgttcatcaaacctgatcagagactctaacaactcaagactagatgatctggaaacctgtacctcccggattgagaagatcaaggatctgctccctggaactgagattaagggctatgtgaagaacgtgaattccaaaggatgttttattatgctttctcgaatggttgatgctaggattactctatcaaatttatcagatgaatatgttgaaaatccacagaaggatttccccgttggaatgcttgtacacggaaggatcctgtctacagacccatcatcagggagagttgaggcatcacttaggaagaccactggttcaaaattggaaaagctggatgatattagttatagtgacttgcatgttggggatatcgttgatggccaagttaagcgggtggaatcctttggattattcgttacaattcggagaagtgaattggttggtctgtgccatgtatcagaactttctgatgaacctgtcgttgatattaactcttgctataaagctggtgatatggttaaagccaaaattctgaagattgatgagacgcggcatcgagtatcacttggaatgaagaagtcatactttgattctgatctgactgctgacacaaatgatgatgaaagtgctcttatggacatcagcgttgcccctcagatggttgaatatcataacagaaatttagttcaccgcaaagcagaaccaagggcttctgttctgcctcttcaggtttccttggatgaatcggaaggttccgacctagaggataatattagtaatacatgtcttgaaattgctaatggaactgaagcaaatgctaaaaagagtgataaacagttaaagaaggaagcaagaaaacaaagggaactagaaatcagtgctatggaggaaagggctttgcaggaagatataccacaaactccagatgattttgagaagttagttaggagctccccaaatagtagttttatctggataaagtatatggcaactttgttagatcttgcagatgttgagaaagcacgtgcagtagctgagagggctttaaaaacaataatccccagagaagaagaagagaaactaaatgtttgggtagcatatttcaatctggaaaatgaatacggtagtccaagggaggatgctgtgaaaaaggtattccaaagagccttgcaatattgtgatcccaaaaagctgcacttggctcttcttgcgatgtacgagaggaccgaacagtatgagcttgcagatgaacttctagacagaatgaccaaaaggttcaaaacttcctgcaagatatggttatgccgcattcagtttgctctcaagcaaggcaaggatgttgagtacatcaaagccattgtaaaccgtgcacttctaagtttgccacacagaaagcgcataaaattcctctcacaaactgctattctagaattcaaatgtggggtgcctgaagaaggaagatccagatttgaactaatattgcgggagtacccaaaaagaacagacctttggagtgtttatctagaccaagaaatccgccttggtgacgtagaagttatacgggcattgtttgagagggtgacttgtctgaccctacctccaaaaaagatgcagttcttgttcaagaagtatcttaatttcgagaagtcactgggtaaagacaacgaaagaattcagcttgtgcaacagaaggcaatcgaatatgttcagagttcactgccgtcacaagacaactcttgaactacatggagacttaataagcccacaaacaatcattaggaaataccagtcgtactgtagatgtgatctctttgatgactccttgaacattattgtgaaaaggtcaatgtaaaatgtgggctgttcaaaattttgtttgaaacctttatataagttatgagtctagtatgtcatgtttcacccaattttttggaaggaactattctaagccggatctggttcgaatattgaccttttctatctgtggtattgactgatgaggcacaattgaatgggtaactgtctgtgctactctgtcacacccgggtttcggacaccaagacacgggcgcgaacataatcacctggtgttgctgggatcaggtcttacacatatgatgaatcatgacacatgatcgaat

SEQ ID NO: 64901 - DNA, 6711 bp, Zea Mays
cattcaccgtccgcgcctccggtcaccgcacagtagtgaatccattcgtcgtccgtgcctccgatcaccatacaaccgtgaccgttagcagcaccttgatttttgcgcgtcctccgccactggtggcagcgacgcgcttccgaggaggttagagcgttggctgctatggcgccgcctcgcgtcaccaggaagaaggggaagggcgccggcggcaagaccgacctgcgtcccgaccggaagcagttcaaaaggcaccacaaggaggatgcagccgctgagcagggggatggcaacggagagcggcagcagtcggcagcgccgggttctgcagcgctcctcgccgcagcttctgacgaagctgactttccaagagggggacacagcctcctgagcaaggatgagatggcggaggctcgtgcggaggcggagcaggatttcgagagggaggcgaagaaggggaagggaaaaaggaagaggagtggcggcgagtcgtctggttttggcgtggatgacgacttggggatactcttcggtggggccaccactgggaagctcccacgctttgctaatcgcatcacagtaaaggttggagacagcgaaatcaagataacagcagcagaagcaagcagggctagaagcaaaattgaatggtccagcagcggaatcgagggcttgttttggacagtttcagttgctagaatatggtacaagttatgcacctcgatgcacattaagattaagaatatttcaccaaatatgaagctctggggtgttgtaattgaggttaaccagaaagatattgtgttaagtctacctggtggaattagaggctttgttcgctcagaggatgtttgcgacattgctttgcaggaaaatcgtaaggatagtgggaacaatttatgcgcagaagttgttcatgttggtcagcttgttccttgtatagtcctacgagtcgacgatgatagtagagaaggaaaagtaaacaaacgggtttggctatcattgcgattaagcctattgtacaagggacttgccctggatggcttgcaggaaggaatggtacttactgcccaagtcaaaagcatcgaggatcatggttacattcttcattttggagtatcttcctttagcggatttatgcagaaggatgacaaagaagatgtgaagactgagcgccgacaactgatgcaatgtgttgtgaaggcgattgacaaaactcgggccattgttcacttgagttctgatgaagacttgctttctaaatctactattaaggatctgaaaggcctttctattgatcatttgattcctgggatgatggttaatgcacgtgtccattcatttcttgaaaatggactcatgttatcatttcttacttatttcagtggaacagttgatatttttaatttgttgaattccttcccctctggtaattggaaagatgattacagtaagaataagaaggtaaatgctcgcatcctgttcgttgatccatcaacaagagcagttgggcttacattgaacaaacatttacttcatcttgaagtaccccctattaatctaaaagctggagatatctacgataaatcaaaggtgctgagggtagataaaaaggccggtctctttcttgaaataccttctccaactccatcacctggatttattagtatacgtgatgtgtcagacaaggatgcaaaaaacttggagaagttcaaggaaggcagtagcttacgtgtccgtatacttggagtgcggaatcttgaaggagttgcaataggcaccataaaagacagtgcttttgaagggtctgttttcactcatgatgatgttaaacctggaatgttagtgagagctaaggttgctactgttgagccattcggtgctattgtacagttttcaagtggcgtgaaagcactttgtccgcttcctcacatgtcagagttggaacatgttgttaaaccaccaaagaaatttaaggttggagctgagcttcttttccgtgtgttgggctgcaaatccaagagagttacagtgacatacaagaagtctctggtgaaatcaaaacttgatgtgctttcatcatatgctgatgcaaaaattggtttagtgactcatggatggattactcatattgaaaagcacggttgctttgtaaaattctacaatggagttcaaggttttgttagcagatctgaccttggattagaggctggaactgaagcagaaaatgtttatcatgttggccaagtggtcaaatgtagaattatcaatgtgatccctgcttcaaggaaactaaatgttagttttgtcatatcccataataggattgctccaatagacactccaaagttgggcagtattgtctctggtgttgtggaacggcttactcctgcagctgttgttgttagtgtaaatggcttctccaaggggacaatactgaatgaacatttggcagaccatcatggtcaagctgctcagttgaagaatgtgttgaaacctgggcacgagttcaaccaactcttagttctcggtgaagtcaactaacttcatttgttatcaatgcactttgaaaaaaaaacagaacaaccctttttctgttaataaacatttgacgcattggacatttttacacagttatgttgtaaaaattatagcaaaaaatgaatctaaagtcactacgtcatgaccagtacttttttttgaactgatggaggatcaagcatacactgtctgaagtgttgtatatctagagggagtaccatactaccacgtaacagtttatgaaaggatgtgcagaatttcacaatgatactgaaggtcaaaatttagttctttcggcaaagcactcacttataaattgtgcaaatgacattccttcagagatatcacagatgcatcctggtgttgtagttcatggttacatctgcaacattattgaagctggttgttttgtccgtttcctcggacatttgactggtttctctcccaaggacaaagcagttgataggtggatagaaaagctttctgatgcgttctatgttggccagtcagttcggagtcatatactcagcgtaaatgcagaaactgctagagtaaaactcgcacttcaacagtcaatgtgctcctcaatggattcttcatttattcagggatactttcttctggatcagaagattgcagcattgaagtactcaagcaatgactgggctcgccattttggcattggtagcttagttgaggcggaggtgggagctatagaagaatatggtattatccttaacttcaaagaccatctggatactgttggtttaatcgagcaccatcaacttggtggcagtagtgtggaagtgggatcttctgtgaagggtcttgttttggatttatctgatggagttgttaacttgtccgtcaaaccagagctaattgacagtgtcagaattgttggaaaaaagaagaaacgccaaagggccgtagttgcagacttggagcttcatgaggaagtgaatgcagtcgtggaaataatcaaagacagctatatggtcctttccatccctgagtacaattatgcaattgggttttcaccactgatggattataactcacaactgcttccccaccaccactatgataatggacaacgcattactgtggttgttggaaatatcccaagttctgactcttctggaagacttatcttactaccaaaagcttcagcacagtattcttccctctctgattctaaaagggctaagaagaaatcaggctacaaaattgggtcacttgttgaagcagagattattgatatcaaaccgcttgagcttctactgaaatttggtggcaatcttcatggaagaatccatattactgagattcttgaagaggattctgctgagcatccctttagtgaactcagaatagggcaaaagcttactgccagaattgtttcagaggctgaaccttctggaaagagtggcaaaaaattcaaatgggaattgtctattaggccatgtatagtcaatggagagtttgctcaaaaagaacaaaatcacaccacaaatgggattgtacgtgcttatgttgtcaaggtggataaggaatgggtctggttaactgtatcaagaaatgttatggctcatttatttttacttgatagttcttccgagcccagcgaactgaaagaattccagcagcgctttagtgttggccaagcagtgaaaggtcgtgttatcagtgtgaaccaggagaaaaggttacttcggttgaaggcacttgataaccaatgcacacaaccgaatatagatgaaacacaagaaccaaagtcctctgtgtttggacaaacaaaacaaggagatatcattggtggacgtgttcaaaaaattctacctggtgttggtgggctcgtcgttcagattggacctcatctccatgggagggttcattatactgaaattgttgactcttgggtgtctgaacccttgtctggattccatgagggccagtttgtgaagtgcaaggtcctgtctgtgagccgctcatcagaaggatcacttcgagttgatctatcactccgttcatcaaacctgatcagagactctaacaactcaagactagatgatctggaaacctgtacctcccggattgagaagatcaaggatctgctccctggaactgagattaagggctatgtgaagaacgtgaattccaaaggatgttttattatgctttctcgaatggttgatgctaggattactctatcaaatttatcagatgaatatgttgaaaatccacagaaggatttccccgttggaatgcttgtacacggaaggatcctgtctacagacccatcatcagggagagttgaggcatcacttaggaagaccactggttcaaaattggaaaagctggatgatattagttatagtgacttgcatgttggggatatcgttgatggccaagttaagcgggtggaatcctttggattattcgttacaattcggagaagtgaattggttggtctgtgccatgtatcagaactttctgatgaacctgtcgttgatattaactcttgctataaagctggtgatatggttaaagccaaaattctgaagattgatgagacgcggcatcgagtatcacttggaatgaagaagtcatactttgattctgatctgactgctgacacaaatgatgatgaaagtgctcttatggacatcagcgttgcccctcagatggttgaatatcataacagaaatttagttcaccgcaaagcagaaccaagggcttctgttctgcctcttcaggtttccttggatgaatcggaaggttccgacctagaggataatattagtaatacatgtcttgaaattgctaatggaactgaagcaaatgctaaaaagagtgataaacagttaaagaaggaagcaagaaaacaaagggaactagaaatcagtgctatggaggaaagggctttgcaggaagatataccacaaactccagatgattttgagaagttagttaggagctccccaaatagtagttttatctggataaagtatatggcaactttgttagatcttgcagatgttgagaaagcacgtgcagtagctgagagggctttaaaaacaataatccccagagaagaagaagagaaactaaatgtttgggtagcatatttcaatctggaaaatgaatacggtagtccaagggaggatgctgtgaaaaaggtattccaaagagccttgcaatattgtgatcccaaaaagctgcacttggctcttcttgcgatgtacgagaggaccgaacagtatgagcttgcagatgaacttctagacagaatgaccaaaaggttcaaaacttcctgcaagatatggttatgccgcattcagtttgctctcaagcaaggcaaggatgttgagtacatcaaagccattgtaaaccgtgcacttctaagtttgccacacagaaagcgcataaaattcctctcacaaactgctattctagaattcaaatgtggggtgcctgaagaaggaagatccagatttgaactaatattgcgggagtacccaaaaagaacagacctttggagtgtttatctagaccaagaaatccgccttggtgacgtagaagttatacgggcattgtttgagagggtgacttgtctgaccctacctccaaaaaagatgcagttcttgttcaagaagtatcttaatttcgagaagtcactgggtaaagacaacgaaagaattcagcttgtgcaacagaaggcaatcgaatatgttcagagttcactgccgtcacaagacaactcttgaactacatggagacttaataagcccacaaacaatcattaggaaataccagtcgtactgtagatgtgatctctttgatgactccttgaacattattgtgaaaaggtcaatgtaaaatgtgggctgttcaaaattttgtttgaaacctttatataagttatgagtctagtatgtcatgtttcacccaattttttggaaggaactattctaagccggatctggttcgaatattgaccttttctatctgtggtattgactgatgaggcacaattgaatgggtaactgtctgtgctactctgtcacacccgggtttcggacaccaagacacgggcgcgaacataatcacctggtgttgctgggatcaggtcttacacatatgatgaatcatgacacatgatcgaat

SEQ ID NO: 64902 - DNA, 6271 bp, Zea Mays
cattcaccgtccgcgcctccggtcaccgcacagtagtgaatccattcgtcgtccgtgcctccgatcaccatacaaccgtgaccgttagcagcaccttgatttttgcgcgtcctccgccactggtggcagcgacgcgcttccgaggaggttagagcgttggctgctatggcgccgcctcgcgtcaccaggaagaaggggaagggcgccggcggcaagaccgacctgcgtcccgaccggaagcagttcaaaaggcaccacaaggaggatgcagccgctgagcagggggatggcaacggagagcggcagcagtcggcagcgccgggttctgcagcgctcctcgccgcagcttctgacgaagctgactttccaagagggggacacagcctcctgagcaaggatgagatggcggaggctcgtgcggaggcggagcaggatttcgagagggaggcgaagaaggggaagggaaaaaggaagaggagtggcggcgagtcgtctggttttggcgtggatgacgacttggggatactcttcggtggggccaccactgggaagctcccacgctttgctaatcgcatcacaaatatttcaccaaatatgaagctctggggtgttgtaattgaggttaaccagaaagatattgtgttaagtctacctggtggaattagaggctttgttcgctcagaggatgtttgcgacattgctttgcaggaaaatcgtaaggatagtgggaacaatttatgcgcagaagttgttcatgttggtcagcttgttccttgtatagtcctacgagtcgacgatgatagtagagaaggaaaagtaaacaaacgggtttggctatcattgcgattaagcctattgtacaagggacttgccctggatggcttgcaggaaggaatggtacttactgcccaagtcaaaagcatcgaggatcatggttacattcttcattttggagtatcttcctttagcggatttatgcagaaggatgacaaagaagatgtgaagactgagcgccgacaactgatgcaatgtgttgtgaaggcgattgacaaaactcgggccattgttcacttgagttctgatgaagacttgctttctaaatctactattaaggatctgaaaggcctttctattgatcatttgattcctgggatgatggttaatgcacgtgtccattcatttcttgaaaatggactcatgttatcatttcttacttatttcagtggaacagttgatatttttaatttgttgaattccttcccctctggtaattggaaagatgattacagtaagaataagaaggtaaatgctcgcatcctgttcgttgatccatcaacaagagcagttgggcttacattgaacaaacatttacttcatcttgaagtaccccctattaatctaaaagctggagatatctacgataaatcaaaggtgctgagggtagataaaaaggccggtctctttcttgaaataccttctccaactccatcacctggatttattagtatacgtgatgtgtcagacaaggatgcaaaaaacttggagaagttcaaggaaggcagtagcttacgtgtccgtatacttggagtgcggaatcttgaaggagttgcaataggcaccataaaagacagtgcttttgaagggtctgttttcactcatgatgatgttaaacctggaatgttagtgagagctaaggttgctactgttgagccattcggtgctattgtacagttttcaagtggcgtgaaagcactttgtccgcttcctcacatgtcagagttggaacatgttgttaaaccaccaaagaaatttaaggttggagctgagcttcttttccgtgtgttgggctgcaaatccaagagagttacagtgacatacaagaagtctctggtgaaatcaaaacttgatgtgctttcatcatatgctgatgcaaaaattggtttagtgactcatggatggattactcatattgaaaagcacggttgctttgtaaaattctacaatggagttcaaggttttgttagcagatctgaccttggattagaggctggaactgaagcagaaaatgtttatcatgttggccaagtggtcaaatgtagaattatcaatgtgatccctgcttcaaggaaactaaatgttagttttgtcatatcccataataggattgctccaatagacactccaaagttgggcagtattgtctctggtgttgtggaacggcttactcctgcagctgttgttgttagtgtaaatggcttctccaaggggacaatactgaatgaacatttggcagaccatcatggtcaagctgctcagttgaagaatgtgttgaaacctgggcacgagttcaaccaactcttagttctcgatactgaaggtcaaaatttagttctttcggcaaagcactcacttataaattgtgcaaatgacattccttcagagatatcacagatgcatcctggtgttgtagttcatggttacatctgcaacattattgaagctggttgttttgtccgtttcctcggacatttgactggtttctctcccaaggacaaagcagttgataggtggatagaaaagctttctgatgcgttctatgttggccagtcagttcggagtcatatactcagcgtaaatgcagaaactgctagagtaaaactcgcacttcaacagtcaatgtgctcctcaatggattcttcatttattcagggatactttcttctggatcagaagattgcagcattgaagtactcaagcaatgactgggctcgccattttggcattggtagcttagttgaggcggaggtgggagctatagaagaatatggtattatccttaacttcaaagaccatctggatactgttggtttaatcgagcaccatcaacttggtggcagtagtgtggaagtgggatcttctgtgaagggtcttgttttggatttatctgatggagttgttaacttgtccgtcaaaccagagctaattgacagtgtcagaattgttggaaaaaagaagaaacgccaaagggccgtagttgcagacttggagcttcatgaggaagtgaatgcagtcgtggaaataatcaaagacagctatatggtcctttccatccctgagtacaattatgcaattgggttttcaccactgatggattataactcacaactgcttccccaccaccactatgataatggacaacgcattactgtggttgttggaaatatcccaagttctgactcttctggaagacttatcttactaccaaaagcttcagcacagtattcttccctctctgattctaaaagggctaagaagaaatcaggctacaaaattgggtcacttgttgaagcagagattattgatatcaaaccgcttgagcttctactgaaatttggtggcaatcttcatggaagaatccatattactgagattcttgaagaggattctgctgagcatccctttagtgaactcagaatagggcaaaagcttactgccagaattgtttcagaggctgaaccttctggaaagagtggcaaaaaattcaaatgggaattgtctattaggccatgtatagtcaatggagagtttgctcaaaaagaacaaaatcacaccacaaatgggattgtacgtgcttatgttgtcaaggtggataaggaatgggtctggttaactgtatcaagaaatgttatggctcatttatttttacttgatagttcttccgagcccagcgaactgaaagaattccagcagcgctttagtgttggccaagcagtgaaaggtcgtgttatcagtgtgaaccaggagaaaaggttacttcggttgaaggcacttgataaccaatgcacacaaccgaatatagatgaaacacaagaaccaaagtcctctgtgtttggacaaacaaaacaaggagatatcattggtggacgtgttcaaaaaattctacctggtgttggtgggctcgtcgttcagattggacctcatctccatgggagggttcattatactgaaattgttgactcttgggtgtctgaacccttgtctggattccatgagggccagtttgtgaagtgcaaggtcctgtctgtgagccgctcatcagaaggatcacttcgagttgatctatcactccgttcatcaaacctgatcagagactctaacaactcaagactagatgatctggaaacctgtacctcccggattgagaagatcaaggatctgctccctggaactgagattaagggctatgtgaagaacgtgaattccaaaggatgttttattatgctttctcgaatggttgatgctaggattactctatcaaatttatcagatgaatatgttgaaaatccacagaaggatttccccgttggaatgcttgtacacggaaggatcctgtctacagacccatcatcagggagagttgaggcatcacttaggaagaccactggttcaaaattggaaaagctggatgatattagttatagtgacttgcatgttggggatatcgttgatggccaagttaagcgggtggaatcctttggattattcgttacaattcggagaagtgaattggttggtctgtgccatgtatcagaactttctgatgaacctgtcgttgatattaactcttgctataaagctggtgatatggttaaagccaaaattctgaagattgatgagacgcggcatcgagtatcacttggaatgaagaagtcatactttgattctgatctgactgctgacacaaatgatgatgaaagtgctcttatggacatcagcgttgcccctcagatggttgaatatcataacagaaatttagttcaccgcaaagcagaaccaagggcttctgttctgcctcttcaggtttccttggatgaatcggaaggttccgacctagaggataatattagtaatacatgtcttgaaattgctaatggaactgaagcaaatgctaaaaagagtgataaacagttaaagaaggaagcaagaaaacaaagggaactagaaatcagtgctatggaggaaagggctttgcaggaagatataccacaaactccagatgattttgagaagttagttaggagctccccaaatagtagttttatctggataaagtatatggcaactttgttagatcttgcagatgttgagaaagcacgtgcagtagctgagagggctttaaaaacaataatccccagagaagaagaagagaaactaaatgtttgggtagcatatttcaatctggaaaatgaatacggtagtccaagggaggatgctgtgaaaaaggtattccaaagagccttgcaatattgtgatcccaaaaagctgcacttggctcttcttgcgatgtacgagaggaccgaacagtatgagcttgcagatgaacttctagacagaatgaccaaaaggttcaaaacttcctgcaagatatggttatgccgcattcagtttgctctcaagcaaggcaaggatgttgagtacatcaaagccattgtaaaccgtgcacttctaagtttgccacacagaaagcgcataaaattcctctcacaaactgctattctagaattcaaatgtggggtgcctgaagaaggaagatccagatttgaactaatattgcgggagtacccaaaaagaacagacctttggagtgtttatctagaccaagaaatccgccttggtgacgtagaagttatacgggcattgtttgagagggtgacttgtctgaccctacctccaaaaaagatgcagttcttgttcaagaagtatcttaatttcgagaagtcactgggtaaagacaacgaaagaattcagcttgtgcaacagaaggcaatcgaatatgttcagagttcactgccgtcacaagacaactcttgaactacatggagacttaataagcccacaaacaatcattaggaaataccagtcgtactgtagatgtgatctctttgatgactccttgaacattattgtgaaaaggtcaatgtaaaatgtgggctgttcaaaattttgtttgaaacctttatataagttatgagtctagtatgtcatgtttcacccaattttttggaaggaactattctaagccggatctggttcgaatattgaccttttctatctgtggtattgactgatgaggcacaattgaatgggtaactgtctgtgctactctgtcacacccgggtttcggacaccaagacacgggcgcgaacataatcacctggtgttgctgggatcaggtcttacacatatgatgaatcatgacacatgatcgaat

SEQ ID NO: 64903 - DNA, 3129 bp, Zea Mays
ggaagtttgcccattttggttccaattattgccttgttacttctctccgactggaaatcattactgtggttgttggaaatatcccaagttctgactcttctggaagacttatcttactaccaaaagcttcagcacagtattcttccctctctgattctaaaagggctaagaagaaatcaggctacaaaattgggtcacttgttgaagcagagattattgatatcaaaccgcttgagcttctactgaaatttggtggcaatcttcatggaagaatccatattactgagattcttgaagaggattctgctgagcatccctttagtgaactcagaatagggcaaaagcttactgccagaattgtttcagaggctgaaccttctggaaagagtggcaaaaaattcaaatgggaattgtctattaggccatgtatagtcaatggagagtttgctcaaaaagaacaaaatcacaccacaaatgggattgtacgtgcttatgttgtcaaggtggataaggaatgggtctggttaactgtatcaagaaatgttatggctcatttatttttacttgatagttcttccgagcccagcgaactgaaagaattccagcagcgctttagtgttggccaagcagtgaaaggtcgtgttatcagtgtgaaccaggagaaaaggttacttcggttgaaggcacttgataaccaatgcacacaaccgaatatagatgaaacacaagaaccaaagtcctctgtgtttggacaaacaaaacaaggagatatcattggtggacgtgttcaaaaaattctacctggtgttggtgggctcgtcgttcagattggacctcatctccatgggagggttcattatactgaaattgttgactcttgggtgtctgaacccttgtctggattccatgagggccagtttgtgaagtgcaaggtcctgtctgtgagccgctcatcagaaggatcacttcgagttgatctatcactccgttcatcaaacctgatcagagactctaacaactcaagactagatgatctggaaacctgtacctcccggattgagaagatcaaggatctgctccctggaactgagattaagggctatgtgaagaacgtgaattccaaaggatgttttattatgctttctcgaatggttgatgctaggattactctatcaaatttatcagatgaatatgttgaaaatccacagaaggatttccccgttggaatgcttgtacacggaaggatcctgtctacagacccatcatcagggagagttgaggcatcacttaggaagaccactggttcaaaattggaaaagctggatgatattagttatagtgacttgcatgttggggatatcgttgatggccaagttaagcgggtggaatcctttggattattcgttacaattcggagaagtgaattggttggtctgtgccatgtatcagaactttctgatgaacctgtcgttgatattaactcttgctataaagctggtgatatggttaaagccaaaattctgaagattgatgagacgcggcatcgagtatcacttggaatgaagaagtcatactttgattctgatctgactgctgacacaaatgatgatgaaagtgctcttatggacatcagcgttgcccctcagatggttgaatatcataacagaaatttagttcaccgcaaagcagaaccaagggcttctgttctgcctcttcaggtttccttggatgaatcggaaggttccgacctagaggataatattagtaatacatgtcttgaaattgctaatggaactgaagcaaatgctaaaaagagtgataaacagttaaagaaggaagcaagaaaacaaagggaactagaaatcagtgctatggaggaaagggctttgcaggaagatataccacaaactccagatgattttgagaagttagttaggagctccccaaatagtagttttatctggataaagtatatggcaactttgttagatcttgcagatgttgagaaagcacgtgcagtagctgagagggctttaaaaacaataatccccagagaagaagaagagaaactaaatgtttgggtagcatatttcaatctggaaaatgaatacggtagtccaagggaggatgctgtgaaaaaggtattccaaagagccttgcaatattgtgatcccaaaaagctgcacttggctcttcttgcgatgtacgagaggaccgaacagtatgagcttgcagatgaacttctagacagaatgaccaaaaggttcaaaacttcctgcaagatatggttatgccgcattcagtttgctctcaagcaaggcaaggatgttgagtacatcaaagccattgtaaaccgtgcacttctaagtttgccacacagaaagcgcataaaattcctctcacaaactgctattctagaattcaaatgtggggtgcctgaagaaggaagatccagatttgaactaatattgcgggagtacccaaaaagaacagacctttggagtgtttatctagaccaagaaatccgccttggtgacgtagaagttatacgggcattgtttgagagggtgacttgtctgaccctacctccaaaaaagatgcagttcttgttcaagaagtatcttaatttcgagaagtcactgggtaaagacaacgaaagaattcagcttgtgcaacagaaggcaatcgaatatgttcagagttcactgccgtcacaagacaactcttgaactacatggagacttaataagcccacaaacaatcattaggaaataccagtcgtactgtagatgtgatctctttgatgactccttgaacattattgtgaaaaggtcaatgtaaaatgtgggctgttcaaaattttgtttgaaacctttatataagttatgagtctagtatgtcatgtttcacccaattttttggaaggaactattctaagccggatctggttcgaatattgaccttttctatctgtggtattgactgatgaggcacaattgaatgggtaactgtctgtgctactctgtcacacccgggtttcggacaccaagacacgggcgcgaacataatcacctggtgttgctgggatcaggtcttacacatatgatgaatcatgacacatgatcgaat

SEQ ID NO: 64904 - DNA, 797 bp, Zea Mays
ctttagcagtctataaaggatttttttcttaaatgccgttggaccacatacgattgttgattgttgatggtaaagaagttgtgaactttgcatcagcatgaggtctggagtctagacacagcgttgcaaactgaggtttaatcatcttagcaactacggtatgtgaccctgagcgcgtgattgttgcgaaacaacgaccacctcggtctacaccttaaaggtttgcgtgacatggcttttcatagtgctcaattggatccatcccctgagcataggagaaaagtatcaatttgtacagtggatccaagtattctataaagcatgcatcctccaatttcccacaagcgagaatggcatgatatgatggatgaaatggctgttgcggtcaaatgtctttcaaggatcaattgtctttcaagaaccacacttatgtattggtttgtgtgcagttcaagctctgcaaggtaaggtctgttcagtttggccagaaagtcatcccctacctgaacacctacgacgaccgcaccatccgactccgaccctctcatcaaggccaacgacaccatcaagatcgatctggagaccaacaagatcatggacttcatcaagttgtatttgccatttcatagacttcatcaagttatatacttagttaggctcaatgttaacacaaacagttgatgagcaagtttaaatttagagtacacttatgtatgagttatttgacaatacttatttatgagatattgaatattatttatctatattatattaattatagtgttattaaatatatg

SEQ ID NO: 64905 - DNA, 2176 bp, Zea Mays
gccttggggatccatagttccatcacacatagacacgggtaataaaaggaagcaatcgagagcggcaaaattacagatttctccgactacgactgcctgcgccgccgccagccccttgcgttgagcaatatcctcgtcctcccgagagcgatccccgtcgcccctgtccgcggccgccgaggcgccgactcgccggcgcggcgccgtcttccgccactgcgccctaccgcccaggacgaagctccagctccggcccaccgtctccctgccggcactgccgcgccgagggcccgagctcctcctcgccccatgcccccgcggccgccctgcccagctccgccccgcgcgttcgcggctctgcgcccccgccaggccgagcttcgcacgttcgccgtccgcgccttcggcttccgcagttcgcacagctgacagcagtccattcaccgtccgcgcctccggtcaccgcacagtacgacgcgcttccgaggaggttagagcattggctgctatggcgccgcctcacgtcaccaggaagaagggaaagggcgccggcggcaagaccgacctgcgtcccgaccgtaagcagttcaaaaggcaccacaaggaggatgcagcagctgagcagggggatggcaacggagagccgggttctgacctagaggataatattagtaatacatgtcttgaaattgctaatggaactgaagcaaatgctaaaaagagtgataaacagttaaagaaggaagcaagaaaacaaagggaactagaaatcagtgctatggaggaaagggctttgcaggaagatataccacaaactccagatgattttgagaagttggttaggagctccccaaatagtagttttatctggataaagtatatggcaactttgttagatcttgcagatgttaagaaagcacgtgcagtagctgagaggtctgtctactgcccaaaacatttgtttttatattttaatatcaaaaagatctttggtgataagaagttgttttctaccatcttaatagtgttgatagatgtgatttggttttgtgttggttttattttcgaaggatgtagaatttacttgttgaaacattctttcaaaaatttccttttgttctgtcaattcaaatgatacatgtttgtcctttttctgttagtttatttaaacttttttggatgcatctctctgtcatcatcttctacaactgtttctcctgtctttagagctttaaaaacaataatccccagagaagaagaagagaaactaaatgtttgggtagcatatttcaatctggaaaatgaatacggtagtccaagggaggatgctgtgaaaaaggtattccaaagagccttgcaatattgtgatcccaaaaagctgcacttggctcttcttgcgatgtacgagaggaccgaacagtatgagcttgcagatgaacttctagacagaataaccaaaaggttcaaaacttcctgcaagatatggttatgccgcattcagtttgccctcaagcaagaattcaaatgtggggtgcctgaagaaggaagatccagatttgaactaatattgcgggagtacccaaaaagaacagacctttggagtgtttatctagaccaagaaatccgccttggtgacgtagaagttatacgggcattgtttgagaggagggtggcttgtctgaccctacctccaaaaaagatgcagttcttgttcaagaagtatcttaacttcgagaagtcactgggtaaagacaacgaaagaattcagcttgtgcaacagaaggcaatcgaatatgttcagagttcactgccgtcacaagacaactcttgaactacatggagacttaataagcccacaaacaatcattaggaaatgccagtcgtactgtagatgtgatctctttgatgacattattgtgaaaaggtcaatgtaaaatgtgggctattcaaaattttgtttgaaaccgttatataagttatgaggcattaagtctagtatgtcatgtttcacccaatttttttgaaaggatctatcctaagccggatctggttcgaatattgaccttttctatctgtggtattgactgttgaggcacaattgaatgggtaactgtctgtgctactcctagcttagaaagcacaaaatactagaatatctgtctgcgcttaatccctt

SEQ ID NO: 64906 - DNA, 1912 bp, Zea Mays
acagatttctccgactacgactgcctgcgccgccgccagccccttgcgttgagcaatatcctcgtcctcccgagagcgatccccgtcgcccctgtccgcggccgccgaggcgccgactcgccggcgcggcgccgtcttccgccactgcgccctaccgcccaggacgaagctccagctccggcccaccgtctccctgccggcactgccgcgccgagggcccgagctcctcctcgccccatgcccccgcggccgccctgcccagctccgccccgcgcgttcgcggctctgcgcccccgccaggccgagcttcgcacgttcgccgtccgcgccttcggcttccgcagttcgcacagctgacagcagtccattcaccgtccgcgcctccggtcaccgcacagtacgacgcgcttccgaggaggttagagcattggctgctatggcgccgcctcacgtcaccaggaagaagggaaagggcgccggcggcaagaccgacctgcgtcccgaccgtaagcagttcaaaaggcaccacaaggaggatgcagcagctgagcagggggatggcaacggagagccgggttctgacctagaggataatattagtaatacatgtcttgaaattgctaatggaactgaagcaaatgctaaaaagagtgataaacagttaaagaaggaagcaagaaaacaaagggaactagaaatcagtgctatggaggaaagggctttgcaggaagatataccacaaactccagatgattttgagaagttggttaggagctccccaaatagtagttttatctggataaagtatatggcaactttgttagatcttgcagatgttaagaaagcacgtgcagtagctgagagagctttaaaaacaataatccccagagaagaagaagagaaactaaatgtttgggtagcatatttcaatctggaaaatgaatacggtagtccaagggaggatgctgtgaaaaaggtattccaaagagccttgcaatattgtgatcccaaaaagctgcacttggctcttcttgcgatgtacgagaggaccgaacagtatgagcttgcagatgaacttctagacagaataaccaaaaggttcaaaacttcctgcaagatatggttatgccgcattcagtttgccctcaagcaaggcaaggatgttgagtacatcaaagccattgtaaaccgtgcacttctaagtttgccacacagaaagcgcataaaattcctctcacaaactgctattctagaattcaaatgtggggtgcctgaagaaggaagatccagatttgaactaatattgcgggagtacccaaaaagaacagacctttggagtgtttatctagaccaagaaatccgccttggtgacgtagaagttatacgggcattgtttgagaggagggtggcttgtctgaccctacctccaaaaaagatgcagttcttgttcaagaagtatcttaacttcgagaagtcactgggtaaagacaacgaaagaattcagcttgtgcaacagaaggcaatcgaatatgttcagagttcactgccgtcacaagacaactcttgaactacatggagacttaataagcccacaaacaatcattaggaaatgccagtcgtactgtagatgtgatctctttgatgacattattgtgaaaaggtcaatgtaaaatgtgggctattcaaaattttgtttgaaaccgttatataagttatgaggcattaagtctagtatgtcatgtttcacccaatttttttgaaaggatctatcctaagccggatctggttcgaatattgaccttttctatctgtggtattgactgttgaggcacaattgaatgggtaactgtctgtgctactcctagcttagaaagcacaaaatactagaatatctgtctgcgcttaatccctt

SEQ ID NO: 64907 - DNA, 1909 bp, Zea Mays
acagatttctccgactacgactgcctgcgccgccgccagccccttgcgttgagcaatatcctcgtcctcccgagagcgatccccgtcgcccctgtccgcggccgccgaggcgccgactcgccggcgcggcgccgtcttccgccactgcgccctaccgcccaggacgaagctccagctccggcccaccgtctccctgccggcactgccgcgccgagggcccgagctcctcctcgccccatgcccccgcggccgccctgcccagctccgccccgcgcgttcgcggctctgcgcccccgccaggccgagcttcgcacgttcgccgtccgcgccttcggcttccgcagttcgcacagctgacagcagtccattcaccgtccgcgcctccggtcaccgcacagtagtgagtgcattcgccgtccgtgcctccgatcaccatacaaccgtgaccgttagcagcaccttgattttagctcgtcctccgccactggtggcagcgacgcgcttccgaggaggttagagcattggctgctatggcgccgcctcacgtcaccaggaagaagggaaagggcgccggcggcaagaccgacctgcgtcccgaccgtaagcagttcaaaaggcaccacaaggaggatgcagcagctgagcagggggatggcaacggagagccgggttctgacctagaggataatattagtaatacatgtcttgaaattgctaatggaactgaagcaaatgctaaaaagagtgataaacagttaaagaaggaagcaagaaaacaaagggaactagaaatcagtgctatggaggaaagggctttgcaggaagatataccacaaactccagatgattttgagaagttggttaggagctccccaaatagtagttttatctggataaagtatatggcaactttgttagatcttgcagatgttaagaaagcacgtgcagtagctgagaggatgctgtgaaaaaggtattccaaagagccttgcaatattgtgatcccaaaaagctgcacttggctcttcttgcgatgtacgagaggaccgaacagtatgagcttgcagatgaacttctagacagaataaccaaaaggttcaaaacttcctgcaagatatggttatgccgcattcagtttgccctcaagcaaggcaaggatgttgagtacatcaaagccattgtaaaccgtgcacttctaagtttgccacacagaaagcgcataaaattcctctcacaaactgctattctagaattcaaatgtggggtgcctgaagaaggaagatccagatttgaactaatattgcgggagtacccaaaaagaacagacctttggagtgtttatctagaccaagaaatccgccttggtgacgtagaagttatacgggcattgtttgagaggagggtggcttgtctgaccctacctccaaaaaagatgcagttcttgttcaagaagtatcttaacttcgagaagtcactgggtaaagacaacgaaagaattcagcttgtgcaacagaaggcaatcgaatatgttcagagttcactgccgtcacaagacaactcttgaactacatggagacttaataagcccacaaacaatcattaggaaatgccagtcgtactgtagatgtgatctctttgatgacattattgtgaaaaggtcaatgtaaaatgtgggctattcaaaattttgtttgaaaccgttatataagttatgaggcattaagtctagtatgtcatgtttcacccaatttttttgaaaggatctatcctaagccggatctggttcgaatattgaccttttctatctgtggtattgactgttgaggcacaattgaatgggtaactgtctgtgctactcctagcttagaaagcacaaaatactagaatatctgtctgcgcttaatccctt

SEQ ID NO: 64908 - DNA, 2249 bp, Zea Mays
aggttgagtgagcagcaagccttagatattcgcccgtagttttcacctctctctctctcctcccctgccctgttacggatcgcactaaagcatgcacaagcacaacacaacagctcgcgtctgctagaacagtctaccaggagctagctcgatgatcgagtggcgaatgaaggcacaagtcctcggtggtggcgggccccagagaccatttgctttcgcgcccttgtcacctagcagctagcagcagagggaggaaggacaagcccacacacaagctctcttcttttctctctgccgtctctcctccttcgctgccgtttggtgctcgtgtcgcgtgtggctgcgctcgtatatagcgtagctttctaggatcccaccagcagagtagcagtagcaggcgcctggtttccggtttccctgcagtgaaggaagaggaagcccaaccccaaggacagcagcgtacaatcaggctgatgcttgttggaactcagctgttgatgcttgtaagcctcgctgcctggctgcgtcctgtgctgtagatacgagatcccgcagcgttcgtttgttgcacttgcaccggcttgctgctagcttgcgacaggactaggaggagctagccgaggaggaggtgtgtgactccatggacgcgggccagcaggatgcgtgggactgggactgggaggtcctgctgccagaccacaggagctcatcctccgtgcgccaccaccacggcagcaacaataatacccttgacgatcaagaagaagcagaggagctcgacctgctgctgcctgcgccaggaggggacgacgtcgttgacgcgcacgacgacgagtgcaaggacatcggcgtcgtgccggacgacgaggccaagaagtcctcctccgtcgcgcctagcgctgccgccggcgatccgacgatggcctcctccgagggcgccgtggaagcgaaggagccgttccagagccctgatgacgccaaggccaccgccgacgacggcggcaagtttgctgcccagcagcaggaggaggaggagggggaggacgaggaggaagatgccggcaaggaaaacgacgacgacgacaaggcggcgcgtgcgccgcagtgcgtggtgttcagcgtggggaagctgaaggtgaacgggatcggcgcgctgtgctcgttcggcgtcgcggccgccaccctctgcgtgttcctcgtcggcggcaggcagcaccacaggcggcaggagcagcgggaggagacgatccagctgcagttctacggcgacgataaggttcgctgacgactcatttaccggctaccgccgcgcgcgccttttcctttccacctaatatccatccgcaatctctctcgatcttttacgaaagcagtattcttttgagcaaatagtagttaattagtcgggcatgaagaatgcgagtgcgaggtctgagtaattaattaattaattgttacggtctaccttgggcgttagtatttgtctgtcgtcttgtctgacgcaaacagatagtaactccttaccactagctagcagatcgtttggacccagctgcttgttgtacgtgctacttgttgtttctttgattgacaaacgaatgaatcgatgacagtaactgattctgtctgaagaagatgcctgcttgcctgccgtgcctgcctctttgtgttgtgtagtgtgtgtgctgatgtggtgtgcatgcagaggatccatcaggtggtgcagcagacgtcgaggctgaaccaggccatgtcgtccgtgatgggggcgggaggaggcgcgtccgcgagggccaacatatccttcggtggattctacgatggattctgacggaacactggggaacagatgggtgtagctagtatacactgccgcgtactactggtggacgatgtaaataattattgggggctcttattattattattagaccttggtttaatgctacacagatacggacggacggatggatgggttataggtttattcaagttgatagtaactaaggggcatagggaagtcttaattagttgacaagttattagtaactaaaaacgtcgaaccatgcgtgcatgctcctcttgggtttacatatatttgtattcattatatattaatgaatgatctgtgtgcatgcaataaaaaaaaagaaaaaaaagagaacctttaaagttgaattagctggtgtatacacgcaacttaatgtgatatcagaaccagagatcacgagtaagctatcatactggtt

SEQ ID NO: 64909 - DNA, 1773 bp, Zea Mays
gtagttttcacctctctctctctcctcccctgccctgttacggatcgcactaaagcatgcacaagcacaacacaacagctcgcgtctgctagaacagtctaccaggagctagctcgatgatcgagtggcgaatgaaggcacaagtcctcggtggtggcgggccccagagaccatttgctttcgcgcccttgtcacctagcagctagcagcagagggaggaaggacaagcccacacacaagctctcttcttttctctctgccgtctctcctccttcgctgccgtttggtgctcgtgtcgcgtgtggctgcgctcgtatatagcgtagctttctaggatcccaccagcagagtagcagtagcaggcgcctggtttccggtttccctgcagtgaaggaagaggaagcccaaccccaaggacagcagcgtacaatcaggctgatgcttgttggaactcagctgttgatgcttgtaagcctcgctgcctggctgcgtcctgtgctgtagatacgagatcccgcagcgttcgtttgttgcacttgcaccggcttgctgctagcttgcgacaggactaggaggagctagccgaggaggaggtgtgtgactccatggacgcgggccagcaggatgcgtgggactgggactgggaggtcctgctgccagaccacaggagctcatcctccgtgcgccaccaccacggcagcaacaataatacccttgacgatcaagaagaagcagaggagctcgacctgctgctgcctgcgccaggaggggacgacgtcgttgacgcgcacgacgacgagtgcaaggacatcggcgtcgtgccggacgacgaggccaagaagtcctcctccgtcgcgcctagcgctgccgccggcgatccgacgatggcctcctccgagggcgccgtggaagcgaaggagccgttccagagccctgatgacgccaaggccaccgccgacgacggcggcaagtttgctgcccagcagcaggaggaggaggagggggaggacgaggaggaagatgccggcaaggaaaacgacgacgacgacaaggcggcgcgtgcgccgcagtgcgtggtgttcagcgtggggaagctgaaggtgaacgggatcggcgcgctgtgctcgttcggcgtcgcggccgccaccctctgcgtgttcctcgtcggcggcaggcagcaccacaggcggcaggagcagcgggaggagacgatccagctgcagttctacggcgacgataaggtggtgcagcagacgtcgaggctgaaccaggccatgtcgtccgtgatgggggcgggaggaggcgcgtccgcgagggccaacatatccttcggtggattctacgatggattctgacggaacactggggaacagatgggtgtagctagtatacactgccgcgtactactggtggacgatgtaaataattattgggggctcttattattattattagaccttggtttaatgctacacagatacggacggacggatggatgggttataggtttattcaagttgatagtaactaaggggcatagggaagtcttaattagttgacaagttattagtaactaaaaacgtcgaaccatgcgtgcatgctcctcttgggtttacatatatttgtattcattatatattaatgaatgatctgtgtgcatgcaataaaaaaaaagaaaaaaaagagaacctttaaagttgaattagctggtgtatacacgcaacttaatgtgatatcagaaccagagatcacgagtaagctatcatactggtt

SEQ ID NO: 64910 - DNA, 832 bp, Zea Mays
ggacggtacagtacgtgcaatagacttcacccctgcctgctgccccgtgccaaaagcaacgcagcccctgatagtgatggctacccgctctgctctgctctcggctgccgcctatttcccttccctctccgggcgctttgcataggagtcggagccgccgcccgtcctccatcctcctgcacggcaggggcagccacacttgttggttcctctccctctaccctctcccgtgtggcggcgggggatatcatctatgatggggtggctgcggctccactccctcttctcccctctccggaggatgtgggtgagggcgcattccgagcgccggaaccggagggggatgcgcatcctgtacaaggacgtgcagtcctgccaggacgaggacgtgcgcgtgctctggtccatcctcatcgactcccaccgccaccaccaccaccacccggccgtcctcgacctcgagctctgaagaagaatctcatcagcgcgatggcgtgcacgtacgtatttatgcacgtgggatcgatatgtgatcaagagagcacagcactggccttccattattccttcagaaaaagaaaaaaaggactcgaggttgaagaagaagaagaagaagaagaagatagactgagagagagattgcctgtccatttctgcttgatgggtgccctgacgacgacgcgtccctggccggccgccggcggccctcgttttctcgcgcacggatggccgtgtgctcatgtacacatatcgatcgatgcttctatgtaatccaagacacacaaatctggcttgtgttgtgttcctatccattttatcgcaaattgccggg

SEQ ID NO: 64911 - DNA, 4198 bp, Zea Mays
ccaccattggtgcggcgtggttctgccacgacgcccgcgacaaatccctgcgcgacggcatcttcgcctcccatcccctcccagcttcccctcccactccggccctcacacaaattgcccctctccttgtcctcctctttacacgctgccgaccacggctgccgccaaccacccgccccacccgtccaccgctgccgagtgctagccatttggagctgccgcgccatggcgtccgtggccgccaccaccacgctggcaccggcactcgcgccccggcgccgggcgcggccagggaccgggctgctgccgccgcgccgggcctcggccgtccgctgctcgctcgaccgtaacgtctccgacatgggcgtcaacgctcccaaagggttattcccacccgagccagagcactacaggggcccgaagctcaaggtggccatcataggggcaggccttgcgggcatgtccaccgctgttgagctcttggaccagggccatgaggttgatttgtacgagtcccgtccgtttatcggtggtaaggttggctcctttgttgacaggcaaggaaaccatatcgagatggggctgcatgtgttcttcgggtgctacagcaatctcttccgcctcatgaagaaggttggcgctgataataatctgctggtgaaggaacatacccatacttttgtaaataaagggggcacgattggtgaacttgattttcggttcccggtgggagctccgttacatggcattcaagcattcctaagaactaatcagctcaaggtttatgataaagcaagaaatgcagttgctcttgcccttagtccagttgttcgggctctggttgatcctgatggtgcattgcagcaagtgcgggacttggatgatgtaagtttcagtgattggttcatgtccaaagggggtactcgggagagtatcacaagaatgtgggatcctgttgcttacgctttgggtttcattgactgtgataatatcagtgcacgttgcatgcttactattttcaccttgtttgccacaaagacagaggcatccctgttacgcatgctaaagggttcacctgatgtttacttaagtggcccaataaagaagtatataacagacaggggtggtttcacttaaggtggggatgcagagaggttctctatgagaaatcacctgatggagagacctatgttaaaggccttctcctcaccaaggctacaagtagagagataatcaaagctgatgcatacgtcgcagcctgtgatgttccgggtatcaaaagattacttccatcagaatggagggaatgggaaatgtttgacaatatctacaagttagatggtgtccctgttgtcactgtccagctccgctacaatggatgggtcactgaacttcaagatttggagaaatcaagacaactgcaaagggcggttgggttggataaccttttgtacacggcggatgcagacttttcctgtttttcggaccttgctctctcatctcctgctgattactacattgaagggcaaggttccctgatccaagctgtgctgactcctggagatccatacatgccattgccaaacgaggagatcattagtaaggttcaaaagcaggttgtagaactgttcccatcttcccggggcttggaagttacatggtccagtgtggtaaagatcggacaatcgctgtaccgtgaggctcctggaaacgacccattcaggcctgatcagaagacgcccgttaaaaacttcttcctctctggatcttacacgaaacaggactacattgacagcatggaaggagcaactctctccggcaggcgaacgtcggcctacatctgcggtgccggggaggagctgctggccctccgaaagaagctactcatcgacgacggcgagaaggcgctggggaacgttcaagtcctgcaggctagctgaacaacccctcctgcactgcagagaagcttggatctttccaaccacacatacatgctggaatggacaaaccaaccaaccattggcttttctcgcttcagggtgctggcgattcccgcagcgacctcctgtgtatcgtatccaatttgagcattagatctgccccccctgcaggcgtttctttcctatccctgatccgagaagcagggtgtagtctaggtggctggcatacgggattacatcaggcagtgtgcttaggccatgcgcatttgagctatggtttatggaaagcttgccggccttgacgctggaaggagaaaccagtcagtctccggcgctgcccctcccgccgtggccggcgacgggtggaggcagtatgtggagcgagagacagtgggcagccggagccggcgtgtccctctgaaggcctcacgacctgccggcttgtgatggccacgagcgcgtgcgcgtgagcgtcagcgtccgacctccagtggtccgtgtttccccgagcaagagcgaacagcagtttggcggcggctgatggcaccaagcgcagccgccggaccgccgtccctggcccggccatcgacatcgagtagcagccacctgcggcgcgccggcagcgccctccagcccgtctccgtcccgcgcgccttggtgcaggggcggaggcgcctcacgggcgccgtccgagccgcgccggacgcgccgccggtggtcagggctgccgtcagcgccgtcaccgagctcctcagagccctctccccgaacaaggcgctcaggggcgctgctacccagcagcagcagggcgaggagccggatccggacccgacctgcggcagcgtcgaggacgtgctcgccgtgctccgagacgattaccggcgcgcctacttcctcaccggggatttcactccgggaatatacaccgaagactgcttgttcgaggacccgacgatcaagttccgcggactctccaggtactcccagaacctgggtctgctggtgcccttcttcgacagcccttcgctcgagctagagaacattgagaagggttcgagggccgaaacgaagttcgtcaaggcgacatggaaactaaggttcatcttcaagctccaaaaggcacacgacgtatctgaggcttccatggaggccgctggtcgcgatcggagggagcacgacgtatgatctggatggagatttcaaggttactcggcactccgagagctgggacgtctctgcgcttcaggccatcgctcagatcttcgtctcggccccggaggagaagctggaaggcagctgaggctgaggcagagcatgcaatgtacagcgccacgcagacgcaggatcagtgatctgaatccgtgatgagcaggtgtccaaagccgtctgtcagagctccgctggtcttctctgtgcaaacaaactgtaccctctctgttccaggttataaacattcgaataattttgctacttacctagatatatgttacgtatatagatatatagtaaagggcggttattatgacacaaatttgtagggtgtaggtacaggttttgaatttgacatttgatgaacactatataaaaaccgactctcctatattccaaacgaacatcctcttttgaatcagatagacccatcggacccatccttctcgccacgagccacactcttctgtgcttaccaaaatgggctggccggttcctggacctggcccgtcttgtgccgatcctcctgaagcttctccggcattttccgtccctaaaatcccctaacctacttgtactggaaactaccctattattactatattcttttcccatcatcaaatcacagtccaacattggtacatccaattatagataaaaaaaaggcggtactgcatggggcctgcggtatttattaattaaatgtgtatttgctgattttacatgagacgatatgtacaggctgcattacagagtgtttattcattgtctgacctcctccgctatttcttgctttattttgaagcagataagaagtatctcttttttaaacaatgtcagccacccttgtactgtagatggcacgtttttaaatattccattcatttctacacttccagatgcaccacatcatgaccatcactgtttccactttctattttttttgtcaagttattgtacagtggatcttatcatagtgtgaatgtccgatgctctcggcagtgtaaatctaattgtctgcagtctaccagcatcttcttgtgaagttg

SEQ ID NO: 64912 - DNA, 4369 bp, Zea Mays
ccaccattggtgcggcgtggttctgccacgacgcccgcgacaaatccctgcgcgacggcatcttcgcctcccatcccctcccagcttcccctcccactccggccctcacacaaattgcccctctccttgtcctcctctttacacgctgccgaccacggctgccgccaaccacccgccccacccgtccaccgctgccgagtgctagccatttggagctgccgcgccatggcgtccgtggccgccaccaccacgctggcaccggcactcgcgccccggcgccgggcgcggccagggaccgggctgctgccgccgcgccgggcctcggccgtccgctgctcgctcgaccgtaacgtctccgacatgggcgtcaacgctcccaaagggttattcccacccgagccagagcactacaggggcccgaagctcaaggtggccatcataggggcaggccttgcgggcatgtccaccgctgttgagctcttggaccagggccatgaggttgatttgtacgagtcccgtccgtttatcggtggtaaggttggctcctttgttgacaggcaaggaaaccatatcgagatggggctgcatgtgttcttcgggtgctacagcaatctcttccgcctcatgaagaaggttggcgctgataataatctgctggtgaaggaacatacccatacttttgtaaataaagggggcacgattggtgaacttgattttcggttcccggtgggagctccgttacatggcattcaagcattcctaagaactaatcagctcaaggtttatgataaagcaagaaatgcagttgctcttgcccttagtccagttgttcgggctctggttgatcctgatggtgcattgcagcaagtgcgggacttggatgataggcatccctgttacgcatgctaaagggttcacctgatgtttacttaagtggcccaataaagaagtatataacagacaggggtggtaggtttcacttaaggtggggatgcagagaggttctctatgagaaatcacctgatggagagacctatgttaaaggccttctcctcaccaaggctacaagtagagagataatcaaagctgatgcatacgtcgcagcctgtgatgttccgggtatcaaaagattacttccatcagaatggagggaatgggaaatgtttgacaatatctacaagttagatggtgtccctgttgtcactgtccagctccgctacaatggatgggtcactgaacttcaagatttggagaaatcaagacaactgcaaagggcggttgggttggataaccttttgtacacggcggatgcagacttttcctgtttttcggaccttgctctctcatctcctgctgattactacattgaagggcaaggttccctgatccaagctgtgctgactcctggagatccatacatgccattgccaaacgaggagatcattagtaaggttcaaaagcaggttgtagaactgttcccatcttcccggggcttggaagttacatggtccagtgtggtaaagatcggacaatcgctgtaccgtgaggctcctggaaacgacccattcaggcctgatcagaagacgcccgttaaaaacttcttcctctctggatcttacacgaaacaggactacattgacagcatggaaggagcaactctctccggcaggcgaacgtcggcctacatctgcggtgccggggaggagctgctggccctccgaaagaagctactcatcgacgacggcgagaaggcgctggggaacgttcaagtcctgcaggctagctgaacaacccctcctgcactgcagagaagcttggatctttccaaccacacatacatgctggaatggacaaaccaaccaaccattggcttttctcgcttcagggtgctggcgattcccgcagcgacctcctgtgtatcgtatccaatttgagcattagatctgccccccctgcaggcgtttctttcctatccctgatccgagaagcagggtgtagtctaggtggctggcatacgggattacatcaggcagtgtgtaagttcagctggaactcgattggtaattgggatggatgattgatgatatatatatagcacacactgttcttgcgtcttgcaagaaaatatagcaagcgatgatccggcgacacttgctgggagactgtaccaacgatcttacttcattttggccattgtgttttttttttttttacaaaatagcagcatcctgtatcaactcgagctctcgtgctaaaccttttcgtttcatatgaaaaatatttcgttatcgttaggcttaggccatgcgcatttgagctatggtttatggaaagcttgccggccttgacgctggaaggagaaaccagtcagtctccggcgctgcccctcccgccgtggccggcgacgggtggaggcagtatgtggagcgagagacagtgggcagccggagccggcgtgtccctctgaaggcctcacgacctgccggcttgtgatggccacgagcgcgtgcgcgtgagcgtcagcgtccgacctccagtggtccgtgtttccccgagcaagagcgaacagcagtttggcggcggctgatggcaccaagcgcagccgccggaccgccgtccctggcccggccatcgacatcgagtagcagccacctgcggcgcgccggcagcgccctccagcccgtctccgtcccgcgcgccttggtgcaggggcggaggcgcctcacgggcgccgtccgagccgcgccggacgcgccgccggtggtcagggctgccgtcagcgccgtcaccgagctcctcagagccctctccccgaacaaggcgctcaggtaactaacccagcatctcacactcgtcaaccccatcagtcatccatccgctctggaatatggatccccgtggcgttctgtgctcttgcggtcggctgtgcaggggcgctgctacccagcagcagcagggcgaggagccggatccggacccgacctgcggcagcgtcgaggacgtgctcgccgtgctccgagacgattaccggcgcgcctacttcctcaccggggatttcactccgggaatatacaccgaagactgcttgttcgaggacccgacgatcaagttccgcggtactcccagaacctgggtctgctggtgcccttcttcgacagcccttcgctcgagctagagaacattgagaagggttcgagggccgaaacgaagttcgtcaaggcgacatggaaactaaggacgtatctgaggcttccatggaggccgctggtcgcgatcggagggagcacgacgtatgatctggatggagatttcaaggttactcggcactccgagagctgggacgtctctgcgcttcaggccatcgctcagatcttcgtctcggccccggaggagaagctggaaggcagctgaggctgaggcagagcatgcaatgtacagcgccacgcagacgcaggatcagtgatctgaatccgtgatgagcaggtgtccaaagccgtctgtcagagctccgctggtcttctctgtgcaaacaaactgtaccctctctgttccaggttataaacattcgaataattttgctacttacctagatatatgttacgtatatagatatatagtaaagggcggttattatgacacaaatttgtagggtgtaggtacaggttttgaatttgacatttgatgaacactatataaaaaccgactctcctatattccaaacgaacatcctcttttgaatcagatagacccatcggacccatccttctcgccacgagccacactcttctgtgcttaccaaaatgggctggccggttcctggacctggcccgtcttgtgccgatcctcctgaagcttctccggcattttccgtccctaaaatcccctaacctacttgtactggaaactaccctattattactatattcttttcccatcatcaaatcacagtccaacattggtacatccaattatagataaaaaaaaggcggtactgcatggggcctgcggtatttattaattaaatgtgtatttgctgattttacatgagacgatatgtacaggctgcattacagagtgtttattcattgtctgacctcctccgctatttcttgctttattttgaagcagataagaagtatctcttttttaaacaatgtcagccacccttgtactgtagatggcacgtttttaaatattccattcatttctacacttccagatgcaccacatcatgaccatcactgtttccactttctattttttttgtcaagttattgtacagtggatcttatcatagtgtgaatgtccgatgctctcggcagtgtaaatctaattgtctgcagtctaccagcatcttcttgtgaagttg

SEQ ID NO: 64913 - DNA, 4363 bp, Zea Mays
ccaccattggtgcggcgtggttctgccacgacgcccgcgacaaatccctgcgcgacggcatcttcgcctcccatcccctcccagcttcccctcccactccggccctcacacaaattgcccctctccttgtcctcctctttacacgctgccgaccacggctgccgccaaccacccgccccacccgtccaccgctgccgagtgctagccatttggagctgccgcgccatggcgtccgtggccgccaccaccacgctggcaccggcactcgcgccccggcgccgggcgcggccagggaccgggctgctgccgccgcgccgggcctcggccgtccgctgctcgctcgaccgtaacgtctccgacatgggcgtcaacgctcccaaagggttattcccacccgagccagagcactacaggggcccgaagctcaaggtggccatcataggggcaggccttgcgggcatgtccaccgctgttgagctcttggaccagggccatgaggttgatttgtacgagtcccgtccgtttatcggtggtaaggttggctcctttgttgacaggcaaggaaaccatatcgagatggggctgcatgtgttcttcgggtgctacagcaatctcttccgcctcatgaagaaggttggcgctgataataatctgctggtgaaggaacatacccatacttttgtaaataaagggggcacgattggtgaacttgattttcggttcccggtgggagctccgttacatggcattcaagcattcctaagaactaatcagctcaaggtttatgataaagcaagaaatgcagttgctcttgcccttagtccagttgttcgggctctggttgatcctgatggtgcattgcagcaagtgcgggacttggatgatgtaagtttcagtgattggttcatgtccaaagggggtactcgggagagtatcacaagaataggcatccctgttacgcatgctaaagggttcacctgatgtttacttaagtggcccaataaagaagtatataacagacaggggtggtaggtttcacttaaggtggggatgcagagaggttctctatgagaaatcacctgatggagagacctatgttaaaggccttctcctcaccaaggctacaagtagagagataatcaaagctgatgcatacgtcgcagcctgtgatgttccgggtatcaaaagattacttccatcagaatggagggaatgggaaatgtttgacaatatctacaagttagatggtgtccctgttgtcactgtccagctccgctacaatggatgggtcactgaacttcaagatttggagaaatcaagacaactgcaaagggcggttgggttggataaccttttgtacacggcggatgcagacttttcctgtttttcggaccttgctctctcatctcctgctgattactacattgaagggcaaggttccctgatccaagctgtgctgactcctggagatccatacatgccattgccaaacgaggagatcattagtaaggttcaaaagcaggttgtagaactgttcccatcttcccggggcttggaagttacatggtccagtgtggtaaagatcggacaatcgctgtaccgtgaggctcctggaaacgacccattcaggcctgatcagaagacgcccgttaaaaacttcttcctctctggatcttacacgaaacaggactacattgacagcatggaaggagcaactctctccggcaggcgaacgtcggcctacatctgcggtgccggggaggagctgctggccctccgaaagaagctactcatcgacgacggcgagaaggcgctggggaacgttcaagtcctgcaggctagctgaacaacccctcctgcactgcagagaagcttggatctttccaaccacacatacatgctggaatggacaaaccaaccaaccattggcttttctcgcttcagggtgctggcgattcccgcagcgacctcctgtgtatcgtatccaatttgagcattagatctgccccccctgcaggcgtttctttcctatccctgatccgagaagcagggtgtagtctaggtggctggcatacgggattacatcaggcagtgtgtaagttcagctggaactcgattggtaattgggatggatgattgatgatatatatatagcacacactgttcttgcgtcttgcaagaaaatatagcaagcgatgatccggcgacacttgctgggagactgtaccaacgatcttacttcattttggccattgtgttttttttttttttacaaaatagcagcatcctgtatcaactcgagctctcgtgctaaaccttttcgtttcatatgaaaaatatttcgttatcgttaggcttaggccatgcgcatttgagctatggtttatggaaagcttgccggccttgacgctggaaggagaaaccagtcagtctccggcgctgcccctcccgccgtggccggcgacgggtggaggcagtatgtggagcgagagacagtgggcagccggagccggcgtgtccctctgaaggcctcacgacctgccggcttgtgatggccacgagcgcgtgcgcgtgagcgtcagcgtccgacctccagtggtccgtgtttccccgagcaagagcgaacagcagtttggcggcggctgatggcaccaagcgcagccgccggaccgccgtccctggcccggccatcgacatcgagtagcagccacctgcggcgcgccggcagcgccctccagcccgtctccgtcccgcgcgccttggtgcaggggcggaggcgcctcacgggcgccgtccgagccgcgccggacgcgccgccggtggtcagggctgccgtcagcgccgtcaccgagctcctcagagccctctccccgaacaaggcgctcaggggcgctgctacccagcagcagcagggcgaggagccggatccggacccgacctgcggcagcgtcgaggacgtgctcgccgtgctccgagacgattaccggcgcgcctacttcctcaccggggatttcactccgggaatatacaccgaagactgcttgttcgaggacccgacgatcaagttccgcggactctccaggtactcccagaacctgggtctgctggtgcccttcttcgacagcccttcgctcgagctagagaacattgagaagggttcgagggccgaaacgaagttcgtcaaggcgacatggaaactaaggttcatcttcaagctccaaaaggcacacgacgtatctgaggcttccatggaggccgctggtcgcgatcggagggagcacgacgtatgatctggatggagatttcaaggttactcggcactccgagagctgggacgtctctgcgcttcaggccatcgctcagatcttcgtctcggccccggaggagaagctggaaggcagctgaggctgaggcagagcatgcaatgtacagcgccacgcagacgcaggatcagtgatctgaatccgtgatgagcaggtgtccaaagccgtctgtcagagctccgctggtcttctctgtgcaaacaaactgtaccctctctgttccaggttataaacattcgaataattttgctacttacctagatatatgttacgtatatagatatatagtaaagggcggttattatgacacaaatttgtagggtgtaggtacaggttttgaatttgacatttgatgaacactatataaaaaccgactctcctatattccaaacgaacatcctcttttgaatcagatagacccatcggacccatccttctcgccacgagccacactcttctgtgcttaccaaaatgggctggccggttcctggacctggcccgtcttgtgccgatcctcctgaagcttctccggcattttccgtccctaaaatcccctaacctacttgtactggaaactaccctattattactatattcttttcccatcatcaaatcacagtccaacattggtacatccaattatagataaaaaaaaggcggtactgcatggggcctgcggtatttattaattaaatgtgtatttgctgattttacatgagacgatatgtacaggctgcattacagagtgtttattcattgtctgacctcctccgctatttcttgctttattttgaagcagataagaagtatctcttttttaaacaatgtcagccacccttgtactgtagatggcacgtttttaaatattccattcatttctacacttccagatgcaccacatcatgaccatcactgtttccactttctattttttttgtcaagttattgtacagtggatcttatcatagtgtgaatgtccgatgctctcggcagtgtaaatctaattgtctgcagtctaccagcatcttcttgtgaagttg

SEQ ID NO: 64914 - DNA, 1876 bp, Zea Mays
gcgcagaggcggcagggtgggcgaccagtctcctccgcacgcttcccaccgagctcacacactgcacactcccacactcccactcccacctgtaggttcacgggaggcgaggaccctgccccccctgcattcttcccgtatcgcggaccgatcctcgccgcgggaggcgagcggagcggggcgtttctgcgggggagaagcgcgtccctgcaatttctgagagaggggaggcggcgagtggaaaagagcaggcgttgctatcctatcttgctgacacagcggcggtgtggcgaggcgcatggcgagggcgcgcggtggcgccgcgtggtgggtgctggcagcggcgtgggtgctgtgggcggctgcggctgcggcggaggcggaggccaggtcgccgtcggcgaggagggtgcaccggcacctcaagcgcctcaacaagccggccgtcaagagcatcgagagtccagatggagacatcatcgactgcgtgcatatctcccaccagccagcgtttgatcatcctctcctcaagaaccacacaatacagtttaggccggcgtaccaccctgaaggtctatacgatgataccaagagcagcataggctcaaacaatgctggcgagaggccgatgctccagatgtggcatcgaaatggcaggtgccccgagggcacggttccaatcaggagaaccaagaaggacgacctgcttcgagctagctccgtgaggcggtatggcaggaagcggcacactgctccgaacccactgtctgttgatcccaacatgctcagtgagggtggccaccaacacgccattgcgtacgtccagggcgacaagtactatggtgcaaaggctaccattaatgtgtgggagcccaagattcagcaggctaacgaatttagcctgtcccagctctggatcttggggggttcatttggggaggatctcaacagcatagaggctggctggcaggttagccctgacctctatggagacaacaacaccaggctgttcacatattggactagtgatgcataccaagccacaggttgctacaacatgttgtgctctggtttcattcagataaacagcgaggttgccatgggggctagtatcttccccatctcgaactacgcgggctcccaatatgatattagcatcctgatctggaaggaccccaaggaaggaaactggtggatgcagtttggcaaggaatacgtcctgggctactggccgtccttcctcttctcctacctcgcggacagcgcgtcgatgatcgaatggggcggggaggtggtgaactcggagcccgacggcacgcacacatcgacccagatgggcagcgggcacttcccggaggaagggttcagcaaggcgagctacttcaagaacgttcaggtggtggacagcagcaaccagctcagcgcccccaagggcgtgggcaccttcacagagcagtccaactgctacgacgtgcagaacggtaacaatggggactggggcacctacttctactacggcggccctggcaagaactcgaactgcccgtgactggtgcttctaatgtgtagtgtgaagtgccgtcaccattagcaaaatgtaacccaagcgttcagtttctgaagagaaggagcatggcttgaggctgcggtgggtggttgggctggtcggtggtgacctctactgatttttgcgaagtctgcttattggtcaccttcgccagttattttgaaagtgtgctatagcttgtttgatgatgaatgatagtaatgctgtaatggtattgagcttagtggttattattgcatccagttaaaccatcctcttcatgttgttaaaaattcagaaatgttgagaagctaatcaacgtctctattt

SEQ ID NO: 64915 - DNA, 2005 bp, Zea Mays
gcgcagaggcggcagggtgggcgaccagtctcctccgcacgcttcccaccgagctcacacactgcacactcccacactcccactcccacctgtaggttcacgggaggcgaggaccctgccccccctgcattcttcccgtatcgcggaccgatcctcgccgcgggaggcgagcggagcggggcgtttctgcgggggagaagcgcgtccctgcaatttctgagagaggggaggcggcgagtggaaaagagcaggcgttgctatcctatcttgctgacacagcggcggtgtggcgaggcgcatggcgagggcgcgcggtggcgccgcgtggtgggtgctggcagcggcgtgggtgctgtgggcggctgcggctgcggcggaggcggaggccaggtcgccgtcggcgaggagggtgcaccggcacctcaagcgcctcaacaagccggccgtcaagagcatcgagagtccagatggagacatcatcgactgcgtgcatatctcccaccagccagcgtttgatcatcctctcctcaagaaccacacaatacaggccggcgtaccaccctgaaggtctatacgatgataccaagagcagcataggctcaaacaatgctggcgagaggccgatgctccagatgtggcatcgaaatggcaggtgccccgagggcacggttccaatcaggagaaccaagaaggacgacctgcttcgagctagctccgtgaggcggtatggcaggaagcggcacactgctccgaacccactgtctgttgatcccaacatgctcagtgagggtggccaccaacacgccattgcgtacgtccagggcgacaagtactatggtgcaaaggctaccattaatgtgtgggagcccaagattcagcaggctaacgaatttagcctgtcccagctctggatcttggggggttcatttggggaggatctcaacagcatagaggctggctggcaggttagccctgacctctatggagacaacaacaccaggctgttcacatattggactagtgatgcataccaagccacaggttgctacaacatgttgtgctctggtttcattcagataaacagcgaggttgccatgggggctagtatcttccccatctcgaactacgcgggctcccaatatgatattagcatcctgatctggaaggaccccaaggaaggaaactggtggatgcagtttggcaaggaatacgtcctgggctactggccgtccttcctcttctcctacctcgcggacagcgcgtcgatgatcgaatggggcggggaggtggtgaactcggagcccgacggcacgcacacatcgacccagatgggcagcgggcacttcccggaggaagggttcagcaaggcgagctacttcaagaacgttcaggtggtggacagcagcaaccagctcagcgcccccaagggcgtgggcaccttcacagagcagtccaactgctacgacgtgcagaacggtaacaatggggactggggcacctacttctactacggcggccctggcaagaactcgaactgcccgtgactggtgcttctaatgtgtagtgtgaagtgccgtcaccattagcaaaatgtaacccaagcgttcaggttcgcttatacagcgtcaatctgcatctccttgttcagtcctagctaggtagtgtgtaacatgtgcatgtgctctctagactctaatgttttcttcttcttttcattgtattttgttcttgtgccatgtaaagtttctgaagagaaggagcatggcttgaggctgcggtgggtggttgggctggtcggtggtgacctctactgatttttgcgaagtctgcttattggtcaccttcgccagttattttgaaagtgtgctatagcttgtttgatgatgaatgatagtaatgctgtaatggtattgagcttagtggttattattgcatccagttaaaccatcctcttcatgttgttaaaaattcagaaatgttgagaagctaatcaacgtctctattt

SEQ ID NO: 64916 - DNA, 2005 bp, Zea Mays
gcgcagaggcggcagggtgggcgaccagtctcctccgcacgcttcccaccgagctcacacactgcacactcccacactcccactcccacctgtaggttcacgggaggcgaggaccctgccccccctgcattcttcccgtatcgcggaccgatcctcgccgcgggaggcgagcggagcggggcgtttctgcgggggagaagcgcgtccctgcaatttctgagagaggggaggcggcgagtggaaaagagcaggcgttgctatcctatcttgctgacacagcggcggtgtggcgaggcgcatggcgagggcgcgcggtggcgccgcgtggtgggtgctggcagcggcgtgggtgctgtgggcggctgcggctgcggcggaggcggaggccaggtcgccgtcggcgaggagggtgcaccggcacctcaagcgcctcaacaagccggccgtcaagagcatcgagagtccagatggagacatcatcgactgcgtgcatatctcccaccagccagcgtttgatcatcctctcctcaagaaccacacaatacagtttaggccggcgtaccaccctgaaggtctatacgatgataccaagagcagcataggctcaaacaatgctggcgagaggccgatgctccagatgtggcatcgaaatggcaggtgccccgagggcacggttccaatcaggagaaccaagaaggacgacctgcttcgagctagctccgtgaggcggtatggcaggaagcggcacactgctccgaacccactgtctgttgatcccaacatgctcagtgagggtggccaccaacacgccattgcgtacgtccagggcgacaagtactatggtgcaaaggctaccattaatgtgtgggagcccaagattcagcaggctaacgaatttagcctgtcccagctctggatcttggggggttcatttggggaggatctcaacagcatagaggctggctggcagccctgacctctatggagacaacaacaccaggctgttcacatattggactagtgatgcataccaagccacaggttgctacaacatgttgtgctctggtttcattcagataaacagcgaggttgccatgggggctagtatcttccccatctcgaactacgcgggctcccaatatgatattagcatcctgatctggaaggaccccaaggaaggaaactggtggatgcagtttggcaaggaatacgtcctgggctactggccgtccttcctcttctcctacctcgcggacagcgcgtcgatgatcgaatggggcggggaggtggtgaactcggagcccgacggcacgcacacatcgacccagatgggcagcgggcacttcccggaggaagggttcagcaaggcgagctacttcaagaacgttcaggtggtggacagcagcaaccagctcagcgcccccaagggcgtgggcaccttcacagagcagtccaactgctacgacgtgcagaacggtaacaatggggactggggcacctacttctactacggcggccctggcaagaactcgaactgcccgtgactggtgcttctaatgtgtagtgtgaagtgccgtcaccattagcaaaatgtaacccaagcgttcaggttcgcttatacagcgtcaatctgcatctccttgttcagtcctagctaggtagtgtgtaacatgtgcatgtgctctctagactctaatgttttcttcttcttttcattgtattttgttcttgtgccatgtaaagtttctgaagagaaggagcatggcttgaggctgcggtgggtggttgggctggtcggtggtgacctctactgatttttgcgaagtctgcttattggtcaccttcgccagttattttgaaagtgtgctatagcttgtttgatgatgaatgatagtaatgctgtaatggtattgagcttagtggttattattgcatccagttaaaccatcctcttcatgttgttaaaaattcagaaatgttgagaagctaatcaacgtctctattt

SEQ ID NO: 64917 - DNA, 1514 bp, Zea Mays
aaaaaagctacttttgtccgattcttttgggctttcctcgctggtagtttttcgctgtcactttggagaattatctcaaaagttctcgccttttggagagtccagatggagacatcatcgactgcgtgcatatctcccaccagccagcgtttgatcatcctctcctcaagaaccacacaatacagtttaggccggcgtaccaccctgaaggtctatacgatgataccaagagcagcataggctcaaacaatgctggcgagaggccgatgctccagatgtggcatcgaaatggcaggtgccccgagggcacggttccaatcaggagaaccaagaaggacgacctgcttcgagctagctccgtgaggcggtatggcaggaagcggcacactgctccgaacccactgtctgttgatcccaacatgctcagtgagggtggccaccaacacgccattgcgtacgtccagggcgacaagtactatggtgcaaaggctaccattaatgtgtgggagcccaagattcagcaggctaacgaatttagcctgtcccagctctggatcttggggggttcatttggggaggatctcaacagcatagaggctggctggcaggttagccctgacctctatggagacaacaacaccaggctgttcacatattggactagtgatgcataccaagccacaggttgctacaacatgttgtgctctggtttcattcagataaacagcgaggttgccatgggggctagtatcttccccatctcgaactacgcgggctcccaatatgatattagcatcctgatctggaaggaccccaaggaaggaaactggtggatgcagtttggcaaggaatacgtcctgggctactggccgtccttcctcttctcctacctcgcggacagcgcgtcgatgatcgaatggggcggggaggtggtgaactcggagcccgacggcacgcacacatcgacccagatgggcagcgggcacttcccggaggaagggttcagcaaggcgagctacttcaagaacgttcaggtggtggacagcagcaaccagctcagcgcccccaagggcgtgggcaccttcacagagcagtccaactgctacgacgtgcagaacggtaacaatggggactggggcacctacttctactacggcggccctggcaagaactcgaactgcccgtgactggtgcttctaatgtgtagtgtgaagtgccgtcaccattagcaaaatgtaacccaagcgttcagtttctgaagagaaggagcatggcttgaggctgcggtgggtggttgggctggtcggtggtgacctctactgatttttgcgaagtctgcttattggtcaccttcgccagttattttgaaagtgtgctatagcttgtttgatgatgaatgatagtaatgctgtaatggtattgagcttagtggttattattgcatccagttaaaccatcctcttcatgttgttaaaaattcagaaatgttgagaagctaatcaacgtctctattt

SEQ ID NO: 64918 - DNA, 1686 bp, Zea Mays
cttggagacaggctggctcttgcaaagtgatgctctcttagtgaaaaagggacatagccttgcctttctgagcgttttgctccggctccagtttcagcaattttctgagctcaacgaacgtgccgagctccagaatagtccagatggagacatcatcgactgcgtgcatatctcccaccagccagcgtttgatcatcctctcctcaagaaccacacaatacagtttaggccggcgtaccaccctgaaggtctatacgatgataccaagagcagcataggctcaaacaatgctggcgagaggccgatgctccagatgtggcatcgaaatggcaggtgccccgagggcacggttccaatcaggagaaccaagaaggacgacctgcttcgagctagctccgtgaggcggtatggcaggaagcggcacactgctccgaacccactgtctgttgatcccaacatgctcagtgagggtggccaccaacacgccattgcgtacgtccagggcgacaagtactatggtgcaaaggctaccattaatgtgtgggagcccaagattcagcaggctaacgaatttagcctgtcccagctctggatcttggggggttcatttggggaggatctcaacagcatagaggctggctggcaggttagccctgacctctatggagacaacaacaccaggctgttcacatattggactagtgatgcataccaagccacaggttgctacaacatgttgtgctctggtttcattcagataaacagcgaggttgccatgggggctagtatcttccccatctcgaactacgcgggctcccaatatgatattagcatcctgatctggaaggaccccaaggaaggaaactggtggatgcagtttggcaaggaatacgtcctgggctactggccgtccttcctcttctcctacctcgcggacagcgcgtcgatgatcgaatggggcggggaggtggtgaactcggagcccgacggcacgcacacatcgacccagatgggcagcgggcacttcccggaggaagggttcagcaaggcgagctacttcaagaacgttcaggtggtggacagcagcaaccagctcagcgcccccaagggcgtgggcaccttcacagagcagtccaactgctacgacgtgcagaacggtaacaatggggactggggcacctacttctactacggcggccctggcaagaactcgaactgcccgtgactggtgcttctaatgtgtagtgtgaagtgccgtcaccattagcaaaatgtaacccaagcgttcaggttcgcttatacagcgtcaatctgcatctccttgttcagtcctagctaggtagtgtgtaacatgtgcatgtgctctctagactctaatgttttcttcttcttttcattgtattttgttcttgtgccatgtaaagtttctgaagagaaggagcatggcttgaggctgcggtgggtggttgggctggtcggtggtgacctctactgatttttgcgaagtctgcttattggtcaccttcgccagttattttgaaagtgtgctatagcttgtttgatgatgaatgatagtaatgctgtaatggtattgagcttagtggttattattgcatccagttaaaccatcctcttcatgttgttaaaaattcagaaatgttgagaagctaatcaacgtctctattt

SEQ ID NO: 64919 - DNA, 1244 bp, Zea Mays
cgttcaccgagtcttcctctctttcccacgcgccgcagcactgcagcagccgccgtcaagtcgaatcggtcggacgtcggagaagccagaagcctccgcgcacggcgcagcggttgctgctagcctgctacttccactggccgataatgcacatcctagagggcgttcaaatgcaactgtgacaaatgaacaaggcgattaccatcacaaaggaaaatgtgtcattggagcatcatcaagcggcgttgctggtatgagcacaatgcatgtaaacactgttgaggtgatcacacaaaacggtaggtacatattagtgtatttatatgtgatggtcaataaaaatattcgtgcacttttaaaatattgtggttttacattaaagggaggcgtgtgaaattaaaaggaggcattgagagcccatggagccatggtgagccttatggaaatgattttagttgtaattattgcactagtcgtatcaagggtggaggtgcgactcgtctaagagagcatttggggggattgcctggaaatgtggctgcatgtattaatgttcctcttaatgttaaggcaataatgactgatgaagtggttgttcggagaataaggaggaggcgaaacagtgacattagactctatgttgagtgagaggttagagaatcaaataaaggtttaaggactttaagtaaagcaagaattcctctagatgaagaaggtcgaatacagatgtcattgagagagtcactaaaggaatatgatgaggagagggtcattggttgttctagtcgtagtaggtctacaagttgttctgctaatcaacaaactagacttgacaggtaaataatttatttttagttaacaatcttattagatcttactaggtaattgcccgtgcttcgcaacggaaccattacaatgcaaaacacaatgaatttgcacttgcaatggggccagaagctccaatatccggaaacgattcagaagagcaaatatcagaaagtggagcttattgcttgtgaaattgatcaaaaaagcaaaagacactgacttgagacgacaggaaagaaaggaggtaaggcagagcccaaagcggatagatagaaaaagatctgctgctcagtaacatgctattcatattattaactcaccaagcattctacccgcttttcataaaactcgatatcatctagcacatgtaacaggtgtccatatatagcatagaaaagatatagcatgcacattat

SEQ ID NO: 64920 - DNA, 1182 bp, Zea Mays
cgagtcttcctctctttcccacgcgccgcagcactgcagcagccgccgtcaagtcgaatcggtcggacgtcggagaagccagaagcctccgcgcacggcgcagcggttgctgctagcctgctacttccactggccgtaacacatgacatttgaggttgagaaagataatgcacatcctagagggcgttcaaatgcaactgtgacaaatgaacaaggcgattaccatcacaaaggaaaatgtgtcattggagcatcatcaagcggcgttgctggtatgagcacaatgcatgtaaacactgttgaggtgatcacacaaaacgggaggcgtgtgaaattaaaaggaggcattgagagcccatggagccatggtgagccttatggaaatgattttagttgtaattattgcactagtcgtatcaagggtggaggtgcgactcgtctaagagagcatttggggggattgcctggaaatgtggctgcatgtattaatgttcctcttaatgttaaggcaataatgactgatgaagtggttgttcggagaataaggaggaggcgaaacagtgacattagactctatgttgagtgagaggttagagaatcaaataaaggtttaaggactttaagtaaagcaagaattcctctagatgaagaaggtcgaatacagatgtcattgagagagtcactaaaggaatatgatgaggagagggtcattggttgttctagtcgtagtaggtctacaagttgttctgctaatcaacaaactagacttgacaggtaaataatttatttttagttaacaatcttattagatcttactaggtaattgcccgtgcttcgcaacggaaccattacaatgcaaaacacaatgaatttgcacttgcaatggggccagaagctccaatatccggaaacgattcagaagagcaaatatcagaaagtggagcttattgcttgtgaaattgatcaaaaaagcaaaagacactgacttgagacgacaggaaagaaaggaggtaaggcagagcccaaagcggatagatagaaaaagatctgctgctcagtaacatgctattcatattattaactcaccaagcattctacccgcttttcataaaactcgatatcatctagcacatgtaacaggtgtccatatatagcatagaaaagatatagcatgcacattat

SEQ ID NO: 64921 - DNA, 1469 bp, Zea Mays
gtcttcctctctttcccacgcgccgcagcactgcagcagccgccgtcaagtcgaatcggtcggacgtcggagaagccagaagcctccgcgcacggcgcagcggttgctgctagcctgctacttccactggccggtacgtatcttgttagctcaagcacgatctggtcgtatctggtcgtcgttagcctttttgttagcttttaagcagccgccgtcaagtaggatcttgtcgtcgttagcttctactttttaggtaaatagaaatattaaaagcaaccaaactccatgagataaactgaataaaagtacttgtgttagttaacttgtttaggttcataggttattgtcattttttgtaaatataaatattaaaagtagatacttgcttaccggttaatatacaattatttgagattattgtagtaacacatgacatttgaggttgagaaagataatgcacatcctagagggcgttcaaatgcaactgtgacaaatgaacaaggcgattaccatcacaaaggaaaatgtgtcattggagcatcatcaagcggcgttgctggtatgagcacaatgcatgtaaacactgttgaggtgatcacacaaaacgggaggcgtgtgaaattaaaaggaggcattgagagcccatggagccatggtgagccttatggaaatgattttagttgtaattattgcactagtcgtatcaagggtggaggtgcgactcgtctaagagagcatttggggggattgcctggaaatgtggctgcatgtattaatgttcctcttaatgttaaggcaataatgactgatgaagtggttgttcggagaataaggaggaggcgaaacagtgacattagactctatgttgagtgagaggttagagaatcaaataaaggtttaaggactttaagtaaagcaagaattcctctagatgaagaaggtcgaatacagatgtcattgagagagtcactaaaggaatatgatgaggagagggtcattggttgttctagtcgtagtaggtctacaagttgttctgctaatcaacaaactagacttgacaggtaaataatttatttttagttaacaatcttattagatcttactaggtaattgcccgtgcttcgcaacggaaccattacaatgcaaaacacaatgaatttgcacttgcaatggggccagaagctccaatatccggaaacgattcagaagagcaaatatcagaaagtggagcttattgcttgtgaaattgatcaaaaaagcaaaagacactgacttgagacgacaggaaagaaaggaggtaaggcagagcccaaagcggatagatagaaaaagatctgctgctcagtaacatgctattcatattattaactcaccaagcattctacccgcttttcataaaactcgatatcatctagcacatgtaacaggtgtccatatatagcatagaaaagatatagcatgcacattat

SEQ ID NO: 64922 - DNA, 1004 bp, Zea Mays
ctccctcccacgcgcccctcaccctcaccctcgccctcgacggcgctgccctctgtgatggcggacgcgcccccaccaaccccgaccctgagatccattgccgaagaaacatccgtcgtcttccccgccccgctcacgtgaaactgccactgatttggcctcccccaacgccgtcgagacaaccaccgccttccccatcgttgccccacacgatttgaactgccacacaactgcttcctccctcctcgctcctcctcatgcaaaccctactctcctctccctcgcacctacgtccgacgcgacggtggagcccgacgaccttgtgcggccttctctgctccatgtaaggccacctctcgcctctcacctattgtcgacgcgttgggtgtttggccctggccaaaagcatgctggtggccaccggcgcaggcgtccccgatgtggcctggtcctgccatcagccagcgcgctcgacctcgccgtcgtcgtcgatgcagagttcttcgatgggcccacgctctctatctcctcgtgcttccaccagttgcctgctctgctccaccgccctttgatttgatttgatttgattgcgatgcaggtcatttcagctaagagtgataaagagatggttctgccgatcatggttggaggttacacaaacttgttttgttctatgcaccatacaagtaattgtggattcatcttccgagggccatagactccagtcaatccaaattgaaacacataactgaagtttcagatgatcactgggcgcagggtgctgtctgtttctctaatgttagttcacttagcacacttaatggctgaggcgtttgcatgacattgagtcaccagtcgcatatctaaatgtgttgcaagcatgaaaacagagaggccatgagtgtccaatcaatggtacatgcaagtttctgcgatctgttccaaattatcttcaactacataataagaaaggtaatcagccaaatatagtatgtggtctggag

SEQ ID NO: 64923 - DNA, 1702 bp, Zea Mays
aaaattaaaaaaatcgataggtggagccacgttgtatatgcggatctccattcaccaatcgccttcctgtcgccctcccgctcggctcggcgaacgcgatctgttccccaacctccgcagccgctccaccgtcctccactccggctgccgaatcgacccgccccgatccagatcaggagctgagggatggacgcgaacaggcgccagagtgggatccagcagttgctggctgcggagcaggaggctcagcaaattgtgaatgccgctagagctggtagtgttttctcatcttttttgtcccaagccattgtagatctagcgtagcgttaggcagcaacaaccttgtgaatgagttcgttccattcacttagacatctttcactgatcctcaattaatgtttgtagagcgagattgaaggtaatgcactgctacgtttctgaactgtagcaaaaaaacggcatctcattaatgctgttactattgcattaccaacaaatatataacacctgttctgggtgttagaccatgacctctcacgccaaagttacaatgtataagtttgcatttagctacctgagttgagatcatgaaatatttagtgtccaactctgcacaaagcaatctttagtctagagggggaaaagaagtttacttttctttttcaagtatgcagaagcatgtttaggccctgtttggaacctctaaaactaatagttagctactaaaaattagttgttgggttccacgccatcagctaataccacagctaattgttagctacctcgcagctaacaattagttaattagctggctcaatccagctaataatttattagctgccaaactattagctcgaggggttccaaagagagccttaactgtgaactgttttctggtgaaatgtaacaacaaagctaaaagctaaagggctgtgttctctctgcagtataaacttgaatttgtgtgttctacagctaagtcgcaataaaagaaggggttgaaatcttgcttttatgggtcccattagcaaaaacatattccattgtgaaccatgtgctgtacaaatgtcttttaaacttgttggcaaattgtcagctaataggaagctaaaaagctgacccctttacccccctcccttcctcttaatagttaatactgaacatgaatgtttcctgtgtccaatagccaagtcagcgaggctcaggcaagcaaaagaggaggctgagcgggaaatagccgaataccgtgcccagatggaggctgagtttcagaggaaggttgcagagagcagcggcgactccggtgcaaacgtcaagcgtctcgaggaagaaacggcggcgaagatcgagcaactcacccagcaggccgcaagcatctccccggatgtcattcagatgcttctgcggcatgtcaccaccgtcaagaactgaggagtgctgttcccgaactatgctcgcagacttgtaccgtcgatctatttatttttgtcaagagtgagagtggtgaggaataatatgcccgcttgtatccataattcctgttcgtaactacggaataagccgccgcagctttagcggcaaacgtgactagtactgtcagaacctaccattgttatttggtacaattggtaaataatattgttttaaactggatttttcgaacaagctgttttgttgataccatgcttggggtttctgtttc

SEQ ID NO: 64924 - DNA, 1269 bp, Zea Mays
gcacggcccagtccaacttctcgttcccccaaaccctaatccctttctccactgccacgttgtatataagccgccgccagcttcaacgcagctgccctcccaaaccctcgcgccgccgctccccagcacatcgctcccagcgcgccaaatcggcggcaacctcggacccttcactcacccagctatggcggagcgaggcggcgagcgtggaggaggagaagtgggtgcccgtcaccaagctcgggcgcctcgtgaaggagaaccggatcaacaagattgaggagatctacctgcactcgctgccggtcaaggagcaccagatcgtggagaccctcgtcccggggctcaaggacgaggtgatgaagatcacgcccgtccagaagcagacccgcgccgggcagcgcacgcgtttcaaggccttcgtcgtcgtcggcgacggggacggccacgtcgggctcggcgtcaagtgcgccaaggaggtcgccaccgccatccgtggcgccatcatcctggccaagctctcggtcgtgcccgtcaggaggggctactggggaaacaagatcggccagccgcacactgtgccctgcaaggtcaccggcaagtgcgggtccgtcaccgtgcgcatggtgccggcgcccagggggtccgggattgtcgctgcccgcgtgcccaagaaggtcctccagttcgccggcattgaagatgtctttacctcgtcccgtggctccaccaagacactcggtaacttcgtcaaggcaacctttgattgtctgatgaagacctacggcttcctcactcctgagttctgggccgagaccaagtatgccaagaccccgttccaggagttcaccgacctcttggctaagccgacaaagggtcttctgatcgaggctcccaccgagacagtggaagcttgaacgtcttagtttactgttccaagtgtcgcgaaaagagttttctgtactagctacatattttaaatgttattttgaattatgatgagaaaccaaggtatgcacccaagataattgatgtcctgttgttttcgtatgtgggtatcgaaccccaaagatgtcctattgttttctgtactccgcatgtgatgaaaatctgtcctgcctgtgttaggccatctgcactagtctacgcatagattatccaaaaacactgttctgcattagagtggagtttgaatatgtacgaggatgggtaagctcctagagatagtctgtcttagtcttacagtgtttttcaacacgcgatgaatgc

SEQ ID NO: 64925 - DNA, 1457 bp, Zea Mays
cagcaactctccacaaagtataaattatatcaacaaaagaatgcatattaacacaagtaaaactttgtggtaaacaatatccactggtctgtacgtagctgtaaataacgccacttgctgcttatatatatataacttaacagacaacagatggcacgtggtattcctccgtttctacaaagtacaaaccttccacttccctagcagttgatgccacacgtctgggtatccgggccagtgacgcgggtggtgaaggggtcgatgcgaacccacagcaaggagaagatggacgccagcaggatggcccagacgacgacgatggtcggggtgcggttctgcctgcccatgaggcccttgaggaacgggtacaggtggacgatgacccagaaggcgaagaagagcttgccgaagagcgggccccacgactggtatccgctgttgatggcgtaggagatgccggcgacgacgccgaccaggttgatgatcaggatggtggtgggcgggatcaggagcgtcgtccacttgaacatgtacagctccgcgaagtcgccgtcctcgtccgaggccttggaggtgacggtgaagttggtgtcgatgccggccagcaccttgagcaggccctggaacacggcgaagaggtgcgcggagatgcccccgatcacccagaactgctcgttcctccaccactcgtcgatgcccaccccgctccacctcatctccaggatgcccgtggcgaagatcgagatgaagagggagatgaaccagatgctggcgaagttgctgatctgcacgcattccattccaagatggcgggcaggatgcagtagatgagaagcgggatggacgtgagcgggtagatggtggtgttgatgtacgcgaatctctccaggaacttgagccgccctccgtagccgtaccacagggggcagtgccggctgaagaggatctccacggacccaagagcccaccggagcacctggttcagacggtccgaaagattgatgggggcagaccccttgaaagctggccgcttgggcatgcagtagatcgaccgccagcctcgcgcgtgcatcttgaatccgaagagactccggagttgcggactgaggaacaccaccatactccatcagagtggaggcaacaaacgctgcggactggccaaatctcttctccaggctcatttgagacataagaagtgatttctcgtcgtcaaatccagcgcctgccatgtaaaaaaaaatttgacagcatgaatacatgcttcgaaaccctcaaaatatacaagaaaagacagcgtgagacagaaagataacacttttcaggaacaggaactaaacatcagtcttaaccgtgaacatctaaaaacgcgaaggcgtaccttcaactccctcctctatatcttcaaggttgaatactggcacagaactgtccacatgcttctgcgacttcttcttgtc

SEQ ID NO: 64926 - DNA, 1865 bp, Zea Mays
atcatatgttgcccgaggaggggtatgatgcagcttcataccctagaggtatgaaggcagaagtcattactgcatctgtagccatgtgcattaaagggtgaagtgtggaaccggttgtggtgatgtggatagtgtgggtctttacttggtgattcatttctttggaactaagtaattggttacttgtttacttgctgcaaattaatactcaagaaggaaattgtgaactacatggttgtttaagcatggtttggttacatagtcccaattgttgtttgacctttttacttgctgagatgtgtcatctcactcttgcattgtttgatgcaggcactttatcttgcccatgggaaaagagggatgtagcagcacgaacacttcacttttaaataaatgtaccaatgtttagtaatgatgttaaacaggggttcaagtctaggagattaatatgttctaggcttcatggtagtcgaatttgtttttttgttggccggattccttctctttttatttggtcatgaatgtttattactatctctcattctgtctatacttcgtggattgtctttcttttacattatgtctaaactttatatcccactcgttatgctactttcaagggaggtgctgccggattttgttttattttccgtctctattacttttttatgtggtataagttttgtgggaagagtttttggtaacattcattgtgtgggatcaatggggtgttacagttggtatcagaggaataggctgtaggtcctagcaagtggaataataataaattgacacactgcacatgtaggatgggtttcctgctttactattgatatattatgttattgtctgtgctggtttgacattatctgatgaggtgctatgccaatcttatttacttattttctcacccctgtggctgcagctatgccgcctcgtagggctcgtggcagcccacaagttcctagtggggactcgatgagtccggcggcaatgttagccgcgatgcaggccatgcagtaggagttggccattctgaggcaggctattcctattgcccctgcaggtgctgctcagggtgctggtgatggaggagtgcccgggggcgctgttcctgcgggtgttgctccaggtggcaggcctgaggtgcctcttctcgtcagtggtctttctctgatgcagtggatgggcatgaagttggacacttttgatggcagtgatactccggttgaggcggcagattggctaacttacgtggaggataagatgaatgtctttgagattgtgtatggagatcgtgttcgcttcggcacacagctgctgaagggagaggctcagatttggtggagaggtgtgcaggcagctcactcctcttcaccaggagtcctgttgttgggggccttcgtcctccgaaggtcctcaaaaacatgatttgacaatgttttccaagtgaaatatgtgaataggtaccttcggattcggatcataagcatacagagcatggtcaggacgaagcctgagcgagacgaaaggtgattatgacgaaggacaatttggtcacgaagctgtgcgcaggaaagcttcggcatgatagcagaaaaggaaaccgacttaaagatgaaaaggcaatttagacctcggagaattactatagagttattagcaaatgtaaagggcatgaatgtaattttacatgggctgcgtcccgtgcctataaatagatgaacagtactccagtactgttcacgctgatttggcattttgcttttgacgtcacacttgtgcttttacctgctttcaagtcaaaggtacatttgtaattcgacatcatttctatttttccatagcaataaaatggaaatgag

SEQ ID NO: 64927 - DNA, 2308 bp, Zea Mays
atttaatttagacatggaaattaagtgttcctcacaagtaacaacattaaaatccttgcatctattgcaaattacaacatgttctacacatgaactagatttattagctacttctagcttagaagttaattcatcatttaagttctttagactagaaacagtttcatggcatgcagacaactcagaagatagaatctcattccttttagtttctagagcaagagacttttgtatactaacaagtttgtcatgttcttcatataatatgtcttcttgcttctctaaaagtctatctttttcatttaaagcatcggttagttcattaatcttttctactttagctctatctaatcctttaaatagactagagtaatctacttcatcatcactagaatcatcatcgcttgaagtagtatacttaaaggtttctcgaacgcttacctttttgtcctttgccatgaggcaggtgtggcgttcgttggggaatagagaggacttgttgaaggctgaggcagcgagtccttcgtcgtcggagtcggaagaagagcagtccgagtcccattccttttcgatgtgtgcctcgccctttgccttcctatagctctttttcttctccttcttcccgccctttccttgttcctggtcactagtattatcgagacaatttgctataaagtgaccagacttaccgcatttgaagcaggagcactttccccttgctttattcttgttggggtactccttgcgtccttttaatgcggtcttgaagcgcttgatgatgagagccatctcatcttcgtttagcccggccgcctcaacttgtgccaccttgcttggtagtgcctccctgctgttggttgccttgagggcaatagtttgaggctcgtggacggggagtggaccgtttagagcgtcgtccacatatcacgcctccttcaccatcatacgcccgctcacaaattttccaaggatctcttcgggtgtcatcttggtgtacctgggattctcacgaataaggttaacaagatgagggtctattaccgtgaatgaccttagcataagtcggacgacgtcgtggtccgtccatctcgtgcttccataactcctaatcttgttgaccagggtcttgagccggttgtatgtttgagttggctcctctcccctgatcatggcgaaccttcccagctcgccttccaccaactccatcttggttatcatggtggcatcattaccctcatgagaaatcttgagggtatcccatatttgcttggcgttgtccaagccgctcaccttgttgtactcgtccctgcacaaggatgctagcaaaatagtgctagcttgtgcattcttatgaatttgctcattgataaatacagggttatcgttactatcaaattgcattcgactttcaactatctcccaaatactaggatggagagaaaataagtgactacgcattttgtgactccaaaaagagtagtcctctccatcaaagtgtggaggtttaccaagaggaattgaaagcaaatgagcattggaattgaaaggcatacgagaataatcaaatgaaaaatttgaattaaccggtttctttttctcgtcgtcgtcgtctcttggtgaagaagaagattcgtcgctttcgtagtagacgatcttcttgatgcgcctcttcttcttcccgtccttcttcttgtgactcgagccaaagttcgtgggcttgtcgtctttgggctcgttgaggaaggactccttgtcgttgaccaccatcccctttcccttaggatccatctctccgggcgattagtccctttcgtgaagagtacgacactgataccaattgagagcacctagagggggggtgaataggtgatcctataaaattcaacaactaatagccacaaaacttggttaagtgttagtatggctaagtagcgagctcttgctaacaaaagtatcacaaaaaaacaatcacaaaagacacacgagtttatcccgtggttcggccaagtataacacttgcctactccacgttggggcgtcccaatggacgagggttgcactcagcccctttcaagtgatcaaatgatcaacttgaataccacggtattctttgcttatctcttttcccattcgcgaggaatctccacaagttggagtctctcgcccttacaataaagatcacggtgaaagcacaagagtaagggtgggaagcaacacacacaaattcgcagcaatacacacgcacgcaagccaagacttgagctcaaaatgaagcacaacgagttcactacaagaatggagctcaaat

SEQ ID NO: 64928 - DNA, 1892 bp, Zea Mays
ctgaaccctaacaaagcaggcgcctttttgctcctccctcccttccacgcaagcgactgctgctgcttccccacaccccccggtaggctcaccgccggcgacgagcacgcgtcccaccacacccaaacccaccgccaccggtgctcgctccgcccaggaccagcgggggagcctccagatctcggcgcgccgcgcaggccagcatggcgtcgtcctccgacgagcagtccaagccgccggagccgcccgccgccgccgccgtggtcaccgccgcagcaccgccacagacgcacgccgagtgggtcgcttcgcttcaggcctactacgctgccgcggggcacccctacgcctggccggcgcagcacctcatggcggcggctgcggcgggggcgcacttcggcacgccggtgccgttccccgtctaccacccaggcgccgccgcggcgtactacgcgcacgcatccatggccgcgggcgtcccttacccgacgtgcgaagctgtccccgcggtggcgctgcccactgtgccggaagggaaagggaagggtaagggcggaggcgcgtcgcctgagaaaggcagctccggggcgccctccggcgaggacgcttctaggagcgatgacagcggcagcgatgagtcatcggagactagagatgatgacactgaccataaggtaccaaacaacttgctgtgccacaagggaccatttttaaattgcatgtttttcctgtaattagctggctttctgtggttcatgtttgttctcctcaggattcatctgcgcccaagaagaggaaatctggtgagccgtctcaagctactgttgtgcgatatgctgcggttgagtcaccatatcccgcaaaaggaaggtctgcctcaaagcttccagtgtctgcacctgggcgtgcagcgcttcctagtgccaccccgaatctaaacattgggatggacatttggaatgcttctcctgccttggctgtgcctgcagtgcagggggaagtgagtcctgggttggcacttgcccgacgtgatggcgttactcaactggacgaacgtgaaataaagagggagaggcgaaaacaatctaacagggagtctgcaaggagatctagattacgcaagcagcaagagtgcgaggagttagcccggaaggtagctgacctaacgaccgagaacagcgctctcagagcagaacttgacaacctcaagaaggcttgtcaagacatggaagcagaaaattcacgtctgttgggtggggtggctgacgcccaggtaccaagtgtcacgaccacactgggaatgagcatcgagccgccgaagttgcagctgcagctgcagcagcatcatgatgaggagggccagctccacaagaaatctagtaataacagcaatgggaactgtgctggaggcagccacaaaccggaggctaacactactaggtgagatacagaggtggatgaggaagtgacaaagatgagatgagatgaggtgtttcttatctaaccacaacacccatcatcggtcagtgtgtgtgttttttcttagcgaagctgtcgttttagtcctcgcagcccgctggggccatgtagagtcgcccccactgcagccatgtattatttatggctcgtcgcggtgtgctttgtgtttttttgtgtgttgtgtaaaaactattgatgtaacaaaacctagagagcctagaggttttttttatgtctgctaactcctgacgagggatgtaatgtaaccggccaatttgttgcctgatcgttcgttagatgaaatgctagcaaatgtcactcgatagccttgcctgcctcgctttgctgtttatacgggttattgaaagtctggtggtgtttttatggtgtttttcatgttgtggcttgtagta

SEQ ID NO: 64929 - DNA, 1807 bp, Zea Mays
ctgaaccctaacaaagcaggcgcctttttgctcctccctcccttccacgcaagcgactgctgctgcttccccacaccccccggtaggctcaccgccggcgacgagcacgcgtcccaccacacccaaacccaccgccaccggtgctcgctccgcccaggaccagcgggggagcctccagatctcggcgcgccgcgcaggccagcatggcgtcgtcctccgacgagcagtccaagccgccggagccgcccgccgccgccgccgtggtcaccgccgcagcaccgccacagacgcacgccgagtgggtcgcttcgcttcaggcctactacgctgccgcggggcacccctacgcctggccggcgcagcacctcatggcggcggctgcggcgggggcgcacttcggcacgccggtgccgttccccgtctaccacccaggcgccgccgcggcgtactacgcgcacgcatccatggccgcgggcgtcccttacccgacgtgcgaagctgtccccgcggtggcgctgcccactgtgccggaagggaaagggaagggtaagggcggaggcgcgtcgcctgagaaaggcagctccggggcgccctccggcgaggacgcttctaggagcgatgacagcggcagcgatgagtcatcggagactagagatgatgacactgaccataaggattcatctgcgcccaagaagaggaaatctggtaacacatcggctgaaggtgagccgtctcaagctactgttgtgcgatatgctgcggttgagtcaccatatcccgcaaaaggaaggtctgcctcaaagcttccagtgtctgcacctgggcgtgcagcgcttcctagtgccaccccgaatctaaacattgggatggacatttggaatgcttctcctgccttggctgtgcctgcagtgcagggggaagtgagtcctgggttggcacttgcccgacgtgatggcgttactcaactgttccttatttcttcaggacgaacgtgaaataaagagggagaggcgaaaacaatctaacagggagtctgcaaggagatctagattacgcaagcagcaagagtgcgaggagttagcccggaaggtagctgacctaacgaccgagaacagcgctctcagagcagaacttgacaacctcaagaaggcttgtcaagacatggaagcagaaaattcacgtctgttggtaccaagtgtcacgaccacactgggaatgagcatcgagccgccgaagttgcagctgcagctgcagcagcatcatgatgaggagggccagctccacaagaaatctagtaataacagcaatgggaactgtgctggaggcagccacaaaccggaggctaacactactaggtgagatacagaggtggatgaggaagtgacaaagatgagatgagatgaggtgtttcttatctaaccacaacacccatcatcggtcagtgtgtgtgttttttcttagcgaagctgtcgttttagtcctcgcagcccgctggggccatgtagagtcgcccccactgcagccatgtattatttatggctcgtcgcggtgtgctttgtgtttttttgtgtgttgtgtaaaaactattgatgtaacaaaacctagagagcctagaggttttttttatgtctgctaactcctgacgagggatgtaatgtaaccggccaatttgttgcctgatcgttcgttagatgaaatgctagcaaatgtcactcgatagccttgcctgcctcgctttgctgtttatacgggttattgaaagtctggtggtgtttttatggtgtttttcatgttgtggcttgtagta

SEQ ID NO: 64930 - DNA, 1787 bp, Zea Mays
ctgaaccctaacaaagcaggcgcctttttgctcctccctcccttccacgcaagcgactgctgctgcttccccacaccccccggtaggctcaccgccggcgacgagcacgcgtcccaccacacccaaacccaccgccaccggtgctcgctccgcccaggaccagcgggggagcctccagatctcggcgcgccgcgcaggccagcatggcgtcgtcctccgacgagcagtccaagccgccggagccgcccgccgccgccgccgtggtcaccgccgcagcaccgccacagacgcacgccgagtgggtcgcttcgcttcaggcctactacgctgccgcggggcacccctacgcctggccggcgcagcacctcatggcggcggctgcggcgggggcgcacttcggcacgccggtgccgttccccgtctaccacccaggcgccgccgcggcgtactacgcgcacgcatccatggccgcgggcgtcccttacccgacgtgcgaagctgtccccgcggtggcgctgcccactgtgccggaagggaaagggaagggtaagggcggaggcgcgtcgcctgagaaaggcagctccggggcgccctccggcgaggacgcttctaggagcgatgacagcggcagcgatgagtcatcggagactagagatgatgacactgaccataaggattcatctgcgcccaagaagaggaaatctggtaacacatcggctgaaggtgagccgtctcaagctactgttgtgcgatatgctgcggttgagtcaccatatcccgcaaaaggaaggtctgcctcaaagcttccagtgtctgcacctgggcgtgcagcgcttcctagtgccaccccgaatctaaacattgggatggacatttggaatgcttctcctgccttggctgtgcctgcagtgcagggggaagtgagtcctgggttggcacttgcccgacgtgatggcgttactcaactggacgaacgtgaaataaagagggagaggcgaaaacaatctaacagggagtctgcaaggagatctagattacgcaagcagagtgcgaggagttagcccggaaggtagctgacctaacgaccgagaacagcgctctcagagcagaacttgacaacctcaagaaggcttgtcaagacatggaagcagaaaattcacgtctgttggtaccaagtgtcacgaccacactgggaatgagcatcgagccgccgaagttgcagctgcagctgcagcagcatcatgatgaggagggccagctccacaagaaatctagtaataacagcaatgggaactgtgctggaggcagccacaaaccggaggctaacactactaggtgagatacagaggtggatgaggaagtgacaaagatgagatgagatgaggtgtttcttatctaaccacaacacccatcatcggtcagtgtgtgtgttttttcttagcgaagctgtcgttttagtcctcgcagcccgctggggccatgtagagtcgcccccactgcagccatgtattatttatggctcgtcgcggtgtgctttgtgtttttttgtgtgttgtgtaaaaactattgatgtaacaaaacctagagagcctagaggttttttttatgtctgctaactcctgacgagggatgtaatgtaaccggccaatttgttgcctgatcgttcgttagatgaaatgctagcaaatgtcactcgatagccttgcctgcctcgctttgctgtttatacgggttattgaaagtctggtggtgtttttatggtgtttttcatgttgtggcttgtagta

SEQ ID NO: 64931 - DNA, 2233 bp, Zea Mays
gatcttaaggagtcccttggtccaagggtaggacctctagataaccatggtccacaattgatgggaccgcctcctcaatttcaacctctaccatctcattctcatatcatgcaggatgaggacatagataggcctcttctttctgaaaatcagagcgatcactctagacagaatattagttttcttggaagttctgtaggagaaccttcgaagattcaaacaaataggagtaacacttcgcctagaagtcatgcaattgctgatacagggaggatttatcctgctgaatgttgtgttacacaaggagaaactcatgtaatcaatgttgaaaatgatacttctgaagagttccaattaggaagcacactaagacgtacaccgccaccaaaatggccaacacctgaccagaagcacagaagaagggtttctggagatgacaatcataatggaagtgttcctttgaaggataatacatatcatagccgcctggatttagaggttatagctggtccatctcatggaataagctgttctcggcagtcaagtagaccttctatgctcccaataactcttggaagggttcccccaagtgatttagtgttgaaggactctgaagtatcagggaaacatgctcagataaactggaatggaaagacattaaaatgggaacttgtggacatgggcagcttgaatggaactttcttgaactcccaggcggttcaccatccaagtgctgggtctaggcattggggtgaacctgctgaacttgcacatggtgatattataactctagggacttcatctaaactgtctgttcaaattttactgcaaaatcaacgagttcctgctggtgttggtatggcatccgatccaatggtggcacgtagaagtggaaagaaacttccaatggaagacataagcttttgccagtgtcctctgcagggtgttgaacattttgggctctttggaatttttgatggacacggtggggatggagctgctaaagctgtcagcaagattcttccagaacatctgggatacattttatctcatcctgaaacaaaagaacgagtgcaatcatattctgatgcttctgatgttcttagatatgcttttactttgacagaagacacaattgatcatcagtacgagggatgtacaggcacagcacttcttatttggtttgaccagaataaagattgttttgcccagtgcgctaatcttggtgactctgcatgcgtcatgagtgtcaacggcaagacgatcgatatgactgaagatcaccgggtaactagcgcgaccgaaagagctaggatagcaagaactgggcagcccctgagagacggtgaagctcgtcttagcggactaaatcttgctaggatgtttggtgacaagtttctcaaggagcaggacccgcgcttcagctcagaaccatacgtgagccaagccgttcgcatcaccaaagcgtgcacagccttcgccgtcattgctagcgacgggctctgggacgtcatcagcacgaaaagggcggtacagcttgtcgtcgagggaaaggagaggaggagctccggcgacgccacctcagcggcggccagagtagccagccgtgtgctggacgaagctcggagtctgcgaaccaaggacaacacatccgtaatattcgtagattttgacgtcctgagaagggatccctgtatctcgccagttgattgacatggcagattccggagactgcagcttcccatggatcgtcgtcttcctggctgctctattatatagctcccaagttttgttgtgttttcagtgagatgatgtggtgtaggaggcagagtgcgtgcataccgtgtaatctggtgcatgccttttagagtctcctctctctctctctctctctctctctctctctctctctctctctctctctctgtcaccctagttgatgaaccgatgatcacccatcatccaggaatggcttaacaaatctccattaactgtgaagtcattcgccatttttgttaatccgtttgcgcgtccagtttgaagtccaagggacgagatggaggcaagagaaagttgcttgctggtttcagtttgtgcacagatctgggatcagaaggcaccggctgcctgcctgacggaaatgggatgctgtggagactggcaatgtatcccaggatggaaggatgagggtggaagcagtgcagccccagaattcaggaaaaacagcaagtgg

SEQ ID NO: 64932 - DNA, 2615 bp, Zea Mays
gacgattagggccgattagtcgctcgattagccagttctgggcgactaggtttaggacctagatttttttatttcctggcttcgtgggcttttttggcgggcggcccgactacaggcagttgaaacgccagccgtctctactgaagatggaacgccagccggcagccgcctcttctgtcttctctttatttccctaattccctacctgctctggcggctcttcttgagttcttgttctggaaattggaatccaggcttccaaagtccactgatccactccagacttccaatccagcacgcgcgaatccattccaatcccgagttccagcacgcgcgaatccagttcttccaacttccaagttctggactttaccgacggactccagacttcaccgacggactccagaaatccagattaataactagtatctctgttgtttctctgctgtatctggtatctggtactggtatcttggacttgtagtattaataactagatgaggacatagataggcctcttctttctgaaaatcagagcgatcactctagacagaatattagttttcttggaagttctgtaggagaaccttcgaagattcaaacaaataggagtaacacttcgcctagaagtcatgcaattgctgatacagggaggatttatcctgctgaatgttgtgttacacaaggagaaactcatgtaatcaatgttgaaaatgatacttctgaagagttccaattaggaagcacactaagacgtacaccgccaccaaaatggccaacacctgaccagaagcacagaagaagggtttctggagatgacaatcataatggaagtgttcctttgaaggataatacatatcatagccgcctggatttagaggttatagctggtccatctcatggaataagctgttctcggcagtcaagtagaccttctatgctcccaataactcttggaagggttcccccaagtgatttagtgttgaaggactctgaagtatcagggaaacatgctcagataaactggaatggaaagacattaaaatgggaacttgtggacatgggcagcttgaatggaactttcttgaactcccaggcggttcaccatccaagtgctgggtctaggcattggggtgaacctgctgaacttgcacatggtgatattataactctagggacttcatctaaactgtctgttcaaattttactgcaaaatcaacgagttcctgctggtgttggtatggcatccgatccaatggtggcacgtagaagtggaaagaaacttccaatggaagacataagcttttgccagtgtcctctgcagggtgttgaacattttgggctctttggaatttttgatggacacggtggggatggagctgctaaagctgtcagcaagattcttccagaacatctgggatacattttatctcatcctgaaacaaaagaacgagtgcaatcatattctgatgcttctgatgttcttagatatgcttttactttgacagaagacacaattgatcatcagtacgagggatgtacaggcacagcacttcttatttggtttgaccagaataaagattgttttgcccagtgcgctaatcttggtgactctgcatgcgtcatgagtgtcaacggcaagacgatcgatatgactgaagatcaccgggtaactagcgcgaccgaaagagctaggatagcaagaactgggcagcccctgagagacggtgaagctcgtcttagcggactaaatcttgctaggatgtttggtgacaagtttctcaaggagcaggacccgcgcttcagctcagaaccatacgtgagccaagccgttcgcatcaccaaagcgtgcacagccttcgccgtcattgctagcgacgggctctgggacgtcatcagcacgaaaagggcggtacagcttgtcgtcgagggaaaggagaggaggagctccggcgacgccacctcagcggcggccagagtagccagccgtgtgctggacgaagctcggagtctgcgaaccaaggacaacacatccgtaatattcgtagattttgacgtcctgagaagggatccctgtatctcgccagttgattgacatggcagattccggagactgcagcttcccatggatcgtcgtcttcctggctgctctattatatagctcccaagttttgttgtgttttcagtgagatgatgtggtgtaggaggcagagtgcgtgcataccgtgtaatctggtgcatgccttttagagtctcctctctctctctctctctctctctctctctctctctctctctctctctctctgtcaccctagttgatgaaccgatgatcacccatcatccaggaatggcttaacaaatctccattaactgtgaagtcattcgccatttttgttaatccgtttgcgcgtccagtttgaagtccaagggacgagatggaggcaagagaaagttgcttgctggtttcagtttgtgcacagatctgggatcagaaggcaccggctgcctgcctgacggaaatgggatgctgtggagactggcaatgtatcccaggatggaaggatgagggtggaagcagtgcagccccagaattcaggaaaaacagcaagtgg

SEQ ID NO: 64933 - DNA, 2435 bp, Zea Mays
gtcttctctttatttccctaattccctacctgctctggcggctcttcttgagttcttgttctggaaattggaatccaggcttccaaagtccactgatccactccagacttccaatccagcacgcgcgaatccattccaatcccgagttccagcacgcgcgaatccagttcttccaacttccaagttctggactttaccgacggactccagacttcaccgacggactccagaaatccagattaataactagtatctctgttgtttctctgctgtatctggtatctggtactggtatcttggacttgtagtattaataactagatgaggacatagataggcctcttctttctgaaaatcagagcgatcactctagacagaatattagttttcttggaagttctgtaggagaaccttcgaagattcaaacaaataggagtaacacttcgcctagaagtcatgcaattgctgatacagggaggatttatcctgctgaatgttgtgttacacaaggagaaactcatgtaatcaatgttgaaaatgatacttctgaagagttccaattaggaagcacactaagacgtacaccgccaccaaaatggccaacacctgaccagaagcacagaagaagggtttctggagatgacaatcataatggaagtgttcctttgaaggataatacatatcatagccgcctggatttagaggttatagctggtccatctcatggaataagctgttctcggcagtcaagtagaccttctatgctcccaataactcttggaagggttcccccaagtgatttagtgttgaaggactctgaagtatcagggaaacatgctcagataaactggaatggaaagacattaaaatgggaacttgtggacatgggcagcttgaatggaactttcttgaactcccaggcggttcaccatccaagtgctgggtctaggcattggggtgaacctgctgaacttgcacatggtgatattataactctagggacttcatctaaactgttcaaattttactgcaaaatcaacgagttcctgctggtgttggtatggcatccgatccaatggtggcacgtagaagtggaaagaaacttccaatggaagacataagcttttgccagtgtcctctgcagggtgttgaacattttgggctctttggaatttttgatggacacggtggggatggagctgctaaagctgtcagcaagattcttccagaacatctgggatacattttatctcatcctgaaacaaaagaacgagtgcaatcatattctgatgcttctgatgttcttagatatgcttttactttgacagaagacacaattgatcatcagtacgagggatgtacaggcacagcacttcttatttggtttgaccagaataaagattgttttgcccagtgcgctaatcttggtgactctgcatgcgtcatgagtgtcaacggcaagacgatcgatatgactgaagatcaccgggtaactagcgcgaccgaaagagctaggatagcaagaactgggcagcccctgagagacggtgaagctcgtcttagcggactaaatcttgctaggatgtttggtgacaagtttctcaaggagcaggacccgcgcttcagctcagaaccatacgtgagccaagccgttcgcatcaccaaagcgtgcacagccttcgccgtcattgctagcgacgggctctgggacgtcatcagcacgaaaagggcggtacagcttgtcgtcgagggaaaggagaggaggagctccggcgacgccacctcagcggcggccagagtagccagccgtgtgctggacgaagctcggagtctgcgaaccaaggacaacacatccgtaatattcgtagattttgacgtcctgagaagggatccctgtatctcgccagttgattgacatggcagattccggagactgcagcttcccatggatcgtcgtcttcctggctgctctattatatagctcccaagttttgttgtgttttcagtgagatgatgtggtgtaggaggcagagtgcgtgcataccgtgtaatctggtgcatgccttttagagtctcctctctctctctctctctctctctctctctctctctctctctctctctctctgtcaccctagttgatgaaccgatgatcacccatcatccaggaatggcttaacaaatctccattaactgtgaagtcattcgccatttttgttaatccgtttgcgcgtccagtttgaagtccaagggacgagatggaggcaagagaaagttgcttgctggtttcagtttgtgcacagatctgggatcagaaggcaccggctgcctgcctgacggaaatgggatgctgtggagactggcaatgtatcccaggatggaaggatgagggtggaagcagtgcagccccagaattcaggaaaaacagcaagtgg

SEQ ID NO: 64934 - DNA, 2021 bp, Zea Mays
tgtttctctgctgtatctggtatctggtactggtatcttggacttgtagtattaataactagatgaggacatagataggcctcttctttctgaaaatcagagcgatcactctagacagaatattagttttcttggaagttctgtaggagaaccttcgaagattcaaacaaataggagtaacacttcgcctagaagtcatgcaattgctgatacagggaggatttatcctgctgaatgttgtgttacacaaggagaaactcatgtaatcaatgttgaaaatgatacttctgaagagttccaattaggaagcacactaagacgtacaccgccaccaaaatggccaacacctgaccagaagcacagaagaagggtttctggagatgacaatcataatggaagtgttcctttgaaggataatacatatcatagccgcctggatttagaggttatagctggtccatctcatggaataagctgttctcggcagtcaagtagaccttctatgctcccaataactcttggaagggttcccccaagtgatttagtgttgaaggactctgaagtatcagggaaacatgctcagataaactggaatggaaaggttcaaattttactgcaaaatcaacgagttcctgctggtgttggtatggcatccgatccaatggtggcacgtagaagtggaaagaaacttccaatggaagacataagcttttgccagtgtcctctgcagggtgttgaacattttgggctctttggaatttttgatggacacggtggggatggagctgctaaagctgtcagcaagattcttccagaacatctgggatacattttatctcatcctgaaacaaaagaacgagtgcaatcatattctgatgcttctgatgttcttagatatgcttttactttgacagaagacacaattgatcatcagtacgagggatgtacaggcacagcacttcttatttggtttgaccagaataaagattgttttgcccagtgcgctaatcttggtgactctgcatgcgtcatgagtgtcaacggcaagacgatcgatatgactgaagatcaccgggtaactagcgcgaccgaaagagctaggatagcaagaactgggcagcccctgagagacggtgaagctcgtcttagcggactaaatcttgctaggatgtttggtgacaagtttctcaaggagcaggacccgcgcttcagctcagaaccatacgtgagccaagccgttcgcatcaccaaagcgtgcacagccttcgccgtcattgctagcgacgggctctgggacgtcatcagcacgaaaagggcggtacagcttgtcgtcgagggaaaggagaggaggagctccggcgacgccacctcagcggcggccagagtagccagccgtgtgctggacgaagctcggagtctgcgaaccaaggacaacacatccgtaatattcgtagattttgacgtcctgagaagggatccctgtatctcgccagttgattgacatggcagattccggagactgcagcttcccatggatcgtcgtcttcctggctgctctattatatagctcccaagttttgttgtgttttcagtgagatgatgtggtgtaggaggcagagtgcgtgcataccgtgtaatctggtgcatgccttttagagtctcctctctctctctctctctctctctctctctctctctctctctctctctctctgtcaccctagttgatgaaccgatgatcacccatcatccaggaatggcttaacaaatctccattaactgtgaagtcattcgccatttttgttaatccgtttgcgcgtccagtttgaagtccaagggacgagatggaggcaagagaaagttgcttgctggtttcagtttgtgcacagatctgggatcagaaggcaccggctgcctgcctgacggaaatgggatgctgtggagactggcaatgtatcccaggatggaaggatgagggtggaagcagtgcagccccagaattcaggaaaaacagcaagtgg

SEQ ID NO: 64935 - DNA, 2167 bp, Zea Mays
atctggtactggtatcttggacttgtagtattaataactagatgaggacatagataggcctcttctttctgaaaatcagagcgatcactctagacagaatattagttttcttggaagttctgtaggagaaccttcgaagattcaaacaaataggagtaacacttcgcctagaagtcatgcaattgctgatacagggaggatttatcctgctgaatgttgtgttacacaaggagaaactcatgtaatcaatgttgaaaatgatacttctgaagagttccaattaggaagcacactaagacgtacaccgccaccaaaatggccaacacctgaccagaagcacagaagaagggtttctggagatgacaatcataatggaagtgttcctttgaaggataatacatatcaagtgcagatagccgcctggatttagaggttatagctggtccatctcatggaataagctgttctcggcagtcaagtagaccttctatgctcccaataactcttggaagggttcccccaagtgatttagtgttgaaggactctgaagtatcagggaaacatgctcagataaactggaatggaaagacattaaaatgggaacttgtggacatgggcagcttgaatggaactttcttgaactcccaggcggttcaccatccaagtgctgggtctaggcattggggtgaacctgctgaacttgcacatggtgatattataactctagggacttcatctaaactgtctgttcaaattttactgcaaaatcaacgagttcctgctggtgttggtatggcatccgatccaatggtggcacgtagaagtggaaagaaacttccaatggaagacataagcttttgccagtgtcctctgcagggtgttgaacattttgggctctttggaatttttgatggacacggtggggatggagctgctaaagctgtcagcaagattcttccagaacatctgggatacattttatctcatcctgaaacaaaagaacgagtgcaatcatattctgatgcttctgatgttcttagatatgcttttactttgacagaagacacaattgatcatcagtacgagggatgtacaggcacagcacttcttatttggtttgaccagaataaagattgttttgcccagtgcgctaatcttggtgactctgcatgcgtcatgagtgtcaacggcaagacgatcgatatgactgaagatcaccgggtaactagcgcgaccgaaagagctaggatagcaagaactgggcagcccctgagagacggtgaagctcgtcttagcggactaaatcttgctaggatgtttggtgacaagtttctcaaggagcaggacccgcgcttcagctcagaaccatacgtgagccaagccgttcgcatcaccaaagcgtgcacagccttcgccgtcattgctagcgacgggctctgggacgtcatcagcacgaaaagggcggtacagcttgtcgtcgagggaaaggagaggaggagctccggcgacgccacctcagcggcggccagagtagccagccgtgtgctggacgaagctcggagtctgcgaaccaaggacaacacatccgtaatattcgtagattttgacgtcctgagaagggatccctgtatctcgccagttgattgacatggcagattccggagactgcagcttcccatggatcgtcgtcttcctggctgctctattatatagctcccaagttttgttgtgttttcagtgagatgatgtggtgtaggaggcagagtgcgtgcataccgtgtaatctggtgcatgccttttagagtctcctctctctctctctctctctctctctctctctctctctctctctctctctctgtcaccctagttgatgaaccgatgatcacccatcatccaggaatggcttaacaaatctccattaactgtgaagtcattcgccatttttgttaatccgtttgcgcgtccagtttgaagtccaagggacgagatggaggcaagagaaagttgcttgctggtttcagtttgtgcacagatctgggatcagaaggcaccggctgcctgcctgacggaaatgggatgctgtggagactggcaatgtatcccaggatggaaggatgagggtggaagcagtgcagccccagaattcaggaaaaacagcaagtgg

SEQ ID NO: 64936 - DNA, 3722 bp, Zea Mays
cgatttggtacggtgcatgagttggcggcgcgcgctccttcccctcccatcccctcccctcctcaaagcccagccaccaccaccagtcagtcaacgcgttgtacattgccctcctttccctcctcaaagcctcagacgaccctcaccaactcgctcacgcgctcgatcactgaagcagcacacagcacagcagcagcagcagcaggcagccatcccagccatggcggccggcggcagcggaggcgaggccgcgcagaaggcgctgcagtcggtggcgcagagcacggggtggacgtacagcctcctctggcgcctctgcccgcgccaaggcgcgctggtctgggcggagggctactacaacggcgccatcaggacgcgcaagacgacgatgacgacagtgcgtcagccggcgggcgcggaggacgccggggacgaggagacggcgctgcgccgcagccggcagctcaaggagctctacgactcgctggcggcgggggaggccgcttacgacggtggtggaggagtcggcgacccacagcagcagcaccagcagcaggtggcggtggtgccgccgcctcgccggcccgtcgccgcgctggcgcccgaggacctgacggagacggagtggttctacctcatgtgcgcctcctactgcttccctcctgccgtcgggtaaaccggctatagcctatatacatacatgctttgctttgcatgctacctcacgtatctacagaatgaagcacagcacagcacagcacagggaacgaacgatcgagctcaaggtctccacgtgtgatgatgaaccaaatgttcgttccttctaataagcaccgcatgtaccaacgatcctctaaatattgaccctgtttgtttgggcaatttttagtttttggcaataaaaagctgccgcggattagcaaacgtcccagcttttcagtctgtttctataaaaatcgctaaaaaccattcaaaatcaacataaatacataatcgatcgagtcgtcacgataaattccatcgctatctagatcttgaaccctttgaaccatttcattttcctccgcacgtaatcccacgatactcagatctttcccacagccagattctctctacaaccagattctcaaaaaaactgatcagaaaaaactgaaccaaacaaacccattattgtccttgctggcgagctaaatcttaccagtaaactattatacaaaaaggccatcatagaaaattaccggaacacatgtttttttggcgacattattgttttttcttaccagtaaactcctaagataattattatttccaccttttttgagctattatatatacgtacatgacattcaaaaacagttgtcccgtcctattttatttactctaatgtctcttcatattactatagagcccgtttcttagtttgacattatcatatatcgtctaattcgttattcgcatcgtcttatcctgaaccaccgcgtgcaattgactttgtgcgagcttctatttggttgtctatacgcgagagacacgggttgcatatgtggatgcaaaacaagatattttaaggctatttagttgcatccactcatactgccaaaattggcgtacctagccgaccaggctcgcatccgcctggtttgttgtgctcaaccatccaatcagccggatagctgatgcagcatgcatcaatgaattatcgaatgtcaaagcacaaacatttaatttcatataacaaacagataatgttctttttttcgttgttgtaacaagagagaagcttccatgtataagtcatatacatgtgtagtgcttccacgtttcaggttgcccggggaggcgtttgtaaggagagctcatgtgtggctatgtggtgcaaacaaagctgacagcaaggtgttctcaagagcaattctcgctaggacagtagcatgcattccagtcgacgatggtgtcctggaaattggaactacagaaaaggtagaagaagacattttcttaattcaacatgttaggaacatcttcgtggatcaacatggcgcccacataatgcctaccaccctctcagggtattcaacttccaccccaaccacacagcttaatcatcagccattccagacaaaaacaggaatcagtctcaatctaggagacgagcataatagtgaaatggaagatgatgacgacggcaggattgatttagagaacaatactgaaaatgattcaacaaggcggcatttgccacaggacgccagtgtaggcaatgagctggaaacgctcaatgcagagagcagtgggccgatgctgattgctaatctgacagcgcaggatgaatattgtccgttgcatcgttttcacagtgaagacctaagcagtaaatacctacagtcatcaggggcagaagatcaagcagcagtagcggaaaacgcacactacatcaaaacggtccttacaatcctacggttcaacgcgtgccggcaaacgcaagcaggcctcctcaaacatcgccaaaacctacctggcactctccaagaactcgccattctcaaaatggaactggaagcgcaaaggaataagcagcatgttgatccctgagggcacccagcagaggatgctcaagagcgtcctgctcggtgctcctagcagcagcagtcaccggacgtcgtcctcagcacctgagacgaggggtgacgatggcgaaggcacgagccggtctcggagaggtccggtgccgtcccagacagagctgagcgccagccatgtcctcaaggagcggcggcggagggagaagctcaacgaagggttcgccatgctccggtccttggtgccgttcgtcacaaagatggacagggcgtcgatcctgggcgacacgatcgagtacgtgaagcagctacggaggcgtatccaggagctggagtcacgagctcggctggttggcagcaaccagaagacgacgatggcgcagccgccgccgcctgcagcctcaacggaggagagaggtcgtcgtcaaaccagcggcggttacctcgctcgcgcaggtacatgcagcagagcagcggaggcgagcggcaacagcaacctcggggaggagcctccggcggcggcggcgagcgacaccgacacggaggtgcaggtgtccatcatcgggagcgacgcgctgctggagctccggtgcccgcacagggaagggctcctgctccgggtcatgcaggcgttgcaccaggagctccggctggagatcacctacgtccaggcctcctcagctggcgacgtgctacttgcaaagctgcgtgcaaaggtgaaggaggtgcatggcaggagaagcagcaccactgaagtgaagagagcaattcacctcatcgtttcatcagactggaactggatatgcgagaagaatccatgtgtagcatagtattaaatacatatacagactatatgggccggcccaaatttacacacatacatcttaacattttgctaaaaaaaacatatagcccaacactccccatcatatatctatcgttctcatcttgctgcatgctatattacactatttactgctgaatccttggcaaaataatccgctatttgatatcttttgatttaacgtgactctactgaagagtgaagaccatcatttatcttaacaaaggagcgatcaatctccacgtattatgttgatagcctatttgttataacacaaaaacttaaatggtacttttctt

SEQ ID NO: 64937 - DNA, 2847 bp, Zea Mays
ctcaaagcctcagacgaccctcaccaactcgctcacgcgctcgatcactgaagcagcacacagcacagcagcagcagcagcaggcagccatcccagccatggcggccggcggcagcggaggcgaggccgcgcagaaggcgctgcagtcggtggcgcagagcacggggtggacgtacagcctcctctggcgcctctgcccgcgccaaggcgcgctggtctgggcggagggctactacaacggcgccatcaggacgcgcaagacgacgatgacgacagtgcgtcagccggcgggcgcggaggacgccggggacgaggagacggcgctgcgccgcagccggcagctcaaggagctctacgactcgctggcggcgggggaggccgcttacgacggtggtggaggagtcggcgacccacagcagcagcaccagcagcaggtggcggtggtgccgccgcctcgccggcccgtcgccgcgctggcgcccgaggacctgacggagacggagtggttctacctcatgtgcgcctcctactgcttccctcctgccgtcgggttgcccggggaggcgtttgtaaggagagctcatgtgtggctatgtggtgcaaacaaagctgacagcaaggtgttctcaagagcaattctcgctaggacagtagcatgcattccagtcgacgatggtgtcctggaaattggaactacagaaaaggtagaagaagacattttcttaattcaacatgttaggaacatcttcgtggatcaacatggcgcccacataatgcctaccaccctctcagggtattcaacttccaccccaaccacacagcttaatcatcagccattccagacaaaaacaggaatcagtctcaatctaggagacgagcataatagtgaaatggaagatgatgacgacggcaggattgatttagagaacaatactgaaaatgattcaacaaggcggcatttgccacaggacgccagtgtaggcaatgagctggaaacgctcaatgcagagagcagtgggccgatgctgattgctaatctgacagcgcaggatgaatattgtccgttgcatcgttttcacagtgaagacctaagcagtaaatacctacagtcatcaggggcagaagatcaagcagcagtagcggaaaacgcacactacatcaaaacggtccttacaatcctacggttcaacgcgtgccggcaaacgcaagcaggcctcctcaaacatcgccaaaacctacctggcactctccaagaactcgccattctcaaaatggaactggaagcgcaaaggaataagcagcatgttgatccctgagggcacccagcagaggatgctcaagagcgtcctgctcggtgctcctagcagcagcagtcaccggacgtcgtcctcagcacctgagacgaggggtgacgatggcgaaggcacgagccggtctcggagaggtccggtgccgtcccagacagagctgagcgccagccatgtcctcaaggagcggcggcggagggagaagctcaacgaagggttcgccatgctccggtccttggtgccgttcgtcacaaaggtgcgtgtgcgtgcgtcgtatttaaatgcaagacaaactcgtgtagcatctccaacaatgcctcaaactagtgtctcaaattgaaatatagggctccacacaggaaaaactactccaacagtgccccatttcataaaattttgtcaaaaaactataggtcactctctcaagtgactcaaatatactacaccgtagtgggctgccctgtaatatagatttgaactttactgttggagcggggtgttttattgatgccctaaattctataaaatatactcattttcaaattatatagcatttttataggtcaacttgttggagatgctctgacgggctaacagcagcctacatgctacagcaacagcaactcttttgttttgtctctcctattcgcaccgcagatggacagggcgtcgatcctgggcgacacgatcgagtacgtgaagcagctacggaggcgtatccaggagctggagtcacgagctcggctggttggcagcaaccagaagacgacgatggcgcagccgccgccgcctgcagcctcaacggaggagagaggtcgtcgtcaaaccagcggcggttacctcgctcgcgcaggtacatgcagcagagcagcggaggcgagcggcaacagcaacctcggggaggagcctccggcggcggcggcgagcgacaccgacacggaggtgcaggtgtccatcatcgggagcgacgcgctgctggagctccggtgcccgcacagggaagggctcctgctccgggtcatgcaggcgttgcaccaggagctccggctggagatcacctacgtccaggcctcctcagctggcgacgtgctacttgcaaagctgcgtgcaaaggtgaaggaggtgcatggcaggagaagcagcaccactgaagtgaagagagcaattcacctcatcgtttcatcagactggaactggatatgcgagaagaatccatgtgtagcatagtattaaatacatatacagactatatgggccggcccaaatttacacacatacatcttaacattttgctaaaaaaaacatatagcccaacactccccatcatatatctatcgttctcatcttgctgcatgctatattacactatttactgctgaatccttggcaaaataatccgctatttgatatcttttgatttaacgtgactctactgaagagtgaagaccatcatttatcttaacaaaggagcgatcaatctccacgtattatgttgatagcctatttgttataacacaaaaacttaaatggtacttttctt

SEQ ID NO: 64938 - DNA, 1851 bp, Zea Mays
gtggaacatcaaaaatgttggtggcaacaaatatcagagtgcaggtatacagacagtagcatgcattccagtcgacgatggtgtcctggaaattggaactacagaaaaggtagaagaagacattttcttaattcaacatgttaggaacatcttcgtggatcaacatggcgcccacataatgcctaccaccctctcagggtattcaacttccaccccaaccacacagcttaatcatcagccattccagacaaaaacaggaatcagtctcaatctaggagacgagcataatagtgaaatggaagatgatgacgacggcaggattgatttagagaacaatactgaaaatgattcaacaaggcggcatttgccacaggacgccagtgtaggcaatgagctggaaacgctcaatgcagagagcagtgggccgatgctgattgctaatctgacagcgcaggatgaatattgtccgttgcatcgttttcacagtgaagacctaagcagtaaatacctacagtcatcaggggcagaagatcaagcagcagtagcggaaaacgcacactacatcaaaacggtccttacaatcctacggttcaacgcgtgccggcaaacgcaagcaggcctcctcaaacatcgccaaaacctacctggcactctccaagaactcgccattctcaaaatggaactggaagcgcaaaggaataagcagcatgttgatccctgagggcacccagcagaggatgctcaagagcgtcctgctcggtgctcctagcagcagcagtcaccggacgtcgtcctcagcacctgagacgaggggtgacgatggcgaaggcacgagccggtctcggagaggtccggtgccgtcccagacagagctgagcgccagccatgtcctcaaggagcggcggcggagggagaagctcaacgaagggttcgccatgctccggtccttggtgccgttcgtcacaaagatggacagggcgtcgatcctgggcgacacgatcgagtacgtgaagcagctacggaggcgtatccaggagctggagtcacgagctcggctggttggcagcaaccagaagacgacgatggcgcagccgccgccgcctgcagcctcaacggaggagagaggtcgtcgtcaaaccagcggcggttacctcgctcgcgcaggtacatgcagcagagcagcggaggcgagcggcaacagcaacctcggggaggagcctccggcggcggcggcgagcgacaccgacacggaggtgcaggtgtccatcatcgggagcgacgcgctgctggagctccggtgcccgcacagggaagggctcctgctccgggtcatgcaggcgttgcaccaggagctccggctggagatcacctacgtccaggcctcctcagctggcgacgtgctacttgcaaagctgcgtgcaaaggtgaaggaggtgcatggcaggagaagcagcaccactgaagtgaagagagcaattcacctcatcgtttcatcagactggaactggatatgcgagaagaatccatgtgtagcatagtattaaatacatatacagactatatgggccggcccaaatttacacacatacatcttaacattttgctaaaaaaaacatatagcccaacactccccatcatatatctatcgttctcatcttgctgcatgctatattacactatttactgctgaatccttggcaaaataatccgctatttgatatcttttgatttaacgtgactctactgaagagtgaagaccatcatttatcttaacaaaggagcgatcaatctccacgtattatgttgatagcctatttgttataacacaaaaacttaaatggtacttttctt

SEQ ID NO: 64939 - DNA, 1637 bp, Zea Mays
ttgccctcctctctttcttcctccccgctccccaccccctcaaacccgaaaggaaccctaatcctagccgcacgcgggaggcagctaagagagcttgaagcaccagccatggcggaccacgacctcacggcgctgatggcggcgcagctggaccggcacctggtcttcccgctgctggagttcctccaggagcggcagctctactcgaggctcaggtcgctcgacgaggccgcagccccgctcgtcgccttcctccagaacccgcagctcgtgcaggagctcaggcccgacaaacagtacaacatccacatgctccaggagagataccagattggtcctgaccagattgaagctctgtatcagtatgccaaatttcagtttgagtgtggtaactactcctgggctgctgagtacctgtaccagtatcgtgctttgtgcacagatactgagcgaagtgtgagtgccctctggggaaagctagcagcagaaatcctaatgcagaactgggatgtggctttggaggaattcaaccgcttgaaggaaataattgattcaaagaacttctcatcacctctgaatcagctccagaacaggatatggctgatgcattgggctctgttcatcttctttaaccatgaaaatggtagaaatgggatcattgatctgttcttccaggacaggtacttgaatgctatacagacaaatgctcaccatcttctgagatacctagctactgcagttgttgttaacaaaaggagaaggaatatgcttaaagagttgattaaggtcattcagcaggagcagcatagctacaaggatcccataactgagtttctgcaatgcttatatgtcaactatgattttgatggtgctcaacagaaactcgtggagtgtgagcaggttatactgaatgatcctttcctgggcaagcgcgttgaagagggaaattttgtcactgttcctttgagagctgagttccttgaaaatgcccgactgtttattttcgagacatactgccgtatccatcggtgcattgatatcagcatgcttgctcagaggctgaacatgagctacgatgaggccgagttgtggataatgaacttggttaggagctcaaaactggatgcaaggatcgattcagtgtcaggaactcttatcatgacaaccaatcacatcaatgtgcatgagcagattatcgagagcatgaagggccttaacatgcggacgtacatgctcgcaaagaacatcgtggagccagctcagcaggcagctcggtaaggttagcggagtacagttttgaggcgccaacaactagtttagaggtagaggtctattgtgtggcagtgaattcgtcaccgggattgaacacatgggactgggaggtggcttgccgtttggtacagcttagtatgctgacattttcaatattttgtactcggaatttcgtaacagtttatccttctcaatgtatattactattaatgcctgtttggatcacattaattgaaacaaatatctagaaattgtttctcattttattattaggttacttttcaactcctgagaaccaatcagggcattaatgtaatgaatgatgatgctacaggatccttctcttctaggcattgtgttttctc

SEQ ID NO: 64940 - DNA, 1763 bp, Zea Mays
ttgccctcctctctttcttcctccccgctccccaccccctcaaacccgaaaggaaccctaatcctagccgcacgcgggaggcagctaagagagcttgaagcaccagccatggcggaccacgacctcacggcgctgatggcggcgcagctggaccggcacctggtcttcccgctgctggagttcctccaggagcggcagctctactcgaggccggagatcctggaggccaagatccgcctcctcagcggcaccaacatggtcgactacgccatggacatccacaagtccctccacggcaccgatgacgttcccgaggacatggtcaagcgccgctccgaggtcgtctccaggctcaggtcgctcgacgaggccgcagccccgctcgtcgccttcctccagaacccgcagctcgtgcaggagctcaggcccgacaaacagtacaacatccacatgctccaggagagataccagattgaagctctgtatcagtatgccaaatttcagtttgagtgtggtaactactcctgggctgctgagtacctgtaccagtatcgtgctttgtgcacagatactgagcgaagtgtgagtgccctctggggaaagctagcagcagaaatcctaatgcagaactgggatgtggctttggaggaattcaaccgcttgaaggaaataattgattcaaagaacttctcatcacctctgaatcagctccagaacaggatatggctgatgcattgggctctgttcatcttctttaaccatgaaaatggtagaaatgggatcattgatctgttcttccaggacaggtacttgaatgctatacagacaaatgctcaccatcttctgagatacctagctactgcagttgttgttaacaaaaggagaaggaatatgcttaaagagttgattaaggtcattcagcaggagcagcatagctacaaggatcccataactgagtttctgcaatgcttatatgtcaactatgattttgatggtgctcaacagaaactcgtggagtgtgagcaggttatactgaatgatcctttcctgggcaagcgcgttgaagagggaaattttgtcactgttcctttgagagctgagttccttgaaaatgcccgactgtttattttcgagacatactgccgtatccatcggtgcattgatatcagcatgcttgctcagaggctgaacatgagctacgatgaggccgagttgtggataatgaacttggttaggagctcaaaactggatgcaaggatcgattcagtgtcaggaactcttatcatgacaaccaatcacatcaatgtgcatgagcagattatcgagagcatgaagggccttaacatgcggacgtacatgctcgcaaagaacatcgtggagccagctcagcaggcagctcggtaaggttagcggagtacagttttgaggcgccaacaactagtttagaggtagaggtctattgtgtggcagtgaattcgtcaccgggattgaacacatgggactgggaggtggcttgccgtttggtacagcttagtatgctgacattttcaatattttgtactcggaatttcgtaacagtttatccttctcaatgtatattactattaatgcctgtttggatcacattaattgaaacaaatatctagaaattgtttctcattttattattaggttacttttcaactcctgagaaccaatcagggcattaatgtaatgaatgatgatgctacaggatccttctcttctaggcattgtgttttctc

SEQ ID NO: 64941 - DNA, 1550 bp, Zea Mays
ttgccctcctctctttcttcctccccgctccccaccccctcaaacccgaaaggaaccctaatcctagccgcacgcgggaggcagctaagagagcttgaagcaccagccatggcggaccacgacctcacggcgctgatggcggcgcagctggaccggcacctggtcttcccgctgctggagttcctccaggagcggcagcccgacaaacagtacaacatccacatgctccaggagagataccagattggtcctgaccagattgaagctctgtatcagtatgccaaatttcagtttgagtgtggtaactactcctgggctgctgagtacctgtaccagtatcgtgctttgtgcacagatactgagcgaagtgtgagtgccctctggggaaagctagcagcagaaatcctaatgcagaactgggatgtggctttggaggaattcaaccgcttgaaggaaataattgattcaaagaacttctcatcacctctgaatcagctccagaacaggatatggctgatgcattgggctctgttcatcttctttaaccatgaaaatggtagaaatgggatcattgatctgttcttccaggacaggtacttgaatgctatacagacaaatgctcaccatcttctgagatacctagctactgcagttgttgttaacaaaaggagaaggaatatgcttaaagagttgattaaggtcattcagcaggagcagcatagctacaaggatcccataactgagtttctgcaatgcttatatgtcaactatgattttgatggtgctcaacagaaactcgtggagtgtgagcaggttatactgaatgatcctttcctgggcaagcgcgttgaagagggaaattttgtcactgttcctttgagagctgagttccttgaaaatgcccgactgtttattttcgagacatactgccgtatccatcggtgcattgatatcagcatgcttgctcagaggctgaacatgagctacgatgaggccgagttgtggataatgaacttggttaggagctcaaaactggatgcaaggatcgattcagtgtcaggaactcttatcatgacaaccaatcacatcaatgtgcatgagcagattatcgagagcatgaagggccttaacatgcggacgtacatgctcgcaaagaacatcgtggagccagctcagcaggcagctcggtaaggttagcggagtacagttttgaggcgccaacaactagtttagaggtagaggtctattgtgtggcagtgaattcgtcaccgggattgaacacatgggactgggaggtggcttgccgtttggtacagcttagtatgctgacattttcaatattttgtactcggaatttcgtaacagtttatccttctcaatgtatattactattaatgcctgtttggatcacattaattgaaacaaatatctagaaattgtttctcattttattattaggttacttttcaactcctgagaaccaatcagggcattaatgtaatgaatgatgatgctacaggatccttctcttctaggcattgtgttttctc

SEQ ID NO: 64942 - DNA, 1595 bp, Zea Mays
ttgccctcctctctttcttcctccccgctccccaccccctcaaacccgaaaggaaccctaatcctagccgcacgcgggaggcagctaagagagcttgaagcaccagccatggcggaccacgacctcacggcgctgatggcggcgcagctggaccggcacctggtcttcccgctgctggagttcctccaggagcggcagctctactcgaggccggagatcctggaggccaagatccgcctcctcagcggcaccaacatggtcgactacgccatggacatccacaagtccctccacggcaccgatgacgttcccgaggacatggtcaagcgccgctccgaggtcgtctccaggctcaggtcgctcgacgaggccgcagccccgctcgtcgccttcctccagaacccgcagctcgtgcaggagctcaggcccgacaaacagtacaacatccacatgctccaggagagataccagattggtcctgaccagattgaagctctgtatcagtatgccaaatttcagtttgagtgtggtaactactcctgggctgctgagtacctgtaccagtatcgtgctttgtgcacagatactgagcgaagtgtgagtgccctctggggaaagctagcagcagaaatcctaatgcagaactgggatgtggctttggaggaattcaaccgcttgaaggaaataattgattcaaagaacttctcatcacctctgaatcagctccagaacaggatatggctgatgcattgggctctgttcatcttctttaaccatgaaaatggtagaaatgggatcattgatctgttcttccaggacaggtacttgaatgctatacagacaaatgctcaccatcttctgagatacctagctactgcagttgttgttaacaaaaggagaaggaatatgcttaaagagttgattaaggtcattcagcaggagcagcatagctacaaggatcccataactgagtttctgcaatgcttatatgtcaactatgattttgatggtgctcaacagaaactcgtggagtgtgagcaggttatactgaatgatcctttcctgggcaagcgcgttgaagagggaaattttgtcactgttcctttgagagctgagttccttgaaaatgcccgactgtttattttcgagacatactgccgtatccatcggtgcattgatatcagcatgcttgctcagaggctgaacatgagctacgatgaggccgagttgtggataatgaacttggttaggagctcaaaactggatgcaaggatcgattcagtgtcaggaactcttatcatgacaaccaatcacatcaatgtgcatgagcagattatcgagagcatgaagggccttaacatgcggacgtacatgctcgcaaagaacatcgtggagccagctcagcaggcagctcggtaaggttagcggagtacagttttgaggcgccaacaactagtttagaggtggcttgccgtttggtacagcttagtatgctgacattttcaatattttgtactcggaatttcgtaacagtttatccttctcaatgtatattattactattaatgcctgtttggatcacattaattgaaaca

SEQ ID NO: 64943 - DNA, 1057 bp, Zea Mays
agctccagaacaggatatggctgatgcattgggctctgttcatcttctttaaccatgaaaatggtagaaatgggatcattgatctgttcttccaggacaggtacttgaatgctatacagacaaatgctcaccatcttctgagatacctagctactgcagttgttgttaacaaaaggagaaggaatatgcttaaagagttgattaaggtcattcagcaggagcagcatagctacaaggatcccataactgagtttctgcaatgcttatatgtcaactatgattttgatggtgctcaacagaaactcgtggagtgtgagcaggttatactgaatgatcctttcctgggcaagcgcgttgaagagggaaattttgtcactgttcctttgagagctgagttccttgaaaatgcccgactgtttattttcgagacatactgccgtatccatcggtgcattgatatcagcatgcttgctcagaggctgaacatgagctacgatgaggccgagttgtggataatgaacttggttaggagctcaaaactggatgcaaggatcgattcagtgtcaggaactcttatcatgacaaccaatcacatcaatgtgcatgagcagattatcgagagcatgaagggccttaacatgcggacgtacatgctcgcaaagaacatcgtggagccagctcagcaggcagctcggtaaggttagcggagtacagttttgaggcgccaacaactagtttagaggtagaggtctattgtgtggcagtgaattcgtcaccgggattgaacacatgggactgggaggtggcttgccgtttggtacagcttagtatgctgacattttcaatattttgtactcggaatttcgtaacagtttatccttctcaatgtatattactattaatgcctgtttggatcacattaattgaaacaaatatctagaaattgtttctcattttattattaggttacttttcaactcctgagaaccaatcagggcattaatgtaatgaatgatgatgctacaggatccttctcttctaggcattgtgttttctc

SEQ ID NO: 64944 - DNA, 1232 bp, Zea Mays
aaaaagaaaagagagggagaggaagcgagcggctgggcgccccaagccccacatggtgcagcgaggtccacgctaacaacttctcgaccttggcctcccacggctctgccgcattgccgcgcgccgccggccggcactcgccgtcctgacgcgagaaggaagatgctctaggaagttgggggcctggctagggacagcctgtgtcccgccgtgggatcggtgggagagggggaggcaggcatgtgtgatctggtggcccgcacgggccggcacctgcagcgctacgagaacggccgtcgccttgtggccggatatagggatattaatgatggagcttctgatgatgaacaaaagaaacttgttgaagttctcatgatcagctcccaaagtggaccgggtcttctatttccaaagggaggctgggagaatgatgaaactgttgaagaggcagctgcaagggaagctatcgaagaagctggagtgcgaggagatttagtgcaactgctggggttctacgatttcaagagcaagcagcccgaagcaacgtgcagagccgcaatcttcgccctgcacgtgaaggaagagctagcctcctggccagaacagagcacccggcagaggagctggctcaccgttcccgaggcggcggagcggagccgctacccgtggatgcaggaggccctcgtgacaggcttctccgcctggctcgagaactggagaaacggtggtggcggcggcggcggctgcgtggaccgaactgagagatgacaccaccttaaagcatcaggggggcccccggcggagaagccatctgctagctatttcttggcgttgtatcttgcttggactagaattttcttccagaggctgactgcctggcatacatgcatgagggctctctgatgctcggtagcttttgtttactttgtcgctttattacaccgtcgtcttcaggatgacagtctcctcagctgatgatggcccgaggtttgttaaattgtaagcttgctgattctcgcggtcgccagctatatttaactgtcttgtattgagccttgagacaaagcaagctttgtgtatatcatgtgtcgtcgtcgtcgtggtgtactggtgtttgcctttttttgaagagttactggtgtttgccttgctatggaagtgcaacgggagtcctcttgttgtcacagtcgcaacttctctgcctttttaccctcggaaagatgctcttgcga

SEQ ID NO: 64945 - DNA, 1416 bp, Zea Mays
aaaaagaaaagagagggagaggaagcgagcggctgggcgccccaagccccacatggtgcagcgaggtccacgctaacaacttctcgaccttggcctcccacggctctgccgcattgccgcgcgccgccggccggcactcgccgtcctgacgcgagaaggaagatgctctaggaagttgggggcctggctagggacagcctgtgtcccgccgtgggatcggtgggagagggggaggcaggcatgtgtgatctggtggcccgcacgggccggcacctgcagcgctacgagaacggccgtcgccttgtggccgggtgcgtccgtaaggggagcccccccttccctacccccaaccaccacggctcttctccctctgccttctcgcatccacacaccaaagacatcaggcgtttttatctgccctcgattcgatctgattgggtttgtccggttgcggtgcttgcttggttgggcagcttaaaggtgcataccattcagatatagggatattaatgatggagcttctgatgatgaacaaaagaaacttgttgaagttctcatgatcagctcccaaagtggaccgggtcttctatttccaaagggaggctgggagaatgatgaaactgttgaagaggcagctgcaagggaagctatcgaagaagctggagtgcgaggagatttagtgcaactgctggggttctacgatttcaagagcaagcagcccgaagcaacgtgcagagccgcaatcttcgccctgcacgtgaaggaagagctagcctcctggccagaacagagcacccggcagaggagctggctcaccgttcccgaggcggcggagcggagccgctacccgtggatgcaggaggccctcgtgacaggcttctccgcctggctcgagaactggagaaacggtggtggcggcggcggcggctgcgtggaccgaactgagagatgacaccaccttaaagcatcaggggggcccccggcggagaagccatctgctagctatttcttggcgttgtatcttgcttggactagaattttcttccagaggctgactgcctggcatacatgcatgagggctctctgatgctcggtagcttttgtttactttgtcgctttattacaccgtcgtcttcaggatgacagtctcctcagctgatgatggcccgaggtttgttaaattgtaagcttgctgattctcgcggtcgccagctatatttaactgtcttgtattgagccttgagacaaagcaagctttgtgtatatcatgtgtcgtcgtcgtcgtggtgtactggtgtttgcctttttttgaagagttactggtgtttgccttgctatggaagtgcaacgggagtcctcttgttgtcacagtcgcaacttctctgcctttttaccctcggaaagatgctcttgcga

SEQ ID NO: 64946 - DNA, 2633 bp, Zea Mays
gacgatcaaacctcacagcccaccacgcgccactgggccactggagagagagagagagagcgagcgagctagcgataggagcagacgccgccaccgatggggtgcgggccatccaaggaggacgcggagggcggcgccgagtcgcgctgccgggagcggaagcacctgctgagcgccgccgtccacgcgcgccacgcgctcgcgggcgcgcacgccggccacaccgccgcgctcaagaacgtcggagccgcgctctccgactacgccgcgggcgagaccgaccgccacgacgccgtcctggtgccgcgctccgcctccgccgcggccgcgctcagcgccgggcagggctcggcggccacggtggtcaaggcgctgccgtccccgctcgacgccttgctcccgccgccgccgcccccgggtgccggcgacggcgacggtgacgacggcgggcacacgacgctgcacaggtccatgagcgcgcccgacatccagctccagccgcccatccggaagggccgctccggggaggcgcccatcatggaggaggacggcgagggcgacgcccccggggacgacgcggggcggcgacgggaggacgacgacccgcagctccagcctcctcctcccccaccgccgccggcgaacaatcccccgccctcgcgctccccgccgcctgtcccggctgcgaaggccaacctggagcgggcgacggcagaggggaattcgtggaaggactacctgttcggctcccccgacgccatgcccggcccgccgcccacgctggaccccagcgccagcgccgccgccgagtcgtcgtgggcggccgagcggaggatgcccgcgcctccgcctccgccgcccgaatccgaccaacagcctacgaagcagccgcagccagtgccttccgccgaggagatcgccgagggaaagaagcccgcggctgagctcgtcacgcgccgggctaggaagccggagggcaagaagggcagggtcgtcatggtgacgccccagccggcgaggctgggcgacatcctgcgcaggctcgacgatgaattcctcaaggcatcccagggcgcgcacgaggtgtccaagatgttggaggcagcaaggatgcattatcactccaatttcgccgagacgcgagtgaggcacaggggaatgtttattaagtacagttttctttggggcagaggcggggttggggctacactgaggcggatttgtggatcattctgcaagagtgatgcaagccatcacttggaatcgctcatttaaagggatccctccaccagaaaatgtgaagaatgagttggctgatgatgaatgggaaacacatgctaccgtactcgataagttgcttgcatgggagaaaaaactatgccatgaagtgaaggaattcgaggttatcaaagtgacatatcaacgaaagctggctgttcttaacaaaaaaaagcaaagtggtgctagttcttcatcagttgagaaaacaaagtccattgttagtcacttgcacacaaaatatatagttgatttacagacaatggagtcaacaattgcagaaattgatcgtctaagagatcaacagctttacccaaaactccttgaactggtgaagggattcgcacacatgtgggatgtcatgtacgctcgtcacaaagcgcagctcaagatcattacagagcttaaagcgtccgatatctcggttgctacacgggaaacaagtgagcaacaccatgagcgaactttgcagctgtggaacgttgttcaggagtggcatgtacagtttgacaggttcatgacatatcagaaggagtacataggaagcctctacaactggatcaagctaaatgtgatccctattgataccaacattaagcctaattcgtcacagccacatgaggccacacctccaatcaagaggttgctgcatgcttggcatgatatccttgagaagctccctgataatgaaacaaagaaggctatacacacatttgcagaagtggtgaacacaatcctagttcaccaggatgatgaactgaagttgaggttaaagattgatgatattaggagggaccttgagaagaagaggaagcagttcgatagttgggcgcagaaaaattgggacagaggagcaagtattcctgatggcgacaatcccgggcgtgttgatcctgcagctgagcggaaagccgtcgtggatagggtggagaatgcactgaaggacctggaagataattataggacccaatgcaaggtagtcagggataaatccctcaatcttctgcggtcaaacctgccggagctgttccgtgctgtgtcggaattctccctccagtctgcgggttatttcaagggcttgtggtcgatcgcgcaaaccaatgaccagctggatgattgagttcttggtgcattcctatgtttttgttgtggtgacttttgtttgtacatgttgaatgttggtagctccacgtgtttgtttatttagtatgccggttttgagttttggttgtgcaaaagatcagaagatgactgccccttgttctgctagagctatggctgttgtaaatgcaaaatgtagggtatatataaggtgtgtataatgttgggaagagaatcacgattttgtttcaaat

SEQ ID NO: 64947 - DNA, 2382 bp, Zea Mays
atggggtgcgggccatccaaggaggacgcggagggcggcgccgagtcgcgctgccgggagcggaagcacctgctgagcgccgccgtccacgcgcgccacgcgctcgcgggcgcgcacgccggccacaccgccgcgctcaagaacgtcggagccgcgctctccgactacgccgcgggcgagaccgaccgccacgacgccgtcctggtgccgcgctccgcctccgccgcggccgcgctcagcgccgggcagggctcggcggccacggtggtcaaggcgctgccgtccccgctcgacgccttgctcccgccgccgccgcccccgggtgccggcgacggcgacggtgacgacggcgggcacacgacgctgcacaggtccatgagcgcgcccgacatccagctccagccgcccatccggaagggccgctccggggaggcgcccatcatggaggaggacggcgagggcgacgcccccggggacgacgcggggcggcgacgggaggacgacgacccgcagctccagcctcctcctcccccaccgccgccggcgaacaatcccccgccctcgcgctccccgccgcctgtcccggctgcgaaggccaacctggagcgggcgacggcagaggggaattcgtggaaggactacctgttcggctcccccgacgccatgcccggcccgccgcccacgctggaccccagcgccagcgccgccgccgagtcgtcgtgggcggccgagcggaggatgcccgcgcctccgcctccgccgcccgaatccgaccaacagcctacgaagcagccgcagccagtgccttccgccgaggagatcgccgagggaaagaagcccgcggctgagctcgtcacgcgccgggctaggaagccggagggcaagaagggcagggtcgtcatggtgacgccccagccggcgaggctgggcgacatcctgcgcaggctcgacgatgaattcctcaaggcatcccagggcgcgcacgaggtgtccaagatgttggaggcagcaaggatgcattatcactccaatttcgccgagacgcgaggatttgtggatcattctgcaagagtgatgcaagccatcacttggaatcgctcatttaaagggatccctccaccagaaaatgtgaagaatgagttggctgatgatgaatgggaaacacatgctaccgtactcgataagttgcttgcatgggagaaaaaactatgccatgaagtgaaggaattcgaggttatcaaagtgacatatcaacgaaagctggctgttcttaacaaaaaaaagcaaagtggtgctagttcttcatcaaaattgatcgtctaagagatcaacagctttacccaaaactccttgaactggtgaagggattcgcacacatgtgggatgtcatgtacgctcgtcacaaagcgcagctcaagatcattacagagcttaaagcgtccgatatctcggttgctacacgggaaacaagtgagcaacaccatgagcgaactttgcagctgtggaacgttgttcaggagtggcatgtacagtttgacaggttcatgacatatcagaaggagtacataggaagcctctacaactggatcaagctaaatgtgatccctattgataccaacattaagcctaattcgtcacagccacatgaggccacacctccaatcaagaggttgctgcatgcttggcatgatatccttgagaagctccctgataatgaaacaaagaaggctatacacacatttgcagaagtggtgaacacaatcctagttcaccaggatgatgaactgaagttgaggttaaagattgatgatattaggagggaccttgagaagaagaggaagcagttcgatagttgggcgcagaaaaattgggacagaggagcaagtattcctgatggcgacaatcccgggcgtgttgatcctgcagctgagcggaaagccgtcgtggatagggtggagaatgcactgaaggacctggaagataattataggacccaatgcaaggtagtcagggataaatccctcaatcttctgcggtcaaacctgccggagctgttccgtgctgtgtcggaattctccctccagtctgcgggttatttcaagggcttgtggtcgatcgcgcaaaccaatgaccagctggatgattgagttcttggtgcattcctatgtttttgttgtggtgacttttgtttgtacatgttgaatgttggtagctccacgtgtttgtttatttagtatgccggttttgagttttggttgtgcaaaagatcagaagatgactgccccttgttctgctagagctatggctgttgtaaatgcaaaatgtagggtatatataaggtgtgtataatgttgggaagagaatcacgattttgtttcaaat

SEQ ID NO: 64948 - DNA, 1077 bp, Zea Mays
agcaaaccttcgtccatatctccaattgtgccctgccattcacgccgccgccaatagcaggttgtagagcaggtggtggttagggaggagtcgaatataggtgacccgttcatctttgagacgtagcgccacaatggcataagggagctttgccctgcgaatggaggagcacaagataatccgtgcccgtgctctcacccccctgcataaacccaattctgttacgatgaggttcattttcgagctcaaaggtactctaattacttatctgaactttctcaagttcacaattcgaaaattggaaattgtaggctgtttcctgtatttttccctttctaagtcaaatcatccaatttgaggatcactcaatctttcttgtcgatgcttgtctaggctcatgggtcttatgtccagaaacttagctggtctccaaaactcccatctaaccgaccatttgcaggtttctgtcctgataatgcaatggttgttgacagatacactacaatccttggggctccatttaaatttgaaattccactttttattgtacagaaagtaccacctaataatgtccacagttttgtacatcccattttttctactatggtccaaggtggtaatataaaattattcagaaatctgcttcaaaaacaactaatcacttctgttttcagagattcacaatctcagacttagccattttttctgttagactgcagatagttcagaaatatgtttttgaacccctgaattaaattgtttcttttgttatcattaatcgacaatatgcccaaaagattccccagacttcaaacctcaagtctgggccaaatatttgcaatgttctagaaggaatgtggctccagctctaacggtgagtccgacgaggttgcgatggcgaagagagcgactctttggaggatgaggtggccccaaggaataccatgggagacgtgcctctagagtaatacaaggacgaatagcacattgtgtatgatatcgatggaagatcaagaaacgtgataaggaggggcgcattgaggcctacctcaggaacgcacgtgatgccaagaattg

SEQ ID NO: 64949 - DNA, 518 bp, Zea Mays
ccatatctccaattgtgccctgccattcacgccgccgccaatagcaggttgtagagcaggtggtggttagggaggagtcgaatataggtgacccgttcatctttgagacgtagcgccacaatggcataagggagctttgccctgcgaatggaggagcacaagataatccgtgcccgtgctctcacccccctgcataaacccaattctgttacgatgaggttcattttcgagctcaaagattccccagacttcaaacctcaagtctgggccaaatatttgcaatgttctagaaggaatgtggctccagctctaacggtgagtccgacgaggttgcgatggcgaagagagcgactctttggaggatgaggtggccccaaggaataccatgggagacgtgcctctagagtaatacaaggacgaatagcacattgtgtatgatatcgatggaagatcaagaaacgtgataaggaggggcgcattgaggcctacctcaggaacgcacgtgatgccaagaattg

SEQ ID NO: 64950 - DNA, 2454 bp, Zea Mays
atgagtttagggctatggttggagttgtctaatatataagccaaaaacaaaacacactcatcccgccatttctcattttggtggtccagaacgctaaaaccctagcaggaagaaaagaactcccctttcttgcttcgtgttccacttccacccgcgccttcctccggcaagtagagaacccatacaagcccccgtattgtcgcatagtcatcctgcggcgtcgccctcctcctttcccactcccaccggttcttcttgacctctcgagatcattctgcccaaggtgctcgatccccagaccagcgatagggaatgttgaagactgtttctgtgagattgtcgcgagatgacagtctccggccatgccaagcactgctgtctcggtattcagaaactgttgtccctttgattcggaggttttgctcgacgcccattaaggttgaggaggtcgccaacatcgaagctgatggaaaggtctcatatctggatgccgctgctctgccctgcgacaactctgactgtcgtggtgagcccagtcatggcagcaggccatggacgaaacggttgaagcattatggaccttctcagaagggaaaccgtaaccatcatgaaacgaaactgccaggcagtggcagggatggatcttctaggaagggcagccaccctcagaagggtaaaacgaaactgccaggcagtgggagggatggatcttctcggaaaggtagccaccatgaaacaaaattggcagacagggatgaacttattcagaagggaagtcatcatgaaaaggaattggcagacacacccttcaaaccttttcttttccagattgtattggatacttctatgagttctcttatgcctgtacttgacggatgggtgaaaatcggtaatcgtctggaaagagataaagtcaatatggttttgttccatctgaggaagcagagaatgtataacaaggctctgaagtttgtggagtggatcgaaagaagaaaactattaaattttgaagaacgtgattatgctagccatctggatttgatagcacggaactatggtgttgaagctgcccaaaagtacatcgagagggtcccagaagccttcaggagtgaggtgctttatgaaactctgcttgttaactgtgtatgccgtgatgatgcccagaaggcagagcaagtcttcaatgaaataagggaactctctttgcctttaactatctctgcttgcaaccaaatgttattgctgtacaagagggtttctcgaaataaggtggttgacattctcacattgatggaaaaggaaaatataaagtattctatattcacctacaagctcatgattgacttaaaagtgcgatcaaatgacatattaggcatggaacaagtcttaaattctatgaaagaaaatggtcttgagccaaattttaccatccagactatggttgctaaattctacatatctgggtgctttacagagaaagcagaagaggttatcaatgctatggaggtacatgtaaaggctaatcgtcatgccgtcaggtctcttcttgacctctatgctattcttggaaggccagttgatgtagagagagtatggaacttgtgcgctgaaccaaagttggaggactttttggctgcaattaaggcatggagtaaacttggacatatcgaaagagcggaagagatctttgacgtgttggtaaagacgtttccgaaactcacttccaagtactttaatgctatgttggaggtgtatgcggaaaataaacttctggacaaaagcaaaaagtttatagaaaggatgtgtttggatgggtgtacaatcggccctcttacctgggatgcagttgtcaagctttatgtgaatttaggcgagttgtcaaaggccgactcgtttctgatgaatgtcacagaagataatcctgacagacatccccttttcagctcatatgtaatcttactaaaggcatacgcagaaaagggcgatatccataacgcggagaagatatttgatagggtaaagcagaccaacttccctgcaagaactctgccctataatttgttacttgcagcttatgccagtgcccaggttacaccctatgggttcagagagaggatgaaagctgacaagttcagcccgggcaagagtcagatcgaacaactgaagcaactcgacagcttgtagaaagcaggcaaatccagattgattttcttccttttcaccccttcaccgtgaccacatggaacattttccttgcaaagcagttagactggaatagaagaatctaccaggatgcatttgttctttcagcatgaattctgtgcaccttggtatgcttgttttgcaggttgatcagagttttaggcgagttgctagccggaagtagacacttctgatggtatattatctgattagcttcgtactcctagctaataataaattgagggaaatgga

SEQ ID NO: 64951 - DNA, 2317 bp, Zea Mays
ctcattttggtggtccagaacgctaaaaccctagcaggaagaaaagaactcccctttcttgcttcgtgttccacttccacccgcgccttcctccggcaagtagagaacccatacaagcccccgtattgtcgcatagtcatcctgcggcgtcgccctcctcctttcccactcccaccggttgaagactgtttctgtgagattgtcgcgagatgacagtctccggccatgccaagcactgctgtctcggtattcagaaactgttgtccctttgattcggaggttttgctcgacgcccattaaggttgaggaggtcgccaacatcgaagctgatggaaaggtctcatatctggatgccgctgctctgccctgcgacaactctgactgtcgtggtgagcccagtcatggcagcaggccatggacgaaacggttgaagcattatggaccttctcagaagggaaaccgtaaccatcatgaaacgaaactgccaggcagtggcagggatggatcttctaggaagggcagccaccctcagaagggtaaaacgaaactgccaggcagtgggagggatggatcttctcggaaaggtagccaccatgaaacaaaattggcagacagggatgaacttattcagaagggaagtcatcatgaaaaggaattggcagacacacccttcaaaccttttcttttccagattgtattggatacttctatgagttctcttatgcctgtacttgacggatgggtgaaaatcggtaatcgtctggaaagagataaagtcaatatggttttgttccatctgaggaagcagagaatgtataacaaggctctgaagtttgtggagtggatcgaaagaagaaaactattaaattttgaagaacgtgattatgctagccatctggatttgatagcacggaactatggtgttgaagctgcccaaaagtacatcgagagggtcccagaagccttcaggagtgaggtgctttatgaaactctgcttgttaactgtgtatgccgtgatgatgcccagaaggcagagcaagtcttcaatgaaataagggaactctctttgcctttaactatctctgcttgcaaccaaatgttattgctgtacaagagggtttctcgaaataaggtggttgacattctcacattgatggaaaaggaaaatataaagtattctatattcacctacaagctcatgattgacttaaaagtgcgatcaaatgacatattaggcatggaacaagtcttaaattctatgaaagaaaatggtcttgagccaaattttaccatccagactatggttgctaaattctacatatctgggtgctttacagagaaagcagaagaggttatcaatgctatggaggtacatgtaaaggctaatcgtcatgccgtcaggtctcttcttgacctctatgctattcttggaaggccagttgatgtagagagagtatggaacttgtgcgctgaaccaaagttggaggactttttggctgcaattaaggcatggagtaaacttggacatatcgaaagagcggaagagatctttgacgtgttggtaaagacgtttccgaaactcacttccaagtactttaatgctatgttggaggtgtatgcggaaaataaacttctggacaaaagcaaaaagtttatagaaaggatgtgtttggatgggtgtacaatcggccctcttacctgggatgcagttgtcaagctttatgtgaatttaggcgagttgtcaaaggccgactcgtttctgatgaatgtcacagaagataatcctgacagacatccccttttcagctcatatgtaatcttactaaaggcatacgcagaaaagggcgatatccataacgcggagaagatatttgatagggtaaagcagaccaacttccctgcaagaactctgccctataatttgttacttgcagcttatgccagtgcccaggttacaccctatgggttcagagagaggatgaaagctgacaagttcagcccgggcaagagtcagatcgaacaactgaagcaactcgacagcttgtagaaagcaggcaaatccagattgattttcttccttttcaccccttcaccgtgaccacatggaacattttccttgcaaagcagttagactggaatagaagaatctaccaggatgcatttgttctttcagcatgaattctgtgcaccttggtatgcttgttttgcaggttgatcagagttttaggcgagttgctagccggaagtagacacttctgatggtatattatctgattagcttcgtactcctagctaataataaattgagggaaatgga

SEQ ID NO: 64952 - DNA, 1508 bp, Zea Mays
tgcatgcaaatgaggcttctcaatttgtggagtggatcgaaagaagaaaactattaaattttgaagaacgtgattatgctagccatctggatttgatagcacggaactatggtgttgaagctgcccaaaagtacatcgagagggtcccagaagccttcaggagtgaggtgctttatgaaactctgcttgttaactgtgtatgccgtgatgatgcccagaaggcagagcaagtcttcaatgaaataagggaactctctttgcctttaactatctctgcttgcaaccaaatgttattgctgtacaagagggtttctcgaaataaggtggttgacattctcacattgatggaaaaggaaaatataaagtattctatattcacctacaagctcatgattgacttaaaagtgcgatcaaatgacatattaggcatggaacaagtcttaaattctatgaaagaaaatggtcttgagccaaattttaccatccagactatggttgctaaattctacatatctgggtgctttacagagaaagcagaagaggttatcaatgctatggaggtacatgtaaaggctaatcgtcatgccgtcaggtctcttcttgacctctatgctattcttggaaggccagttgatgtagagagagtatggaacttgtgcgctgaaccaaagttggaggactttttggctgcaattaaggcatggagtaaacttggacatatcgaaagagcggaagagatctttgacgtgttggtaaagacgtttccgaaactcacttccaagtactttaatgctatgttggaggtgtatgcggaaaataaacttctggacaaaagcaaaaagtttatagaaaggatgtgtttggatgggtgtacaatcggccctcttacctgggatgcagttgtcaagctttatgtgaatttaggcgagttgtcaaaggccgactcgtttctgatgaatgtcacagaagataatcctgacagacatccccttttcagctcatatgtaatcttactaaaggcatacgcagaaaagggcgatatccataacgcggagaagatatttgatagggtaaagcagaccaacttccctgcaagaactctgccctataatttgttacttgcagcttatgccagtgcccaggttacaccctatgggttcagagagaggatgaaagctgacaagttcagcccgggcaagagtcagatcgaacaactgaagcaactcgacagcttgtagaaagcaggcaaatccagattgattttcttccttttcaccccttcaccgtgaccacatggaacattttccttgcaaagcagttagactggaatagaagaatctaccaggatgcatttgttctttcagcatgaattctgtgcaccttggtatgcttgttttgcaggttgatcagagttttaggcgagttgctagccggaagtagacacttctgatggtatattatctgattagcttcgtactcctagctaataataaattgagggaaatgga

SEQ ID NO: 64953 - DNA, 596 bp, Zea Mays
taaaaactcgattcgaatcgtctgcttctcgcagctaatgagactgcttgatccattgtactgcattgagtaataagtggaaatgagatgactggcaaaagatgttgattgataaaatgtttgataccatgtatgactagctaggtacacatctagtttaaaaaaaggatcatactaaaacttgaaaagctaaaacttgattttagactcagctagtgcttttggcaaaccaaacccctcagccaaacagctgcatgtctagaggtagaggagtagactcctcacaccgggtaagtctagctgagtattagtatactcagccttgcttgtggcacaatttttgcaggtaccccttagggtgattggttgctggtgtgacttggcctccatccctgccaccgggatagacggtcaagtgggttattgcttccgcaggagaggaccaggaggagtagcgtggccaggcttcgccatgttactcggttttctccgttagttatttccgctgcattaaaaacttatggttattatttctgaaactccgataatgtaatcactaatgatacttattaaatttgtggtattatgttttattg

SEQ ID NO: 64954 - DNA, 1112 bp, Zea Mays
ggagatccgacagcaaccaagaagcttctctcttcctcgccagtgcccaccccgccagccggcacgaagcgcggcgttaatatctcccctcccttccctcttctggtctccgccccgctccttgcctccgatccccaattcctccttcggatctcgcattcagcgcagcgcaggtgtgaaggaagggggacgcggaggaagatggggctcgcgttcgggaagctcttcagccggctcttcgccaagaaggagatgcggatcctcatggtcggcctcgacgccgccggtaaaaccaccatcctctacaagctcaagctcggcgagatcgtcaccaccatccccaccatcggtttcaatgttgaaactgttgagtacaagaacattagcttcactgtctgggatgtcgggggtcaggacaagatcagacctctttggaggcattacttccagaacacccagggtcttatctttgttgtggacagcaatgaccgtgaccgtgttgttgaagccagagatgagctccacaggatgctgaacgaggatgagctacgtgatgctgtgctgcttgtttttgccaacaagcaagatcttcccaatgcctggactggctgtccagcaacattgcgagcaaggcttgaggcctaccttgaatgtcaaccgcgaactgactaggagctccggatgtatcatggaaactcaggacagaatcgcagttgcaacctgttagatgtcttctaccggcactatatatattttttgtttgatgtgtaatgatgttactgttcaacgtttattaccctactatactgttggatgttctttggacctgtttcatttcgcacaaggattggacttccaatatcatgctacattttacattcgtggtaaatacctgattagaaagttagccgaggagatccaatgtcatggtacatggaaatccagattaggttaaacattcttaagtatacagaagactggtaccctagccaccactttttttagcagttgtgtttttttcatttgtctagaattctcaatcctggtgaagcggtgtcattttgatttgattgtaagctttagttgaagtctcgctcactctcggtgcatga

SEQ ID NO: 64955 - DNA, 1201 bp, Zea Mays
cagcaaccaagaagcttctctcttcctcgccagtgcccaccccgccagccggcacgaagcgcggcgttaatatctcccctcccttccctcttctggtctccgccccgctccttgcctccgatccccaattcctccttcggatctcgcattcagcgcagcgcaggtgtgaaggaagggggacgcggaggaagatggggctcgcgttcgggaagctcttcagccggctcttcgccaagaaggagatgcggatcctcatggtcggcctcgacgccgccggtaaaaccaccatcctctacaagctcaagctcggcgagatcgtcaccaccatccccaccatcggtttcaatgttgaaactgttgagtacaagaacattagcttcactgtctgggatgtcgggggtcaggacaagatcagacctctttggaggcattacttccagaacacccagggtcttatctttgttgtggacagcaatgaccgtgaccgtgttgttgaagccagagatgagctccacaggatgctgaacgaggatgagctacgtgatgctgtgctgcttgtttttgccaacaagcaagatcttcccaatgccatgaatgctgctgagattactgacaagcttggattacactccctgcgccagcgacactgagcacttgtgccacaactggcgagggtctgtatgaaggcctggactggctgtccagcaacattgcgagcaaggcttgaggcctaccttgaatgtcaaccgcgaactgactaggagctccggatgtatcatggaaactcaggacagaatcgcagttgcaacctgttagatgtcttctaccggcactatatatattttttgtttgatgtgtaatgatgttactgttcaacgtttattaccctactatactgttggatgttctttggacctgtttcatttcgcacaaggattggacttccaatatcatgctacattttacattcgtggtaaatacctgattagaaagttagccgaggagatccaatgtcatggtacatggaaatccagattaggttaaacattcttaagtatacagaagactggtaccctagccaccactttttttagcagttgtgtttttttcatttgtctagaattctcaatcctggtgaagcggtgtcattttgatttgattgtaagctttagttgaagtctcgctcactctcggtgcatga

SEQ ID NO: 64956 - DNA, 1178 bp, Zea Mays
ctcgccagtgcccaccccgccagccggcacgaagcgcggcgttaatatctcccctcccttccctcttctggtctccgccccgctccttgcctccgatccccaattcctccttcggatctcgcattcagcgcagcgcaggaagggggacgcggaggaagatggggctcgcgttcgggaagctcttcagccggctcttcgccaagaaggagatgcggatcctcatggtcggcctcgacgccgccggtaaaaccaccatcctctacaagctcaagctcggcgagatcgtcaccaccatccccaccatcggtttcaatgttgaaactgttgagtacaagaacattagcttcactgtctgggatgtcgggggtcaggacaagatcagacctctttggaggcattacttccagaacacccagggtcttatctttgttgtggacagcaatgaccgtgaccgtgttgttgaagccagagatgagctccacaggatgctgaacgaggatgagctacgtgatgctgtgctgcttgtttttgccaacaagcaagatcttcccaatgccatgaatgctgctgagattactgacaagcttggattacactccctgcgccagcgacactggtacatccagagcacttgtgccacaactggcgagggtctgtatgaaggcctggactggctgtccagcaacattgcgagcaaggcttgaggcctaccttgaatgtcaaccgcgaactgactaggagctccggatgtatcatggaaactcaggacagaatcgcagttgcaacctgttagatgtcttctaccggcactatatatattttttgtttgatgtgtaatgatgttactgttcaacgtttattaccctactatactgttggatgttctttggacctgtttcatttcgcacaaggattggacttccaatatcatgctacattttacattcgtggtaaatacctgattagaaagttagccgaggagatccaatgtcatggtacatggaaatccagattaggttaaacattcttaagtatacagaagactggtaccctagccaccactttttttagcagttgtgtttttttcatttgtctagaattctcaatcctggtgaagcggtgtcattttgatttgattgtaagctttagttgaagtctcgctcactctcggtgcatga

SEQ ID NO: 64957 - DNA, 1184 bp, Zea Mays
ctcgccagtgcccaccccgccagccggcacgaagcgcggcgttaatatctcccctcccttccctcttctggtctccgccccgctccttgcctccgatccccaattcctccttcggatctcgcattcagcgcagcgcaggtgaaggaagggggacgcggaggaagatggggctcgcgttcgggaagctcttcagccggctcttcgccaagaaggagatgcggatcctcatggtcggcctcgacgccgccggtaaaaccaccatcctctacaagctcaagctcggcgagatcgtcaccaccatccccaccatcggtttcaatgttgaaactgttgagtacaagaacattagcttcactgtctgggatgtcgggggtcaggacaagatcagacctctttggaggcattacttccagaacacccagggtcttatctttgttgtggacagcaatgaccgtgaccgtgttgttgaagccagagatgagctccacaggatgctgaacgaggatgagctacgtgatgctgtgctgcttgtttttgccaacaagcaagatcttcccaatgccatgaatgctgctgagattactgacaagcttggattacactccctgcgccagcgacactggtacatccagagcacttgtgccacaactggcgagggtctgtatgaaggcctggactggctgtccagcaacattgcgagcaaggcttgaggcctaccttgaatgtcaaccgcgaactgactaggagctccggatgtatcatggaaactcaggacagaatcgcagttgcaacctgttagatgtcttctaccggcactatatatattttttgtttgatgtgtaatgatgttactgttcaacgtttattaccctactatactgttggatgttctttggacctgtttcatttcgcacaaggattggacttccaatatcatgctacattttacattcgtggtaaatacctgattagaaagttagccgaggagatccaatgtcatggtacatggaaatccagattaggttaaacattcttaagtatacagaagactggtaccctagccaccactttttttagcagttgtgtttttttcatttgtctagaattctcaatcctggtgaagcggtgtcattttgatttgattgtaagctttagttgaagtctcgctcactctcggtgcatga

SEQ ID NO: 64958 - DNA, 1235 bp, Zea Mays
ccagatctgagtcccctcgcgctctcagatccctctcccccgatctcctctccggccgccgtgcgcggtagatctccgcccgttggcgcgtgatctacccgaccgacccgcgcgactgcggttggatcatctcggtccagatccgcggcgccgtcgcctggatgcgctggggaatttgcgatccgttgtgtgaaggaagggggacgcggaggaagatggggctcgcgttcgggaagctcttcagccggctcttcgccaagaaggagatgcggatcctcatggtcggcctcgacgccgccggtaaaaccaccatcctctacaagctcaagctcggcgagatcgtcaccaccatccccaccatcggtttcaatgttgaaactgttgagtacaagaacattagcttcactgtctgggatgtcgggggtcaggacaagatcagacctctttggaggcattacttccagaacacccagggtcttatctttgttgtggacagcaatgaccgtgaccgtgttgttgaagccagagatgagctccacaggatgctgaacgaggatgagctacgtgatgctgtgctgcttgtttttgccaacaagcaagatcttcccaatgccatgaatgctgctgagattactgacaagcttggattacactccctgcgccagcgacactggtacatccagagcacttgtgccacaactggcgagggtctgtatgaaggcctggactggctgtccagcaacattgcgagcaaggcttgaggcctaccttgaatgtcaaccgcgaactgactaggagctccggatgtatcatggaaactcaggacagaatcgcagttgcaacctgttagatgtcttctaccggcactatatatattttttgtttgatgtgtaatgatgttactgttcaacgtttattaccctactatactgttggatgttctttggacctgtttcatttcgcacaaggattggacttccaatatcatgctacattttacattcgtggtaaatacctgattagaaagttagccgaggagatccaatgtcatggtacatggaaatccagattaggttaaacattcttaagtatacagaagactggtaccctagccaccactttttttagcagttgtgtttttttcatttgtctagaattctcaatcctggtgaagcggtgtcattttgatttgattgtaagctttagttgaagtctcgctcactctcggtgcatga

SEQ ID NO: 64959 - DNA, 1949 bp, Zea Mays
cttgtatccaccaaattctggctttacaagattccatagagtaaccaaacacatataccatcagacgactgggctggaccaagaagaaatccagtagcacactagacactagcagtaacgccaagaaagaatggcgtgctgcaccaccaccagccgtctcgtcctctcggcggccgccgccctgctcgccgtggccggcggcgccgcggaagccccgagctactgcgcgccggggcaggccatcccgtaccgtccgctgtccggctgcacctggtacgttgcgagccggagctgcgacgtgatcgaggccatgctcccgaaccgggccgtcctcaaggagacgtgctgcagccagctgcgggacatcccggcggagtgccggtgccgggcgctgcgggtgatgatggagacgcccctcgtcgtgggcgcggagccgggggcccagcagaggtgccgggtcgcgcaggcccgcttcgcccccgccctcgtcgccgcggccgagtgcggcttgctcaccgcccacggcaggcgcttctgcaacgcgctcgacgccgagtgatgcggtgaccatggtgatgatactgctccccgtaccgtgcgtggtcgaataagaagggcgtatattattcatggatctatactaatctattaagattctaatatcaccgtccagacctcccacactgcctcctgcccctgccacgtgttccccgcccttgtcgcacgatcccagtcccgcaccccaacccccgcgatgcccccatcccaccactgccaccgccatcaaggcacgatgcccatttccggagatcgctccgtctctcgcttctttctcccctatatctcgcagttgtagcccaccataaacccgcccaccataaaccctaaccctagatggatgtcgtcacctccatggttgtagcatcccaaaaatttaaattctgaaattttctcaaactcgccctaaattcaaaatgaatttcaaatttcatttcaaaatgtttgtttgcgagttgatatcaacaaataaattatagtggtctatattctctccaaaatcctcctccaaatatcctacaaatatttccctactgaccccctcaaattctttccagaaacactgtccagatatttccccagtggtccccctcaaattctttccagaaatattgtccaaatattccaccaatatatctccaagtattttcttcctcagaaataccttccgaatcatttttgaagtctccacaaatattttcttcataactttcctcatgcccatacgtatacgtatgcctccaatgtcatacggtgagctctacaagctaacctcacttatacaagacaaatacatgctaatctcccactaatcctctcatcctcccactaatcctctcatccctccccctaatccccccaccatggctataaatagaggggcaagggcctcctctcatcccaccccaagccatttcatggcaactctcttccccccccacacacccactccatgtttcacacaagcacacactagcacaaggatcgttcgatcgttcttcgatcgttcgtcccctgttcttagtttgttcgttcgttcgtccgatcgttcgatcgttcatccgatcgttcatggttcgttcgtccgttcgtccgatcgttcgatcgttcgttcgttcgttcgtccaaataatctttttcctaccgttatgctgccgaaattccgatcgttcgttcgttcgatcattcgatcgttcatcgttcgttcatagttcctattcatcgttcatcgttcgttcatagtccctattcatcgttcttctagataatctttgtcctgccgttatgctgccgaaattccgatcgttcgttcgtccgatcattcgatcgttcgtccgttcgttcgtccaaataatcttttcctgccgttatgctgccgaaattctgatcgt

SEQ ID NO: 64960 - DNA, 1558 bp, Zea Mays
cttagtttgttcgttcgttcgtccgatcgttcgatcgttcgtccgatcgttcatggttcgttcgtccgttcgtccgatcgttcgatcgttcgttcgttcgttcgtccaaataatctttttcctaccgttatgctgccgaaattccgatcgttcgttcgttcgatcattcgatcgttcatcgttcgttcatagttcctattcatcgttcatcgttcgttcatagtccctattcatcgttcttctagataatctttgtcctgccgttatgctgccgaaattccgatcgttcgttcgtccgatcattcgatcgttcgtccgttcgttcgtccaaataatcttttcctgccgttatgctgccgaaattctgatcgttcgttcgtccgatcattcgatcgttcgtccgttcgttcatagttcccattcatcgttcatcgttcgttcatacgaactattcactatcactattcaccattactattcatcgttactattcatcgttactattcacatacactattcatcatcgttactatttatcattgctattcatcatcgttactattcatcgatgatatctatagttacttttccatcgccactattcatcgttactaatcatcgttactattcatcgatcatccgatcgccccaaatttcaactactcatccatcatgctgtccagtccacttaagaccagccagacccatattccagtcatacggactccggtgactgtgattttccttccagtagggaacttcccatctggtcgcccatcccaggtttctccaagttgagcacgcttaactttgagattccttcgaaccaggcttccaaactcagattccaataattcttgtttctaaattcttatcgaattattccctatccaaccatgtcatcccttaatcctggtccatattctagaaaactcccaaaatactcttgtcccatattctgtctataactctcctgttcatactaagtcagacgattcattcgtcactattctcaccaacagtgaacttcactgtgctacaccacatacacccagctataaatacacccagctaccctctccctctccacacacactcaacaccctcagccaaggcaaacaccccacccactcagttactctgctctgccggctacacgcgtagtgttgcttcgccttcagtccaccctcctggtaagcacctccgctccaccactagtagtatctcaacaccacatgacacagattctactcaagactctacccatccatatatcgctattctgaccactatactaaatatttgttgctatacttgttggtttgtatgtttgcttgttcatgttgcatagttatcggagcgttcgtgccgtctcgtggaggccagatctgcaagtctacgccaggcagtggagctagaagctagttccgcgagctccccttcgccgaataagcacggcaagctcactggatccctttgatgcataaattacccatgtctttcaaccacaaccctcagcctgttattttatgcatgatatgattttgagacaagttat

SEQ ID NO: 64961 - DNA, 250 bp, Zea Mays
tttaggtgaggaagtagcagatttctgttgcttctgtgccaaggtggttcctaaggaggagaaacaagactgaagtgcgggaggacttggtcctccacatagaaatcttttgcttaaaaccgtatcgggaggagtttgtgcctcccttggtatgtgtaataatactactcagcactcgctttatatttctggtctgtaataaacaactcaatcttactttttaaataaatgtaagttatgtaatcgcttc

SEQ ID NO: 64962 - DNA, 1333 bp, Zea Mays
cgttcacactcaactccctcgattagtaataacaggaaaaccatccgccggaggccggagggcagattctccaccaccgcctccaccccgccctcacgacgcgaatctgcggcgaacccccctctcgtattccttctcgccgccctgccccgagcgcaccgtttagaggccgccaggctccggcacccccgcccgcccgggctcgcctggggtcgggatgccctgctgcccgccgtcgctgctcggagtcggcccacggctgcgctccttcctccgcgactacgacgcgctccagtccctcgccctcgtactcatctacctccagattggttgtgcactgatcggatcacttggggcattgttcaatggggttcttgtgatcaacctggtgattggtctatttgctgttgttgcaattgagagcagtagccagagacttggtcggacatatgctgtccttctcttctttgctgtcgtccttgacgttgcttggtttatactcttctcacatgctatctggactattaatcctgatgataagtatggtcaactgtttgttttctcactcagacttgcattgtggatgcaaatcattgggttttcagtcagatgatatattagggggttcaatctatgatccttcttactactcgtcactgttcgaggatgttcgaaacaatgcatgcaatcatcagggtgataaacaaagtggtagtaatgacagtggttcaacatccgcgggccagtcaccacgacttaaatcttttgcttgtagatctcttctggctaatgatgtggaaagtggactaagaagaccgttgaactcctaggataaaacagcgggctcatgttgaagtgggagggggctgtccagcgaaaggagcttggcaaatactgtaactgtgacttcatgtgggcatccacagcagtcttggcgccattttggagcaccgttcgtactcagcgagctttgagttaagccggatgtttctgcaaagagctgttcaatgttggtgttgcatatcggtttatgtcatgcgatatgtttactgctcatcacggtccaatttttctgacctgccttcctgtttcttttagctaccaaggaaaatgaagcaggtagttcattagttatttagtaaattggctattttttttctagccgtagcttgccagctgcttctcttcgagcattttggtcattgttcatagtgctgtcatgacaaggagcacatctctagatcagtaaaggaaagaaatgtaaatctcattcgtttctggaaagaggtgaaatgcatgagactcgtttaaaacgttgcagggttatcacatg

SEQ ID NO: 64963 - DNA, 1353 bp, Zea Mays
cgttcacactcaactccctcgattagtaataacaggaaaaccatccgccggaggccggagggcagattctccaccaccgcctccaccccgccctcacgacgcgaatctgcggcgaacccccctctcgtattccttctcgccgccctgccccgagcgcaccgtttagaggccgccaggctccggcacccccgcccgcccgggctcgcctggggtcgggatgccctgctgcccgccgtcgctgctcggagtcggcccacggctgcgctccttcctccgcgactacgacgcgctccagtccctcgccctcgtactcatctacctccagattggttgtgcactgatcggatcacttggggcattgttcaatggggttcttgtgatcaacctggtgattggtctatttgctgttgttgcaattgagagcagtagccagagacttggtcggacatatgctgtccttctcttctttgctgtcgtccttgacgttgcttggtttatactcttctcacatgctatctggactattaatcctgatgataagtatggtcaactgtttgttttctcactcagacttgcattgtggatgcaaatcattgggttttcagtcagatgatatattagggggttcaatctatgatccttcttactactcgtcactgttcgaggatgttcgaaacaatgcatgcaatcatcagggtgataaacaaagtggtagtaatgacagtggttcaacatccgcgggccagtcaccacgacttaaatcttttgcttgtagatctcttctggctaatgatgtggaaagtggactaagaagaccgttgaactcctaggataaaacagcgggctcatgttgaagcagttcatttctcggaccagtgggagggggctgtccagcgaaaggagcttggcaaatactgtaactgtgacttcatgtgggcatccacagcagtcttggcgccattttggagcaccgttcgtactcagcgagctttgagttaagccggatgtttctgcaaagagctgttcaatgttggtgttgcatatcggtttatgtcatgcgatatgtttactgctcatcacggtccaatttttctgacctgccttcctgtttcttttagctaccaaggaaaatgaagcaggtagttcattagttatttagtaaattggctattttttttctagccgtagcttgccagctgcttctcttcgagcattttggtcattgttcatagtgctgtcatgacaaggagcacatctctagatcagtaaaggaaagaaatgtaaatctcattcgtttctggaaagaggtgaaatgcatgagactcgtttaaaacgttgcagggttatcacatg

SEQ ID NO: 64964 - DNA, 2728 bp, Zea Mays
cgttcacactcaactccctcgattagtaataacaggaaaaccatccgccggaggccggagggcagattctccaccaccgcctccaccccgccctcacgacgcgaatctgcggcgaacccccctctcgtattccttctcgccgccctgccccgagcgcaccgtttagaggccgccaggctccggcacccccgcccgcccgggctcgcctggggtcgggatgccctgctgcccgccgtcgctgctcggagtcggcccacggctgcgctccttcctccgcgactacgacgcgctccagtccctcgccctcgtactcatctacctccagattggttgtgcactgatcggatcacttggggcattgttcaatggggttcttgtgatcaacctggtgattggtctatttgctgttgttgcaattgagagcagtagccagagacttggtcggacatatgctgtccttctcttctttgctgtcgtccttgacgttgcttggtttatactcttctcacatgctatctggactattaatcctgatgataagtatggtcaactgtttgttttctcactcagacttgcattgtggatgcaaatcattgggttttcagtcaggtttttgtcttcgttcttatggattcagatgtatagattagggccttctttcaccacgccaacatattttgaaaccaaccatgaagcaagaactagtttcttgagccctagatctgattcagttagacggaattccatggcagatgatatattagggggttcaatctatgatccttcttactactcgtcactgttcgaggatgttcgaaacaatgcatgcaatcatcaggtattaccttctagtttctggcacactgttcttttcattcaaattcaatgtttaacatattaggggaaagaataggatgaccaaatacctctgtccattttgtgtttctttctatctcaataaatttgtcttgtctagaccacctaccttcaatctgtgacaaataatttaagaatctgaatgtgctatcagctcactgtatcacatagcaaaatctttagtgtacattttctgatgtgtttgtttgactgaagtaccaacgagatagttgagagtataaagtatctattcaattattctggaaatactgacctacttaatttcactttttctaagtagctcttttttctatgaagacgtttgcatcaaagtaaaattagataaatacatgtttgaactatacctttggaatgcttcgaaaacgtggaccttttcagctgtcatatggaatttgaagtttatgcagtactcaggttcgtgagaattaactgtgtatagttcactgattttgtaagtacagttgatgtggagtaacatgggaaaactttattggctattccagttatttccctggtacagaagctataaaaaagcagcatattatcttagttactttctctgattgtaaatatgaatccgtatatcctttctcttaagtcaaacttttctttaactttgatggtcaatatgtgaatttttgtatagaatagcaatgcaagatcgaaattaatagattcattatgaaaaatacttttatatatctcttttcatttaaggtaatgtatttttttacagatattgcttgtaatagtgtcatatttgagactgtcttaatgtattaatggacttatatttgtgattggaggaagtatgtgatgcataaattttttcgtttatttatatgtgatcattatggtgtgtactaaactgtaaatatttaccttgactggatcaaacttaagaatatcacaaattctcacacaatagactgcacattctctctgatttatactaattcatttgtaattctctattctcatttccatcaagattttggttgcattcttatttagcttagtgcaagcacaatgccgattttgaggtttttttttctgtaaaatgcatttgcccaggttgaagatgttaagttctgcttcaatgggtgataaacaaagtggtagtaatgacagtggttcaacatccgcgggccagtcaccacgacttaaatcttttgcttgtagatctcttctggctaatgatgtggaaagtggactaagaagaccgttgaactcctaggataaaacagcgggctcatgttgaaggtggaccatattttggtaacctaaatcctgtagccatctttctcttaaacatagaggcttacacaccgcagcagttcatttctcggaccagtgggagggggctgtccagcgaaaggagcttggcaaatactgtaactgtgacttcatgtgggcatccacagcagtcttggcgccattttggagcaccgttcgtactcagcgagctttgagttaagccggatgtttctgcaaagagctgttcaatgttggtgttgcatatcggtttatgtcatgcgatatgtttactgctcatcacggtccaatttttctgacctgccttcctgtttcttttagctaccaaggaaaatgaagcaggtagttcattagttatttagtaaattggctattttttttctagccgtagcttgccagctgcttctcttcgagcattttggtcattgttcatagtgctgtcatgacaaggagcacatctctagatcagtaaaggaaagaaatgtaaatctcattcgtttctggaaagaggtgaaatgcatgagactcgtttaaaacgttgcagggttatcacatg

SEQ ID NO: 64965 - DNA, 3578 bp, Zea Mays
ctcagcagtgccaaggcccagtgccgaccgagccttcccctcgcctgatctgcgcgtccctgtcctcggctcctgagcactcgcgtactcgctcgtcgcatctgcccacactaccactggccacaccgaaaccctagctgcgcacccaaatcgatcgatccagggacggcagcggcacgacgcgccaaaataggttcagaactagcgtcgcgacaaaatcggttcacgaccgccacggttggaccagctgcgccgtggccgtgcggctgtgcggccggcattggcgcgctgcgcgctgcttcaggccggtgtgccgcgcggctgggcgacgtgaaacggattcacatcgtaggagcagaacttgctggtcgaggtggaggcttgctgcgtgcagcaggacagggagtcagggacaacagattttagcaaagtatgagctgtgaactagtgttagaggaaagcacgaaggaaatagtggcataaaacttgatttgtctaaagataaattggtttcttaaaatggctcagcaaatggcttcagttcatttgaatgatacaacagttgttgatgccaagcccttgcgtacattgactcccatgttccctgcaccactagggcttcacacgttcactcctcagaactcaccttcagttgtttgtgtgaccccatttggaccatatggtggagggactgaattggggatgcctgctgttccaccaatgtttgcagcgcctgtacctgctgcaggagcagaacccagccagagacagccgcatacagctaatatgaacggaggagacactgaattggggatgcctgctgttccaccaatgtttgcagcgcctgcacctgctgcaggagcagaacccaaccagggacagccacatacagctaatatgaacggaactgcagtcaacagttcggtcacatctttgcaaactccttcagctgccacacaggaatctggtaagaggaagaggggcaggccaaagcgtgtgcctgatactactgtttcttcggctccttcagctcctctggctcctactatttctccagttccttcacttcctgtggttactccagttccttcagctcctcaggaattgaacactattgtttccctgacgccttcttcagacgccccacaagaatctggcaagaggaagaggggacggcccaaacgtatacaagacgttcctgtaatggttcctctgacctcgcaaggagatagcacatctgttattcagacacttccagggtccagtgtacatgaatctggtacgagaaggggacgtcccaaacgtttgcaggatagttcagatattgtcactccaattgactcaaaagatagtgagtcctctccccagccacctattgccgcacctgccgaaagtggtaagaggaagaggggacgtccaaagcgcattgatggttccgtgactccttcaagtcattctgttttttcaatagatgatgatgctgttgacacgatgaaacgtggacgacctaggaaaattgataccaaactgttacagtttccatctttattttcagatgatcctagacaaactgcagataatgtactcatgatgtttgacgccctgcgacgcagacttatgcagatggatgatgtgaaacaagctgcaaagcagcagcctaacttgaaagctgggagcatcatgaacaatgctgaacttcgtgtcaataaggacaagaggataggagaggttccaggtgttgaggttggtgatatgttctacttcagaattgagatgtgcttagtggggttgaatagtcagagcatggcagggatagattacatgtctgccaagttcggtaatgaggaggaccctgtagctattagtgttgtgtcagctggtgtatatgataacactggagatgatccagatgttctagtttatactggacatggcatgtcgggtaaggatgaccaaaaacttgagaggggtaatcttgcactagagaggagtttgcatagaggtaatccaatcagagtcattcgtagcgtaaaagacttgacttgtccaactggcaagatttacatatatgatggtctttacaagatcaaagaagcctgggtagagaaagggaaatctggtttcaatgtgtttaaacacaagttgcttagggaacctggccaacctgatggcattgcagtgtggaagaagactgaaaaatggagggaaaatccatcatctagagaccatgttatattacttgacatatcatatggtgtggaaaataaccctgtctgccttgtaaatgaggttgacgatgaaaagggccctagccgcttcacttatacaactaatttgacatatgggaattctctcagctcgatgagaaagatgcaaggttgcaaatgcataagtgtatgcctccctggtgataacaactgctcctgtacgcatcgaaatgctggtgaccttccttacagtgcttcaggcatacttgttagccgaatgcccgttttatacgagtgtggtgattcctgcacatgttcacaaaattgccggaaccgagttgtacagaaaggtacgcagatccgttttgaagtttttaagacaggagatcgtggttggggcctccgtagttgggatccaattcgagcaggcacatttatctgtgaatatgcaggtgaaatcattgacataaatagagtgaatggtgaagatgactacatatttgagacttctcctttagagcagaatttaagatggaactatgcaccggaattgctgggtgagcctagtctttctgactcaaatgaaacaccaaagcagctgcctatagtcatcagtgcaaaacgaaccggcaacatagctcgctttatgaaccacagctgctcacctaatgtgttttggcaaccagttctgtatgatcatggtgatgagggatatccacatattgcattctttgcaattaagcatattcctccaatgacagagcttacctatgattatggtcagaaccagcgtaatagtattcaaatgggaacccattctggttttcggaagtctaaaagttgcttatgttggtccccgaagtgtagaggttcctttggctaataaccagccctataaggaatatattggatcataatactccatttcaaagttacacctaagatatctgctggtcgacttttatattcagctcccaaaaatctgtcacaagtttgtgagagcaactgaattgtctttaccagcagaagcagcccgtcatggtggcctgtatgaagcagcaggggtctcctatgtcctaggtgttccatgcaccatcgaataaatccacccctcttcatgttagaatgggaaacggggatgtgttttgcacaaattatctgtcatgcagtcgtcgtattaagttttcttgaactagtttgtagtcatcctcagagaatgcatgatgtgcactttgtagtaatatatgcaggttgttatcccacctactatataaccatcaaaatttcagtgtttgtacaggacgccctatgtagtggcgctgcttgcaaatgttagttagtacactgatattccataattttactcctttc

SEQ ID NO: 64966 - DNA, 3474 bp, Zea Mays
ccaaggcccagtgccgaccgagccttcccctcgcctgatctgcgcgtccctgtcctcggctcctgagcactcgcgtactcgctcgtcgcatctgcccacactaccactggccacaccgaaaccctagctgcgcacccaaatcgatcgatccagggacggcagcggcacgacgcgccaaaataggttcagaactagcgtcgcgacaaaatcggttcacgaccgccacggttggaccagctgcgccgtggccgtgcggctgtgcggccggcattggcgcgctgcgcgctgcttcaggccggtgtgccgcgcggctgggcgacgtgaaacggattcacatcgtaggagcagaacttgctggtcgaggtggaggcttgctgcgtgcagcaggacagggagtcagggacaacagattttagcaaagtatgagctgtgaactagtgttagaggaaagcacgaaggaaatagtggcataaaacttgatttgtctaaagataaattggtttcttaaaatggctcagcaaatggcttcagttcatttgaatgatacaacagttgttgatgccaagcccttgcgtacattgactcccatgttccctgcaccactagggcttcacacgttcactcctcagaactcaccttcagttgtttgtgtgaccccatttggaccatatggtggagggactgaattggggatgcctgctgttccaccaatgtttgcagcgcctgtacctgctgcaggagcagaacccagccagagacagccgcatacagctaatatgaacggaggagacactgaattggggatgcctgctgttccaccaatgtttgcagcgcctgcacctgctgcaggagcagaacccaaccagggacagccacatacagctaatatgaacggaactgcagtcaacagttcggtcacatctttgcaaactccttcagctgccacacaggaatctggtaagaggaagaggggcaggccaaagcgtgtgcctgatactactgtttcttcggctccttcagctcctctggctcctactatttctccagttccttcacttcctgtggttactccagttccttcagctcctcaggaattgaacactattgtttccctgacgccttcttcagacgccccacaagaatctggcaagaggaagaggggacggcccaaacgtatacaagacgttcctgtaatggttcctctgacctcgcaaggagatagcacatctgttattcagacacttccagggtccagtgtacatgaatctggtacgagaaggggacgtcccaaacgtttgcaggatagttcagatattgtcactccaattgactcaaaagatagtgagtcctctccccagccacctattgccgcacctgccgaaagtggtaagaggaagaggggacgtccaaagcgcattgatggttccgtgactccttcaagtcattctgttttttcaatagatgatgatgctgttgacacgatgaaacgtggacgacctaggaaaattgataccaaactgttacagtttccatctttattttcagatgatcctagacaaactgcagataatgtactcatgatgtttgacgccctgcgacgcagacttatgcagatggatgatgtgaaacaagctgcaaagcagcagcctaacttgaaagctgggagcatcatgaacaatgctgaacttcgtgtcaataaggacaagaggataggagaggttccaggtgttgaggttggtgatatgttctacttcagaattgagatgtgcttagtggggttgaatagtcagagcatggcagggatagattacatgtctgccaagttcggtaatgaggaggaccctgtagctattagtgttgtgtcagctggtgtatatgataacactggagatgatccagatgttctagtttatactggacatggcatgtcgggtaaggatgaccaaaaacttgagaggggtaatcttgcactagagaggagtttgcatagaggtaatccaatcagagtcattcgtagcgtaaaagacttgacttgtccaactggcaagatttacatatatgatggtctttacaagatcaaagaagcctgggtagagaaagggaaatctggtttcaatgtgtttaaacacaagttgcttagggaacctggccaacctgatggcattgcagtgtggaagaagactgaaaaatggagggaaaatccatcatctagagaccatgttatattacttgacatatcatatggtgtggaaaataaccctgtctgccttgtaaatgaggttgacgatgaaaagggccctagccgcttcacttatacaactaatttgacatatgggaattctctcagctcgatgagaaagatgcaaggttgcaaatgcataagtgtatgcctccctggtgataacaactgctcctgtacgcatcgaaatgctggtgaccttccttacagtgcttcaggcatacttgttagccgaatgcccgttttatacgagtgtggtgattcctgcacatgttcacaaaattgccggaaccgagttgtacagaaaggtacgcagatccgttttgaagtttttaagacaggagatcgtggttggggcctccgtagttgggatccaattcgagcaggcacatttatctgtgaatatgcaggtgaaatcattgacataaatagagtgaatggtgaagatgactacatatttgagacttctcctttagagcagaatttaagatggaactatgcaccggaattgctgggtgagcctagtctttctgactcaaatgaaacaccaaagcagctgcctatagtcatcagtgcaaaacgaaccggcaacatagctcgctttatgaaccacagctgctcacctaatgtgttttggcaaccagttctgtatgatcatggtgatgagggatatccacatattgcattctttgcaattaagcatattcctccaatgacagagcttacctatgattatggtcagaaccagcgtaatagtattcaaatgggaacccattctggttttcggaagtctaaaagttgcttatgttggtccccgaagtgtagaggttcctttggctaataaccagccctataaggaatatattggatcataatactccatttcaaagaagcagcccgtcatggtggcctgtatgaagcagcaggggtctcctatgtcctaggtgttccatgcaccatcgaataaatccacccctcttcatgttagaatgggaaacggggatgtgttttgcacaaattatctgtcatgcagtcgtcgtattaagttttcttgaactagtttgtagtcatcctcagagaatgcatgatgtgcactttgtagtaatatatgcaggttgttatcccacctactatataaccatcaaaatttcagtgtttgtacaggacgccctatgtagtggcgctgcttgcaaatgttagttagtacactgatattccataattttactcctttc

SEQ ID NO: 64967 - DNA, 3143 bp, Zea Mays
cagtgccgaccgagccttcccctcgcctgatctgcgcgtccctgtcctcggctcctgagcactcgcgtactcgctcgtcgcatctgcccacactaccactggccacaccgaaaccctagctgcgcacccaaatcgatcgatccagggacggcagcggcacgacgcgccaaaataggttcagaactagcgtcgcgacaaaatcggttcacgaccgccacggttggaccagctgcgccgtggccgtgcggctgtgcggccggcattggcgcgctgcgcgctgcttcaggccggtgtgccgcgcggctgggcgacgtgaaacggattcacatcgtaggagcagaacttgctggtcgaggtggaggcttgctgcgtgcagcaggacagggagtcagggacaacagattttagcaaagtatgagctgtgaactagtgttagaggaaagcacgaaggaaatagtggcataaaacttgatttgtctaaagataaattggtttcttaaaatggctcagcaaatggcttcagttcatttgaatgatacaacagttgttgatgccaagcccttgcgtacattgactcccatgttccctgcaccactagggcttcacacgttcactcctcagaactcaccttcagttgtttgtgtgaccccatttggaccatatggtggagggactgaattggggatgcctgctgttccaccaatgtttgcagcgcctgtacctgctgcaggagcagaacccagccagagacagccgcatacagctaatatgaacggaggagacactgaattggggatgcctgctgttccaccaatgtttgcagcgcctgcacctgctgcaggagcagaacccaaccagggacagccacatacagctaatatgaacggaactgcagtcaacagttcggtcacatctttgcaaactccttcagctgccacacaggaatctggtaagaggaagaggggcaggccaaagcgtgtgcctgatactactgtttcttcggctccttcagctcctctggctcctactatttctccagttccttcacttcctgtggttactccagttccttcagctcctcaggaattgaacactattgtttccctgacgccttcttcagacgccccacaagaatctggcaagaggaagaggggacggcccaaacgtatacaagacgttcctgtaatggttcctctgacctcgcaaggagatagcacatctgttattcagacacttccagggtccagtgtacatgaatctggtacgagaaggggacgtcccaaacgtttgcaggatagttcagatattgtcactccaattgactcaaaagatagtgagtcctctccccagccacctattgccgcacctgccgaaagtggtaagaggaagaggggacgtccaaagcgcattgatggttccgtgactccttcaagtcattctgttttttcaatagatgatgatgctgttgacacgatgaaacgtggacgacctaggaaaattgataccaaactgttacagtttccatctttattttcagatgatcctagacaaactgcagataatgtactcatgatgtttgacgccctgcgacgcagacttatgcagatggatgatgtgaaacaagctgcaaagcagcagcctaacttgaaagctgggagcatcatgaacaatgctgaacttcgtgtcaataaggacaagaggataggagaggttccaggtgttgaggttggtgatatgttctacttcagaattgagatgtgcttagtggggttgaatagtcagagcatggcagggatagattacatgtctgccaagttcggtaatgaggaggaccctgtagctattagtgttgtgtcagctggtgtatatgataacactggagatgatccagatgttctagtttatactggacatggcatgtcgggtaaggatgaccaaaaacttgagaggggtaatcttgcactagagaggagtttgcatagaggtaatccaatcagagtcattcgtagcgtaaaagacttgacttgtccaactggcaagatttacatatatgatggtctttacaagatcaaagaagcctgggtagagaaagggaaatctggtttcaatgtgtttaaacacaagttgcttagggaacctggccaacctgatggcattgcagtgtggaagaagactgaaaaatggagggaaaatccatcatctagagaccatgttatattacttgacatatcatatggtgtggaaaataaccctgtctgccttgtaaatgaggttgacgatgaaaagggccctagccgcttcacttatacaactaatttgacatatgggaattctctcagctcgatgagaaagatgcaaggttgcaaatgcataagtgtatgcctccctggtgataacaactgctcctgtacgcatcgaaatgctggtgaccttccttacagtgcttcaggcatacttgttagccgaatgcccgttttatacgagtgtggtgattcctgcacatgttcacaaaattgccggaaccgagttgtacagaaaggtacgcagatccgttttgaagtttttaagacaggagatcgtggttggggcctccgtagttgggatccaattcgagcaggcacatttatctgtgaatatgcaggtgaaatcattgacataaatagagtgaatggtgaagatgactacatatttgagacttctcctttagagcagaatttaagatggaactatgcaccggaattgctgggtgagcctagtctttctgactcaaatgaaacaccaaagcagctgcctatagtcatcagtgcaaaacgaaccggcaacatagctcgctttatgaaccacagctgctcacctaatgtgttttggcaaccagttctgtatgatcatggtgatgagggatatccacatattgcattctttgcaattaagcatattcctccaatgacagagcttacctatgattatggtcagaaccagcgtaatagtattcaaatgggaacccattctggttttcggaagtctaaaagttgcttatgttggtccccgaagtgtagaggttcctttggctaataaccagccctataaggaatatattggatcataatactccatttcaaaggaagcgttggtttaaagttgag

SEQ ID NO: 64968 - DNA, 908 bp, Zea Mays
cttatctgatgcagatcagtggatccctatcagttactgattttttggaactaaacatagtattctccaacaaatagctacctagggtgccatcatgaaacacaccaccagccaatgcatctaaactcatgtcttcctgctgcgccgctaggtatgctacttcatccctatcgactatcggcgctgtgtgcaccgacgatcaggagagcatgtctctggaaccttcgccataggcgatcctgcaccggtagaggacatataaggtttttaggaagcactctgcatgactgctccacattgtcttcaacttgtcgccaaggcttctctgggcgtcttatgtcgtcatcaacaatgggacggtactaatgtcaacatcatctgctctacctcatcgttagcaaggaacaaacagatcagtctgaattactatggagacttgaagagacttgcttgcttgtactcaaaatatggtttcttctcctggaagtgatatggaacacaccatgcgctgttgtaaagaatacacgaagcagatatgtataatggaatcgaaaaaggtcctgcatcaatcattctgaggccagagcgaacaaatgcaatcgagaacaccgaattacaactcgagtagccataatgctgtgctgcttgttttgtgaaactggctcagtaagataagatagttcagaactggagcttaagctggtatagttcaaggtgaaagaaaacctcacattctggttgaagctacagagtgactaaactaaaagcaaccggtaactaaaagtagtcatattggcaattgaataccatcttgtctccccgcctcattctatcgagatgttaatcgcgacgactgctacctatgatttagagcgcgagatcgcctagaatgcaactcaaccaaatat

SEQ ID NO: 64969 - DNA, 2478 bp, Zea Mays
ccaaaatcgccgccgcagccgccgccgccatcagccatggccgctgacacttcgaagcccttcttcccggcggcgccgcactcggctctccgcccctccaggagcgccgcctcgcgcgcgttccctgagagctcctactggcgcgccttccgctcctcggagctcgtgtccgacgccggcttccccgtcaccgatctcaccttcgcctcctctgtggaagacagagctgcccctaccctcgccgcttcctggtccacctccgtgcacgtcttctcctccgaccccctcgagaagctccgtaggatctctgtcgcgggcgatctcgccttctccccgtccttccgctgcgacggcgccctcctcgccaccggagacaagaagggtgtcgtccgcgtattccgcgccgacaaggccgccacgggggccctccgcacgctgcgcgcccacgccgccgagacccgcgtggtccggtacccagtcgctggcggcgacaagcttcacctcctcaccgccggcgacgacgcgctcctcgcctactgggacgtgccctcggagactcccgtcttctccatccccgccgcgcaccaggactacattcgcggcggtgcggcctcccctgctgatcacaacattttcgccactggctcttacgaccgcagcgtcaaattgtgggatgcccgcaccagcaataccggcccatctttgtccttctcccacggggaattggtggaaagcgtgctattccttccgtccggcgggctgctggccacggccggagggaacgtggtcaagatttgggacgtcattggtggtggctggctcgtgcactctgtggagagccatgtcaagacagtgatggacctgactcttggcaagatggtcaacactggggagatgcggctgcttagtgcgggcattgatgggtatgtgaagagctttgattttgggaagcttaagatgacacactccttgcggtaccctcagccgctcctttctgtggctgtctcgccctgtgggtctgtggtggtggcagggtctgcgaaagggaagatttatatgagaaataggaagaagaaggctgtggatgaggaagagcaagggatgaaatctgttggtggtgcgattgactgggtatctccagagccggagaagtcagtgttgaggccaaattactttaggtacttccgccgtgggcagaatgagaaggcaaaggagggtgactttgtgattgagaagccgaagaaggtgaaatatgcagagcatgataagttactgagaaagttcaggcacaaggatgctctggtttcagcattggtcaagaacaacccgaggagtgttgtggctgttatggaggagctggtttcaagaagaaagctcataagatgcatcgggaatttggataatgaggaacttggtcttcttttggagttccttcaccggaatgcaactttgccaaggtatgctaagttgttgttgtgtttggcaaacaaggttgtggagatgcgcgaggctgatatccgatcagatgagaagctgaaggtgcatatgaggaatcttaagagaatggttgcagaggagattcagatacagcacatgctgcagggcattcaagggatgatttcaccaatgcttgcacttgcaaccagatgaaaaggtgcttttgtttcaaacaaggaatttttgttatatgttagtttgcaggaggcccctgcatgcgatatgtactgctttgaaaaattatgtttgctattggatagtgaagtatgccagatggttgagatactctgttctgtcattctatgctattgtttatctggtttaacatatcattcctgattttgctcatttgatttgatagtatgcatttatacataatctgacatcctcaaaactcaaaaggcttcaatgcttgtaatttgtcacttgttttgctttgttttgtatgaattggtttaaaactttactttgcatggagtggctaagctaaattttccacttgcatggaggaaactactagctagggtgctctcacccatgttcaagtatcaggcattgcatatttacactgctggttgtcttatagaccaaagaaccaagtgtggtatatctctactggagaattgagcctaaaactctacactaacagtcaaatggcgaaagcatggttgaatacatgcagaaccaagtgtggtatatctctactggagaattgagcctaaaactctacactaataggcaaatggtgaaagcatgtgttcaaccagagtacaattatgactgctgccaaatgatacaccgacaaagcaacaagcacccgggtgtatgtcttttgaaatgctggtagttatcttattactgcttgcaattcttatctcactgtctgcacctttgatggtagtttactagtcattaggggcagggtagtacaggtagggctctccaatccttggttgtacttgtacctgatttggttatatt

SEQ ID NO: 64970 - DNA, 1750 bp, Zea Mays
aggtcggataccaaaagaccaaaccggaaggtgttttaatactacaatcccaattgccatattcaggatactaaattttagaagcccggtcattggaggagcttttggttaaaaaaaaactctctttcgacgtcctctttgcagtcgatctgaaaaattacagtctacagtttacagccatgttactctccggccgccaccactgccaccacaaattcaccccttcctcaccgccggccgccttccgctccacccatctccgccgtctccggccgcttcggcccctagcccttgcatccgccaaccctcctccgccaccgtcgccactaccttccctattcccgtcgccaaggcgtccatggcggtggcggcacagcgccagcgacgttatcgaagaccttcctcctgtcgaggccgatggaaacgacgccgtcaaggtcaagaagagcttctgggcagcggtgagcctcatcatcggcacggcggtcgggccgggcatgctgggcctgccgtccgccaccatccgctccggccaggcgccctccgcggtctgcatcctgctctcgtgggcctacgtcgtgtcctccatcgtcctcgtcgcagagctcagcttcgccgccatggcgcgtgacggcgtcgacgaggtcagcttcacgggacttgcgtcgagcaccctgggggcgggccctggcgcggtcgtcgctgtcgtgtacgccgcgctcagcttctccctgctcgtcgcttgcgtcgccggcatcggctcgctcgtctcccagctgttccccggggtgagtccggtcctggccaacgccctgttcccctgcttcgccggcgtcctcatcgccttcttccctttcaaggccgtcgacggcgccaaccgagccctctgtggcctgatgcttgtttccattaccgctctcgttgtgactggcgtgtccgtcggtcggaccagcttgctgggatctctcagctacgcgtgctggagcccaggcgcgatcctgccggccataccggtgaccgtgctcacgctcgggttccatgtcatcacacccttcatctgcaagatcgtgggagactcggtgtacgacgctcggaaggcgatactgattgggggcgctgtgccattggccatggtgctgtcatggaatgccgtcattctcgggctggctagtgctggcggcaatgctgggtttgatgaccctatcaaactcctcctctcagtgaatccagccgcgctgcctgctgttcgaggcttcgcttttgctgcactggcgacgagcctgatagggtacgcagtgagctttccgaagcagttggcggacacagtggagctgattcttcagaggttttctcagaagcaaggaagcatgcaccaagctaatggtagcggtggatatggcagaaatggggcgattcttacatggatggtgctgatcattcccatctttattgcgtcgttcttctcagcagtcttctccaaggcactggattttgctggggtttatgcaaactgcttcctgtttgggatcctgcctcctgttatggcctggatccatcggtcacagaagaaaaggagatctcctgattcatgtgaagatgttctacctggcgggaatgctgctctgctgatacttttcgctgttgctgttgtcctagcaatctggcactagtagaaggtacaattttgagtcactccgttggagtttggagaagctctttagaattgcatttcaagagcagtatggcgctg

SEQ ID NO: 64971 - DNA, 1703 bp, Zea Mays
aggtcggataccaaaagaccaaaccggaaggtgttttaatactacaatcccaattgccatattcaggatactaaattttagaagcccggtcattggaggagcttttggttaaaaaaaaactctctttcgacgtcctctttgcagtcgatctgaaaaattacagtctacagtttacagccatgttactctccggccgccaccactgccaccacaaattcaccccttcctcaccgccggccgccttccgctccacccatctccgccgtctccggccgcttcggcccctagcccttgcatccgccaaccctcctccgccaccgtcgccactaccttccctattcccgtcgccaaggcgtccatggcggtggcggcacagcgccagcgacgttatcgaagaccttcctcctgtcgaggccgatggaaacgacgccgtcaaggtcaagaagagcttctgggcagcggtgagcctcatcatcggcacggcggtcgggccgggcatgctgggcctgccgtccgccaccatccgctccggccaggcgccctccgcggtctgcatcctgctctcgtgggcctacgtcgtgtcctccatcgtcctcgtcgcagagctcagcttcgccgccatggcgcgtgacggcgtcgacgaggtcagcttcacgggacttgcgtcgagcaccctgggggcgggccctggcgcggtcgtcgctgtcgtgtacgccgcgctcagcttctccctgctcgtcgcttgcgtcgccggcatcggctcgctcgtctcccagctgttccccggggtgagtccggtcctggccaacgccctgttcccctgcttcgccggcgtcctcatcgccttcttccctttcaaggccgtcgacggcgccaaccgagccctctgtggcctgatgcttgtttccattaccgctctcgttgtgactggcgtgtccgtcggtcggaccagcttgctgggatctctcagctacgcgtgctggagcccaggcgcgatcctgccggccataccggtgaccgtgctcacgctcgggttccatgtcatcacacccttcatctgcaagatcgtgggagactcggtgtacgacgctcggaaggcgatactgattgggggcgctgtgccattggccatggtgctgtcatggaatgccgtcattctcgggctggctagtgctggcggcaatgctgggtttgatgaccctatcaaactcctcctctcagtgaatccagccgcgctgcctgctgttcgaggcttcgcttttgctgcactggcgacgagcctgatagggtacgcagtgagctttccgaagcagttggcggacacagtggagctgattcttcagaggttttctcagaagcaaggaagcatgcaccaagctaatggtagcggtggatatggcagaaatggggcgattcttacatggatggtgctgatcattcccatctttattgcgtcgttcttctcagcagtcttctccaaggcactggattttgctggggtttatgcaaactgcttcctgtttgggatcctgcctcctgttatggcctggatccatcggtcacagaagaaaaggagatctcctgattcatgtgaagatgttctacctggcgggaatgctgctctgctgatacttttcgctgttgctgttgtcctagcaatctggcactagtagaagcaaagcatatgcatgcatcgacaaaca

SEQ ID NO: 64972 - DNA, 897 bp, Zea Mays
ctctctgtgtcatcaccctcattccgacagttccgctagaaggaaaagaagaaaaaaaaactctctttctctctctttcccagccctctctctccctctccacccggccgccaccatgtcaggcctctacagccagggcttctcccctgcaagaaccctctccccccagattaggagcaaccccgacgctgacagccagtacttggccgagcttctcgcggagcatcagaagctggggcccttcatgcaggtgctgccgatatgcagccggctgctcaatcaagaaatcatgcgggtatcaagcatggttcatgaccatggatttagtgatcttgacaggcgccggtttagaagtcctagccctatgtcctcaccaattgtccggcctaatctacatggcaatggatttggtccttggaatgggatgcaccaagagagattgggctttcctcctcctggaacaagtatggactggcaaggagcaccaccaagccctggctcttatattgtcaagaagatcgttcgcttggaagttcccgtcgactcttaccctaatttcaactttgtggggcgcattctagggccaaggggtaattctctaaagcgagttgaagcatcaactggctgccgtgtttttattagagggaagggttccatcaaagacacagaaaaggaggagaagcttaaaggaaaacctggctatgaacatctgaatgagccactgcatatattgatcgaggctgaattaccagcgaatatcgttgacacaagactgagacaggcacaagaagtcatggaagaattgctaaagccagtgccaacaacaaaaggaaatgtactcctatatcctgaaacctgaaagctgggagtatgctattcagttgcaactttctcaaa

SEQ ID NO: 64973 - DNA, 1483 bp, Zea Mays
ctctctgtgtcatcaccctcattccgacagttccgctagaaggaaaagaagaaaaaaaaactctctttctctctctttcccagccctctctctccctctccacccggccgccaccatgtcaggcctctacagccagggcttctcccctgcaagaaccctctccccccagattaggagcaaccccgacgctgacagccagtacttggccgagcttctcgcggagcatcagaagctggggcccttcatgcaggtgctgccgatatgcagccggctgctcaatcaagaaatcatgcgggtatcaagcatggttcatgaccatggatttagtgatcttgacaggcgccggtttagaagtcctagccctatgtcctcaccaattgtccggcctaatctacatggcaatggatttggtccttggaatgggatgcaccaagagagattgggctttcctcctcctggaacaagtatggactggcaaggagcaccaccaagccctggctcttatattgtcaagaagatcgttcgcttggaagttcccgtcgactcttaccctaatttcaactttgtggggcgcattctagggccaaggggtaattctctaaagcgagttgaagcatcaactggctgccgtgtttttattagagggaagggttccatcaaagacacagaaaaggaggagaagcttaaaggaaaacctggctatgaacatctgaatgagccactgcatatattgatcgaggctgaattaccagcgaatatcgttgacacaagactgagacaggcacaagaagtcatggaagaattgctaaagccagtggacgagtcacaagatttctacaagaggcaacagctgagggaactggctatgctgaactcaaccctgagagaagacagtcctcatcctggaagcgtatcccccttcagtaacggcagcatgaagcgcgcgaagccaagccagtagagggaagcttctggctctcctccaacccttgagtcgtccacggcgcggcaccgacaaggatagtctgggtaccaggtgcgtcgtcgtctcaaggagacgaggagggatcggtggccgatgaactgcctttgatcttggtgggtggatccggccgtgctgttgttgtaactgcttgtaagggtgatggacattattcgttttattcgttgttggctgttaaccctgagtagattatggtgctgaggagatagtggtttcagtgggagactagttaaaccctgatagtagtgtgagctgttcgtttaggtgtttaattagcttgtactattctcgaatatttgtcgtccgctagttcattttttgaactaagccgcgacaaataaaaaagaactcagggatagtattattattcgcgttacattgtgtggagttgcaacactagagatgatgacacatcccgctctatgatagtttgatgacgacagctttggatgaaccatgtggatctatctattagaatgt

SEQ ID NO: 64974 - DNA, 1200 bp, Zea Mays
ctctctgtgtcatcaccctcattccgacagttccgctagaaggaaaagaagaaaaaaaaactctctttctctctctttcccagccctctctctccctctccacccggccgccaccatgtcaggcctctacagccagggcttctcccctgcaagaaccctctccccccagattaggagcaaccccgacgctgacagccagtacttggccgagcttctcgcggagcatcagaagctggggcccttcatgcaggtgctgccgatatgcagccggctgctcaatcaagaaatcatgcgggtatcaagcatggttcatgaccatggatttagtgatcttgacaggcgccggtttagaagtcctagccctatgtcctcaccaattgtccggcctaatctacatggcaatggatttggtccttggaatgggatgcaccaagagagattgggctttcctcctcctggaacaagtatggactggcaaggagcaccaccaagccctggctcttatattgtcaagaagatcgttcgcttggaagttcccgtcgactcttaccctaatttcaactttgtggggcgcattctagggccaaggggtaattctctaaagcgagttgaagcatcaactggctgccgtgtttttattagagggaagggttccatcaaagacacagaaaaggaggagaagcttaaaggaaaacctggctatgaacatctgaatgagccactgcatatattgatcgaggctgaattaccagcgaatatcgttgacacaagactgagacaggcacaagaagtcatggaagaattgctaaagccagtggacgagtcacaagatttctacaagaggcaacagctgagggaactggctatgctgaactcaaccctgagagaagacagtcctcatcctggaagcgtatcccccttcagtaacggcagcatgaagcgcgcgaagccaagccagtagagggaagcttctggctctcctccaacccttgagtcgtccacggcgcggcaccgacaaggtggtgcccttggaactcgcgctgtccgtgtctgtctcgtgggtgcttgtgtaatagaagtagtcacgcggcgccctcctcggaatgcgtgatgacagattgctgacagccgaaggcccgcagcgcctacagggaaagctactggcgtgcctgcactgaagtcgtcggcggcggcggccgt

SEQ ID NO: 64975 - DNA, 235 bp, Zea Mays
ccttccttgccttgccctcagagtcaatcttgcaaagcccggcccactcgccaagagtcttagcggcaggaacagtgaccaggtgaacattgtgctcagcgcagagtgccttcaccaacttgacgtaatctggctggtcacagtcctcagcaagcacgcaaagctgagcggcgtgcttctcgatggccttggcagcctcacggagacccttcacaagaccgtcatgagcacttga

SEQ ID NO: 64976 - DNA, 1474 bp, Zea Mays
cgaaaacaattgccaagtgccaaccaagctcggtggctgaatagaaaaattgtgcccggcagcgagccagcgatggccagattcacgctgttctgctccggcatgtcagcatgtgacgaggacgccaccatcctctgcacctcaaaagtgagagcgagagcccccccctcaacatcactgacaccaccaaagcacgggaaagcagaggaagcggagcagagctttgtgggagcgtcaatggcaggaacttgggtgaagaagggcgccggtccgggagcacggagctcccacgccatcacgctgctcgggggcacggcctactcgttcggcggcgagctcaccccgcgcgtcccggttgacagcaccatgtacgccttcgacctcaacacccagacgtggtcggcgctggacgcgacgggcgacgtgccgccgccgcgcgtgggcgtgaccatggcggccgcgggcggcacggtgttcacgttcggcgggcgcgacctggagcacaaggagctgaacgagctctacgccttcgacgcggcgacgcgggcgtggacgctgctgtcgtccggcgccgacggcccgccgcaccgcagctaccactccatggcggcggacgcgggcgcggggcgggtgtacgtgttcggcgggtgcggcgacgccggccgcctcaacgacctgtgggcgtacgacgtggcggcggggcaatgggagcagctgccgccgccgggggaggcgtgccagccgcgcggcgggcccgggctggtcgtcgccggcgggaaggtgtgggtggtgtacgggttctcgggcgaggagctggacgacgtgcactgctacgacccggccacccgggagtgggccgcggtccagaccacgggcgacaggcccagcccccggagcgtgttctgcgccgccgggttcgggaggcacgtggtgctgttcggcggcgaggtggaccccagtgacctcggccacctcggcgccggcaagttctcggccgaggcgttcgcgctggacacggagaccggcgcgtggacgcggctggacgacagggcggaggccgagcaccacccggggcctcgcgggtggtgtgcgttcacggcgggggagaaggacggccagcgagggctgctggtgtatggcggcaactcgccgacgaacgaccggctcggcgacatctacttcttcacgcccgttcttgaggccgcaagctagcgcgtgtgacgaactggctggcaatgtgtagcagttcaatctgcatgtgcagggcttgtatgttgtgaattgtgatcatcgtcttgtgtcgtagttgagtttcctggtttgtttttcttaacttccgtcgttttttggatttttatatgctgtgtgatttgagaataattatggcaaaaattaaatcccacccatgtatctgtgtttttatttggagtgtaattggattgaatagatacatcgaatactgacgggtatcact

SEQ ID NO: 64977 - DNA, 3909 bp, Zea Mays
atcttggtccagaagaccttgctgtctagagagctttggctacagctattgactccctatacccttgctacccgtggtgatcatgcagtaaaagtatggagcatattagccttgttggtcccctatgattgagcttctgcagggccacaacaaatcagttgtgtatatctgtttgttctagtctttgaaggcacaaaccccacactgttgtcctcctgttgtttccccagcgtgttcatcgtgtgagtgaaggagttgtggtgttcaggtctgagtaatctcccttccgactccccagtttggtctgctcctgagcgatgtgtcatattctcggcctggtgaccagcccagccgactatccccctcataaacgcctcaaagaacacgacctcgacgttgcggagcgccgccgtgaaccacccaatcgtcaaccggtcaccttgtgttttctctgagcaagattagggaccctgttagtgacctcgcggttacctgtgtcgcaccatggtggtcgtttagtcgtcggctcgccagagtggacggcggagtgttgtggccgagcgtttgtaaaaggagataaaccgaagaacttaagtgcttctgtcagtggaatagggcaatagtggcctgggttccgttggattattccaggcacgtgggtcctttgcgcaaaagaacaaacgcaagcgtgggctctcagccgcatgccagccctgctcggtaatgtgctgcgtgggccggattcagcccgcaatttaatgccttccctttatttatttagctgagagcttgttaattagaccacaaattgtacaaaaatagtataaaatcatgtactttctagtaaaaaaataaatttaggatttttacgacagatgccaaatttcagggaataaattttagaaataagaattgagcaccaaaaatcatggaattttttttgagaaatttgttatcagaagctgatcacttggtaaaagtttggtgctgtttgtaagccatttgttcagaaatccttgtagagtccctaattgaaataataagaagaacataatcacatgtggattagaaatttggaaaaaggaacaagtttaacaagtgaaacctgatctttggataaagaagcaagagtgcctagtgggatctggatttttggtgtagtttgaagattgttctaattctctagaagttcaagttgtaggattcaagtcagaaaagtaagtccttacttaagtcaagcatagagttattggttatggagacagagttccctagtgtggcttgagagcttagtgatgatattagaatgtttagctcccctgttgtttggttagttttgtgtgcacctttagtaaggtgtagtttgtactgctttagagtatcttctttgtagttgcacaagtatatgcattcatgttcatatcatttcatgtagagctccgagcagaaggagtgtaaattcaagacgaagtggttgtggaagaggagtttgctcgagtgcctattcagcaagtggatagagctatctaactggttattgggtagaaaggtcttgagcctcttcactgcaacaaaggcaagccccggtgcatttacccttccttgtatttttaaaaagacttttatacacttaagtctagtgaaatgtgcattaagtttataggaattgcttggaaaactatttgatgcattgcctaccttgatatccatacctttatagatacttctgatgaagtatcaaaatatgatttacaaaaatgcttagccctgcttagatcttgtggatagaggctgtcttttgcaataatgcctagctcaggggttatcctgaggaaggatggcttctacctgcaagaatattttcattgggagcatggtgggatcttactgcaaagttccctataatgctcttttcatcctaaggaacacaaacaatcctaaggatggaagtacttaaatcgggacttgggctatgaacaagtgatgttctacccaggttaattaaggattggatgcgtatgtaggcctgtatgatcaaggactatcttaactggccacatgccctggatatgggacagggtaagcttgaacccggctattccatacatgaaaagacaatcgcgcactgggagtggagagatggcgagagtggcacgtaccctcctggcaaaggaccgcctaaaaagggtggtgtgctctcgggtggcgcggacctgttcatgcagtggaggatccgtgggaatggttgacatatgcaagggttaagtgctacatatgtcgtgtggttagagatcctcagctgagtaaatcgattcggatcgccgttatatccccggagagtggagacttgatcgctgccctgcaacctaagtcaggatgtaaacattatgaataaaaatgatgttgtattgatgagatggtgaaattagactagatgctaccagagtctattaatatttaatctggcgttaaaatattgaaagtaaggactcactttagtaagttatttctgcaaaagtatctaagttgattcttgctaaagccttttccttgattcctatttaaccagcatatccttgagagtcatttttccttagtcgggtaagacttgcgaaagtacactccgtactcagggttttcgaacccatgttgttgtaggtgatgaggagtactctaggtgttcctatggctggagggcatttccagttctggaggaggattagttaggcttgtgtataatctttggagggtttctaccttcctgctattgtaataagttatgcactttgagtatatcaggacttgtaataaatgtaactcttcctatgtaataaacttgagttttgaaaaggtaaagaatgtttgtaaagtcttccgctcttatctccgaagtgtgtgtatcgaatgtgattactgtaatatgcatgtatggtgggagatccttgggatgatgagttcaagtggttgaactcgtgatagccttgttaagttacctggtacacgtgcatagccatctgaggccatcaaagcaaggattggtgcatgtgggcctgataacttgggagggctgccacaagtacaaacatctttatctttacatgagtttcacggtcgtgcgtcacaaccaaagcgggcagatctactttattcctccacgtatcgtgataagataagtcttatctcttgcttgtgtaaccaagcaacaaaccacgagcatcaactcggcagttgccgccatcacggcgtagattttttctcccccacgtctcgcctaacaaccagaggtcatcctactagcctctgactcaccagtcaccgccgcagcattgtagatctatttttttgcccacgcctcacctaacaaaatagataagtcttatctcccgcatacgcaaccaaccatgcaaccaccacgagcacttccttctcctcctcgttgtcgtcgtatttaatcccaactttccatctctttcctcatctctgcctctctcacccgtatacttctgcatcgtcatggaggacctcgagcagaccatcctgctggctttcgactcattagtctcccttgccgcgccccacccacgacaccgactttactatctcacgcgccatgcaacacgcttccccgcgacaacacctttactacctgatgtccatgtcatgtaacatgcttctccaagcacctcgaaccactgttgtgactctccgtcgccatgcaatacatggctaaatagacaagttgaggaggcaccaccaccggcaataatattggcaaagaatttgagatattgagatcggtgatatatatagatagatagattgtatattacgagccctaggcttccaataactagtggaagcccaggtcagacggtgcaatccggtcgagccggaccaggtctaggctgc

SEQ ID NO: 64978 - DNA, 1064 bp, Zea Mays
ctcacggttcggtcctttcctcccccacagtgcccttccatgcatggcagtcgccgcaaccaatcctccgatgcgctgccaccacgccagagccgctcggcagatccataaatcatgcctcccctactgcgcccttatccatggcgtcgccgcgatccgttcctcctccactgcaatatctccctccgctccgcatcgctctcctaataataataaaacgtcccgaggtttctagaatcagttggagaaaaaaattgacggtcgaaagcatctggtagagataggggttctattgccgtacttctctccctttcctcgctcaccacgaccgacattcttcctcagtttctacaacgcacacttgacatagcatctgaggaacaggatctaatcctaatcttgaacgacatccgcacgagtcaaagcgtcaagcccatctccttcacgggaaccattggatttcaatggagttgcgcttcttcatttctcataattgttggtggaactattctgctcatccatagattgtttctgaccccgtgacatggacttttgggtgcttatacatttattatttttctttacctcgaggattttccccggagctatgtttctccatttttcataattgtggtagaacagttctggttatctataggcaagtcctaaacactatctcttccagcgacgacatttacacttctgtaatctttctgcctgagctattagctggaacatctttttaccatgacaaatattgtcgcctagctcattcccatcaaagaaattcaaaatagcagtccacaacccgagttatgcaaaatcacgtaaaggatatgaatagggtatttcctcttagattttctagcatttttcagattcaaacacacacacaaatgaaattttgtaaacaaaaacattataatcttatattttctataaatttaatataaacatttgttcatacaagaaataaatgatcaatgcttgcggttgggtatgacatgtggtgtttttgttggatgtccctcaaactgatattgtgagcattttaatgtaatatg

SEQ ID NO: 64979 - DNA, 2986 bp, Zea Mays
taggaattcaagaggcaaacctgaaaactcgggaccgggccacgccatggataaaggagcagccggtggctaaatttttggttggccccgcgggcgcacgtcgtttccgctcgcccccctgcgatgccgggaccggccgtggaggcagcggccaggagcggcggcgaccaccacggcggctgctgcgggaaggcggccggcaagtgggagaagacgtacctggatgtcctgggcatctgctgcaccgccgaggtggcgctcgtcgagcggctcctgacgcccatccaaggcgtgagggcggtcaccgtcgtcgtcccgtcccggaccgtcatcgtcgaccacgacaccgccgccgtctcccagttccacattgtgaaggttctgaacaaggcgggcctcgaggcctccgtccgagcctatggcagcagcgccggcgccggcgggcggtggcccagcccgttcaccgtcgcctgcggcgccctgctcgccctgtccctgctcgcgccgctgctccccccgctgcggtggctggcggtggcggcggcctgcgtgggctcccagcccatgctgctccgggcgttcgccgcggcgggcaagctgacgctggacatcaacatcctgatgctcatcgcggtcgccggctccgtggcgctcgggagcttcacggaggccggcgccatcgtgttcctcttcaccgtcgccgagtggctggagacgctggcgtgcagcaaggccagcgccgggatgctgtccctcatgtccacggtgcccaagaccgtcgtgctggccgagacggggcaggtcgtcggcatgggcgacgtcgcggtcggcaccgtcgtcgcggtcagggccggcgacgtggtccccgtggacggcgtggtcgtcggcgggcacagcgaggtcgacgagagcagcctcaccggcgagtccttccccgtgccgaagcagccgcagtcggaggtctgggccggcaccatcaacttagacggctacatctccgtgaggacgacggccctcgccgagaactcgacggtggcgaagatggagaggctggtggaggaggcccagaacagccggtctcggacgcagcggctcatcgactcgtgcgccaagcactacacccctgtgtggttgtgtcttttgcatgtgcagccgtggtcgtcctcgcggcgggggtggtcctcgtgcccgccctgctgggagctcgcgacctggagctggagcattggttccggctgtccctggtgctgctggtgagcgcgtgcccgtgcgcgctggtgctgtccacgcccgtcgccaccttctgcgcgctcctgcgggcggccaggatggggctcctcgtcaagggaggcaacgtcctcgagtcgctgggcgaagtcagggtcgccgcgttcgacaagaccggcaccatcaccagaggggagttcagcatcaaggacttccatgtggttggggacaaggttgaaatgaaccagctactctactgggtatctagcatcgagagcaaatcaagccatccaatggccgctgcacttgtcgagtacgctcagtccaaatctgtacagccgaagccggagaacgtgaccgagacctgcatctatcatggcgagggcatctacggggtgatggatgggaaacagatctacattggaaacgaaaggatcatagcaaggtcctcgtgtcgtcatcatcaacatgctggccaccaagaaacagacggtctcaaaggcgtgtccatcggccacgtgatctgcgacggcgatctggtggggaagttctcgctgtccgacacctgcaggacaggggcggccgaggcgatcctgcagctgaggtcgatggggatcaagtcggtgatgctgaccggggacagcgcggcggcggccaagcacgcgcaggagcagctcgggggcgtcctggaggagctccacgcggggctcctgccggaggacaaggtccggctcgtccggggcctgcaggcgcggcacggggcgacgctgatggtgggcgacggcatgaacgacgccccggcgctggccgcggcggacgtgggcgtgtccatgggcctgtccgggtcggccgcggccatcgagacgagccacgccgcgctcatgtccggcgacatcctcagggtgcccaaggccgtccggctcgggcgccgcgcccggcgcaccatcgccgtgaacgtggcctcctccgtcggcgccaaggccgccgtgctggcgctcgccgtcgcgtggcgccccgtgctgtgggtggccgtgctcgccgacgtcggcacgtgcctgctcgtcgtcctccacagcatgctgctgctcagggacggcgccgcccgccgcccgaggtgctgcgctagcgctacggcgtgcaagagcaagcaggcgtccaagccgtgctgcgcgacggtgaagccggtggcgacgacgaggcacaggcacgggcacgggcacgggcacgggcacgcaggcgcggggaagcccgggacgctaggaggcgacaagcagggtaaggactgccatggttgctgccagaaggagagcaagccgcccgaggacgccgtcgtgatcgccattccgggacgggccgtggagcaccggaaggaggccttccctcacgagaacgcgggagccggggggtgctgcgctgcagcgcacggtgccgaagacgaggtatgcattgtcatcagcgccaggtcgccctgctgcagcaccgcgaggagtcggtctggttctcccaaggacgcattgtgctgccacggctccggtggtaaagacggcggcgccatctcagccctcgtgtgctgacctcacctaccagcactaccattcgtggaatacggtcgtcttgtatataaaaaaattactcatatcctatgccgtagacaggaagttgtttctattacgagtactaatattcttgtaatctatgttcccctgagatcattagaaaaaaaattatatataatactctattaaaaatctaatgtggg

SEQ ID NO: 64980 - DNA, 1915 bp, Zea Mays
agcgtgtgcctagcatttcttccctggctgaaggcgtgggtctcgagagctgcttaaaaagctttgcacaaaaatggcttcgcctgcgataccattcgcccccctcacgtcccatcgcgccgctcccttcgtcctggggtgtcctcctccatggccaccgccaccgccgcctgccgctcgcccacggccgccgccgccgcgccctgacgctgctgctgctgctagactgctagaggaggaggccggggcaggcagctcgcgagctcgatcgcctggcgggcccgagctggagtcgatggtgctggatctcaatgccgagtcgccgacgcccggctcggcctcggccgcctcgagctccagcgtcgtagtgggcgggggcttcttccggttcgacctgctcggagggacacccgacgaggagggttgctcgccctcgccacccatcgtgacgcgccagctcttccccttgccgtacccggacgctgcaggtagcaccgccgcctcgacggcgtcgaacgggtcgccgccgccggaggtggcgggggcatgggcgcgccgcccagcggatctcggggcgccggcgctggcacaggggaaggtgatgtctgcgccttcgtcgcccgcggttttgtctcctgccgccgggaagaagagccggcgggggcccaggtcgcggagctcgcaataccggggcgtcaccttctacaggaggaccggccgctgggagtcacacatctgggactgcgggaagcaggtctacctgggtggatttgatactgcgcacgccgcagcaagggcctatgatcgcgctgccatcaagttcagaggccttgacgccgacatcaacttccagttgaaggactatgaagatgacttgaagcaggtacatctaccttggtctatttgacagtgaaatcgaagcagcaagagcgtatgatagggcagccattcgcttcaatggaccggatgctgttaggaactttgattctgtttcctatgatggagatgtcccacttccacctgcaattgagaaagatgtggttgatggagacatccttgatctgaatttgaggatttcacaacctaacgtgcatgatctcagaagtgatggtaccctgactggttttggattaagttgtaattctcctgaagcttcaagctccattgtttctcagccaatgggcccccagtggcctgtccatcctcacagcagatcgatgcggccccagcatccacatctgtatgcatctccttgtccaggcttctttgtgaacctcagggaggcgcctatgcaggaagaggagaaccggtccgagccggcgtgtccccagccgttcccctcctgggcatggcaaacgcagggctcccgtgccccagttctccctgccaccactgcagcatcatcaggattctctaccgccgctgccaccggcgtggacgcggccacagccggccacagcgtgccgccgccgtctggtagcctccggcagttctcgggctaccaccagctccgcttccccccaaccgcctgacggagacagaccacctcctgttgagttggcggcggcggcggcgtctcatagctggccggtggttggctggctgcccatgcaacgccacgccggtgggtgcgggtcggtattcggtaacagtcgccactgttgggtatggttttgtgggactacagaggatgcagtgatctctcgctgctgctgtgtgctgtctctctcgctccctctacccacccacacctgtttgtaatatgaatttatcgccctctcgcgctcgtgattcgtccatcttcgtttcgttttgatggccaccggatgggatcatgagcgtgttgcgagaaattgtgtaataaaccatgcgtatttttatttatatttatttattgtgacgatggtacatgata

SEQ ID NO: 64981 - DNA, 2024 bp, Zea Mays
agcgtgtgcctagcatttcttccctggctgaaggcgtgggtctcgagagctgcttaaaaagctttgcacaaaaatggcttcgcctgcgataccattcgcccccctcacgtcccatcgcgccgctcccttcgtcctggggtgtcctcctccatggccaccgccaccgccgcctgccgctcgcccacggccgccgccgccgcgccctgacgctgctgctgctgctagactgctagaggaggaggccggggcaggcagctcgcgagctcgatcgcctggcgggcccgagctggagtcgatggtgctggatctcaatgccgagtcgccgacgcccggctcggcctcggccgcctcgagctccagcgtcgtagtgggcgggggcttcttccggttcgacctgctcggagggacacccgacgaggagggttgctcgccctcgccacccatcgtgacgcgccagctcttccccttgccgtacccggacgctgcaggtagcaccgccgcctcgacggcgtcgaacgggtcgccgccgccggaggtggcgggggcatgggcgcgccgcccagcggatctcggggcgccggcgctggcacaggggaaggtgatgtctgcgccttcgtcgcccgcggttttgtctcctgccgccgggaagaagagccggcgggggcccaggtcgcggagctcgcaataccggggcgtcaccttctacaggaggaccggccgctgggagtcacacatctgggactgcgggaagcaggtctacctgggtggatttgatactgcgcacgccgcagcaagggcctatgatcgcgctgccatcaagttcagaggccttgacgccgacatcaacttccagttgaaggactatgaagatgacttgaagcagatgaggaattggactaaggaggagtttgttcacatactccgacgtcaaagcactgggtttgccagggggagctcaaagtaccgcggtgtgacactacacaagtgtggtcggtgggaagctcggatgggtcagcttctcggaaagaagtacatctaccttggtctatttgacagtgaaatcgaagcagcaagagcgtatgatagggcagccattcgcttcaatggaccggatgctgttaggaactttgattctgtttcctatgatggagatgtcccacttccacctgcaattgagaaagatgcagtggttgatggagacatccttgatctgaatttgaggatttcacaacctaacgtgcatgatctcagaagtgatggtaccctgactggttttggattaagttgtaattctcctgaagcttcaagctccattgtttctcagccaatgggcccccagtggcctgtccatcctcacagcagatcgatgcggccccagcatccacatctgaggcgcctatgcaggaagaggagaaccggtccgagccggcgtgtccccagccgttcccctcctgggcatggcaaacgcagggctcccgtgccccagttctccctgccaccactgcagcatcatcaggattctctaccgccgctgccaccggcgtggacgcggccacagccggccacagcgtgccgccgccgtctggtagcctccggcagttctcgggctaccaccagctccgcttccccccaaccgcctgacggagacagaccacctcctgttgagttggcggcggcggcggcgtctcatagctggccggtggttggctggctgcccatgcaacgccacgccggtgggtgcgggtcggtattcggtaacagtcgccactgttgggtatggttttgtgggactacagaggatgcagtgatctctcgctgctgctgtgtgctgtctctctcgctccctctacccacccacacctgtttgtaatatgaatttatcgccctctcgcgctcgtgattcgtccatcttcgtttcgttttgatggccaccggatgggatcatgagcgtgttgcgagaaattgtgtaataaaccatgcgtatttttatttatatttatttattgtgacgatggtacatgata

SEQ ID NO: 64982 - DNA, 1186 bp, Zea Mays
agagcgtccattccctttttgaagcagatgaggaattggactaaggaggagtttgttcacatactccgacgtcaaagcactgggtttgccagggggagctcaaagtaccgcggtgtgacactacacaagtgtggtcggtgggaagctcggatgggtcagcttctcggaaagaagtacatctaccttggtctatttgacagtgaaatcgaagcagcaagagcgtatgatagggcagccattcgcttcaatggaccggatgctgttaggaactttgattctgtttcctatgatggagatgtcccacttccacctgcaattgagaaagatggtacaattggactattgtacttagttttgcatggcgtccattagacgatcctctacaatctcactgggattaattgttcttagcagtggttgatggagacatccttgatctgaatttgaggatttcacaacctaacgtgcatgatctcagaagtgatggtaccctgactggttttggattaagttgtaattctcctgaagcttcaagctccattgtttctcaggaggcgcctatgcaggaagaggagaaccggtccgagccggcgtgtccccagccgttcccctcctgggcatggcaaacgcagggctcccgtgccccagttctccctgccaccactgcagcatcatcaggattctctaccgccgctgccaccggcgtggacgcggccacagccggccacagcgtgccgccgccgtctggtagcctccggcagttctcgggctaccaccagctccgcttccccccaaccgcctgacggagacagaccacctcctgttgagttggcggcggcggcggcgtctcatagctggccggtggttggctggctgcccatgcaacgccacgccggtgggtgcgggtcggtattcggtaacagtcgccactgttgggtatggttttgtgggactacagaggatgcagtgatctctcgctgctgctgtgtgctgtctctctcgctccctctacccacccacacctgtttgtaatatgaatttatcgccctctcgcgctcgtgattcgtccatcttcgtttcgttttgatggccaccggatgggatcatgagcgtgttgcgagaaattgtgtaataaaccatgcgtatttttatttatatttatttattgtgacgatggtacatgata

SEQ ID NO: 64983 - DNA, 1208 bp, Zea Mays
agagcgtccattccctttttgaagcagatgaggaattggactaaggaggagtttgttcacatactccgacgtcaaagcactgggtttgccagggggagctcaaagtaccgcggtgtgacactacacaagtgtggtcggtgggaagctcggatgggtcagcttctcggaaagaagtacatctaccttggtctatttgacagtgaaatcgaagcagcaagagcgtatgatagggcagccattcgcttcaatggaccggatgctgttaggaactttgattctgtttcctatgatggagatgtcccacttccacctgcaattgagaaagatgcagtggttgatggagacatccttgatctgaatttgaggatttcacaacctaacgtgcatgatctcagaagtgatggtaccctgactggttttggattaagttgtaattctcctgaagcttcaagctccattgtttctcagccaatgggcccccagtggcctgtccatcctcacagcagatcgatgcggccccagcatccacatctgtatgcatctccttgtccaggcttctttgtgaacctcagggaggcgcctatgcaggaagaggagaaccggtccgagccggcgtgtccccagccgttcccctcctgggcatggcaaacgcagggctcccgtgccccagttctccctgccaccactgcagcatcatcaggattctctaccgccgctgccaccggcgtggacgcggccacagccggccacagcgtgccgccgccgtctggtagcctccggcagttctcgggctaccaccagctccgcttccccccaaccgcctgacggagacagaccacctcctgttgagttggcggcggcggcggcgtctcatagctggccggtggttggctggctgcccatgcaacgccacgccggtgggtgcgggtcggtattcggtaacagtcgccactgttgggtatggttttgtgggactacagaggatgcagtgatctctcgctgctgctgtgtgctgtctctctcgctccctctacccacccacacctgtttgtaatatgaatttatcgccctctcgcgctcgtgattcgtccatcttcgtttcgttttgatggccaccggatgggatcatgagcgtgttgcgagaaattgtgtaataaaccatgcgtatttttatttatatttatttattgtgacgatggtacatgata

SEQ ID NO: 64984 - DNA, 1034 bp, Zea Mays
gtgaaatttggtccgattgcttcgtctagctgcgtagtttgttttgtctatgatggatgatgatgagagctgttaagagaaaacaagagaatgctggatcgatccatcagggaaattgagcgagagaggcaaggattgcaggcccaggagaaaaagctcatcactgagatcaagaaaacagctaaagaaggccagatgggagctgtcaaagtaatggccaaagaccttattcgtacccggcatcagataacaaagttctaccaactcaaatctcagctccaaggagtttctctaagagttcagacactaaaatcaactcaagctatgggtgatgccatgaagggcgttacaaaggcaatggctcaaatgaacaggcagctaaatctgccagggttgcagaggataatgcaagagtttgagcggcagaacgagaggatggagatggtgagcgaagtgatgggagatgccatagatgatgctttggaaggagatgaggaggaagaagaaactgaggagcttgtgaatcaagtacttgatgaaattggcattgatatcaaccaagagcttgttggagccccgtcggccgctgttgctcaacctgcttcagcgggaagggttgcccaggctgaaagtgctgggaatgctgacactggaatcgacgccgatttgcaggcaaggctggacaatctgaggagaatgtaggtgctacaccagcaaaagagtagtgccttctagctctgttgcctgcgaatgtgaatacctagtcaatcaaagcaaaacgtttacaagccagtgtgtatgttgaaatgaatgaagcgttcgatatgccggtagtaatgacaaatgttaaatatacatatttacaatttcttcccctctgagttcatgatggattgatgcctgcagatgcggcatgtcagctgcgtgctaactgtgatttgcaagctgttgcttaaatacacagcagatatctaagctttaaattgccatgcttcctttccggcgattcaacgtcgtcgaagctccgaatcgtt

SEQ ID NO: 64985 - DNA, 1023 bp, Zea Mays
cttccgcaagacttgtaatattgtggaattgggccggcagctactgtgctttattaagctgttaagagaaaacaagagaatgctggatcgatccatcagggaaattgagcgagagaggcaaggattgcaggcccaggagaaaaagctcatcactgagatcaagaaaacagctaaagaaggccagatgggagctgtcaaagtaatggccaaagaccttattcgtacccggcatcagataacaaagttctaccaactcaaatctcagctccaaggagtttctctaagagttcagacactaaaatcaactcaagctatgggtgatgccatgaagggcgttacaaaggcaatggctcaaatgaacaggcagctaaatctgccagggttgcagaggataatgcaagagtttgagcggcagaacgagaggatggagatggtgagcgaagtgatgggagatgccatagatgatgctttggaaggagatgaggaggaagaagaaactgaggagcttgtgaatcaagtacttgatgaaattggcattgatatcaaccaagagcttgttggagccccgtcggccgctgttgctcaacctgcttcagcgggaagggttgcccaggctgaaagtgctgggaatgctgacactggaatcgacgccgatttgcaggcaaggctggacaatctgaggagaatgtaggtgctacaccagcaaaagagtagtgccttctagctctgttgcctgcgaatgtgaatacctagtcaatcaaagcaaaacgtttacaagccagtgtgtatgttgaaatgaatgaagcgttcgatatgccggtagtaatgacaaatgttaaatatacatatttacaatttcttcccctctgagttcatgatggattgatgcctgcagatgcggcatgtcagctgcgtgctaactgtgatttgcaagctgttgcttaaatacacagcagatatctaagctttaaattgccatgcttcctttccggcgattcaacgtcgtcgaagctccgaatcgtt

SEQ ID NO: 64986 - DNA, 929 bp, Zea Mays
attttcttaggcccatgtgtgctgtgtcgcttgtcaattgtcataggtccgatctgtccccaagcttgcaagactcctagatagatctttaagggagctgtcaaagtaatggccaaagaccttattcgtacccggcatcagataacaaagttctaccaactcaaatctcagctccaaggagtttctctaagagttcagacactaaaatcaactcaagctatgggtgatgccatgaagggcgttacaaaggcaatggctcaaatgaacaggcagctaaatctgccagggttgcagaggataatgcaagagtttgagcggcagaacgagaggatggagatggtgagcgaagtgatgggagatgccatagatgatgctttggaaggagatgaggaggaagaagaaactgaggagcttgtgaatcaagtacttgatgaaattggcattgatatcaaccaagagcttgttggagccccgtcggccgctgttgctcaacctgcttcagcgggaagggttgcccaggctgaaagtgctgggaatgctgacactggaatcgacgccgatttgcaggcaaggctggacaatctgaggagaatgtaggtgctacaccagcaaaagagtagtgccttctagctctgttgcctgcgaatgtgaatacctagtcaatcaaagcaaaacgtttacaagccagtgtgtatgttgaaatgaatgaagcgttcgatatgccggtagtaatgacaaatgttaaatatacatatttacaatttcttcccctctgagttcatgatggattgatgcctgcagatgcggcatgtcagctgcgtgctaactgtgatttgcaagctgttgcttaaatacacagcagatatctaagctttaaattgccatgcttcctttccggcgattcaacgtcgtcgaagctccgaatcgtt

SEQ ID NO: 64987 - DNA, 3070 bp, Zea Mays
cttccaacccagccgtgcctgctcgccaccattcggcgtttcttccggtgggaacagagggcaacagttgacgcggcagccaaaatcgccacgccctggacttcctcctcgaactggtggccatcgaatctgcttatccgcaactgcatttcccacgaggagcctaaagtccttgtgccggagtatggtgagatggctgatatccaagacaaggatgtcactctctttttctgcattgagctatggtgattcagtagaagatgtatgtctttggtggaaaccataatggtcgttactttggcgacattcaggaggagttcttcagcgccttcaaggaggagatggagatcaagcgacaactcgagaaggtgcaggtggcatagagggccccctggtgctttgccatcatctctgcttggatatgaggcactgacaggttccctagatgattctagatttgaagattatcttcacagactgaaccaagattgtgagcacattgtattgctaagacaattttgtcgtacaactttctttcagatgtcaagaggtggatcttgtttctacagtgagttggtgatctggagacgatcgagtgtagagtgttgaaggcacatctccaatattcctacacaaaaacacaatgcacatcaactaacagaagtgcaataccctctcatttattagcctcatcaaactgaattgaaagacaacaaactgaactgaaagtcaacatacatgccaggtaactgtattgcaaaagaatatggtacttatgcacctaaggagaaagggaagaagcatactttttttggctctggtatgtgtagctcccattttagattttaccaagtatcaaatgtacatttcttattgtttgatgactaacatcatgcagaggtattaattttaaaaaatgacgctgaaccttaaaatatattcaaaccattcatttacatcatgcaaaggtatgatattaattccatggatcgatgagttaaatggctattttaagctaaagcttgttttcctttacaagaggtggttttatctaaaagaatatctttggagtggttcttttacattctatgaaaccatcctttttatttgttgccacatgtcagacgtcatatttaaatgtgcatacacaaatatactaattgttttagctgacctagagtttatctaaaagactcggataggctgaatgtatgagttgtttcttgctgtaaatatggattggtaacgaatagagaaattaggtttgctttgtagtattacaaaaatatatgaatccttgagaagagttctttctagaattgataaaatgaattggaatgtggagctgtggattgatgaatctatcaaacctattctacaattgtagcctgcaaatagtaaatacgtacctctgtgtgttcttaagtcttaacttaatatcctaattcttggcaggcttcatgtgttgtatctttctataaatatgaacaaagaataaggttgatggaatttagttgattattaaatgatttgtaagtgctcaaaatggatgacattaacttaattgcagagcaacattgtatagtcgattaaccgtgtttgtaacatatttattctctcatctttgtgttggagtgcttgcaacatattttgtacttgcatcttcttttggtagttaagagtgtaaccagacaactcatccattttcttccatttgcacccaaactttcattgtcttattgttgtcaagcgcataatgtgatcatgttttgcttggggtggcatgaaactatagtgacaatatcagtgtggccatccagtttctgtacaattcttgactacaggtcccagttcaagttagtttgccaaatttctatggcttgtgcagctagcatcttagtgctctttgcaaaaaaagagtattattaagggtttagtctttgagctttctacatagaaggggctacttgaaatcaccataaattttcattgctttcattctctcttttggtatttcagtttggttatggtttaactcttcttttgctatttgtgtcgaccatttatgtcacaataacttcactcaatactctgtacataactgactggtcatgatatcatatttcgataaagtatttatgacaatctaagacacacaaatggtctgtggaaaacctttggatggcaagcttgtatcgtatgccttccaaattttatagtagtaccattttttatttttgtttggatacctcttctaacagagatcttggtaatttgaacttatatggtcatctggtgcctgagcttggaaaattggagcatcttcagtatttgttatgatcaccgtaggcaggttttctccacacagatgggtttgagcaaccaggacattgttgcactttttggtggtcacaccctagttggtggaatcagggaagatgccacaagaacaggtttgggtttgagggagcttagacgtccaaccctttgatctttgacaactcttcaaggagcttctgagtggagagaaggaaggccttttgcagctaccaagggacaaagctctcctctcttatccatccttctgcccacttattgacaaatatgtagcagtatatatatctttgatccttgtcatttgttcggggtcagtttatgttaacctgggtggctgtaataaatatttgtcggccttgtgttttgttatcttcttttctcttgaatggttcatttgaagatggggtgaactaaactgaatatgtagtctgtatgtttttatggttcatttttcttttttatttatctatcatatctatcggagaagctttgtcatatgaagcagagtatggtaggttggtggggcattgcagtgcagtggcagcgacactctgattaactatgccaacggattgatcattgcatttcctctgggtaactcagcaggcaaggggcctcgaaatgcaatggttgtcaacaaagaaattgtgacagattggagtcgatgatatatatgtcgtcactttcatgtaatcgttatacactaacattctgtcgaataaagactagagtc

SEQ ID NO: 64988 - DNA, 3243 bp, Zea Mays
cccgccctcacaccccaccgtggacgcgcccacgtcgcgcgtttctcggccacctccgcatgcacccgacctcctttatgagcccgcaccccactcactcactcccctcgcccagtagcgcccttctgcagacccctcgcacctctgcctcgcacagcgcgcgcccgtggagcaccatcgccgttcaccgtaacctcgggcccattccacggccgtcgtcgagcttccgtcatgctcattgctccgccgtgtcgcccccgccgttgatccgggccctcgctgtgttctcaccatcgctcaagcgctccaaagctgtctctcaagaactggtggccatcgaatctgcttatccgcaactgcatttcccacgaggagcctaaagtccttgtgccggagtatggtgagatggctgatatccaagacaaggatgtcactctctttttctgcattgagctatggtgattcagtagaagatgtatgtctttggtggaaaccataatggtcgttactttggcgacattcaggaggagttcttcagcgccttcaaggaggagatggagatcaagcgacaactcgagaaggtgcaggtggcatagagggatcattgttgcccattgaagaaccactactagaataagaaagtccaccaattttttcagcaccattatttccagcttcattgtaactgctagacaaaataaggccccctggtgctttgccatcatctctgcttggatatgaggcactgacaggttccctagatgattctagatttgaagattatcttcacagactgaaccaagattgtgagcacattgtattgctaagacaattttgtcgtacaactttctttcagatgtcaagaggtggatcttgtttctacagtgagttggtgatctggagacgatcgagtgtagagtgttgaaggcacatctccaatattcctacacaaaaacacaatgcacatcaactaacagaagtgcaataccctctcatgtaactgtattgcaaaagaatatggtacttatgcacctaaggagaaagggaagaagcatactttttttggctctgaggtattaattttaaaaaatgacgctgaaccttaaaatatattcaaaccattcatttacatcatgcaaaggtatgatattaattccatggatcgatgagttaaatggctattttaagctaaagcttgttttcctttacaagaggtggttttatctaaaagaatatctttggagtggttcttttacattctatgaaaccatcctttttatttgttgccacatgtcagacgtcatatttaaatgtgcatacacaaatatactaattgttttagctgacctagagtttatctaaaagactcggataggctgaatgtatgagttgtttcttgctgtaaatatggattggtaacgaatagagaaattaggtttgctttgtagtattacaaaaatatatgaatccttgagaagagttctttctagaattgataaaatgaattggaatgtggagctgtggattgatgaatctatcaaacctattctacaattgtagcctgcaaatagtaaatacgtacctctgtgtgttcttaagtcttaacttaatatcctaattcttggcaggcttcatgtgttgtatctttctataaatatgaacaaagaataaggttgatggaatttagttgattattaaatgatttgtaagtgctcaaaatggatgacattaacttaattgcagagcaacattgtatagtcgattaaccgtgtttgtaacatatttattctctcatctttgtgttggagtgcttgcaacatattttgtacttgcatcttcttttggtagttaagagtgtaaccagacaactcatccattttcttccatttgcacccaaactttcattgtcttattgttgtcaagcgcataatgtgatcatgttttgcttggggtggcatgaaactatagtgacaatatcagtgtggccatccagtttctgtacaattcttgactacaggtcccagttcaagttagtttgccaaatttctatggcttgtgcagctagcatcttagtgctctttgcaaaaaaagagtattattaagggtttagtctttgagctttctacatagaaggggctacttgaaatcaccataaattttcattgctttcattctctcttttggtatttcagtttggttatggtttaactcttcttttgctatttgtgtcgaccatttatgtcacaataacttcactcaatactctgtacataactgactggtcatgatatcatatttcgataaagtatttatgacaatctaagacacacaaatggtctgtggaaaacctttggatggcaagcttgtatcgtatgccttccaaattttatagtagtaccattttttatttttgtttggatacctcttctaacagagatcttggtaatttgaacttatatggtcatctggtgcctgagcttggaaaattggagcatcttcagtatttgttatgatcaccgtaggcaggttttctccacacagatgggtttgagcaaccaggacattgttgcactttttggtggtcacaccctagttggtggaatcagggaagatgccacaagaacaggtttgggtttgagggagcttagacgtccaaccctttgatctttgacaactcttcaaggagcttctgagtggagagaaggaaggccttttgcagctaccaagggacaaagctctcctctcttatccatccttctgcccacttattgacaaatatgtagcagtatatatatctttgatccttgtcatttgttcggggtcagtttatgttaacctgggtggctgtaataaatatttgtcggccttgtgttttgttatcttcttttctcttgaatggttcatttgaagatggggtgaactaaactgaatatgtagtctgtatgtttttatggttcatttttcttttttatttatctatcatatctatcggagaagctttgtcatatgaagcagagtatggtaggttggtggggcattgcagtgcagtggcagcgacactctgattaactatgccaacggattgatcattgcatttcctctgggtaactcagcaggcaaggggcctcgaaatgcaatggttgtcaacaaagaaattgtgacagattggagtcgatgatatatatgtcgtcactttcatgtaatcgttatacactaacattctgtcgaataaagactagagtc

SEQ ID NO: 64989 - DNA, 3082 bp, Zea Mays
gccgttcaccgtaacctcgggcccattccacggccgtcgtcgagcttccgtcatgctcattgctccgccgtgtcgcccccgccgttgatccgggccctcgctgtgttctcaccatcgctcaagcgctccaaagctgtctctcaagaactggtggccatcgaatctgcttatccgcaactgcatttcccacgaggagcctaaagtccttgtgccggagtatgcattgagctatggtgattcagtagaagatgtatgtctttggtggaaaccataatggtcgttactttggcgacattcaggaggagttcttcagcgccttcaaggaggagatggagatcaagcgacaactcgagaaggtgcaggtggcatagagggatcattgttgcccattgaagaaccactactagaataagaaagtccaccaattttttcagcaccattatttccagcttcattgtaactgctagacaaaataaggccccctggtgctttgccatcatctctgcttggatatgaggcactgacaggttccctagatgattctagatttgaagattatcttcacagactgaaccaagattgtgagcacattgtattgctaagacaattttgtcgtacaactttctttcagatgtcaagaggtggatcttgtttctacagtgagttggtgatctggagacgatcgagtgtagagtgttgaaggcacatctccaatattcctacacaaaaacacaatgcacatcaactaacagaagtgcaataccctctcatgtaactgtattgcaaaagaatatggtacttatgcacctaaggagaaagggaagaagcatactttttttggctctggtatgtgtagctcccattttagattttaccaagtatcaaatgtacatttcttattgtttgatgactaacatcatgcagaggtattaattttaaaaaatgacgctgaaccttaaaatatattcaaaccattcatttacatcatgcaaaggtatgatattaattccatggatcgatgagttaaatggctattttaagctaaagcttgttttcctttacaagaggtggttttatctaaaagaatatctttggagtggttcttttacattctatgaaaccatcctttttatttgttgccacatgtcagacgtcatatttaaatgtgcatacacaaatatactaattgttttagctgacctagagtttatctaaaagactcggataggctgaatgtatgagttgtttcttgctgtaaatatggattggtaacgaatagagaaattaggtttgctttgtagtattacaaaaatatatgaatccttgagaagagttctttctagaattgataaaatgaattggaatgtggagctgtggattgatgaatctatcaaacctattctacaattgtagcctgcaaatagtaaatacgtacctctgtgtgttcttaagtcttaacttaatatcctaattcttggcaggcttcatgtgttgtatctttctataaatatgaacaaagaataaggttgatggaatttagttgattattaaatgatttgtaagtgctcaaaatggatgacattaacttaattgcagagcaacattgtatagtcgattaaccgtgtttgtaacatatttattctctcatctttgtgttggagtgcttgcaacatattttgtacttgcatcttcttttggtagttaagagtgtaaccagacaactcatccattttcttccatttgcacccaaactttcattgtcttattgttgtcaagcgcataatgtgatcatgttttgcttggggtggcatgaaactatagtgacaatatcagtgtggccatccagtttctgtacaattcttgactacaggtcccagttcaagttagtttgccaaatttctatggcttgtgcagctagcatcttagtgctctttgcaaaaaaagagtattattaagggtttagtctttgagctttctacatagaaggggctacttgaaatcaccataaattttcattgctttcattctctcttttggtatttcagtttggttatggtttaactcttcttttgctatttgtgtcgaccatttatgtcacaataacttcactcaatactctgtacataactgactggtcatgatatcatatttcgataaagtatttatgacaatctaagacacacaaatggtctgtggaaaacctttggatggcaagcttgtatcgtatgccttccaaattttatagtagtaccattttttatttttgtttggatacctcttctaacagagatcttggtaatttgaacttatatggtcatctggtgcctgagcttggaaaattggagcatcttcagtatttgttatgatcaccgtaggcaggttttctccacacagatgggtttgagcaaccaggacattgttgcactttttggtggtcacaccctaggaagatgccacaagaacaggtttgggtttgagggagcttagacgtccaaccctttgatctttgacaactcttcaaggagcttctgagtggagagaaggaaggccttttgcagctaccaagggacaaagctctcctctcttatccatccttctgcccacttattgacaaatatgtagcagtatatatatctttgatccttgtcatttgttcggggtcagtttatgttaacctgggtggctgtaataaatatttgtcggccttgtgttttgttatcttcttttctcttgaatggttcatttgaagatggggtgaactaaactgaatatgtagtctgtatgtttttatggttcatttttcttttttatttatctatcatatctatcggagaagctttgtcatatgaagcagagtatggtaggttggtggggcattgcagtgcagtggcagcgacactctgattaactatgccaacggattgatcattgcatttcctctgggtaactcagcaggcaaggggcctcgaaatgcaatggttgtcaacaaagaaattgtgacagattggagtcgatgatatatatgtcgtcactttcatgtaatcgttatacactaacattctgtcgaataaagactagagtc

SEQ ID NO: 64990 - DNA, 3054 bp, Zea Mays
ctcaccatcgctcaagcgctccaaagctgtctctcaagaactggtggccatcgaatctgcttatccgcaactgcatttcccacgaggagcctaaagtccttgtgccggagtatgcattgagctatggtgattcagtagaagatgtatgtctttggtggaaaccataatggtcgttactttggcgacattcaggaggagttcttcagcgccttcaaggaggagatggagatcaagcgacaactcgagaaggtgcaggtggcatagagggatcattgttgcccattgaagaaccactactagaataagaaagtccaccaattttttcagcaccattatttccagcttcattgtaactgctagacaaaataaggccccctggtgctttgccatcatctctgcttggatatgaggcactgacaggttccctagatgattctagatttgaagattatcttcacagactgaaccaagattgtgagcacattgtattgctaagacaattttgtcgtacaactttctttcagatgtcaagaggtggatcttgtttctacagtgagttggtgatctggagacgatcgagtgtagagtgttgaaggcacatctccaatattcctacacaaaaacacaatgcacatcaactaacagaagtgcaataccctctcatttattagcctcatcaaactgaattgaaagacaacaaactgaactgaaagtcaacatacatgccaggtaactgtattgcaaaagaatatggtacttatgcacctaaggagaaagggaagaagcatactttttttggctctggtatgtgtagctcccattttagattttaccaagtatcaaatgtacatttcttattgtttgatgactaacatcatgcagaggtattaattttaaaaaatgacgctgaaccttaaaatatattcaaaccattcatttacatcatgcaaaggtatgatattaattccatggatcgatgagttaaatggctattttaagctaaagcttgttttcctttacaagaggtggttttatctaaaagaatatctttggagtggttcttttacattctatgaaaccatcctttttatttgttgccacatgtcagacgtcatatttaaatgtgcatacacaaatatactaattgttttagctgacctagagtttatctaaaagactcggataggctgaatgtatgagttgtttcttgctgtaaatatggattggtaacgaatagagaaattaggtttgctttgtagtattacaaaaatatatgaatccttgagaagagttctttctagaattgataaaatgaattggaatgtggagctgtggattgatgaatctatcaaacctattctacaattgtagcctgcaaatagtaaatacgtacctctgtgtgttcttaagtcttaacttaatatcctaattcttggcaggcttcatgtgttgtatctttctataaatatgaacaaagaataaggttgatggaatttagttgattattaaatgatttgtaagtgctcaaaatggatgacattaacttaattgcagagcaacattgtatagtcgattaaccgtgtttgtaacatatttattctctcatctttgtgttggagtgcttgcaacatattttgtacttgcatcttcttttggtagttaagagtgtaaccagacaactcatccattttcttccatttgcacccaaactttcattgtcttattgttgtcaagcgcataatgtgatcatgttttgcttggggtggcatgaaactatagtgacaatatcagtgtggccatccagtttctgtacaattcttgactacaggtcccagttcaagttagtttgccaaatttctatggcttgtgcagctagcatcttagtgctctttgcaaaaaaagagtattattaagggtttagtctttgagctttctacatagaaggggctacttgaaatcaccataaattttcattgctttcattctctcttttggtatttcagtttggttatggtttaactcttcttttgctatttgtgtcgaccatttatgtcacaataacttcactcaatactctgtacataactgactggtcatgatatcatatttcgataaagtatttatgacaatctaagacacacaaatggtctgtggaaaacctttggatggcaagcttgtatcgtatgccttccaaattttatagtagtaccattttttatttttgtttggatacctcttctaacagagatcttggtaatttgaacttatatggtcatctggtgcctgagcttggaaaattggagcatcttcagtatttgttatgatcaccgtaggcaggttttctccacacagatgggtttgagcaaccaggacattgttgcactttttggtggtcacaccctagttggtggaatcagggaagatgccacaagaacaggtttgggtttgagggagcttagacgtccaaccctttgatctttgacaactcttcaaggagcttctgagtggagagaaggaaggccttttgcagctaccaagggacaaagctctcctctcttatccatccttctgcccacttattgacaaatatgtagcagtatatatatctttgatccttgtcatttgttcggggtcagtttatgttaacctgggtggctgtaataaatatttgtcggccttgtgttttgttatcttcttttctcttgaatggttcatttgaagatggggtgaactaaactgaatatgtagtctgtatgtttttatggttcatttttcttttttatttatctatcatatctatcggagaagctttgtcatatgaagcagagtatggtaggttggtggggcattgcagtgcagtggcagcgacactctgattaactatgccaacggattgatcattgcatttcctctgggtaactcagcaggcaaggggcctcgaaatgcaatggttgtcaacaaagaaattgtgacagattggagtcgatgatatatatgtcgtcactttcatgtaatcgttatacactaacattctgtcgaataaagactagagtc

SEQ ID NO: 64991 - DNA, 2941 bp, Zea Mays
tcgtggggctctgctcatcgagctctagaactggtggccatcgaatctgcttatccgcaactgcatttcccacgaggagcctaaagtccttgtgccggagtatgcattgagctatggtgattcagtagaagatgtatgtctttggtggaaaccataatggtcgttactttggcgacattcaggaggagttcttcagcgccttcaaggaggagatggagatcaagcgacaactcgagaaggtgcaggtggcatagagggccccctggtgctttgccatcatctctgcttggatatgaggcactgacaggttccctagatgattctagatttgaagattatcttcacagactgaaccaagattgtgagcacattgtattgctaagacaattttgtcgtacaactttctttcagatgtcaagaggtggatcttgtttctacagtgagttggtgatctggagacgatcgagtgtagagtgttgaaggcacatctccaatattcctacacaaaaacacaatgcacatcaactaacagaagtgcaataccctctcatttattagcctcatcaaactgaattgaaagacaacaaactgaactgaaagtcaacatacatgccaggtaactgtattgcaaaagaatatggtacttatgcacctaaggagaaagggaagaagcatactttttttggctctggtatgtgtagctcccattttagattttaccaagtatcaaatgtacatttcttattgtttgatgactaacatcatgcagaggtattaattttaaaaaatgacgctgaaccttaaaatatattcaaaccattcatttacatcatgcaaaggtatgatattaattccatggatcgatgagttaaatggctattttaagctaaagcttgttttcctttacaagaggtggttttatctaaaagaatatctttggagtggttcttttacattctatgaaaccatcctttttatttgttgccacatgtcagacgtcatatttaaatgtgcatacacaaatatactaattgttttagctgacctagagtttatctaaaagactcggataggctgaatgtatgagttgtttcttgctgtaaatatggattggtaacgaatagagaaattaggtttgctttgtagtattacaaaaatatatgaatccttgagaagagttctttctagaattgataaaatgaattggaatgtggagctgtggattgatgaatctatcaaacctattctacaattgtagcctgcaaatagtaaatacgtacctctgtgtgttcttaagtcttaacttaatatcctaattcttggcaggcttcatgtgttgtatctttctataaatatgaacaaagaataaggttgatggaatttagttgattattaaatgatttgtaagtgctcaaaatggatgacattaacttaattgcagagcaacattgtatagtcgattaaccgtgtttgtaacatatttattctctcatctttgtgttggagtgcttgcaacatattttgtacttgcatcttcttttggtagttaagagtgtaaccagacaactcatccattttcttccatttgcacccaaactttcattgtcttattgttgtcaagcgcataatgtgatcatgttttgcttggggtggcatgaaactatagtgacaatatcagtgtggccatccagtttctgtacaattcttgactacaggtcccagttcaagttagtttgccaaatttctatggcttgtgcagctagcatcttagtgctctttgcaaaaaaagagtattattaagggtttagtctttgagctttctacatagaaggggctacttgaaatcaccataaattttcattgctttcattctctcttttggtatttcagtttggttatggtttaactcttcttttgctatttgtgtcgaccatttatgtcacaataacttcactcaatactctgtacataactgactggtcatgatatcatatttcgataaagtatttatgacaatctaagacacacaaatggtctgtggaaaacctttggatggcaagcttgtatcgtatgccttccaaattttatagtagtaccattttttatttttgtttggatacctcttctaacagagatcttggtaatttgaacttatatggtcatctggtgcctgagcttggaaaattggagcatcttcagtatttgttatgatcaccgtaggcaggttttctccacacagatgggtttgagcaaccaggacattgttgcactttttggtggtcacaccctagttggtggaatcagggaagatgccacaagaacaggtttgggtttgagggagcttagacgtccaaccctttgatctttgacaactcttcaaggagcttctgagtggagagaaggaaggccttttgcagctaccaagggacaaagctctcctctcttatccatccttctgcccacttattgacaaatatgtagcagtatatatatctttgatccttgtcatttgttcggggtcagtttatgttaacctgggtggctgtaataaatatttgtcggccttgtgttttgttatcttcttttctcttgaatggttcatttgaagatggggtgaactaaactgaatatgtagtctgtatgtttttatggttcatttttcttttttatttatctatcatatctatcggagaagctttgtcatatgaagcagagtatggtaggttggtggggcattgcagtgcagtggcagcgacactctgattaactatgccaacggattgatcattgcatttcctctgggtaactcagcaggcaaggggcctcgaaatgcaatggttgtcaacaaagaaattgtgacagattggagtcgatgatatatatgtcgtcactttcatgtaatcgttatacactaacattctgtcgaataaagactagagtc

SEQ ID NO: 64992 - DNA, 3050 bp, Zea Mays
atcgaatctgcttatccgcaactgcatttcccacgaggagcctaaagtccttgtgccggagtatgcattgagctatggtgattcagtagaagatgtatgtctttggtggaaaccataatggtcgttactttggcgacattcaggaggagttcttcagcgccttcaaggaggagatggagatcaagcgacaactcgagaaggtgcaggtggcatagagggccccctggtgctttgccatcatctctgcttggatatgaggcactgacaggttccctagatgattctagatttgaagattatcttcacagactgaaccaagattgtgagcacattgtattgctaagacaattttgtcgtacaacgttcgtccaccctccatttgtagatttgtctgcatctactctttgcggatcgtcgactcattgttcttgtcatatgtgttcgaacagtttctttcagatgtcaagaggtggatcttgtttctacagtgagttggtgatctggagacgatcgagtgtagagtgttgaaggcacatctccaatattcctacacaaaaacacaatgcacatcaactaacagaagtgcaataccctctcatttattagcctcatcaaactgaattgaaagacaacaaactgaactgaaagtcaacatacatgccaggtaactgtattgcaaaagaatatggtacttatgcacctaaggagaaagggaagaagcatactttttttggctctggtatgtgtagctcccattttagattttaccaagtatcaaatgtacatttcttattgtttgatgactaacatcatgcagaggtattaattttaaaaaatgacgctgaaccttaaaatatattcaaaccattcatttacatcatgcaaaggtatgatattaattccatggatcgatgagttaaatggctattttaagctaaagcttgttttcctttacaagaggtggttttatctaaaagaatatctttggagtggttcttttacattctatgaaaccatcctttttatttgttgccacatgtcagacgtcatatttaaatgtgcatacacaaatatactaattgttttagctgacctagagtttatctaaaagactcggataggctgaatgtatgagttgtttcttgctgtaaatatggattggtaacgaatagagaaattaggtttgctttgtagtattacaaaaatatatgaatccttgagaagagttctttctagaattgataaaatgaattggaatgtggagctgtggattgatgaatctatcaaacctattctacaattgtagcctgcaaatagtaaatacgtacctctgtgtgttcttaagtcttaacttaatatcctaattcttggcaggcttcatgtgttgtatctttctataaatatgaacaaagaataaggttgatggaatttagttgattattaaatgatttgtaagtgctcaaaatggatgacattaacttaattgcagagcaacattgtatagtcgattaaccgtgtttgtaacatatttattctctcatctttgtgttggagtgcttgcaacatattttgtacttgcatcttcttttggtagttaagagtgtaaccagacaactcatccattttcttccatttgcacccaaactttcattgtcttattgttgtcaagcgcataatgtgatcatgttttgcttggggtggcatgaaactatagtgacaatatcagtgtggccatccagtttctgtacaattcttgactacaggtcccagttcaagttagtttgccaaatttctatggcttgtgcagctagcatcttagtgctctttgcaaaaaaagagtattattaagggtttagtctttgagctttctacatagaaggggctacttgaaatcaccataaattttcattgctttcattctctcttttggtatttcagtttggttatggtttaactcttcttttgctatttgtgtcgaccatttatgtcacaataacttcactcaatactctgtacataactgactggtcatgatatcatatttcgataaagtatttatgacaatctaagacacacaaatggtctgtggaaaacctttggatggcaagcttgtatcgtatgccttccaaattttatagtagtaccattttttatttttgtttggatacctcttctaacagagatcttggtaatttgaacttatatggtcatctggtgcctgagcttggaaaattggagcatcttcagtatttgttatgatcaccgtaggcaggttttctccacacagatgggtttgagcaaccaggacattgttgcactttttggtggtcacaccctaggaagatgccacaagaacaggtttgggtttgagggagcttagacgtccaaccctttgatctttgacaactcttcaagtatgtgatttgtttacccttgatactgtgctttgttggttaaactgagtaagttgagtacacactaactgatagggagcttctgagtggagagaaggaaggccttttgcagctaccaagggacaaagctctcctctcttatccatccttctgcccacttattgacaaatatgtagcagtatatatatctttgatccttgtcatttgttcggggtcagtttatgttaacctgggtggctgtaataaatatttgtcggccttgtgttttgttatcttcttttctcttgaatggttcatttgaagatggggtgaactaaactgaatatgtagtctgtatgtttttatggttcatttttcttttttatttatctatcatatctatcggagaagctttgtcatatgaagcagagtatggtaggttggtggggcattgcagtgcagtggcagcgacactctgattaactatgccaacggattgatcattgcatttcctctgggtaactcagcaggcaaggggcctcgaaatgcaatggttgtcaacaaagaaattgtgacagattggagtcgatgatatatatgtcgtcactttcatgtaatcgttatacactaacattctgtcgaataaagactagagtc

SEQ ID NO: 64993 - DNA, 1568 bp, Zea Mays
cgaatctgcttatccgcaactgcatttcccacgaggagcctaaagtccttgtgccggagtatggtgagatggctgatatccaagacaaggatgtcactctctttttctggcgagctccccaatccacgctataaggcccactctggttttcttgactgcctaatttaacttctcatttagtgacatgttgtctgtgatgattgcagcattgagctatggtgattcagtagaagatgtatgtctttggtggaaaccataatggtcgttactttggcgacattcaggtagattgttcctctagatgttgtatttattcacaactacatttatgggtaggaattctcacagccatcttcaattaggaggagttcttcagcgccttcaaggaggagatggagatcaagcgacaactcgagaaggtgcaggtggcatagagggtaacaattcccatcctgtgactattttggttgatcggtgactgttttggttcttacaaaaatagtttctttaaatgttaaactaaatattgttctcaggatcattgttgcccattgaagaaccactactagaataagaaagtccaccaattttttcagcaccattatttccagcttcattgtaactgctagacaaaataaggtactacttaactgagaaacactacttctagccacactaggattattcaagaccagcttgtggcacttatttgtttgttgattgaatccaagttttgtagcagtcaagtcattagatctggttttgtcaccttttttactaataggatttgtttacatggtttcagcatctggcggtaaagttgtttatctttttcatacctacaatctgaatgaccttattgcgcctgtgtatttgtagccaccacaacgttgactgtgcctagatttcattccctgtgtatttaagtgtcttgttggaatgcttttgatatttgactgttgtagtatctttgctaccatgtgtgccagtttttcaagttgaaacttcatcgtgctaacaatttatttgcgatattttgtttactgctgcctgtactccctctgttccaaatcagaatacatttattacatcagataggtacattatgaaaagaatctgatgatacttatttgtatcataaattttattactttattatttaaatttggtcaaaactaagatgatttgactctctaaaaattttgaataacttatacaaaagagggaggcaactaaggaaataggagtctgccttctattttgttcatcttcatccttcaacaacttagtacattagtttatattgtttttttggtgattagcagtttagctctcttgatgtgttgctaactgatattttatgatgccatattccaaaggccccctggtgctttgccatcatctctgcttggatatgaggcactgacaggttccctagatgattctagatttgaagattatcttcacagtaagacatgctatcatttgttattgataggtcattttccttctctatcacatgtatgataatttttcacttgttattatatttttttaatcaataacag

SEQ ID NO: 64994 - DNA, 2858 bp, Zea Mays
atctgcttatccgcaactgcatttcccacgaggagcctaaagtccttgtgccggagtatgcattgagctatggtgattcagtagaagatgtatgtctttggtggaaaccataatggtcgttactttggcgacattcaggaggagttcttcagcgccttcaaggaggagatggagatcaagcgacaactcgagaaggtgcaggtggcatagagggccccctggtgctttgccatcatctctgcttggatatgaggcactgacaggttccctagatgattctagatttgaagattatcttcacagactgaaccaagattgtgagcacattgtattgctaagacaattttgtcgtacaactgagttggtgatctggagacgatcgagtgtagagtgttgaaggcacatctccaatattcctacacaaaaacacaatgcacatcaactaacagaagtgcaataccctctcatttattagcctcatcaaactgaattgaaagacaacaaactgaactgaaagtcaacatacatgccaggtaactgtattgcaaaagaatatggtacttatgcacctaaggagaaagggaagaagcatactttttttggctctggtatgtgtagctcccattttagattttaccaagtatcaaatgtacatttcttattgtttgatgactaacatcatgcagaggtattaattttaaaaaatgacgctgaaccttaaaatatattcaaaccattcatttacatcatgcaaaggtatgatattaattccatggatcgatgagttaaatggctattttaagctaaagcttgttttcctttacaagaggtggttttatctaaaagaatatctttggagtggttcttttacattctatgaaaccatcctttttatttgttgccacatgtcagacgtcatatttaaatgtgcatacacaaatatactaattgttttagctgacctagagtttatctaaaagactcggataggctgaatgtatgagttgtttcttgctgtaaatatggattggtaacgaatagagaaattaggtttgctttgtagtattacaaaaatatatgaatccttgagaagagttctttctagaattgataaaatgaattggaatgtggagctgtggattgatgaatctatcaaacctattctacaattgtagcctgcaaatagtaaatacgtacctctgtgtgttcttaagtcttaacttaatatcctaattcttggcaggcttcatgtgttgtatctttctataaatatgaacaaagaataaggttgatggaatttagttgattattaaatgatttgtaagtgctcaaaatggatgacattaacttaattgcagagcaacattgtatagtcgattaaccgtgtttgtaacatatttattctctcatctttgtgttggagtgcttgcaacatattttgtacttgcatcttcttttggtagttaagagtgtaaccagacaactcatccattttcttccatttgcacccaaactttcattgtcttattgttgtcaagcgcataatgtgatcatgttttgcttggggtggcatgaaactatagtgacaatatcagtgtggccatccagtttctgtacaattcttgactacaggtcccagttcaagttagtttgccaaatttctatggcttgtgcagctagcatcttagtgctctttgcaaaaaaagagtattattaagggtttagtctttgagctttctacatagaaggggctacttgaaatcaccataaattttcattgctttcattctctcttttggtatttcagtttggttatggtttaactcttcttttgctatttgtgtcgaccatttatgtcacaataacttcactcaatactctgtacataactgactggtcatgatatcatatttcgataaagtatttatgacaatctaagacacacaaatggtctgtggaaaacctttggatggcaagcttgtatcgtatgccttccaaattttatagtagtaccattttttatttttgtttggatacctcttctaacagagatcttggtaatttgaacttatatggtcatctggtgcctgagcttggaaaattggagcatcttcagtatttgttatgatcaccgtaggcaggttttctccacacagatgggtttgagcaaccaggacattgttgcactttttggtggtcacaccctagttggtggaatcagggaagatgccacaagaacaggtttgggtttgagggagcttagacgtccaaccctttgatctttgacaactcttcaaggagcttctgagtggagagaaggaaggccttttgcagctaccaagggacaaagctctcctctcttatccatccttctgcccacttattgacaaatatgtagcagtatatatatctttgatccttgtcatttgttcggggtcagtttatgttaacctgggtggctgtaataaatatttgtcggccttgtgttttgttatcttcttttctcttgaatggttcatttgaagatggggtgaactaaactgaatatgtagtctgtatgtttttatggttcatttttcttttttatttatctatcatatctatcggagaagctttgtcatatgaagcagagtatggtaggttggtggggcattgcagtgcagtggcagcgacactctgattaactatgccaacggattgatcattgcatttcctctgggtaactcagcaggcaaggggcctcgaaatgcaatggttgtcaacaaagaaattgtgacagattggagtcgatgatatatatgtcgtcactttcatgtaatcgttatacactaacattctgtcgaataaagactagagtc

SEQ ID NO: 64995 - DNA, 2986 bp, Zea Mays
gtgagatggctgatatccaagacaaggatgtcactctctttttctgcattgagctatggtgattcagtagaagatgtatgtctttggtggaaaccataatggtcgttactttggcgacattcaggaggagttcttcagcgccttcaaggaggagatggagatcaagcgacaactcgagaaggtgcaggtggcatagagggatcattgttgcccattgaagaaccactactagaataagaaagtccaccaattttttcagcaccattatttccagcttcattgtaactgctagacaaaataaggccccctggtgctttgccatcatctctgcttggatatgaggcactgacaggttccctagatgattctagatttgaagattatcttcacagactgaaccaagattgtgagcacattgtattgctaagacaattttgtcgtacaactttctttcagatgtcaagaggtggatcttgtttctacagtgagttggtgatctggagacgatcgagtgtagagtgttgaaggcacatctccaatattcctacacaaaaacacaatgcacatcaactaacagaagtgcaataccctctcatttattagcctcatcaaactgaattgaaagacaacaaactgaactgaaagtcaacatacatgccaggtaactgtattgcaaaagaatatggtacttatgcacctaaggagaaagggaagaagcatactttttttggctctggtatgtgtagctcccattttagattttaccaagtatcaaatgtacatttcttattgtttgatgactaacatcatgcagaggtattaattttaaaaaatgacgctgaaccttaaaatatattcaaaccattcatttacatcatgcaaaggtatgatattaattccatggatcgatgagttaaatggctattttaagctaaagcttgttttcctttacaagaggtggttttatctaaaagaatatctttggagtggttcttttacattctatgaaaccatcctttttatttgttgccacatgtcagacgtcatatttaaatgtgcatacacaaatatactaattgttttagctgacctagagtttatctaaaagactcggataggctgaatgtatgagttgtttcttgctgtaaatatggattggtaacgaatagagaaattaggtttgctttgtagtattacaaaaatatatgaatccttgagaagagttctttctagaattgataaaatgaattggaatgtggagctgtggattgatgaatctatcaaacctattctacaattgtagcctgcaaatagtaaatacgtacctctgtgtgttcttaagtcttaacttaatatcctaattcttggcaggcttcatgtgttgtatctttctataaatatgaacaaagaataaggttgatggaatttagttgattattaaatgatttgtaagtgctcaaaatggatgacattaacttaattgcagagcaacattgtatagtcgattaaccgtgtttgtaacatatttattctctcatctttgtgttggagtgcttgcaacatattttgtacttgcatcttcttttggtagttaagagtgtaaccagacaactcatccattttcttccatttgcacccaaactttcattgtcttattgttgtcaagcgcataatgtgatcatgttttgcttggggtggcatgaaactatagtgacaatatcagtgtggccatccagtttctgtacaattcttgactacaggtcccagttcaagttagtttgccaaatttctatggcttgtgcagctagcatcttagtgctctttgcaaaaaaagagtattattaagggtttagtctttgagctttctacatagaaggggctacttgaaatcaccataaattttcattgctttcattctctcttttggtatttcagtttggttatggtttaactcttcttttgctatttgtgtcgaccatttatgtcacaataacttcactcaatactctgtacataactgactggtcatgatatcatatttcgataaagtatttatgacaatctaagacacacaaatggtctgtggaaaacctttggatggcaagcttgtatcgtatgccttccaaattttatagtagtaccattttttatttttgtttggatacctcttctaacagagatcttggtaatttgaacttatatggtcatctggtgcctgagcttggaaaattggagcatcttcagtatttgttatgatcaccgtaggcaggttttctccacacagatgggtttgagcaaccaggacattgttgcactttttggtggtcacaccctagttggtggaatcagggaagatgccacaagaacaggtttgggtttgagggagcttagacgtccaaccctttgatctttgacaactcttcaaggagcttctgagtggagagaaggaaggccttttgcagctaccaagggacaaagctctcctctcttatccatccttctgcccacttattgacaaatatgtagcagtatatatatctttgatccttgtcatttgttcggggtcagtttatgttaacctgggtggctgtaataaatatttgtcggccttgtgttttgttatcttcttttctcttgaatggttcatttgaagatggggtgaactaaactgaatatgtagtctgtatgtttttatggttcatttttcttttttatttatctatcatatctatcggagaagctttgtcatatgaagcagagtatggtaggttggtggggcattgcagtgcagtggcagcgacactctgattaactatgccaacggattgatcattgcatttcctctgggtaactcagcaggcaaggggcctcgaaatgcaatggttgtcaacaaagaaattgtgacagattggagtcgatgatatatatgtcgtcactttcatgtaatcgttatacactaacattctgtcgaataaagactagagtc

SEQ ID NO: 64996 - DNA, 2909 bp, Zea Mays
ctgatatccaagacaaggatgtcactctctttttctgcattgagctatggtgattcagtagaagatgtatgtctttggtggaaaccataatggtcgttactttggcgacattcaggagttcttcagcgccttcaaggaggagatggagatcaagcgacaactcgagaaggtgcaggtggcatagagggatcattgttgcccattgaagaaccactactagaataagaaagtccaccaattttttcagcaccattatttccagcttcattgtaactgctagacaaaataaggccccctggtgctttgccatcatctctgcttggatatgaggcactgacaggttccctagatgattctagatttgaagattatcttcacagactgaaccaagattgtgagcacattgtattgctaagacaattttgtcgtacaactttctttcagatgtcaagaggtggatcttgtttctacagtgagttggtgatctggagacgatcgagtgtagagtgttgaaggcacatctccaatattcctacacaaaaacacaatgcacatcaactaacagaagtgcaataccctctcatgtaactgtattgcaaaagaatatggtacttatgcacctaaggagaaagggaagaagcatactttttttggctctggtatgtgtagctcccattttagattttaccaagtatcaaatgtacatttcttattgtttgatgactaacatcatgcagaggtattaattttaaaaaatgacgctgaaccttaaaatatattcaaaccattcatttacatcatgcaaaggtatgatattaattccatggatcgatgagttaaatggctattttaagctaaagcttgttttcctttacaagaggtggttttatctaaaagaatatctttggagtggttcttttacattctatgaaaccatcctttttatttgttgccacatgtcagacgtcatatttaaatgtgcatacacaaatatactaattgttttagctgacctagagtttatctaaaagactcggataggctgaatgtatgagttgtttcttgctgtaaatatggattggtaacgaatagagaaattaggtttgctttgtagtattacaaaaatatatgaatccttgagaagagttctttctagaattgataaaatgaattggaatgtggagctgtggattgatgaatctatcaaacctattctacaattgtagcctgcaaatagtaaatacgtacctctgtgtgttcttaagtcttaacttaatatcctaattcttggcaggcttcatgtgttgtatctttctataaatatgaacaaagaataaggttgatggaatttagttgattattaaatgatttgtaagtgctcaaaatggatgacattaacttaattgcagagcaacattgtatagtcgattaaccgtgtttgtaacatatttattctctcatctttgtgttggagtgcttgcaacatattttgtacttgcatcttcttttggtagttaagagtgtaaccagacaactcatccattttcttccatttgcacccaaactttcattgtcttattgttgtcaagcgcataatgtgatcatgttttgcttggggtggcatgaaactatagtgacaatatcagtgtggccatccagtttctgtacaattcttgactacaggtcccagttcaagttagtttgccaaatttctatggcttgtgcagctagcatcttagtgctctttgcaaaaaaagagtattattaagggtttagtctttgagctttctacatagaaggggctacttgaaatcaccataaattttcattgctttcattctctcttttggtatttcagtttggttatggtttaactcttcttttgctatttgtgtcgaccatttatgtcacaataacttcactcaatactctgtacataactgactggtcatgatatcatatttcgataaagtatttatgacaatctaagacacacaaatggtctgtggaaaacctttggatggcaagcttgtatcgtatgccttccaaattttatagtagtaccattttttatttttgtttggatacctcttctaacagagatcttggtaatttgaacttatatggtcatctggtgcctgagcttggaaaattggagcatcttcagtatttgttatgatcaccgtaggcaggttttctccacacagatgggtttgagcaaccaggacattgttgcactttttggtggtcacaccctagttggtggaatcagggaagatgccacaagaacaggtttgggtttgagggagcttagacgtccaaccctttgatctttgacaactcttcaaggagcttctgagtggagagaaggaaggccttttgcagctaccaagggacaaagctctcctctcttatccatccttctgcccacttattgacaaatatgtagcagtatatatatctttgatccttgtcatttgttcggggtcagtttatgttaacctgggtggctgtaataaatatttgtcggccttgtgttttgttatcttcttttctcttgaatggttcatttgaagatggggtgaactaaactgaatatgtagtctgtatgtttttatggttcatttttcttttttatttatctatcatatctatcggagaagctttgtcatatgaagcagagtatggtaggttggtggggcattgcagtgcagtggcagcgacactctgattaactatgccaacggattgatcattgcatttcctctgggtaactcagcaggcaaggggcctcgaaatgcaatggttgtcaacaaagaaattgtgacagattggagtcgatgatatatatgtcgtcactttcatgtaatcgttatacactaacattctgtcgaataaagactagagtc

SEQ ID NO: 64997 - DNA, 2913 bp, Zea Mays
ctgatatccaagacaaggatgtcactctctttttctgcattgagctatggtgattcagtagaagatgtatgtctttggtggaaaccataatggtcgttactttggcgacattcaggaggagttcttcagcgccttcaaggaggagatggagatcaagcgacaactcgagaaggtgcaggtggcatagaggggatcattgttgcccattgaagaaccactactagaataagaaagtccaccaattttttcagcaccattatttccagcttcattgtaactgctagacaaaataaggccccctggtgctttgccatcatctctgcttggatatgaggcactgacaggttccctagatgattctagatttgaagattatcttcacagactgaaccaagattgtgagcacattgtattgctaagacaattttgtcgtacaactttctttcagatgtcaagaggtggatcttgtttctacagtgagttggtgatctggagacgatcgagtgtagagtgttgaaggcacatctccaatattcctacacaaaaacacaatgcacatcaactaacagaagtgcaataccctctcatgtaactgtattgcaaaagaatatggtacttatgcacctaaggagaaagggaagaagcatactttttttggctctggtatgtgtagctcccattttagattttaccaagtatcaaatgtacatttcttattgtttgatgactaacatcatgcagaggtattaattttaaaaaatgacgctgaaccttaaaatatattcaaaccattcatttacatcatgcaaaggtatgatattaattccatggatcgatgagttaaatggctattttaagctaaagcttgttttcctttacaagaggtggttttatctaaaagaatatctttggagtggttcttttacattctatgaaaccatcctttttatttgttgccacatgtcagacgtcatatttaaatgtgcatacacaaatatactaattgttttagctgacctagagtttatctaaaagactcggataggctgaatgtatgagttgtttcttgctgtaaatatggattggtaacgaatagagaaattaggtttgctttgtagtattacaaaaatatatgaatccttgagaagagttctttctagaattgataaaatgaattggaatgtggagctgtggattgatgaatctatcaaacctattctacaattgtagcctgcaaatagtaaatacgtacctctgtgtgttcttaagtcttaacttaatatcctaattcttggcaggcttcatgtgttgtatctttctataaatatgaacaaagaataaggttgatggaatttagttgattattaaatgatttgtaagtgctcaaaatggatgacattaacttaattgcagagcaacattgtatagtcgattaaccgtgtttgtaacatatttattctctcatctttgtgttggagtgcttgcaacatattttgtacttgcatcttcttttggtagttaagagtgtaaccagacaactcatccattttcttccatttgcacccaaactttcattgtcttattgttgtcaagcgcataatgtgatcatgttttgcttggggtggcatgaaactatagtgacaatatcagtgtggccatccagtttctgtacaattcttgactacaggtcccagttcaagttagtttgccaaatttctatggcttgtgcagctagcatcttagtgctctttgcaaaaaaagagtattattaagggtttagtctttgagctttctacatagaaggggctacttgaaatcaccataaattttcattgctttcattctctcttttggtatttcagtttggttatggtttaactcttcttttgctatttgtgtcgaccatttatgtcacaataacttcactcaatactctgtacataactgactggtcatgatatcatatttcgataaagtatttatgacaatctaagacacacaaatggtctgtggaaaacctttggatggcaagcttgtatcgtatgccttccaaattttatagtagtaccattttttatttttgtttggatacctcttctaacagagatcttggtaatttgaacttatatggtcatctggtgcctgagcttggaaaattggagcatcttcagtatttgttatgatcaccgtaggcaggttttctccacacagatgggtttgagcaaccaggacattgttgcactttttggtggtcacaccctagttggtggaatcagggaagatgccacaagaacaggtttgggtttgagggagcttagacgtccaaccctttgatctttgacaactcttcaaggagcttctgagtggagagaaggaaggccttttgcagctaccaagggacaaagctctcctctcttatccatccttctgcccacttattgacaaatatgtagcagtatatatatctttgatccttgtcatttgttcggggtcagtttatgttaacctgggtggctgtaataaatatttgtcggccttgtgttttgttatcttcttttctcttgaatggttcatttgaagatggggtgaactaaactgaatatgtagtctgtatgtttttatggttcatttttcttttttatttatctatcatatctatcggagaagctttgtcatatgaagcagagtatggtaggttggtggggcattgcagtgcagtggcagcgacactctgattaactatgccaacggattgatcattgcatttcctctgggtaactcagcaggcaaggggcctcgaaatgcaatggttgtcaacaaagaaattgtgacagattggagtcgatgatatatatgtcgtcactttcatgtaatcgttatacactaacattctgtcgaataaagactagagtc

SEQ ID NO: 64998 - DNA, 2293 bp, Zea Mays
tatccaagacaaggatgtcactctctttttctgcattgagctatggtgattcagtagaagatgtatgtctttggtggaaaccataatggtcgttactttggcgacattcaggaggagttcttcagcgccttcaaggaggagatggagatcaagcgacaactcgagaaggtgcaggtggcatagagggccccctggtgctttgccatcatctctgcttggatatgaggcactgacaggttccctagatgattctagatttgaagattatcttcacagactgaaccaagattgtgagcacattgtattgctaagacaattttgtcgtacaactttctttcagatgtcaagaggtggatcttgtttctacagtgagttggtgatctggagacgatcgagtgtagagtgttgaaggcacatctccaatattcctacacaaaaacacaatgcacatcaactaacagaagtgcaataccctctcatgtaactgtattgcaaaagaatatggtacttatgcacctaaggagaaagggaagaagcatactttttttggctctgaggtattaattttaaaaaatgacgctgaaccttaaaatatattcaaaccattcatttacatcatgcaaaggtatgatattaattccatggatcgatgagttaaatggctattttaagctaaagcttgttttcctttacaagaggtggttttatctaaaagaatatctttggagtggttcttttacattctatgaaaccatcctttttatttgttgccacatgtcagacgtcatatttaaatgtgcatacacaaatatactaattgttttagctgacctagagtttatctaaaagactcggataggctgaatgtatgagttgtttcttgctgtaaatatggattggtaacgaatagagaaattaggtttgctttgtagtattacaaaaatatatgaatccttgagaagagttctttctagaattgataaaatgaattggaatgtggagctgtggattgatgaatctatcaaacctattctacaattgtagcctgcaaatagtaaatacgtacctctgtgtgttcttaagtcttaacttaatatcctaattcttggcaggcttcatgtgttgtatctttctataaatatgaacaaagaataaggttgatggaatttagttgattattaaatgatttgtaagtgctcaaaatggatgacattaacttaattgcagagcaacattgtatagtcgattaaccgtgtttgtaacatatttattctctcatctttgtgttggagtgcttgcaacatattttgtacttgcatcttcttttggtagttaagagtgtaaccagacaactcatccattttcttccatttgcacccaaactttcattgtcttattgttgtcaagcgcataatgtgatcatgttttgcttggggtggcatgaaactatagtgacaatatcagtgtggccatccagtttctgtacaattcttgactacaggtcccagttcaagttagtttgccaaatttctatggcttgtgcagctagcatcttagtgctctttgcaaaaaaagagtattattaagggtttagtctttgagctttctacatagaaggggctacttgaaatcaccataaattttcattgctttcattctctcttttggtatttcagtttggttatggtttaactcttcttttgctatttgtgtcgaccatttatgtcacaataacttcactcaatactctgtacataactgactggtcatgatatcatatttcgataaagtatttatgacaatctaagacacacaaatggtctgtggaaaacctttggatggcaagcttgtatcgtatgccttccaaattttatagtagtaccattttttatttttgtttggatacctcttctaacagagatcttggtaatttgaacttatatggtcatctggtgcctgagcttggaaaattggagcatcttcagtatttgttatgatcaccgtaggcaggttttctccacacagatgggtttgagcaaccaggacattgttgcactttttggtggtcacaccctagttggtggaatcagggaagatgccacaagaacaggtttgggtttgagggagcttagacgtccaaccctttgatctttgacaactcttcaagcaaggggcctcgaaatgcaatggttgtcaacaaagaaattgtgacagattggagtcgatgatatatatgtcgtcactttcatgtaatcgttatacactaacattctgtcgaataaagactagagtc

SEQ ID NO: 64999 - DNA, 1342 bp, Zea Mays
cccaaactttcaggactactggcaccaaccactcgcattcgtcactcgtccctctcccctctctcccccaaggccccaacccacttgagcgagccctagagaaggcaaaagccatggcgtccttggttgttcgtgccgccggcgccgccgccgccgccgcccgtcttccctccctccgtcctcgccgcaacggcagcggggtgctctccggcttgagggtcggaacagggcactacggcgcgcggctcgcgcttgcttcgtccacagcttctcacaaagagttcaagatcgcctgccttactgtcgatgacagcagtttgggcccgggggatgaatatgagtctgacccccgcatgccaggcgaggatgagttcgaccatttctaccgtgttctcgccaagaagactgacaacctgctcagctgctacattccaatgccgcttgcactttctgaagaggagaaggccgtgcagaaggagttcaagctgatcgcgagcggatgcatcgacctcctggttggtgcgatgcgccgcacccccgcagagaaaaggcgcccactgttcttggtgtttggtgagctgtacccggtatttgagtttgtgaggtggactgccgaggcggggtgtgccaagtggtggatggcgctgcagatcatcgagaagctggagatcgtgcgcaagatggtgtcgagcgctttcggcggcgcccctgttgacagaagcatggtgttcgccaggaaggtggacctcaccggtgtcgacggcgaggcgctcgccggccacggcctcgggagcaacttatcagtggtgatcttcgtgctgatggacagcgtcttcagcaacgtcaagtcggacatcgatgccatggtctctgctgcttccactccttattagccatcgtcacctagctacctacgtgtctacacgatcgagatttgcagtcactagcctcaagtctccaagtgattggatctctgccacagtgctcttactactgccctagctcaagtcttgatgtgatcggccgggtgcctacaatggtgtccgttgtagctactagtatcaacctttgttgttcgttctagctattactagtatctactttgttatgttggatcatgcatgtgattgggttctctgctactgcccaaagtactatggtttcagttctacccagtacttcattgtgttgaatcagtcacattatatgatttctgatattagccagcagtatccactccactgtgttggattagtcacattagggtttgttcgttttgctctcaatccatatgggttggatgagattgagtgggttccgttcccaaataaatcaaaaaaaa

SEQ ID NO: 65000 - DNA, 1513 bp, Zea Mays
ggatcttcaatttcatgcccagtttctcttggatgcatctatatgcttctcacaaagagttcaagatcgcctgccttactgtcgatgacagcagtttgggcccgggggatgaatatgagtctgacccccgcatgccaggcgaggatgagttcgaccatttctaccgtgttctcgccaagaagactgacaacctgctcagctgctacattccaatgccgcttgcactttctgaagaggagaaggccgtgcagaaggagttcaagctgatcgcgagcggatgcatcgacctcctggttggtgcgatgcgccgcacccccgcagagaaaaggcgcccactgttcttggtgtttggtgagctgtacccggtatttgagtttgtgaggtggactgccgaggcggggtgtgccaagtggtggatggcgctgcagatcatcgagaagctggagatcgtgcgcaagatggtgtcgagcgctttcggcggcgcccctgttgacagaagcatggtgttcgccaggaaggtggacctcaccggtgtcgacggcgaggcgctcgccggccacggcctcgggagcaacttatcagtggtgatcttcgtgctgatggacagcgtcttcagcaacgtcaagtcggacatcgatgccatggtgtctgacccttgccgcatggcagacgaggatgtgcaggagttcgaccattactaccgtcatctggccaagagggctgccaagctgcatgccatctacccgcctgaactaccaaagccgctttcagaatctgaagatgagaaggccgtgcaggagaggttcaaggagatggcgaacgagagcatcgacctcgcggctggtgcgatgcgccgcatccccgcggagaaatggcgcccactgatctcggtgtttgcttatgtgttccttgtatttgtgcgggtgaggtggtatgccgagagagggtgtgccaagtggtggatggcgccgcagatcatcgaggggctccaaaccgtgcgcaggatggtgtcgagcgcatgcggcggcacccctcttgacattgacaaggtgttcgacaggatggtggccctctccggtgtcagcgttcaggcggcgcccggcggccacggcgtcgtcgggagcaacgacttatcagaggtgatcttcgccctgatcgacaacgtcttcggcaacgtcaagtcggacatctatgacatggtctctgcttccactccttgttagccatcgtcaccaagctacgtacgtgtctacatacaggatcgagatttgcagtcactagcctcaagtgattggatcatgcatgtgattagctctagtcttgatgtgatcatgcatgtgatacctggtgcccaaagtactacgtttctgttctacacttctacccagtagcaacttcactgtgttggatcagtcacattatatgatttctgaaattagccagcagtatactccattgtgttggatcagtcatatcataagatttctgatattagcctttcattccttctgtt

SEQ ID NO: 65001 - DNA, 868 bp, Zea Mays
aatatatttgttcgaagaaaaaagaacggcccatgtcccacggtcccacccagtagggcgttcctctcccgtgtggattctccccacctccgccgccgtttccccgcgtgctttctctctctctctcgatctcgagcgacgactcggttacagccgccgtcctacgccaggtcccaggtcttcgtcgggcccgtctccggcaacgagcaccaacaagatttttgtgtgtaaagatttgcgagcaccattcactttttcatcagtgtgaaattaaaacacttcaagcatgagctctcaccgtgtgaagtggaatgaggacaatttgtatgaaattgagtcaaacaaaccggtgaggcagaagataacagagccaaagacaccatatcacccaagatagatgatgatggatcattgtcgccaacacgtcctttcgacaaatgtcttgatgagactgtccaggctgaagctatcttaacagccttaaatggtgtggcttcttcaagcattagcatttcaaaggatgatggttggggatcgtcagatgatgatacagatgccatagatcaagatgctgaccctgaagctgacacgacaaggttgagtttcaaggagcatcgccgtgcccactacgatgagtaccgcaaggttaaggagctgatgaggactggatcccttactgctgaggaggccgatgaggataacagagctgccaccagctccgaagacaaaggtgtggggaaaggagggccgaatgataacatgaagccctcgcctcaaacatgaggagttcatatgaagtgacagggaacgaggaacgatgccacgtttcgggaatttcgtcacgaaacgaggaacgggaacacacggg

SEQ ID NO: 65002 - DNA, 888 bp, Zea Mays
aacgagtcgtcctcatcatcgagcatgcggcccttggcgagatcaataagatccttcacgtcgttggtcgcttagtaagggaaaccagtgaagttaaatggaccaattgatgtgacttggagccatggtgagccatatcctgggcctcatgggggtgtctcgattaaaagagcatctaggtcacatatatgggagtatgaaggcatgtcgtaaagtgccaaatcatgtgaaggacataatgtctcaaaaagtaacagatgggagaattaggagggcacgtggtaataagctctgcctgtttgttgaaaaggaggtttctgcaacaagacacgattatcgaagtgcaagaatttctcttgatgaacaagcacagattgatatggcaatgagaaattcaatgagggattctttttccacattggaacatgatagttgtccaccttttggtaagtcaatgggtagtgcaactagagctgcaagttgttctacagggaagcaaagtaggctctcaagttactacaagaatacactagatacctctagaggtccttttgacattgacttggcacacagtaggacacaagtgcagccactcatagatgttatgctagagaagggtcataaggagaagctagggatatcattggcaaaatggttccatgctaatgacattcctggaagaaaggtagactgcccatacttccgttcaacacttaacttagctcaacaacttggtgatggagtaccaattccacgtgggagagaaatagatggtccattattggatatgaattatgtagacatggaggctcacatggattggaaggattatggagttacagtcatgtgtgattcttggacagctgctgcccttaaccctgaagcgct

SEQ ID NO: 65003 - DNA, 798 bp, Zea Mays
ctaaaatatgatccaatttgggtgatgatcctatcaacaaaaatctatgtgatagattaatgcaagtaatcaatagaagacttgactgtatgctcaatgatactcttatgcttgcagctgctgcccttaaccctgaagcgctatatacttccaaaatggcaagaaaaccaaagttccaacatgctgtgacaatggccataaagaaactttcaagctcatcttcaaaggcttcagctgcaattgatcaatatactttcttcagaaagcaagctgggttatttggaggagaagaggctaaatattcagcacttaatggacgcgcaagtgcaggtggtggtgatgatgaagatggtgaacttagtggtccatgttttgcagctaggacacaacctaaattagctacagaccaatatattggtcctggtcaagatgaagaaacaacacctctctgtccaagatcaaaaaggcagaagaagctctccatcaagggcctgcacatgcttgagaagtgatctaatcttcaagcacaagcacaagaatatggcgtatacatggactgattcaatggcaagattttgaacatgtggctctattgtatcaaccgtgtgctctgtttcagtttcagcgcaatattgctgtcatatttagttcatgtggcctaacaatatttagaactgtgattgatttctatgcattatttaaactatggactaccaaatatttgtgactcaccactagtgttatattcactggtgcatggatgttgccaaagaactttatttacataatatttggttt

SEQ ID NO: 65004 - DNA, 2939 bp, Zea Mays
aagacccactatttttatgagttttttttataattttgggtattacaacatcaccccaaatctcgcaactctcaccagcctagccatccacgagagtcaatcagccaacatcctcgccccaaatcgacgccaacctcccatccacgccgaggatggtgatccttaaagaacatgccaacccaatccccatcgcccccaaaacagagatttggttccaccccaatctccatccttggcagcgacgctctccaatccccaattattggcggtccaatcctcggcggcggcgctcagctctcctcatgtggccacccagcacctgccccatcttaaagacgagcctgtagatgtggcactcgtgttgtgcctgcgcctgcttgtctcttctgctgtcgccgtcgaccgactgctgcttgtgtcgtgtgagtgccctggtgttgacgccaaactcaaggcttgtgcgttgcgaggatgttggctgattatacattgtcaggttgatgttcttttctgtaactcgttttggtttacatagacattccatgtttttttcatggtccgtgagtgataatttgatattgaccagaaacatattttcaggtagtaattacaatttacaactcataagttaatgttttggtttacatagacattccatgttttttggcaaaactgtatgatgtattttctaggtaacctttaggcaggctggatgttatatgagaataattagtgaccattatttacaataggcgtattccacatatttttgcttattttatttcgattttctttcagttagccactcttgttatggtcttcatcctatattttaattcgattttctttcggttagcctataccgacataaatttcaattccttaagtgtggaggtttctgttatggttttggaagatacttgtgttgccaatttggaaatgcaaagccaacaagagcagttgggggtgagcatcatatcaatgtccccaaatgtcactttattattcgttaaccgtgcccaaaaaagagcacaagtaactgctctcaagcctatgcttgttcttgaggtggaccaataatttcttgaaataggatacagtgtgaatttaaattgagatacaaaacaataaattcacaattagtactaaattaataccaacacaaattagctactgctatttttattttgattctcatttataactgattcaagcctccaaaacaatcgtggcagcaggtacagtcccaggttccttttttcatactttggtttgtatatttctgccattttatcagtgtgtgtattaaaatgtctattgatcactacttgctctgtccacaacacactgcatatgtattgtgatttaggatatgcctcatgaagtttgagtgtgtttctggtccttcatttttactacataacatgtttagctgtttgttcaatcaggtcttgtgaaattaatcatgcttcatctggaccattcatttttactacataacatgtttagctatttgttcaatcaggtcttgtgaaattaatcatgcttcatctggaccatcgattaagtaatactacaaaaaaatcagattcaggtttggtcatatctgatgtactaaaatccaggttgttcttcaccagaacaaacatacttgtttattgtttaggtttagggtcattggagatggcgatcgtggccggatgtattctctttggagtatgatgctagggtccccataaacaagtgttcacaacttcagttatgaagatatatctcaaggttttcaacttaaaatttcatcaagatcatgatcctagacttgaagttgatttaattcattggtagattcactaaaattctgaaatgatttaattaaggtttgcttctaccagtcgaagttgtgaaagttgtcatttttactaaagcagcaatttatataattgttaaacttctctgcaaggcttaaagtagctggccttcctaaggttatgccttttcttcctcgttattctttgctttaatttattatgtatgtctaaagggtttttgtttttcagatttacatcggctgtttaaggatttgtttatctattggtcaaatttcttagttgttcgatttataatcaaaagcctaaaatgatgggccaaccttgtgtcttgtaatgttttggacttttctattaggtttgtcttttgtatcaggtgtgttgtgtatgctatcaatcttgtttttttgtgaacccattttgtttaggcttgagatttatctcatctctcacacctttccttttgttattccacaaagacagaggaggggaccaagggactaagggtggcatgtggaaactgaaacaggtagtgcaactactatagcaccatcgggcaagcatctctccagctgtccagtgactgctctgcttttattgtctgtcgacttctatagatttatttttgcattgacttgtcaaaccctcctggattgcatctatcaaaccagcacatagttcaactttgaagactattagctttgcagacacatggatagattgtaggaattagtaagtcaggtgctcaggtcaaagatcgcttgcagttcggttcgctccagtgggaagctgatgtctttaggttagaagaataactatgagtgagtacgaaggaaggaaggatggtggattgggtagcttgctgctggctgctcggttctaggagttatagcggtagtggtggagtttgattcaggagctagggtaaaattagcgtctaaaatagttgtttggtttaggtaatcttaagtagacaaccctgattatgattctgggtagtttatcatttagtaatttgaggtttgatgttgcagtaatatgaggtttggtgtggcgtttgatttatacgagggagtaccattaatttacagcatcaaattagtaccattaaat

SEQ ID NO: 65005 - DNA, 2667 bp, Zea Mays
aagacccactatttttatgagttttttttataattttgggtattacaacatcaccccaaatctcgcaactctcaccagcctagccatccacgagagtcaatcagccaacatcctcgccccaaatcgacgccaacctcccatccacgccgaggatggtgatccttaaagaacatgccaacccaatccccatcgcccccaaaacagagatttggttccaccccaatctccatccttggcagcgacgctctccaatccccaattattggcggtccaatcctcggcggcggcgctcagctctcctcatgtggccacccagcacctgccccatcttaaagacgagcctgtagatgtggcactcgtgttgtgcctgcgcctgcttgtctcttctgctgtcgccgtcgaccgactgctgcttgtgtcgtgtgagtgccctggtgttgacgccaaactcaaggcttgtgcgttgcgaggatgttggctgattatacattgtcaggttgatgttcttttctgtaactcgttttggtttacatagacattccatgtttttttcatggtccgtgagtgataatttgatattgaccagaaacatattttcaggtagtaattacaatttacaactcataagttaatgttttggtttacatagacattccatgttttttggcaaaactgtatgatgtattttctaggtaacctttaggcaggctggatgttatatgagaataattagtgaccattatttacaataggcgtattccacatatttttgcttattttatttcgattttctttcagttagccactcttgttatggtcttcatcctatattttaattcgattttctttcggttagcctataccgacataaatttcaattccttaagtgtggaggtttctgttatggttttggaagatacttgtgttgccaatttggaaatgcaaagccaacaagagcagttgggggtgagcatcatatcaatgtccccaaatgtcactttattattcgttaaccgtgcccaaaaaagagcacaagtaactgctctcaagcctatgcttgttcttgaggtggaccaataatttcttgaaataggatacagtgtgaatttaaattgagatacaaaacaataaattcacaattagtactaaattaataccaacacaaattagctactgctatttttattttgattctcatttataactgattcaagcctccaaaacaatcgtggcagcaggtacagtcccaggttccttttttcatactttggtttgtatatttctgccattttatcagtgtgtgtattaaaatgtctattgatcactacttgctctgtccacaacacactgcatatgtattgtgatttaggatatgcctcatgaagtttgagtgtgtttctggtccttcatttttactacataacatgtttagctgtttgttcaatcaggtcttgtgaaattaatcatgcttcatctggaccattcatttttactacataacatgtttagctatttgttcaatcaggtcttgtgaaattaatcatgcttcatctggaccatcgattaagtaatactacaaaaaaatcagattcaggtttggtcatatctgatgtactaaaatccaggtttagggtcattggagatggcgatcgtggccggatgtattctctttggagtatgatgctagggtccccataaacaagtgttcacaacttcagttatgaagatatatctcaaggttttcaacttaaaatttcatcaagatcatgatcctagacttgaagttgatttaattcattggtagattcactaaaattctgaaatgatttaattaaggtttgcttctaccagtcgaagttgtgaaagttgtcatttttactaaagcagcaatttatataattgttaaacttctctgcaaggcttaaagtagctggccttcctaaggttatgccttttcttcctcgttattctttgctttaatttattatgtatgtctaaagggtttttgtttttcagatttacatcggctgtttaaggatttgtttatctattggtcaaatttcttagttgttcgatttataatcaaaagcctaaaatgatgggccaaccttgtgtcttgtaatgttttggacttttctattaggtttgtcttttgtatcaggtgtgttgtgtatgctatcaatcttgtttttttgtgaacccattttgtttaggcttgagatttatctcatctctcacacctttccttttgttattccacaaagacagaggaggggaccaagggactaagggtggcatgtggaaactgaaacagggagatagatggaaattgtggtcatcaacagctctagcacacaccgagagtgcattgaactgggcaaggattagttcctgtataatggcacattggcactactgtaatgcataaggatttgttctcacatttgaagtacaggtaatgtaaattttgtttgtaatttttatgtacgaataattgtgagttctttatcttttacatttgccttaatattattgtacatgtttgaaacatgtttgaacaactatatatctcaattaaatagagtttacctatgtgatatatagaatctgtagcaacgcatgggcacatgactagtttatacataataatcaatttttggataaatc

SEQ ID NO: 65006 - DNA, 2293 bp, Zea Mays
aagacccactatttttatgagttttttttataattttgggtattacaacatcaccccaaatctcgcaactctcaccagcctagccatccacgagagtcaatcagccaacatcctcgccccaaatcgacgccaacctcccatccacgccgaggatggtgatccttaaagaacatgccaacccaatccccatcgcccccaaaacagagatttggttccaccccaatctccatccttggcagcgacgctctccaatccccaattattggcggtccaatcctcggcggcggcgctcagctctcctcatgtggccacccagcacctgccccatcttaaagacgagcctgtagatgtggcactcgtgttgtgcctgcgcctgcttgtctcttctgctgtcgccgtcgaccgactgctgcttgtgtcgtgtgagtgccctggtgttgacgccaaactcaaggcttgtgcgttgcgaggatgttggctgattatacattgtcaggttgatgttcttttctgtaactcgttttggtttacatagacattccatgtttttttcatggtccgtgagtgataatttgatattgaccagaaacatattttcaggtagtaattacaatttacaactcataagttaatgttttggtttacatagacattccatgttttttggcaaaactgtatgatgtattttctaggtaacctttaggcaggctggatgttatatgagaataattagtgaccattatttacaataggcgtattccacatatttttgcttattttatttcgattttctttcagttagccactcttgttatggtcttcatcctatattttaattcgattttctttcggttagcctataccgacataaatttcaattccttaagtgtggaggtttctgttatggttttggaagatacttgtgttgccaatttggaaatgcaaagccaacaagagcagttgggggtgagcatcatatcaatgtccccaaatgtcactttattattcgttaaccgtgcccaaaaaagagcacaagtaactgctctcaagcctatgcttgttcttgaggtggaccaataatttcttgaaataggatacagtgtgaatttaaattgagatacaaaacaataaattcacaattagtactaaattaataccaacacaaattagctactgctatttttattttgattctcatttataactgattcaagcctccaaaacaatcgtggcagcaggtacagtcccaggttccttttttcatactttggtttgtatatttctgccattttatcagtgtgtgtattaaaatgtctattgatcactacttgctctgtccacaacacactgcatatgtattgtgatttaggatatgcctcatgaagtttgagtgtgtttctggtccttcatttttactacataacatgtttagctgtttgttcaatcaggtcttgtgaaattaatcatgcttcatctggaccattcatttttactacataacatgtttagctatttgttcaatcaggtcttgtgaaattaatcatgcttcatctggaccatcgattaagtaatactacaaaaaaatcagattcaggtttggtcatatctgatgtactaaaatccaggtgaataagatggggttcataggatccacatcaactttttattaaattgtaccttaatataaacccaaagctaacactgcatttttttcttttggggaaaacaatttataggttgttcttcaccagaacaaacatacttgtttattgtttaggtttagggtcattggagatggcgatcgtggccggatgtattctctttggagtatgatgctagggtccccataaacaagtgttcacaacttcagttatgaagatatatctcaagacagaggaggggaccaagggactaagggtggcatgtggaaactgaaacagggagatagatggaaattgtggtcatcaacagctctagcacacaccgagagtgcattgaactgggcaaggattagttcctgtataatggcacattggcactactgtaatgcataaggatttgttctcacatttgaagtacaggtaatgtaaattttgtttgtaatttttatgtacgaataattgtgagttctttatcttttacatttgccttaatattattgtacatgtttgaaacatgtttgaacaactatatatctcaattaaatagagtttacctatgtgatatatagaatctgtagcaacgcatgggcacatgactagtttatacataataatcaatttttggataaatc

SEQ ID NO: 65007 - DNA, 899 bp, Zea Mays
aagacccactatttttatgagttttttttataattttgggtattacaacatcaccccaaatctcgcaactctcaccagcctagccatccacgagagtcaatcagccaacatcctcgccccaaatcgacgccaacctcccatccacgccgaggatggtgatccttaaagaacatgccaacccaatccccatcgcccccaaaacagagatttggttccaccccaatctccatccttggcagcgacgctctccaatccccaattattggcggtccaatcctcggcggcggcgctcagctctcctcatgtggccacccagcacctgccccatcttaaagacgagcctgtagatgtggcactcgtgttgtgcctgcgcctgcttgtctcttctgctgtcgccgtcgaccgactgctgcttgtgtcgtgtgagtgccctggtgttgacgccaaactcaaggcttgtgcgttgcgaggatgttggctgattatacattgtcagacagaggaggggaccaagggactaagggtggcatgtggaaactgaaacagggagatagatggaaattgtggtcatcaacagctctagcacacaccgagagtgcattgaactgggcaaggattagttcctgtataatggcacattggcactactgtaatgcataaggatttgttctcacatttgaagtacaggtaatgtaaattttgtttgtaatttttatgtacgaataattgtgagttctttatcttttacatttgccttaatattattgtacatgtttgaaacatgtttgaacaactatatatctcaattaaatagagtttacctatgtgatatatagaatctgtagcaacgcatgggcacatgactagtttatacataataatcaatttttggataaatc

SEQ ID NO: 65008 - DNA, 1012 bp, Zea Mays
aagacccactatttttatgagttttttttataattttgggtattacaacatcaccccaaatctcgcaactctcaccagcctagccatccacgagagtcaatcagccaacatcctcgccccaaatcgacgccaacctcccatccacgccgaggatggtgatccttaaagaacatgccaacccaatccccatcgcccccaaaacagagatttggttccaccccaatctccatccttggcagcgacgctctccaatccccaattattggcggtccaatcctcggcggcggcgctcagctctcctcatgtggccacccagcacctgccccatcttaaagacgagcctgtagatgtggcactcgtgttgtgcctgcgcctgcttgtctcttctgctgtcgccgtcgaccgactgctgcttgtgtcgtgtgagtgccctggtgttgacgccaaactcaaggcttgtgcgttgcgaggatgttggctgattatacattgtcagacagaggaggggaccaagggactaagggtggcatgtggaaactgaaacagttctagccaacacgacatggcgtggattgaacttgaatcgacgagctatgtgccagttatcgctcttctaaacacatcaaccagtgcaccaaaactagcttctttcttccttgggagatagatggaaattgtggtcatcaacagctctagcacacaccgagagtgcattgaactgggcaaggattagttcctgtataatggcacattggcactactgtaatgcataaggatttgttctcacatttgaagtacaggtaatgtaaattttgtttgtaatttttatgtacgaataattgtgagttctttatcttttacatttgccttaatattattgtacatgtttgaaacatgtttgaacaactatatatctcaattaaatagagtttacctatgtgatatatagaatctgtagcaacgcatgggcacatgactagtttatacataataatcaatttttggataaatc

SEQ ID NO: 65009 - DNA, 2342 bp, Zea Mays
aagacccactatttttatgagttttttttataattttgggtattacaacatcaccccaaatctcgcaactctcaccagcctagccatccacgagagtcaatcagccaacatcctcgccccaaatcgacgccaacctcccatccacgccgaggatggtgatccttaaagaacatgccaacccaatccccatcgcccccaaaacagagatttggttccaccccaatctccatccttggcagcgacgctctccaatccccaattattggcggtccaatcctcggcggcggcgctcagctctcctcatgtggccacccagcacctgccccatcttaaagacgagcctgtagatgtggcactcgtgttgtgcctgcgcctgcttgtctcttctgctgtcgccgtcgaccgactgctgcttgtgtcgtgtgagtgccctggtgttgacgccaaactcaaggcttgtgcgttgcgaggatgttggctgattatacattgtcaggttgatgttcttttctgtaactcgttttggtttacatagacattccatgtttttttcatggtccgtgagtgataatttgatattgaccagaaacatattttcaggtagtaattacaatttacaactcataagttaatgttttggtttacatagacattccatgttttttggcaaaactgtatgatgtattttctaggtaacctttaggcaggctggatgttatatgagaataattagtgaccattatttacaataggcgtattccacatatttttgcttattttatttcgattttctttcagttagccactcttgttatggtcttcatcctatattttaattcgattttctttcggttagcctataccgacataaatttcaattccttaagtgtggaggtttctgttatggttttggaagatacttgtgttgccaatttggaaatgcaaagccaacaagagcagttgggggtgagcatcatatcaatgtccccaaatgtcactttattattcgttaaccgtgcccaaaaaagagcacaagtaactgctctcaagcctatgcttgttcttgaggtggaccaataatttcttgaaataggatacagtgtgaatttaaattgagatacaaaacaataaattcacaattagtactaaattaataccaacacaaattagctactgctatttttattttgattctcatttataactgattcaagcctccaaaacaatcgtggcagcaggtacagtcccaggttccttttttcatactttggtttgtatatttctgccattttatcagtgtgtgtattaaaatgtctattgatcactacttgctctgtccacaacacactgcatatgtattgtgatttaggatatgcctcatgaagtttgagtgtgtttctggtccttcatttttactacataacatgtttagctgtttgttcaatcaggtcttgtgaaattaatcatgcttcatctggaccattcatttttactacataacatgtttagctatttgttcaatcaggtcttgtgaaattaatcatgcttcatctggaccatcgattaagtaatactacaaaaaaatcagattcaggtttggtcatatctgatgtactaaaatccaggttgttcttcaccagaacaaacatacttgtttattgtttaggtttagggtcattggagatggcgatcgtggccggatgtattctctttggagtatgatgctagggtccccataaacaagtgttcacaacttcagttatgaagatatatctcaagacagaggaggggaccaagggactaagggtggcatgtggaaactgaaacagttctagccaacacgacatggcgtggattgaacttgaatcgacgagctatgtgccagttatcgctcttctaaacacatcaaccagtgcaccaaaactagcttctttcttccttgggagatagatggaaattgtggtcatcaacagctctagcacacaccgagagtgcattgaactgggcaaggattagttcctgtataatggcacattggcactactgtaatgcataaggatttgttctcacatttgaagtacaggctgttcacattgcaacccctgctcaagagaagaggaaggcataatggaggacttgcaggagtttcaagactacgatgagttctaggtgtgggttagcggcaaacccccagtcggctgcatgtgaaggccttatcttactacgtttcgtattcacactttgatctatgtttaagactatgtggatgtctcggacatcgtgatgtaatcaaattaataactctttacgttattatttgagcatgtgtgatgatgtccaat

SEQ ID NO: 65010 - DNA, 2343 bp, Zea Mays
aagacccactatttttatgagttttttttataattttgggtattacaacatcaccccaaatctcgcaactctcaccagcctagccatccacgagagtcaatcagccaacatcctcgccccaaatcgacgccaacctcccatccacgccgaggatggtgatccttaaagaacatgccaacccaatccccatcgcccccaaaacagagatttggttccaccccaatctccatccttggcagcgacgctctccaatccccaattattggcggtccaatcctcggcggcggcgctcagctctcctcatgtggccacccagcacctgccccatcttaaagacgagcctgtagatgtggcactcgtgttgtgcctgcgcctgcttgtctcttctgctgtcgccgtcgaccgactgctgcttgtgtcgtgtgagtgccctggtgttgacgccaaactcaaggcttgtgcgttgcgaggatgttggctgattatacattgtcaggttgatgttcttttctgtaactcgttttggtttacatagacattccatgtttttttcatggtccgtgagtgataatttgatattgaccagaaacatattttcaggtagtaattacaatttacaactcataagttaatgttttggtttacatagacattccatgttttttggcaaaactgtatgatgtattttctaggtaacctttaggcaggctggatgttatatgagaataattagtgaccattatttacaataggcgtattccacatatttttgcttattttatttcgattttctttcagttagccactcttgttatggtcttcatcctatattttaattcgattttctttcggttagcctataccgacataaatttcaattccttaagtgtggaggtttctgttatggttttggaagatacttgtgttgccaatttggaaatgcaaagccaacaagagcagttgggggtgagcatcatatcaatgtccccaaatgtcactttattattcgttaaccgtgcccaaaaaagagcacaagtaactgctctcaagcctatgcttgttcttgaggtggaccaataatttcttgaaataggatacagtgtgaatttaaattgagatacaaaacaataaattcacaattagtactaaattaataccaacacaaattagctactgctatttttattttgattctcatttataactgattcaagcctccaaaacaatcgtggcagcaggtacagtcccaggttccttttttcatactttggtttgtatatttctgccattttatcagtgtgtgtattaaaatgtctattgatcactacttgctctgtccacaacacactgcatatgtattgtgatttaggatatgcctcatgaagtttgagtgtgtttctggtccttcatttttactacataacatgtttagctgtttgttcaatcaggtcttgtgaaattaatcatgcttcatctggaccattcatttttactacataacatgtttagctatttgttcaatcaggtcttgtgaaattaatcatgcttcatctggaccatcgattaagtaatactacaaaaaaatcagattcaggtttggtcatatctgatgtactaaaatccaggtgaataagatggggttcataggatccacatcaactttttattaaattgtaccttaatataaacccaaagctaacactgcatttttttcttttggggaaaacaatttataggttgttcttcaccagaacaaacatacttgtttattgtttaggtttagggtcattggagatggcgatcgtggccggatgtattctctttggagtatgatgctagggtccccataaacaagtgttcacaacttcagttatgaagatatatctcaagaagacagaggaggggaccaagggactaagggtggcatgtggaaactgaaacagggagatagatggaaattgtggtcatcaacagctctagcacacaccgagagtgcattgaactgggcaaggattagttcctgtataatggcacattggcactactgtaatgcataaggatttgttctcacatttgaagtacaggctgttcacattgcaacccctgctcaagagaagaggaaggcataatggaggacttgcaggagtttcaagactacgatgagttctaggtgtgggttagcggcaaacccccagtcggctgcatgtgaaggccttatcttactacgtttcgtattcacactttgatctatgtttaagactatgtggatgtctcggacatcgtgatgtaatcaaattaataactctttacgttattatttgagcatgtgtgatgatgtccaat

SEQ ID NO: 65011 - DNA, 1059 bp, Zea Mays
aagacccactatttttatgagttttttttataattttgggtattacaacatcaccccaaatctcgcaactctcaccagcctagccatccacgagagtcaatcagccaacatcctcgccccaaatcgacgccaacctcccatccacgccgaggatggtgatccttaaagaacatgccaacccaatccccatcgcccccaaaacagagatttggttccaccccaatctccatccttggcagcgacgctctccaatccccaattattggcggtccaatcctcggcggcggcgctcagctctcctcatgtggccacccagcacctgccccatcttaaagacgagcctgtagatgtggcactcgtgttgtgcctgcgcctgcttgtctcttctgctgtcgccgtcgaccgactgctgcttgtgtcgtgtgagtgccctggtgttgacgccaaactcaaggcttgtgcgttgcgaggatgttggctgattatacattgtcagacagaggaggggaccaagggactaagggtggcatgtggaaactgaaacagttctagccaacacgacatggcgtggattgaacttgaatcgacgagctatgtgccagttatcgctcttctaaacacatcaaccagtgcaccaaaactagcttctttcttccttgggagatagatggaaattgtggtcatcaacagctctagcacacaccgagagtgcattgaactgggcaaggattagttcctgtataatggcacattggcactactgtaatgcataaggatttgttctcacatttgaagtacaggctgttcacattgcaacccctgctcaagagaagaggaaggcataatggaggacttgcaggagtttcaagactacgatgagttctaggtgtgggttagcggcaaacccccagtcggctgcatgtgaaggccttatcttactacgtttcgtattcacactttgatctatgtttaagactatgtggatgtctcggacatcgtgatgtaatcaaattaataactctttacgttattatttgagcatgtgtgatgatgtccaat

SEQ ID NO: 65012 - DNA, 1685 bp, Zea Mays
atttttatgagttttttttataattttgggtattacaacatcaccccaaatctcgcaactctcaccagcctagccatccacgagagtcaatcagccaacatcctcgccccaaatcgacgccaacctcccatccacgccgaggatggtgatccttaaagaacatgccaacccaatccccatcgcccccaaaacagagatttggttccaccccaatctccatccttggcagcgacgctctccaatccccaattattggcggtccaatcctcggcggcggcgctcagctctcctcatgtggccacccagcacctgccccatcttaaagacgagcctgtagatgtggcactcgtgttgtgcctgcgcctgcttgtctcttctgctgtcgccgtcgaccgactgctgcttgtgtcgtgtgagtgccctggtgttgacgccaaactcaaggcttgtgcgttgcgaggatgttggctgattatacattgtcaggtcttgtgaaattaatcatgcttcatctggaccatcgattaagtaatactacaaaaaaatcagattcaggtttggtcatatctgatgtactaaaatccaggtttagggtcattggagatggcgatcgtggccggatgtattctctttggagtatgatgctagggtccccataaacaagtgttcacaacttcagttatgaagatatatctcaaggttttcaacttaaaatttcatcaagatcatgatcctagacttgaagttgatttaattcattggtagattcactaaaattctgaaatgatttaattaaggtttgcttctaccagtcgaagttgtgaaagttgtcatttttactaaagcagcaatttatataattgttaaacttctctgcaaggcttaaagtagctggccttcctaaggttatgccttttcttcctcgttattctttgctttaatttattatgtatgtctaaagggtttttgtttttcagatttacatcggctgtttaaggatttgtttatctattggtcaaatttcttagttgttcgatttataatcaaaagcctaaaatgatgggccaaccttgtgtcttgtaatgttttggacttttctattaggtttgtcttttgtatcagacagaggaggggaccaagggactaagggtggcatgtggaaactgaaacagttctagccaacacgacatggcgtggattgaacttgaatcgacgagctatgtgccagttatcgctcttctaaacacatcaaccagtgcaccaaaactagcttctttcttccttgggagatagatggaaattgtggtcatcaacagctctagcacacaccgagagtgcattgaactgggcaaggattagttcctgtataatggcacattggcactactgtaatgcataaggatttgttctcacatttgaagtacaggctgttcacattgcaacccctgctcaagagaagaggaaggcataatggaggacttgcaggagtttcaagactacgatgagttctaggtgtgggttagcggcaaacccccagtcggctgcatgtgaaggccttatcttactacgtttcgtattcacactttgatctatgtttaagactatgtggatgtctcggacatcgtgatgtaatcaaattaataactctttacgttattatttgagcatgtgtgatgatgtccaat

SEQ ID NO: 65013 - DNA, 1330 bp, Zea Mays
gttttttttataattttgggtattacaacatcaccccaaatctcgcaactctcaccagcctagccatccacgagagtcaatcagccaacatcctcgccccaaatcgacgccaacctcccatccacgccgaggatggtgatccttaaagaacatgccaacccaatccccatcgcccccaaaacagagatttggttccaccccaatctccatccttggcagcgacgctctccaatccccaattattggcggtccaatcctcggcggcggcgctcagctctcctcatgtggccacccagcacctgccccatcttaaagacgagcctgtagatgtggcactcgtgttgtgcctgcgcctgcttgtctcttctgctgtcgccgtcgaccgactgctgcttgtgtcgtgtcttgtgaaattaatcatgcttcatctggaccatcgattaagtaatactacaaaaaaatcagattcaggtttggtcatatctgatgtactaaaatccaggtgaataagatggggttcataggatccacatcaactttttattaaattgtaccttaatataaacccaaagctaacactgcatttttttcttttggggaaaacaatttataggttgttcttcaccagaacaaacatacttgtttattgtttaggtttagggtcattggagatggcgatcgtggccggatgtattctctttggagtatgatgctagggtccccataaacaagtgttcacaacttcagttatgaagatatatctcaagacagaggaggggaccaagggactaagggtggcatgtggaaactgaaacagttctagccaacacgacatggcgtggattgaacttgaatcgacgagctatgtgccagttatcgctcttctaaacacatcaaccagtgcaccaaaactagcttctttcttccttgggagatagatggaaattgtggtcatcaacagctctagcacacaccgagagtgcattgaactgggcaaggattagttcctgtataatggcacattggcactactgtaatgcataaggatttgttctcacatttgaagtacaggctgttcacattgcaacccctgctcaagagaagaggaaggcataatggaggacttgcaggagtttcaagactacgatgagttctaggtgtgggttagcggcaaacccccagtcggctgcatgtgaaggccttatcttactacgtttcgtattcacactttgatctatgtttaagactatgtggatgtctcggacatcgtgatgtaatcaaattaataactctttacgttattatttgagcatgtgtgatgatgtccaat

SEQ ID NO: 65014 - DNA, 1102 bp, Zea Mays
tataattttgggtattacaacatcaccccaaatctcgcaactctcaccagcctagccatccacgagagtcaatcagccaacatcctcgccccaaatcgacgccaacctcccatccacgccgaggatggtgatccttaaagaacatgccaacccaatccccatcgcccccaaaacagagatttggttccaccccaatctccatccttggcagcgacgctctccaatccccaattattggcggtccaatcctcggcggcggcgctcagctctcctcatgtggccacccagcacctgccccatcttaaagacgagcctgtagatgtggcactcgtgttgtgcctgcgcctgcttgtctcttctgctgtcgccgtcgaccgactgctgcttgtgtcgtgtgagtgccctggtgttgacgccaaactcaaggcttgtgcgttgcgaggatgttggctgattatacattgtcagacagaggaggggaccaagggactaagggtggcatgtggaaactgaaacaggtagtgcaactactatagcaccatcgggcaagcatctctccagctgtccagtgactgctctgcttttattgtctgtcgacttctatagatttatttttgcattgacttgtcaaaccctcctggattgcatctatcaaaccagcacatagttcaactttgaagactattagctttgcagacacatggatagattgtaggaattagtaagtcaggtgctcaggtcaaagatcgcttgcagttcggttcgctccagtgggaagctgatgtctttaggttagaagaataactatgagtgagtacgaaggaaggaaggatggtggattgggtagcttgctgctggctgctcggttctaggagttatagcggtagtggtggagtttgattcaggagctagggtaaaattagcgtctaaaatagttgtttggtttaggtaatcttaagtagacaaccctgattatgattctgggtagtttatcatttagtaatttgaggtttgatgttgcagtaatatgaggtttggtgtggcgtttgatttatacgagggagtaccattaatttacagcatcaaattagtaccattaaat

SEQ ID NO: 65015 - DNA, 1865 bp, Zea Mays
caacatcaccccaaatctcgcaactctcaccagcctagccatccacgagagtcaatcagccaacatcctcgccccaaatcgacgccaacctcccatccacgccgaggatggtgatccttaaagaacatgccaacccaatccccatcgcccccaaaacagagatttggttccaccccaatctccatccttggcagcgacgctctccaatccccaattattggcggtccaatcctcggcggcggcgctcagctctcctcatgtggccacccagcacctgccccatcttaaagacgagcctgtagatgtggcactcgtgttgtgcctgcgcctgcttgtctcttctgctgtcgccgtcgaccgactgctgcttgtgtcgtgtgagtgccctggtgttgacgccaaactcaaggcttgtgcgttgcgaggatgttggctgattatacattgtcaggtcttgtgaaattaatcatgcttcatctggaccatcgattaagtaatactacaaaaaaatcagattcaggtttggtcatatctgatgtactaaaatccaggttgttcttcaccagaacaaacatacttgtttattgtttaggtttagggtcattggagatggcgatcgtggccggatgtattctctttggagtatgatgctagggtccccataaacaagtgttcacaacttcagttatgaagatatatctcaaggttttcaacttaaaatttcatcaagatcatgatcctagacttgaagttgatttaattcattggtagattcactaaaattctgaaatgatttaattaaggtttgcttctaccagtcgaagttgtgaaagttgtcatttttactaaagcagcaatttatataattgttaaacttctctgcaaggcttaaagtagctggccttcctaaggttatgccttttcttcctcgttattctttgctttaatttattatgtatgtctaaagggtttttgtttttcagatttacatcggctgtttaaggatttgtttatctattggtcaaatttcttagttgttcgatttataatcaaaagcctaaaatgatgggccaaccttgtgtcttgtaatgttttggacttttctattaggtttgtcttttgtatcaggtgtgttgtgtatgctatcaatcttgtttttttgtgaacccattttgtttaggcttgagatttatctcatctctcacacctttccttttgttattccacaaagacagaggaggggaccaagggactaagggtggcatgtggaaactgaaacaggtagtgcaactactatagcaccatcgggcaagcatctctccagctgtccagtgactgctctgcttttattgtctgtcgacttctatagatttatttttgcattgacttgtcaaaccctcctggattgcatctatcaaaccagcacatagttcaactttgaagactattagctttgcagacacatggatagattgtaggaattagtaagtcaggtgctcaggtcaaagatcgcttgcagttcggttcgctccagtgggaagctgatgtctttaggttagaagaataactatgagtgagtacgaaggaaggaaggatggtggattgggtagcttgctgctggctgctcggttctaggagttatagcggtagtggtggagtttgattcaggagctagggtaaaattagcgtctaaaatagttgtttggtttaggtaatcttaagtagacaaccctgattatgattctgggtagtttatcatttagtaatttgaggtttgatgttgcagtaatatgaggtttggtgtggcgtttgatttatacgagggagtaccattaatttacagcatcaaattagtaccattaaat

SEQ ID NO: 65016 - DNA, 1824 bp, Zea Mays
caacatcaccccaaatctcgcaactctcaccagcctagccatccacgagagtcaatcagccaacatcctcgccccaaatcgacgccaacctcccatccacgccgaggatggtgatccttaaagaacatgccaacccaatccccatcgcccccaaaacagagatttggttccaccccaatctccatccttggcagcgacgctctccaatccccaattattggcggtccaatcctcggcggcggcgctcagctctcctcatgtggccacccagcacctgccccatcttaaagacgagcctgtagatgtggcactcgtgttgtgcctgcgcctgcttgtctcttctgctgtcgccgtcgaccgactgctgcttgtgtcgtgtgagtgccctggtgttgacgccaaactcaaggcttgtgcgttgcgaggatgttggctgattatacattgtcaggtcttgtgaaattaatcatgcttcatctggaccatcgattaagtaatactacaaaaaaatcagattcaggtttggtcatatctgatgtactaaaatccaggtttagggtcattggagatggcgatcgtggccggatgtattctctttggagtatgatgctagggtccccataaacaagtgttcacaacttcagttatgaagatatatctcaaggttttcaacttaaaatttcatcaagatcatgatcctagacttgaagttgatttaattcattggtagattcactaaaattctgaaatgatttaattaaggtttgcttctaccagtcgaagttgtgaaagttgtcatttttactaaagcagcaatttatataattgttaaacttctctgcaaggcttaaagtagctggccttcctaaggttatgccttttcttcctcgttattctttgctttaatttattatgtatgtctaaagggtttttgtttttcagatttacatcggctgtttaaggatttgtttatctattggtcaaatttcttagttgttcgatttataatcaaaagcctaaaatgatgggccaaccttgtgtcttgtaatgttttggacttttctattaggtttgtcttttgtatcaggtgtgttgtgtatgctatcaatcttgtttttttgtgaacccattttgtttaggcttgagatttatctcatctctcacacctttccttttgttattccacaaagacagaggaggggaccaagggactaagggtggcatgtggaaactgaaacaggtagtgcaactactatagcaccatcgggcaagcatctctccagctgtccagtgactgctctgcttttattgtctgtcgacttctatagatttatttttgcattgacttgtcaaaccctcctggattgcatctatcaaaccagcacatagttcaactttgaagactattagctttgcagacacatggatagattgtaggaattagtaagtcaggtgctcaggtcaaagatcgcttgcagttcggttcgctccagtgggaagctgatgtctttaggttagaagaataactatgagtgagtacgaaggaaggaaggatggtggattgggtagcttgctgctggctgctcggttctaggagttatagcggtagtggtggagtttgattcaggagctagggtaaaattagcgtctaaaatagttgtttggtttaggtaatcttaagtagacaaccctgattatgattctgggtagtttatcatttagtaatttgaggtttgatgttgcagtaatatgaggtttggtgtggcgtttgatttatacgagggagtaccattaatttacagcatcaaattagtaccattaaat

SEQ ID NO: 65017 - DNA, 893 bp, Zea Mays
caacatcaccccaaatctcgcaactctcaccagcctagccatccacgagagtcaatcagccaacatcctcgccccaaatcgacgccaacctcccatccacgccgaggatggtgatccttaaagaacatgccaacccaatccccatcgcccccaaaacagagatttggttccaccccaatctccatccttggcagcgacgctctccaatccccaattattggcggtccaatcctcggcggcggcgctcagctctcctcatgtggccacccagcacctgccccatcttaaagacgagcctgtagatgtggcactcgtgttgtgcctgcgcctgcttgtctcttctgctgtcgccgtcgaccgactgctgcttgtgtcgtgtttagggtcattggagatggcgatcgtggccggatgtattctctttggagtatgatgctagggtccccataaacaagtgttcacaacttcagttatgaagatatatctcaagacagaggaggggaccaagggactaagggtggcatgtggaaactgaaacagggagatagatggaaattgtggtcatcaacagctctagcacacaccgagagtgcattgaactgggcaaggattagttcctgtataatggcacattggcactactgtaatgcataaggatttgttctcacatttgaagtacaggtaatgtaaattttgtttgtaatttttatgtacgaataattgtgagttctttatcttttacatttgccttaatattattgtacatgtttgaaacatgtttgaacaactatatatctcaattaaatagagtttacctatgtgatatatagaatctgtagcaacgcatgggcacatgactagtttatacataataatcaatttttggataaatc

SEQ ID NO: 65018 - DNA, 857 bp, Zea Mays
caacatcaccccaaatctcgcaactctcaccagcctagccatccacgagagtcaatcagccaacatcctcgccccaaatcgacgccaacctcccatccacgccgaggatggtgatccttaaagaacatgccaacccaatccccatcgcccccaaaacagagatttggttccaccccaatctccatccttggcagcgacgctctccaatccccaattattggcggtccaatcctcggcggcggcgctcagctctcctcatgtggccacccagcacctgccccatcttaaagacgagcctgtagatgtggcactcgtgttgtgcctgcgcctgcttgtctcttctgctgtcgccgtcgaccgactgctgcttgtgtcgtgtgagtgccctggtgttgacgccaaactcaaggcttgtgcgttgcgaggatgttggctgattatacattgtcagacagaggaggggaccaagggactaagggtggcatgtggaaactgaaacaggtaggagatagatggaaattgtggtcatcaacagctctagcacacaccgagagtgcattgaactgggcaaggattagttcctgtataatggcacattggcactactgtaatgcataaggatttgttctcacatttgaagtacaggtaatgtaaattttgtttgtaatttttatgtacgaataattgtgagttctttatcttttacatttgccttaatattattgtacatgtttgaaacatgtttgaacaactatatatctcaattaaatagagtttacctatgtgatatatagaatctgtagcaacgcatgggcacatgactagtttatacataataatcaatttttggataaatc

SEQ ID NO: 65019 - DNA, 940 bp, Zea Mays
caacatcaccccaaatctcgcaactctcaccagcctagccatccacgagagtcaatcagccaacatcctcgccccaaatcgacgccaacctcccatccacgccgaggatggtgatccttaaagaacatgccaacccaatccccatcgcccccaaaacagagatttggttccaccccaatctccatccttggcagcgacgctctccaatccccaattattggcggtccaatcctcggcggcggcgctcagctctcctcatgtggccacccagcacctgccccatcttaaagacgagcctgtagatgtggcactcgtgttgtgcctgcgcctgcttgtctcttctgctgtcgccgtcgaccgactgctgcttgtgtcgtacagaggaggggaccaagggactaagggtggcatgtggaaactgaaacagttctagccaacacgacatggcgtggattgaacttgaatcgacgagctatgtgccagttatcgctcttctaaacacatcaaccagtgcaccaaaactagcttctttcttccttgggagatagatggaaattgtggtcatcaacagctctagcacacaccgagagtgcattgaactgggcaaggattagttcctgtataatggcacattggcactactgtaatgcataaggatttgttctcacatttgaagtacaggctgttcacattgcaacccctgctcaagagaagaggaaggcataatggaggacttgcaggagtttcaagactacgatgagttctaggtgtgggttagcggcaaacccccagtcggctgcatgtgaaggccttatcttactacgtttcgtattcacactttgatctatgtttaagactatgtggatgtctcggacatcgtgatgtaatcaaattaataactctttacgttattatttgagcatgtgtgatgatgtccaat

SEQ ID NO: 65020 - DNA, 823 bp, Zea Mays
caacatcaccccaaatctcgcaactctcaccagcctagccatccacgagagtcaatcagccaacatcctcgccccaaatcgacgccaacctcccatccacgccgaggatggtgatccttaaagaacatgccaacccaatccccatcgcccccaaaacagagatttggttccaccccaatctccatccttggcagcgacgctctccaatccccaattattggcggtccaatcctcggcggcggcgctcagctctcctcatgtggccacccagcacctgccccatcttaaagacgagcctgtagatgtggcactcgtgttgtgcctgcgcctgcttgtctcttctgctgtcgccgtcgaccgactgctgcttgtgtcgtaggaggggaccaagggactaagggtggcatgtggaaactgaaacagggagatagatggaaattgtggtcatcaacagctctagcacacaccgagagtgcattgaactgggcaaggattagttcctgtataatggcacattggcactactgtaatgcataaggatttgttctcacatttgaagtacaggctgttcacattgcaacccctgctcaagagaagaggaaggcataatggaggacttgcaggagtttcaagactacgatgagttctaggtgtgggttagcggcaaacccccagtcggctgcatgtgaaggccttatcttactacgtttcgtattcacactttgatctatgtttaagactatgtggatgtctcggacatcgtgatgtaatcaaattaataactctttacgttattatttgagcatgtgtgatgatgtccaat

SEQ ID NO: 65021 - DNA, 3334 bp, Zea Mays
gtcacacgccaacaacgcaaacgacccttgccacgcggaaacatccgtccttccctaccggcccggaggcagctgcccagctcccctacgaatctcgattccccaaacaacattgccaccgccgcctgggcgcctcgcttcccctcacctcgccctctccaccaagccgcgagccgcctcccccatagggttcctctccccggagccgggggcagcaagggggatggaggggtgggcgtccgcggcggcgtacacggccgccgcgctggcctccgcggcggcggcgacggtggtggctctgcggctcgtgcaccggcatctccttcactacgccgagcccacgcaccagcgtttcatcgtccgcatcatcctcatggtcccggtatatgcagtgatgtcatttctttcccttgtcttaccgcatcaagcaatctacttcaattctattcgagaaatctatgatgcttgggtcatctacaatttcttttcactttgcttggcatgggttggaggtcctggtaatgtggtgacgttttatacggagatgtaaacaaggctgtctgcagtttgtgatcctaaaaccaatcttggtcgttatcactttcatactttacgcaaaaggaaaatatgaagatggaaacttcagtgtcaaccagtcctatctatacataactatcatctatacaatttcatactctatggcattgtttgctcttgcactgttctatgcggcatgcagagatctacttcagccatataaccctgtcccgaagttcatcataatcaaatcagtggtgttcctaacatattggcagccagaacttcgtgctatgtgttgagatgctcatagcagccattgggcaccgattttccttctcctacaaggaatacgctggctccaatgcccgccctttcggtggctttaggggaagccttcttcacgcgatgaaattcaatgacttctatcatgacactgtacaccagtttgcacctacatatcatgagtatgtgctgtacagtaacgagggggaggatgaaccaacaaaatacagccccagcactatggtgccaaccggagagcacatagtggagctggcggaagtcaccgttgtgaactcgaaggctccagggatgtcaaggtttttgatgtatgagcctgatcaggcagaaacaatgccctcccaagtcatggaagcgaacagaactgcttccgcggaaccatacgacctctcaagcttcctcaacgtagagctatctgatcatcctgatgaggtccctgcgattcctgatgcaagagaacaatgacatgttgaggtgtatattcatggtgtaaatgggcgatagcgctgttgagctgatcatagattaaggtgtagtgttgtacatagaaacgtcacatgtcggcgacgtttcattgttcgctcatcttgggggcaagtttatgtttttttcttctttgggtgggttaaagatgagccaagctgacagatcaattcaaggtgtaagtggaaatacgcggtgtaagcaacttgtcgtagatttgctgaattccttttgccgatgaggtgggtcatgggtgtcggttgaacgtggtttgtgtactgattgttgtaaaggttcacttatataacctgcgaggttgcactgagatccaagtggttaactgtatgatgacttaatttccttgttgctgaaatggtatactcatcttattttaggccctagaccatattcgcccagcattacaaaaagagagtagttaatgagtagtacagcatatgactatagggcggcctcctaaatgaaaaaaagtaccttatcatttggaaccagacaccagtgcactggcgtctgcttaacacaattgtacaatcaaagtaactcactctttggcggcaacaactaccagactactagtagttcaggattatcatctgaaacaagccaacctaaccgcatcggccatctccttagaaggattcatcccggcagctttcatctgatacatgattctggtggcctctctgtaccgtccgccgcgagcataggccatggccagggcactccagcacgcggcgtcaggcttgccaccgatcgtctcaaacgccctggtggcgtccgccagctgcccttgcttcgcgtacatgtgtatgagcccggagccaacgaactggttcgtgtccacgccgcgcttgatggcgtcggcgtgcacctgctgcccgcagcagcaccctgggtcctgtgactctgcgaacaccgcgaggatgctcgacagggagaagctgctccttggaacgcccgaggacgccatgtccctgaagacatccacagcctcgctcagtaggctttcacggtggcaggatgtgatcaggctcgtccaggccgcctcagggactggttcctgacagtggtgctgcatcgtcgtcgcgagaactcgccgcgcgcttctgtgaaaaccgcctccatcgcagtacagctgcactagcgagctgccaatgtcaccgtggatcctgcctttcttgacgacgagagcgtgtacctgctcaccgagacgtagctcgcctgcacgggtacatgaccgcagcacggccacgatggcatgggagtagcaatcgccgtccaggaccggcgttccatggcacatgtgggcgaacagacgcatcgcttcatggtggaggcagccatccgagtaggcggacaccatggtcgcccacgccatgccgttagtggtgggcattccgtcgaatacccggcgggcagcttcgatgtccccacacgcggcgtaagaaagcaggagacggttggcgaccggcgacgggagtccatcggaggcgcgacgggcggttatgtgcgcgtgcacggaggccacctctgctgcgtcggcgcactccctgagaagggatatgtagatgtcctcgtcgggcgggatgcccagcgcgtccatcaggcggagcacgtcgccggcgccggacgagggcggatgtgagtccgtagcttccggcggtggtttcttggtgcaatccttgccgctagtggtgtcagtcgcggtgttggtggggacggggagcttcggacgcgagaggagaggcggcggcggtttggccggtttgtttagggccggcaaccgtgctttactggtggccatggccggggtggtggcgttcgcggagagctgccggcagcgacgggtaaggcggggagtcgcggtggtggcgcagagcggtttcgcgacggagcagcgcgccatgtgcgaggttggctgaacccgaggcaccacccgagcgaaggttcggcttgtccaagagaggatttgtcgagatatttagggggtgtg

SEQ ID NO: 65022 - DNA, 3195 bp, Zea Mays
aaggcctccaaccaaacacaagtgtggacagatagttggtgtactcaaagctggaaatgatgcttaggactactaaatcttacagctctgtgggagttaaagtatatgcagtgatgtcatttctttcccttgtcttaccgcatcaagcaatctacttcaattctattcgagaaatctatgatgcttgggtcatctacaatttcttttcactttgcttggcatgggttggaggtcctggtaatgtggtggtaagtttgaatggacaatctctgaaaccctcatggttactgatgacttgctgtttaccagctattcccctagatggacgttttatacggagatgtaaacaaggctgtctgcagtttgtgatcctaaaaccaatcttggtcgttatcactttcatactttacgcaaaaggaaaatatgaagatggaaacttcagtgtcaaccagtcctatctatacataactatcatctatacaatttcatactctatggcattgtttgctcttgcactgttctatgcggcatgcagagatctacttcagccatataaccctgtcccgaagttcatcataatcaaatcagtggtgttcctaacatattggcagggtgtgctggttttccttgctgcaaaatctggtttcataaaaaatgctgagaaagctgcctatctccagaacttcgtgctatgtgttgagatgctcatagcagccattgggcaccgattttccttctcctacaaggaatacgctggctccaatgcccgccctttcggtggctttaggggaagccttcttcacgcgatgaaattcaatgacttctatcatgacactgtacaccagtttgcacctacatatcatgagtatgtgctgtacagtaacgagggggaggatgaaccaacaaaatacagccccagcactatggtgccaaccggagagcacatagtggagctggcggaagtcaccgttgtgaactcgaaggctccagggatgtcaaggtttttgatgtatgagcctgatcaggcagaaacaatgccctcccaagtcatggaagcgaacagaactgcttccgcggaaccatacgacctctcaagcttcctcaacgtagagctatctgatcatcctgatgaggtccctgcgattcctgatgcaagagaacaatgacatgttgaggtgtatattcatggtgtaaatgggcgatagcgctgttgagctgatcatagattaaggtgtagtgttgtacatagaaacgtcacatgtcggcgacgtttcattgttcgctcatcttgggggcaagtttatgtttttttcttctttgggtgggttaaagatgagccaagctgacagatcaattcaaggtgtaagtggaaatacgcggtgtaagcaacttgtcgtagatttgctgaattccttttgccgatgaggtgggtcatgggtgtcggttgaacgtggtttgtgtactgattgttgtaaaggttcacttatataacctgcgaggttgcactgagatccaagtggttaactgtatgatgacttaatttccttgttgctgaaatggtatactcatcttattttaggccctagaccatattcgcccagcattacaaaaagagagtagttaatgagtagtacagcatatgactatagggcggcctcctaaatgaaaaaaagtaccttatcatttggaaccagacaccagtgcactggcgtctgcttaacacaattgtacaatcaaagtaactcactctttggcggcaacaactaccagactactagtagttcaggattatcatctgaaacaagccaacctaaccgcatcggccatctccttagaaggattcatcccggcagctttcatctgatacatgattctggtggcctctctgtaccgtccgccgcgagcataggccatggccagggcactccagcacgcggcgtcaggcttgccaccgatcgtctcaaacgccctggtggcgtccgccagctgcccttgcttcgcgtacatgtgtatgagcccggagccaacgaactggttcgtgtccacgccgcgcttgatggcgtcggcgtgcacctgctgcccgcagcagcaccctgggtcctgtgactctgcgaacaccgcgaggatgctcgacagggagaagctgctccttggaacgcccgaggacgccatgtccctgaagacatccacagcctcgctcagtaggctttcacggtggcaggatgtgatcaggctcgtccaggccgcctcagggactggttcctgacagtggtgctgcatcgtcgtcgcgagaactcgccgcgcgcttctgtgaaaaccgcctccatcgcagtacagctgcactagcgagctgccaatgtcaccgtggatcctgcctttcttgacgacgagagcgtgtacctgctcaccgagacgtagctcgcctgcacgggtacatgaccgcagcacggccacgatggcatgggagtagcaatcgccgtccaggaccggcgttccatggcacatgtgggcgaacagacgcatcgcttcatggtggaggcagccatccgagtaggcggacaccatggtcgcccacgccatgccgttagtggtgggcattccgtcgaatacccggcgggcagcttcgatgtccccacacgcggcgtaagaaagcaggagacggttggcgaccggcgacgggagtccatcggaggcgcgacgggcggttatgtgcgcgtgcacggaggccacctctgctgcgtcggcgcactccctgagaagggatatgtagatgtcctcgtcgggcgggatgcccagcgcgtccatcaggcggagcacgtcgccggcgccggacgagggcggatgtgagtccgtagcttccggcggtggtttcttggtgcaatccttgccgctagtggtgtcagtcgcggtgttggtggggacggggagcttcggacgcgagaggagaggcggcggcggtttggccggtttgtttagggccggcaaccgtgctttactggtggccatggccggggtggtggcgttcgcggagagctgccggcagcgacgggtaaggcggggagtcgcggtggtggcgcagagcggtttcgcgacggagcagcgcgccatgtgcgaggttggctgaacccgaggcaccacccgagcgaaggttcggcttgtccaagagaggatttgtcgagatatttagggggtgtg

SEQ ID NO: 65023 - DNA, 3013 bp, Zea Mays
gcccattcacataggaactgtatactctattaactagcgaggactggagtctacctctttcaagacaaagctatgatgcttgggtcatctacaatttcttttcactttgcttggcatgggttggaggtcctggtaatgtggtgacgttttatacggagatgtaaacaaggctgtctgcagtttgtgatcctaaaaccaatcttggtcgttatcactttcatactttacgcaaaaggaaaatatgaagatggaaacttcagtgtcaaccagtcctatctatacataactatcatctatacaatttcatactctatggcattgtttgctcttgcactgttctatgcggcatgcagagatctacttcagccatataaccctgtcccgaagttcatcataatcaaatcagtggtgttcctaacatattggcagggtgtgctggttttccttgctgcaaaatctggtttcataaaaaatgctgagaaagctgcctatctccagaacttcgtgctatgtgttgagatgctcatagcagccattgggcaccgattttccttctcctacaaggaatacgctggctccaatgcccgccctttcggtggctttaggggaagccttcttcacgcgatgaaattcaatgacttctatcatgacactgtacaccagtttgcacctacatatcatgagtatgtgctgtacagtaacgagggggaggatgaaccaacaaaatacagccccagcactatggtgccaaccggagagcacatagtggagctggcggaagtcaccgttgtgaactcgaaggctccagggatgtcaaggtttttgatgtatgagcctgatcaggcagaaacaatgccctcccaagtcatggaagcgaacagaactgcttccgcggaaccatacgacctctcaagcttcctcaacgtagagctatctgatcatcctgatgaggtccctgcgattcctgatgcaagagaacaatgacatgttgaggtgtatattcatggtgtaaatgggcgatagcgctgttgagctgatcatagattaaggtgtagtgttgtacatagaaacgtcacatgtcggcgacgtttcattgttcgctcatcttgggggcaagtttatgtttttttcttctttgggtgggttaaagatgagccaagctgacagatcaattcaaggtgtaagtggaaatacgcggtgtaagcaacttgtcgtagatttgctgaattccttttgccgatgaggtgggtcatgggtgtcggttgaacgtggtttgtgtactgattgttgtaaaggttcacttatataacctgcgaggttgcactgagatccaagtggttaactgtatgatgacttaatttccttgttgctgaaatggtatactcatcttattttaggccctagaccatattcgcccagcattacaaaaagagagtagttaatgagtagtacagcatatgactatagggcggcctcctaaatgaaaaaaagtaccttatcatttggaaccagacaccagtgcactggcgtctgcttaacacaattgtacaatcaaagtaactcactctttggcggcaacaactaccagactactagtagttcaggattatcatctgaaacaagccaacctaaccgcatcggccatctccttagaaggattcatcccggcagctttcatctgatacatgattctggtggcctctctgtaccgtccgccgcgagcataggccatggccagggcactccagcacgcggcgtcaggcttgccaccgatcgtctcaaacgccctggtggcgtccgccagctgcccttgcttcgcgtacatgtgtatgagcccggagccaacgaactggttcgtgtccacgccgcgcttgatggcgtcggcgtgcacctgctgcccgcagcagcaccctgggtcctgtgactctgcgaacaccgcgaggatgctcgacagggagaagctgctccttggaacgcccgaggacgccatgtccctgaagacatccacagcctcgctcagtaggctttcacggtggcaggatgtgatcaggctcgtccaggccgcctcagggactggttcctgacagtggtgctgcatcgtcgtcgcgagaactcgccgcgcgcttctgtgaaaaccgcctccatcgcagtacagctgcactagcgagctgccaatgtcaccgtggatcctgcctttcttgacgacgagagcgtgtacctgctcaccgagacgtagctcgcctgcacgggtacatgaccgcagcacggccacgatggcatgggagtagcaatcgccgtccaggaccggcgttccatggcacatgtgggcgaacagacgcatcgcttcatggtggaggcagccatccgagtaggcggacaccatggtcgcccacgccatgccgttagtggtgggcattccgtcgaatacccggcgggcagcttcgatgtccccacacgcggcgtaagaaagcaggagacggttggcgaccggcgacgggagtccatcggaggcgcgacgggcggttatgtgcgcgtgcacggaggccacctctgctgcgtcggcgcactccctgagaagggatatgtagatgtcctcgtcgggcgggatgcccagcgcgtccatcaggcggagcacgtcgccggcgccggacgagggcggatgtgagtccgtagcttccggcggtggtttcttggtgcaatccttgccgctagtggtgtcagtcgcggtgttggtggggacggggagcttcggacgcgagaggagaggcggcggcggtttggccggtttgtttagggccggcaaccgtgctttactggtggccatggccggggtggtggcgttcgcggagagctgccggcagcgacgggtaaggcggggagtcgcggtggtggcgcagagcggtttcgcgacggagcagcgcgccatgtgcgaggttggctgaacccgaggcaccacccgagcgaaggttcggcttgtccaagagaggatttgtcgagatatttagggggtgtg

SEQ ID NO: 65024 - DNA, 1306 bp, Zea Mays
aattcgcgcgccctcaagcgtcagccgcgtcgacctccctgctcgctgttctccagctcgctctggccgcggacaccgtcgagtcgtcgaaccccgtcctcctctgctcgactcccaagcaggctccctgatccacgtccttctcgccgtcgatttcccacgcctgtggccacggcactcgctcctcggatccttgtcgtcgatcttcagtcctcgtcagttgctaacgtgcagcacgcctcgctctcgtgctcgccgtcgtttggtcatgagatgttcgtccctgcgcgctcactatgtcgtcgcacgccaagtcgattctgcctcgtggtgctcgtcaaatgttcgatggaacgtctaatctgataattgttgccgattctggggattttcgagtttatttgatcgcggtaagcactcgtcgtttatattctatttgttttacctcaaaattaattatggtcagttaaaaatgtgttaatgcttgttagattaataaatagcttgggcaaatatttttagtcgtgatgaatcttgtgtttggtcatgatgctttgtgtggtatttcggcggtgtgtaggataaatttagtgtttaagcaattatcgataagttaagtgtgtataaattggctcgtcattcgcgaagaatggtcaagttaataatatgagaaaaatagatttagtatttcatatgatcaattaaatgccctagataaatatctagcactaccgaaatgagtgaaagcgaataatatcgataagtttgtttctattaggattcaatccagctaagttaaaaataatgtagatgatgagtcgtatttaggctaattatgtttaaagtgtataatttgtttgcaatgtttgtgttaggttcgtttaatttagaaaagtgtaattattgcgcgtagtcgtatattaataactagtgttttcgtgtacgattgtacaacgcctcgctgctaggtgttttattcgctatcgcgtagcattatttaggtttgtaatatttccgtcgatatgcattcatgtgcataatgcatttcattcaggaacgttaattaatcgcgtgatgcggaagaagaaccaagccgaccccaagcgtgggctaatctgcaagctgaagctgatgaatcaacctgaagacggttaaatcaagcaagtgctcggtcgaaggatactcgtcaagcggacgtcacctaacaacactaacctagtgttactccaggcaagccccggtgcatgcaacccctttccttgtgtttttaaatacttttcgcacacttaagtctagtgaaatgtgc

SEQ ID NO: 65025 - DNA, 1111 bp, Zea Mays
cgtgagctcatattctccttcccaatttttttttctcccgctgctcaacgcttggatatttcaagccgcccgtgggtcttatctttttcacggtgcatggctttatctcctgccgccgcctgctctgatatttctttcagccgcctggacaggcttcatcttcctctcgcacgcgatgtgctcatctccctcctatcctctgctccccagctccgatccagcgctctgggctgtgctccctctctcctccatgcgtgaggtgccagcggactgaccttccccatgcagctccttcctctcgctcccgctccagcttctctacgctgccgccgttccctcgcgcagcgtcgtcctagacccggctgggcgcgctcgggtcttgttggcgcggcggcggcgacccctgtggccgcagctcactcccggtgcttctctccctgcttcaatttttttccagccatggtgctcgcgccggcgtcctcgactcctcagtctggcgcgctgtttttttttccatgtccctgtgcgcgagctgattcagcttgtcggtcatccactgctcctcggcgctccttgctcggcctccgacggctgtcgtccctcgccacgccctggccgcatcgctggctcccctcggttccagccatcagttgccgcggcatcctctcagttctcggtcagggaattcgcgcgccctcaagcgtcagccgcgtcgacctccctgctcgctgttctccagctcgctctggccgcggacaccgtcgagtcgtcgaaccccgtcctcctctgctcgactcccaagcaggctccctgatccacatccttctcgccgtcgatttcccacgcctgtggccacggcactcgctcctcggatccttgtcgtcgatcttcagtcctcgtcagttgctaacgtgcagcacgcctcgctctcgtgctcgccgtcgtttggtcatgagatgttcgtccctgcgcgctcactatgtcgtcgcacgccaagtcgattctgcctcgtggtgctcgccaaatgttcgatggaacgtctaatctgataattgttgccaattctggggattttcgagtttatttgatcgcggaacgttaattaatcgcg

SEQ ID NO: 65026 - DNA, 1578 bp, Zea Mays
cgcctgtacatcttgacaataaatagtaccaataatgcctcatcacaagtttacttgattgatgctcttccatcttatgggcgcggtagagaactccccggcaaaagacatcaaagtctaatatttggatccaatcttaccgatgtgataataaccggtgccaatggcaccgtcgatggccagggtgcggtttggtgggactggtttcacaaccacacattgaactatactagaccaccgctcgttgagttgatgtactctaccagagttgttatttccaacctgaccttcataaattcgccgttctggaatatccatcctgtgtactgcagccaggttttggtccagcatctcacaatcctagcacctatcagttcaccaaacaccgacggcatcgatccagactcgtccacaaacgtctgcatcgaagactgctacgtcagaaacggcgacgacattatcgtcatcaagagcgggtgggacgagtacggcatctccttcgcccaccccagctccaacatcagcatccgcaacatcacaggacagacgaggaacagcgccgggctcgcctttggaagcgagatgtcaggcggcatatcggacgtccgagcggagggtgtccggatcgtcaactcggtgcacggtatccgcatcaagacggccccagggcgtggagggtacgtgaagaacgtgtatgtagctgacgtcagcttcgacaacgtttccatagccatcaggatcactggaaactatggtgaacaccctgacgatggctacgacaggaacgcgcttcccaccataagcaacataaccatcaaggatgtcgtgggtgtcaacattggtgttgcaggaatgctgcagggcattccgggggatagcttcagtggcatctgcttgtcaaatgtttctctaagtgtcaggtctactgatccatggaattgttcacttgtcgaagggtattcgagctctgtgtcacctgaggtgtgtgagcaactgagagccactcctggtcctgggtccggacagatgtgctatggaggtaactatccggcagctgcggcacaaccgcagccgccgcagaagtcaggtgctagccggctggtaagtcctttcctctcgataagttggtttctacgtaggtaaccttgagcatagtatctacttatcattttccccccctgttcccacttcccagcagcttggtaattgtagtttatggagttcagtaccatgtacacttgttccaaaaactatttgctggggcatgtagctactgattattcttactcagaaatggaatggatttgtttgacttgaacagttctgttgaaacacgtcaggttctgggctggcttgtccttgtaagatacgggtgccggcatataacttggtttctcctcgcaaacgaacttccagggttattcaacaaaggctaaattgcattacaagaccgtgtaaaaataattttgttttctaccgtaagtacctctgctgcaattttgtttattgatattcttgtgctatctaattgctaggatgtgttttctaggcaagcaccactagtacctgagaataggg

SEQ ID NO: 65027 - DNA, 2040 bp, Zea Mays
taaagaccaattagcagatagtgccctaggaagatcctgtgaaaagcaattaacatgaaaaaagagattttgaaactgcttttggcaatacaaatgagcagcttttttggaataagtaatctactataagctagcctcatacagaatatgtagaggtagcatgggatcaagaagtagtgccctgatgagcaaaaatagggactaaagagtcctcgcacagttgaacatctatgtagagatagcatgggatcaagaagtggtgccctgatgagtaaaaataggactacagtccttgcacagttgaacaacaaaatatcaaacattaagcatatttctcacatatgcagggcaacacaggagggcagacccagtgccgaaggctccaacatcaccttgctctttcctacaaaatccatattgtctttcccgggaaaccaagcatggtaaattgagaccccaagcaagaagcaatgaaaacaaacacgtcacaatttcaagatcattgtccagcctacttaaagcaaatttacagaaataaagttacaagcataattgtcctagtttttaccgcaagggatattcatctcaaatacatattttcaagttcagaaatcgtacagcataagctcaaaccaggcgaatggatagggggtctgagtagcactacacaggtcctgtgtttgactcctcacgggagtaaatttcaggctaaggttaaaaatatcccctactttgtcccatactcccatgacaaacaggcccaaggcccggccctagtcgcagtcattctcacatgggctatggtgccgttgtgtatgggtggaccaggtgcccaggggttgtcttaccccctacaggttaagtttttttaagctcaaacaagtacatttatgcttgtgtgcaacatttgagatgctcatgtagagttttgacatcttgtgctgacttcttttgtctaaaagttcttaaaatattcagacctcccaatgaacaacgtactatgaaatagcgagtacctacatgagtgatatatgactaccaagctttgccattttacaaccactaaatcaacaatcctgaaacataaaacaacaacaataaagtcttttagtcccaagcaagtcgggtaagctaaagttgaaacccagtagaaaccacaagtcaaggttcaagcacatggatagctgtttcccatgcactcctattcaaggctaaatctttaagtatattccattactttaagtctcctttaaagcatcttctcatgtcaacttcgaccttccctacctctcttctcattgctatcacgcattaggatcccactacgtactagtgcctctagagatctccgttagacatgtccaaaccatctcaaccggtgtttgataatcctgacacatgattcaaaaatatttatatggcaaccagctgttatgttcgaccctagttcaatgccagaagttagcatttgtgtcagtattctgaacagtttgctctagctctattcagtcactcagacttccatttagaaagctacagagcaagccatcaacccatcttacctcttcaccgatttcaatccggagcattgagcagccatccaacagccccattttaactcatgtctttatcagtgcctaagtgtgctttcatgtaattttcctgcttctaattcttgcttaaggcttgtgttaaattaatgatctatcttgtataccaggacctgatcagcaccctcaagacctcatgtagaagtagatgagataaactcttgaaaaaccttgatagagttagtagtacctaaggagtagtcatgaatggacctgtaagtgggtgaatcctcagttatcagtaaaactggctactactcacgcatcgattttttcccctctgtgcttcatcattcctcttttcgacaaaaattgctttatgcctcacaattcggagaaatttaagattttggggacccaattcgcatgccctttcagatttgacactctgggcacatgtcaatgacccccacatgtcactgtgataggg

SEQ ID NO: 65028 - DNA, 2459 bp, Zea Mays
gctagatacaggccacaatgctaatcctgttgtttatacatccttgataaggaatttcttcatgcatgggaggaaggaagatggacacaaaatcttcaaagagatgaatcgtcgaggatgccagcctgatcttactctactgaatacatacatggattgtgttttcaaagctggtgacgttgaaaagggaagggcaatatttgaggatatcaaaggttatggtttccttccggatgtacgaagttattccattttgattcatggtctcacaaaagctggccaagctagggaaacttccagcattttccatgccatgaagcagcgaggttttgctcttgatgctcgggcttataatgctgttgttgatgggttctgcaaatctggaaaggtggacaaggcctatgaagctcttgaagagatgaaggtgaaacatgtacctcctacggttgctacatatgggtcaattattgatggtttagctaagattgataggttagatgaagcttacatgctttttgaggaagcaaaatcaaaaggaatagaattgaatgttattgtgtatagctctctcatcgatgggtttggaaaggttggtaggatagatgaagcttatttgatattagaagagatgatgaagaagggtttggcaccaaatgtttacacatggaacagccttatggatgctttagtgaaagctgaagaaatcaatgaagcacttatttgtttccagtcaatgaaggaaatgaaatgttccccaaacacttacacatatagtattcttataaatggactttgccgcgtacagaagtacaataaggcttttgtgttctggcaagaaatgcagaaacagggattggtccctaatgttgtgacttacacaaccatgatttctgggctcgcaaaggtagggaacataaccgatgcttgcagtctctttgagaggtttaaagccaacggtggaatccctgacgctgcaagtttcaatgctcttatagaggggatgagccatgcaaatagagctattgaagcatatcatgtatttgaagaaactcgattacgaggatgtaggattaatgtaaaggcatgcatcagtcttctagatgctttgaacaaagctgaatgtattgaacaggctgctgttgtaggtgcagttttgagagagattgccaagtcccatcatgcttctagatcattgtaaaattcagcttgacttggtgatagtttgacagtattggcattgatatgatgcttgggttagcacaggacaaattacactgtaagccaaattgatgtggcttgtatagtctgtactgtttgactggttgagaataggaagttttgacattattgtgatccagcattgagatagtgctctaggatttggtgagaacactcatgcatttctaccactggtggtattggacagcaggtctggatctcttgatatcagctgggcaatagttgaataatatcggtcgatcagtgtcttgctctaatgctacttggtaccttcatatttgccaactggaggatttttctccagatatgtcaaaacatctctggttcagcatgttgattcaaaaaatttaaatgaaacttcaagacaggtaactgtgcagttagcttctctttttaatatattggtacacctgtgtgttgtgagaaaaatacgtgtacttagctaggcctcaatctgaaaatttgctaacttccaataattatgagcccgtgatgctcctgcatttaacttgttaagagaagaagaattgggtcgtcttgatgtttctagttcttttatcttgggcatagagttactgtagaaacttagttctttttttcctgttcaaatattatccctgttaagttattgagtgcccttatcttttaccatcaagaatggtgccttttttcttgtgaaggaaggattcgtcatattttttatgttgccgtgttcaattttcctttttatgtttattttcaaactggaatgatgaaagttagccaaatcgtataatgatgtgctcctcctggtgtcatcttagtctgcacttggtgaagttttcttcttcccaagtacaagatgagatgactggagttgaagtttgcatcagtatgtgatgatagaaatggagattggtaacttgctgaccagaaaatatcctggagtcgaaacaaacaatactgatagcaaaatatgcaaggttgcagctattgtttgttacattgttttgtttgattgtttccaagatttgtttgtgcatgtcttttgtttgatcagatgccattgtttctgccgccattgtctgccattgggttttcatcttcggaaaccatagtttctttggcagtcctgttattactccctccattcctaaaagaatgtaaatctcgtcttgttttttggagtcaatcagactcaagtttgactagttctgtagaaaatagtattgacatttatg

SEQ ID NO: 65029 - DNA, 1968 bp, Zea Mays
gctagatacaggccacaatgctaatcctgttgtttatacatccttgataaggaatttcttcatgcatgggaggaaggaagatggacacaaaatcttcaaagagatgaatcgtcgaggatgccagcctgatcttactctactgaatacatacatggattgtgttttcaaagctggtgacgttgaaaagggaagggcaatatttgaggatatcaaaggttatggtttccttccggatgtacgaagttattccattttgattcatggtctcacaaaagctggccaagctagggaaacttccagcattttccatgccatgaagcagcgaggttttgctcttgatgctcgggcttataatgctgttgttgatgggttctgcaaatctggaaaggtggacaaggcctatgaagctcttgaagagatgaaggtgaaacatgtacctcctacggttgctacatatgggtcaattattgatggtttagctaagattgataggttagatgaagcttacatgctttttgaggaagcaaaatcaaaaggaatagaattgaatgttattgtgtatagctctctcatcgatgggtttggaaaggttggtaggatagatgaagcttatttgatattagaagagatgatgaagaagggtttggcaccaaatgtttacacatggaacagccttatggatgctttagtgaaagctgaagaaatcaatgaagcacttatttgtttccagtcaatgaaggaaatgaaatgttccccaaacacttacacatatagtattcttataaatggactttgccgcgtacagaagtacaataaggcttttgtgttctggcaagaaatgcagaaacagggattggtccctaatgttgtgacttacacaaccatgatttctgggctcgcaaaggtagggaacataaccgatgcttgcagtctctttgagaggtttaaagccaacggtggaatccctgacgctgcaagtttcaatgctcttatagaggggatgagccatgcaaatagagctattgaagcatatcatgtatttgaagaaactcgattacgaggatgtaggattaatgtaaaggcatgcatcagtcttctagatgctttgaacaaagctgaatgtattgaacaggctgctgttgtaggtgcagttttgagagagattgccaagtcccatcatgcttctagatcattgtaaaattcagcttgacttggtgatagtttgacagtattggcattgatatgatgcttgggttagcacaggacaaattacactgtaagccaaattgatgtggcttgtatagtctgtactgtttgactggttgagaataggaagttttgacattattgtgatccagcattgagatagtgctctaggatttggtgagaacactcatgcatttctaccactggtggtattggacagcaggtctggatctcttgatatcagctgggcaatagttgaataatatcggtcgatcagtgtcttgctctaatgctacttggtaccttcatatttgccaactggaggatttttctccagatatgtcaaaacatctctggttcagcatgttgattcaaaaaatttaaatgaaacttcaagacagtattcaaaggaaagcgggggagcgtcttgttatcatttggagagacatgatgattatccgctagagatccctgtcaaatgctctttggattggattcgtccaagatgaaggattttgtacgaggacgcaacagctgtgtttcgcagtgtcaaatttctatttcaagttcgataaataatatagaatagcttttcagctagtttctaattcaagttcgaccaaggaaaataatctagaatagctttttgtgctaacattgtaattggcgattgcggataattcgttgcttggacaaattacagctatttcgaaaactaacgtgggatagagtttttgctgattaaaaaggaggataatatgg

SEQ ID NO: 65030 - DNA, 1983 bp, Zea Mays
gctagatacaggccacaatgctaatcctgttgtttatacatccttgataaggaatttcttcatgcatgggaggaaggaagatggacacaaaatcttcaaagagatgaatcgtcgaggatgccagcctgatcttactctactgaatacatacatggattgtgttttcaaagctggtgacgttgaaaagggaagggcaatatttgaggatatcaaaggttatggtttccttccggatgtacgaagttattccattttgattcatggtctcacaaaagctggccaagctagggaaacttccagcattttccatgccatgaagcagcgaggttttgctcttgatgctcgggcttataatgctgttgttgatgggttctgcaaatctggaaaggtggacaaggcctatgaagctcttgaagagatgaaggtgaaacatgtacctcctacggttgctacatatgggtcaattattgatggtttagctaagattgataggttagatgaagcttacatgctttttgaggaagcaaaatcaaaaggaatagaattgaatgttattgtgtatagctctctcatcgatgggtttggaaaggttggtaggatagatgaagcttatttgatattagaagagatgatgaagaagggtttggcaccaaatgtttacacatggaacagccttatggatgctttagtgaaagctgaagaaatcaatgaagcacttatttgtttccagtcaatgaaggaaatgaaatgttccccaaacacttacacatatagtattcttataaatggactttgccgcgtacagaagtacaataaggcttttgtgttctggcaagaaatgcagaaacagggattggtccctaatgttgtgacttacacaaccatgatttctgggctcgcaaaggtagggaacataaccgatgcttgcagtctctttgagaggtttaaagccaacggtggaatccctgacgctgcaagtttcaatgctcttatagaggggatgagccatgcaaatagagctattgaagcatatcatgtatttgaagaaactcgattacgaggatgtaggattaatgtaaaggcatgcatcagtcttctagatgctttgaacaaagctgaatgtattgaacaggctgctgttgtaggtgcagttttgagagagattgccaagtcccatcatgcttctagatcattgtaaaattcagcttgacttggtgatagtttgacagtattggcattgatatgatgcttgggttagcacaggacaaattacactgtaagccaaattgatgtggcttgtatagtctgtactgtttgactggttgagaataggaagttttgacattattgtgatccagcattgagatagtgctctaggatttggtgagaacactcatgcatttctaccactggtggtattggacagcaggtctggatctcttgatatcagctgggcaatagttgaataatatcggtcgatcagtgtcttgctctaatgctacttggtaccttcatatttgccaactggaggatttttctccagatatgtcaaaacatctctggttcagcatgttgattcaaaaaatttaaatgaaacttcaagacagctaatgtatcttcagtattcaaaggaaagcgggggagcgtcttgttatcatttggagagacatgatgattatccgctagagatccctgtcaaatgctctttggattggattcgtccaagatgaaggattttgtacgaggacgcaacagctgtgtttcgcagtgtcaaatttctatttcaagttcgataaataatatagaatagcttttcagctagtttctaattcaagttcgaccaaggaaaataatctagaatagctttttgtgctaacattgtaattggcgattgcggataattcgttgcttggacaaattacagctatttcgaaaactaacgtgggatagagtttttgctgattaaaaaggaggataatatgg

SEQ ID NO: 65031 - DNA, 1959 bp, Zea Mays
gctagatacaggccacaatgctaatcctgttgtttatacatccttgataaggaatttcttcatgcatgggaggaaggaagatggacacaaaatcttcaaagagatgaatcgtcgaggatgccagcctgatcttactctactgaatacatacatggattgtgttttcaaagctggtgacgttgaaaagggaagggcaatatttgaggatatcaaaggttatggtttccttccggatgtacgaagttattccattttgattcatggtctcacaaaagctggccaagctagggaaacttccagcattttccatgccatgaagcagcgaggttttgctcttgatgctcgggcttataatgctgttgttgatgggttctgcaaatctggaaaggtggacaaggcctatgaagctcttgaagagatgaaggtgaaacatgtacctcctacggttgctacatatgggtcaattattgatggtttagctaagattgataggttagatgaagcttacatgctttttgaggaagcaaaatcaaaaggaatagaattgaatgttattgtgtatagctctctcatcgatgggtttggaaaggttggtaggatagatgaagcttatttgatattagaagagatgatgaagaagggtttggcaccaaatgtttacacatggaacagccttatggatgctttagtgaaagctgaagaaatcaatgaagcacttatttgtttccagtcaatgaaggaaatgaaatgttccccaaacacttacacatatagtattcttataaatggactttgccgcgtacagaagtacaataaggcttttgtgttctggcaagaaatgcagaaacagggattggtccctaatgttgtgacttacacaaccatgatttctgggctcgcaaaggtagggaacataaccgatgcttgcagtctctttgagaggtttaaagccaacggtggaatccctgacgctgcaagtttcaatgctcttatagaggggatgagccatgcaaatagagctattgaagcatatcatgtatttgaagaaactcgattacgaggatgtaggattaatgtaaaggcatgcatcagtcttctagatgctttgaacaaagctgaatgtattgaacaggctgctgttgtaggtgcagttttgagagagattgccaagtcccatcatgcttctagatcattgtaaaattcagcttgacttggtgatagtttgacagtattggcattgatatgatgcttgggttagcacaggacaaattacactgtaagccaaattgatgtggcttgtatagtctgtactgtttgactggttgagaataggaagttttgacattattgtgatccagcattgagatagtgctctaggatttggtgagaacactcatgcatttctaccactggtggtattggacagcaggtctggatctcttgatatcagctgggcaatagttgaataatatcggtcgatcagtgtcttgctctaatgctacttggtaccttcatatttgccaactggaggatttttctccagatatgtcaaaacatctctggttcagcatgttgattcaaaaaatttaaatgaaacttcaagacaggaaagcgggggagcgtcttgttatcatttggagagacatgatgattatccgctagagatccctgtcaaatgctctttggattggattcgtccaagatgaaggattttgtacgaggacgcaacagctgtgtttcgcagtgtcaaatttctatttcaagttcgataaataatatagaatagcttttcagctagtttctaattcaagttcgaccaaggaaaataatctagaatagctttttgtgctaacattgtaattggcgattgcggataattcgttgcttggacaaattacagctatttcgaaaactaacgtgggatagagtttttgctgattaaaaaggaggataatatgg

SEQ ID NO: 65032 - DNA, 2013 bp, Zea Mays
gctagatacaggccacaatgctaatcctgttgtttatacatccttgataaggaatttcttcatgcatgggaggaaggaagatggacacaaaatcttcaaagagatgaatcgtcgaggatgccagcctgatcttactctactgaatacatacatggattgtgttttcaaagctggtgacgttgaaaagggaagggcaatatttgaggatatcaaaggttatggtttccttccggatgtacgaagttattccattttgattcatggtctcacaaaagctggccaagctagggaaacttccagcattttccatgccatgaagcagcgaggttttgctcttgatgctcgggcttataatgctgttgttgatgggttctgcaaatctggaaaggtggacaaggcctatgaagctcttgaagagatgaaggtgaaacatgtacctcctacggttgctacatatgggtcaattattgatggtttagctaagattgataggttagatgaagcttacatgctttttgaggaagcaaaatcaaaaggaatagaattgaatgttattgtgtatagctctctcatcgatgggtttggaaaggttggtaggatagatgaagcttatttgatattagaagagatgatgaagaagggtttggcaccaaatgtttacacatggaacagccttatggatgctttagtgaaagctgaagaaatcaatgaagcacttatttgtttccagtcaatgaaggaaatgaaatgttccccaaacacttacacatatagtattcttataaatggactttgccgcgtacagaagtacaataaggcttttgtgttctggcaagaaatgcagaaacagggattggtccctaatgttgtgacttacacaaccatgatttctgggctcgcaaaggtagggaacataaccgatgcttgcagtctctttgagaggtttaaagccaacggtggaatccctgacgctgcaagtttcaatgctcttatagaggggatgagccatgcaaatagagctattgaagcatatcatgtatttgaagaaactcgattacgaggatgtaggattaatgtaaaggcatgcatcagtcttctagatgctttgaacaaagctgaatgtattgaacaggctgctgttgtaggtgcagttttgagagagattgccaagtcccatcatgcttctagatcattgtaaaattcagcttgacttggtgatagtttgacagtattggcattgatatgatgcttgggttagcacaggacaaattacactgtaagccaaattgatgtggcttgtatagtctgtactgtttgactggttgagaataggaagttttgacattattgtgatccagcattgagatagtgctctaggatttggtgagaacactcatgcatttctaccactggtggtattggacagcaggtctggatctcttgatatcagctgggcaatagttgaataatatcggtcgatcagtgtcttgctctaatgctacttggtaccttcatatttgccaactggaggatttttctccagatatgtcaaaacatctctggttcagcatgttgattcaaaaaatttaaatgaaacttcaagacagttaatgtatcttcttgcaagaaaaaaacagctaatgtatcttcagtattcaaaggaaagcgggggagcgtcttgttatcatttggagagacatgatgattatccgctagagatccctgtcaaatgctctttggattggattcgtccaagatgaaggattttgtacgaggacgcaacagctgtgtttcgcagtgtcaaatttctatttcaagttcgataaataatatagaatagcttttcagctagtttctaattcaagttcgaccaaggaaaataatctagaatagctttttgtgctaacattgtaattggcgattgcggataattcgttgcttggacaaattacagctatttcgaaaactaacgtgggatagagtttttgctgattaaaaaggaggataatatgg

SEQ ID NO: 65033 - DNA, 1993 bp, Zea Mays
gctagatacaggccacaatgctaatcctgttgtttatacatccttgataaggaatttcttcatgcatgggaggaaggaagatggacacaaaatcttcaaagagatgaatcgtcgaggatgccagcctgatcttactctactgaatacatacatggattgtgttttcaaagctggtgacgttgaaaagggaagggcaatatttgaggatatcaaaggttatggtttccttccggatgtacgaagttattccattttgattcatggtctcacaaaagctggccaagctagggaaacttccagcattttccatgccatgaagcagcgaggttttgctcttgatgctcgggcttataatgctgttgttgatgggttctgcaaatctggaaaggtggacaaggcctatgaagctcttgaagagatgaaggtgaaacatgtacctcctacggttgctacatatgggtcaattattgatggtttagctaagattgataggttagatgaagcttacatgctttttgaggaagcaaaatcaaaaggaatagaattgaatgttattgtgtatagctctctcatcgatgggtttggaaaggttggtaggatagatgaagcttatttgatattagaagagatgatgaagaagggtttggcaccaaatgtttacacatggaacagccttatggatgctttagtgaaagctgaagaaatcaatgaagcacttatttgtttccagtcaatgaaggaaatgaaatgttccccaaacacttacacatatagtattcttataaatggactttgccgcgtacagaagtacaataaggcttttgtgttctggcaagaaatgcagaaacagggattggtccctaatgttgtgacttacacaaccatgatttctgggctcgcaaaggtagggaacataaccgatgcttgcagtctctttgagaggtttaaagccaacggtggaatccctgacgctgcaagtttcaatgctcttatagaggggatgagccatgcaaatagagctattgaagcatatcatgtatttgaagaaactcgattacgaggatgtaggattaatgtaaaggcatgcatcagtcttctagatgctttgaacaaagctgaatgtattgaacaggctgctgttgtaggtgcagttttgagagagattgccaagtcccatcatgcttctagatcattgtaaaattcagcttgacttggtgatagtttgacagtattggcattgatatgatgcttgggttagcacaggacaaattacactgtaagccaaattgatgtggcttgtatagtctgtactgtttgactggttgagaataggaagttttgacattattgtgatccagcattgagatagtgctctaggatttggtgagaacactcatgcatttctaccactggtggtattggacagcaggtctggatctcttgatatcagctgggcaatagttgaataatatcggtcgatcagtgtcttgctctaatgctacttggtaccttcatatttgccaactggaggatttttctccagatatgtcaaaacatctctggttcagcatgttgattcaaaaaatttaaatgaaacttcaagacagaaaaaaacagctaatgtatcttcagtattcaaaggaaagcgggggagcgtcttgttatcatttggagagacatgatgattatccgctagagatccctgtcaaatgctctttggattggattcgtccaagatgaaggattttgtacgaggacgcaacagctgtgtttcgcagtgtcaaatttctatttcaagttcgataaataatatagaatagcttttcagctagtttctaattcaagttcgaccaaggaaaataatctagaatagctttttgtgctaacattgtaattggcgattgcggataattcgttgcttggacaaattacagctatttcgaaaactaacgtgggatagagtttttgctgattaaaaaggaggataatatgg

SEQ ID NO: 65034 - DNA, 1490 bp, Zea Mays
cccccaacgaaccctagctccggcagcggtggtcgatctggaggacacggcaaccccactccccgtccgtccggcctccaggacgggcgaagtagtgaagaaacgtcgtcgtcgtcgatgttcaccagcgcctaggaaaggcggcaaagcacctgtagatcgggggaaatccatcgccacccacaacatcgaagagagcagcaccgcagcaccagtcaggcgacgtcctaccacgcgttcgcgtgcaagaattgcaatggacaactactttgacgatggtgatgattccatttttacggtgtccactacactccaccaattaacttcgatgacgaccatgttgatatgacaccacccatgcaatttagcccggctattccacaacaagttacacaagttgctctaggactgtcacaaaagaagaaaaaaaatggcaaccaagaaggtagccatccggagtaaaaactttaggaacgaggaaaattccttgctatactctgcttatttgaatgtgggcaaggatccaattactgcgacaaatcaaactttgggcagctactagggatgggtccacaagttcttcaatgagcacaagacctcaactataatagatcgaagtgtttgttccatccaacacagatggggaataatccaaagggaaacaagaaaattttgtgccatatatggcaaagtatgtagaaggtaccgaagtggacaaagtgaagatgacaaggtagttcacatatacatgtcatgccaatattgtgcaacgattaatttctgcataccttattttctaagtcagcaagatctcgaccttcacgatggtgccataggaaataccttccaattcatgcattgatgattcattctgaaaaatgagcccaattggactttgtagttgatgactgctggattttgccccaacaacaacaacaaatccctagatgtggagaccacagatgcagacgacatgcctcctccactagaatgcccaatgggacgcgacaaagaaaaaacagcaaagcacgcctagttcttcttcttagtccacaacttgtttggaggtcttgcataagatgtcaatggacagacttaactttgacatggccctggggcatccaaaaaggagggagaggctttcaagtccctgatgacagaaaaagtgcatatctagaagcagttgctcaatctaaagaaatacaatgaaacaaataagatgatgatgatggacgagcactctacctaatgatgattcctaagcaactttgctatgaagaaaaagcatattctgaacaaggcaaaggaatttggttttgagtgatctgtttcagaatgcaatcaatttgtttttagcatattttatttgtgttgtcctcgtggtttgaataatgaacttgtgtagttgtgttttcaattaatttcgggaatcggtactctattgtcggaaaacattaatgttttgtcgagaagtgcttgttgtaataaat

SEQ ID NO: 65035 - DNA, 2068 bp, Zea Mays
aacgaaccctagctccggcagcggtggtcgatctggaggacacggcaaccccactccccgtccgtccggcctccaggacgggcgaagtagtgaagaaacgtcgtcgtcgtcgatgttcaccagcgcctaggaaaggcggcaaagcacctgtagatcgggggaaatccatcgccacccacaacatcgaagagagcagcaccgcagcaccagtcaggcgacgtcctaccacgcgttcgcgtgcaaggtcttgatttatgaagtccaaaaacatacatgttcctcgtatagatccggcctctgcacacaacaaaaccctctattcaccaagtttttgacacatccatgttcacatgtacatgccataccattgtatcattcagtgctcatgttttaactattatttgccatacattcggaaatcagatgaaacagatccaattcatgtatagctacaatgtcggacactccgtacgataccctcagatgggctatcaaggagatacaagaccacgctacggccattcggcaagtggtgttgaatcctagtgacgaacgagttcaatgccaccatgtgccagagctccttgcttagatccttcaattagctgattggatcgacaaggtctctattcagtgcaccaccattcttgccatgtacaaccccaaccctcaggacacaggcatcacaagtgaagacgaacgagttgccgctgatatggaaccgttgccaacactgtcacctaaatcccttcaagaaatgtgcaaagagtggggcatgaactacgacagcgatcagtctagaggcaacaactagctaggtttctagttaaatgtagtaggttcatggtagtattttgtcagtcatggatgtcttgaactacccattcaagttatttctaggggatccatgcgaactatgtgtgtgttcttaccttttggactaaataatgtgtctctatctgtttctatgtgctgaaccttcgcacttgtttcagaattgcaatggacaactactttgacgatggtgatgattccatttttacggtgtccactacactccaccaattaacttcgatgacgaccatgttgatatgacaccacccatgcaatttagcccggctattccacaacaagttacacaagttgctctaggactgtcacaaaagaagaaaaaaaatggcaaccaagaaggtagccatccggagtaaaaactttaggaacgaggaaaattccttgctatactctgcttatttgaatgtgggcaaggatccaattactgcgacaaatcaaactttgggcagctactagggatgggtccacaagttcttcaatgagcacaagacctcaactataatagatcgaagtgtttgttccatccaacacagatggggaataatccaaagggaaacaagaaaattttgtgccatatatggcaaagtatgtagaaggtaccgaagtggacaaagtgaagatgacaagttgatgactgctggattttgccccaacaacaacaacaaatccctagatgtggagaccacagatgcagacgacatgcctcctccactagaatgcccaatgggacgcgacaaagaaaaaacagcaaagcacgcctagttcttcttcttagtccacaacttgtttggaggtcttgcataagatgtcaatggacagacttaactttgacatggccctggggcatccaaaaaggagggagaggctttcaagtccctgatgacagaaaaagtgcatatctagaagcagttgctcaatctaaagaaatacaatgaaacaaataagatgatgatgatggacgagcactctacctaatgatgattcctaagcaactttgctatgaagaaaaagcatattctgaacaaggcaaaggaatttggttttgagtgatctgtttcagaatgcaatcaatttgtttttagcatattttatttgtgttgtcctcgtggtttgaataatgaacttgtgtagttgtgttttcaattaatttcgggaatcggtactctattgtcggaaaacattaatgttttgtcgagaagtgcttgttgtaataaat

SEQ ID NO: 65036 - DNA, 1019 bp, Zea Mays
gaacaacacgcattcctacaatcggacaatcctactccaagcattgagggacacggaggcggcgccgttcggcactgcacgctcacgggctcgcgcattagtggatactctcccccggcgccacgaaatcgtccgctctcaccaccttccatcggtccctcacgatcttgccaagaatccaagatccgcctgcggtagctagcggtcctatcttgatccgatggtgtcaccgactccgggagggaaggatgcaagggagggtggcggcaaggcggagtggatgatctacgccttcgtggcgcgcggcaccgcggtgctggcggagtacacggagttcaccggcaacttccccgccatcgccgcgcaatgcctgcagcggctacccgccgggtcgtcctccgccggcaccggccctgacggccgtggcgatgcgccggcacggttcagctacgcctgtgaccgacacacattcaacttcctcttgtaccgcggctacgacactgggccgtggagagaaattgagtgaactccaagacaagacttctgagctacatattcaggcccagcagttcaagaaacagggagtgaagattcgcaggaagacatggctacagaacatgaaaattaagttggtgattcttggaatccttttgctccttgtaatcatagtatgggtatctatttgtcagggctttgactgcaccaagcatgaaacataatagaaatggtacaacgctgctccatccattttaaattataacatgttttggctctttttagatctatagttatgtctagatacatagttaaagctataaattcagaaatgctaaaacattttataatttaggacagaggatagtactaggttggagctgtgatagattttgtgctggtgaagccaagtgtacctctacatatgcttcggctctctagtttcgtatcacggtacaaatgtaaatctgagttggtcctaaagtgtactcgcgatgtaagactaacatgattccttccgtact

SEQ ID NO: 65037 - DNA, 1271 bp, Zea Mays
gaacaacacgcattcctacaatcggacaatcctactccaagcattgagggacacggaggcggcgccgttcggcactgcacgctcacgggctcgcgcattagtggatactctcccccggcgccacgaaatcgtccgctctcaccaccttccatcggtccctcacgatcttgccaagaatccaagatccgcctgcggtagctagcggtcctatcttgatccgatggtgtcaccgactccgggagggaaggatgcaagggagggtggcggcaaggcggagtggatgatctacgccttcgtggcgcgcggcaccgcggtgctggcggagtacacggagttcaccggcaacttccccgccatcgccgcgcaatgcctgcagcggctacccgccgggtcgtcctccgccggcaccggccctgacggccgtggcgatgcgccggcacggttcagctacgcctgtgaccgacacacattcaacttcctcttgtaccgcggctacggttgcggaggaatccgttccaaagaatgtctcagtggcatttcttgaaaggttaaaagatgacttcatgaagagatatggtggtggtaaagctgacacagctcttgcaaaatgtctaaataaagaatatggacaagttataaagcagcacattcaatatgttcttgatcattcagaggaactagataaaatgttaaaagtgcaagcccaagtttcagaagtgaaaaatataatgttagacagcatagaaaagacactgggccgtggagagaaattgagtgaactccaagacaagacttctgagctacatattcaggcccagcagttcaagaaacagggagtgaagattcgcaggaagacatggctacagaacatgaaaattaagttggtgattcttggaatccttttgctccttgtaatcatagtatgggtatctatttgtcagggctttgactgcaccaagcatgaaacataatagaaatggtacaacgctgctccatccattttaaattataacatgttttggctctttttagatctatagttatgtctagatacatagttaaagctataaattcagaaatgctaaaacattttataatttaggacagaggatagtactaggttggagctgtgatagattttgtgctggtgaagccaagtgtacctctacatatgcttcggctctctagtttcgtatcacggtacaaatgtaaatctgagttggtcctaaagtgtactcgcgatgtaagactaacatgattccttccgtact

SEQ ID NO: 65038 - DNA, 1681 bp, Zea Mays
gaacaacacgcattcctacaatcggacaatcctactccaagcattgagggacacggaggcggcgccgttcggcactgcacgctcacgggctcgcgcattagtggatactctcccccggcgccacgaaatcgtccgctctcaccaccttccatcggtccctcacgatcttgccaagaatccaagatccgcctgcggtagctagcggtcctatcttgatccgatggtgtcaccgactccgggagggaaggatgcaagggagggtggcggcaaggcggagtggatgatctacgccttcgtggcgcgcggcaccgcggtgctggcggagtacacggagttcaccggcaacttccccgccatcgccgcgcaatgcctgcagcggctacccgccgggtcgtcctccgccggcaccggccctgacggccgtggcgatgcgccggcacggttcagctacgcctgtgaccgacacacattcaacttcctcttgtaccgcggctacgttgcggaggaatccgttccaaagaatgtctcagtggcatttcttgaaaggttaaaagatgacttcatgaagagatatggtggtggtaaagctgacacagctcttgcaaaatgtctaaataaagaatatggacaagttataaagcagcacattcaatatgttcttgatcattcagaggaactagataaaatgttaaaagtgcaagcccaagtttcagaagtgaaaaatataatgttagacagcatagaaaagacactgggccgtggagagaaattgagtgaactccaagacaagacttctgagctacatattcaggcccagcagttcaagaaacagggagtgaagattcgcaggaagacatggctacagaacatgaaaattaagttggtgattcttggaatccttttgctccttgtaatcatagtatgggtatctatttgtcagggctttgactgcaccaagcatgaaacataatagaaatgggttcttttaaaggcttcctcaacagctccttcaataaatctattaaacgacgggcttctctgctggattctctataaaaataggaagaagtcgtctcgagaaacctagcaaagctgagagcccaaaaaagaaggcttctcttgcgtcattcccttcccctgaaaatagaaagagttatgtttctaaccaaataaagcactctttcggacttcctaaaaataatgagaaagttattttctcatatgagatagagctggagttgtgatgcagagtcctaccaaagaagagggtctaagatcttaggccttgttccaatctcgcgagataaactttagcagcttttttttagctacttttagctatttgtaatctaaacaggagagctaatagtggtaattgaagctaaactttagcacttcaattcatatagctaaaatttagcaggaagctaaagtttatctcgtgagattgaaacggggccttacaagttttgtggtactacagttagttatagggttatgagggttatgtcgctggtactacttaaagatatttaacgttcggttagcaacatatctagttcttaaagaggtatggtgctttcatacatactttaaatctaaaacttttattttaaatgcaagggcttttgaatggaagaacctaagaacttttaatggttttagtttttatcttttttac

SEQ ID NO: 65039 - DNA, 1693 bp, Zea Mays
gaacaacacgcattcctacaatcggacaatcctactccaagcattgagggacacggaggcggcgccgttcggcactgcacgctcacgggctcgcgcattagtggatactctcccccggcgccacgaaatcgtccgctctcaccaccttccatcggtccctcacgatcttgccaagaatccaagatccgcctgcggtagctagcggtcctatcttgatccgatggtgtcaccgactccgggagggaaggatgcaagggagggtggcggcaaggcggagtggatgatctacgccttcgtggcgcgcggcaccgcggtgctggcggagtacacggagttcaccggcaacttccccgccatcgccgcgcaatgcctgcagcggctacccgccgggtcgtcctccgccggcaccggccctgacggccgtggcgatgcgccggcacggttcagctacgcctgtgaccgacacacattcaacttcctcttgtaccgcggctacgcctattgtgtagttgcggaggaatccgttccaaagaatgtctcagtggcatttcttgaaaggttaaaagatgacttcatgaagagatatggtggtggtaaagctgacacagctcttgcaaaatgtctaaataaagaatatggacaagttataaagcagcacattcaatatgttcttgatcattcagaggaactagataaaatgttaaaagtgcaagcccaagtttcagaagtgaaaaatataatgttagacagcatagaaaagacactgggccgtggagagaaattgagtgaactccaagacaagacttctgagctacatattcaggcccagcagttcaagaaacagggagtgaagattcgcaggaagacatggctacagaacatgaaaattaagttggtgattcttggaatccttttgctccttgtaatcatagtatgggtatctatttgtcagggctttgactgcaccaagcatgaaacataatagaaatgggttcttttaaaggcttcctcaacagctccttcaataaatctattaaacgacgggcttctctgctggattctctataaaaataggaagaagtcgtctcgagaaacctagcaaagctgagagcccaaaaaagaaggcttctcttgcgtcattcccttcccctgaaaatagaaagagttatgtttctaaccaaataaagcactctttcggacttcctaaaaataatgagaaagttattttctcatatgagatagagctggagttgtgatgcagagtcctaccaaagaagagggtctaagatcttaggccttgttccaatctcgcgagataaactttagcagcttttttttagctacttttagctatttgtaatctaaacaggagagctaatagtggtaattgaagctaaactttagcacttcaattcatatagctaaaatttagcaggaagctaaagtttatctcgtgagattgaaacggggccttacaagttttgtggtactacagttagttatagggttatgagggttatgtcgctggtactacttaaagatatttaacgttcggttagcaacatatctagttcttaaagaggtatggtgctttcatacatactttaaatctaaaacttttattttaaatgcaagggcttttgaatggaagaacctaagaacttttaatggttttagtttttatcttttttac

SEQ ID NO: 65040 - DNA, 960 bp, Zea Mays
gtttatcgttattttctcattttttaattagttgcctctttttagatgttagttgatttcatatcctataaaagtagttgatgttagtaggtaaataaattacatttgtatgtctcctcagatttgatttgaccgtgtatgcctggttctcttaacttcccatggattgtatcatgtgtacatgattttcaattgataaaataaagtttaatgctataagcataacaagagcagaagattacacagcagtatgatggttatcatgcttgctttagttatacattatacatggtgtgggggacatcagtaaactattattaactgaaatcattgtcctaagaaatgttagtgtttgtgcaagttgagtgtgctgcatggaaatcatcaacttgttcctatgaccgctatggacgtcgtaataatcagaaataaaaaaggttctttttatatgttgccatagttttatttatttgttgaattcctgcatcacttaaaagtctgttttacagttagtttgaattggcaattccttataattttgccatttctgcctcttgtatttttagacactgggccgtggagagaaattgagtgaactccaagacaagacttctgagctacatattcaggcccagcagttcaagaaacagggagtgaagattcgcaggaagacatggctacagaacatgaaaattaagttggtgattcttggaatccttttgctccttgtaatcatagtatgggtatctatttgtcagggctttgactgcaccaagcatgaaacataatagaaatgaggatagtactaggttggagctgtgatagattttgtgctggtgaagccaagtgtacctctacatatgcttcggctctctagtttcgtatcacggtacaaatgtaaatctgagttggtcctaaagtgtactcgcgatgtaagactaacatgattccttccgtact

SEQ ID NO: 65041 - DNA, 2029 bp, Zea Mays
aacgctaacgccaaggctaatcccgaacccgaaatggcaggtagctctgctcgatgactcggcccctctcgaaagccacgaaaatcgctgggccgttcgattcactcacctcactccacctcttgactgaagaagccgtctgcctgcctccgactcccgcgtctctcctccaagtgatctccttccacctttgccgatcgcccgttgccaccggccgggcgatcctcgtacttccacttccaccatggcctcctcctcctcttcctcctcctcctcctcctcctcctcctcctcctcccgcttcctcctcccgctgctactgctctgttcgcacctctccctcgcctcggcagaggaggcggcgtcggcggcagcggacctcctcagcgaggcgcgcgcgccggggttcgccgcgtggctgcgcggcgtgcggcggcgcatccaccagcgccccgagctggccttccaggagttccgcaccagcgagctcgtgcgggccgagctcgacgcgatcggcgtcccgtaccggtggcccgtcgcccagaccggcgtcgtggccaccatcgcgggcgccgccgccggccccgtcgtcgcgctccgggccgacatggacgcgctccccgtgcaggagctggtggactgggagcacaagagccaggagagtgggaaaatgcacgcttgcggacacgacgtgcacacgacaatgcttctgggggctgccagaatactccaggatcgcaagagcgacctaatgccggcagaggagggccagggcggcgcgtactacgtgctgcaagaaggcgtccttgacgacgcgtcagccatattcggcttgcacgttgacccggccctccccgtcggcgtcgtttcgtccaggccagggcccttcgcggcgacgtccggtcggttcctggcgacggtcaccggtaaaggcgggcacgccgcgatgccccacgaatccatcgaccctgttgtagctgcagccactactgtcgtcagcctccagaagatcatctcccgagaaatcgatcccctgcagggcgcggttgtgtccgtcacttttctgaagggaggagaagcgtacaatgtcatcccagagaatgtggcctttggcggcaccatgaggagcatgacgaatgaaggtctatcgtatctcaagaagaggatcaaagagatcgtcgaaggacaggcagcggtgcaccactgcagtgccagcgtggacttcatggaggacacgatgaagccgtacccggccgtggtcaacgacgaagggatgtacgctcacgccaaggaggtggccgagggcctccttggggagaagaacgtcagggtgggtccccaggtgatgggcgcggaggacttcgggttctacgcgcagaggatggcgggcgccttcttcaccatcggggtcggcaacgcgagcaccatggcgaccatccattccacccactcgcctcacttcgtcgtcgacgaggacgtgcttcccgtcggagctgcgttccatgctgctgtggcgattgaatatgtcaggaagaaccgtgcgtcgacctaaacgctaaactcaaataaatcagacggaacaaaacggcagtagtttgtcttaggtgtcactatatataatgcgagtatttacatctagtcgctctcgttcctgtgtcgttagaaacaaagcagagtgattgggattaattcttagatcagttgcgagttgcgactacatgacacactttgccgctaaactgaagcgctgccataaaaatccataaagcactagctagtcaatgcatgtgcgtgaaatatataaataaacaaaaaaaagtacagaacatataactctaagaatcaaactttttattcttgcgtccgactactaattcatagaaaattaatattagtattttgtggtgaggaagttcgcggtaacgtaagcagtcgcggatatgactcccgagccacctgaaacataatctatatatctttagtttacacttgtttttataccaaattataatagaaagaggattttttt

SEQ ID NO: 65042 - DNA, 2038 bp, Zea Mays
aacgctaacgccaaggctaatcccgaacccgaaatggcaggtagctctgctcgatgactcggcccctctcgaaagccacgaaaatcgctgggccgttcgattcactcacctcactccacctcttgactgaagaagccgtctgcctgcctccgactcccgcgtctctcctccaagtgatctccttccacctttgccgatcgcccgttgccaccggccgggcgatcctcgtacttccacttccaccatggcctcctcctcctcttcctcctcctcctcctcctcctcctcctcctcctcccgcttcctcctcccgctgctactgctctgttcgcacctctccctcgcctcggcagaggaggcggcgtcggcggcagcggacctcctcagcgaggcgcgcgcgccggggttcgccgcgtggctgcgcggcgtgcggcggcgcatccaccagcgccccgagctggccttccaggagttccgcaccagcgagctcgtgcgggccgagctcgacgcgatcggcgtcccgtaccggtggcccgtcgcccagaccggcgtcgtggccaccatcgcgggcgccgccgccggccccgtcgtcgcgctccgggccgacatggacgcgctccccgtgcaggagctggtggactgggagcacaagagccaggagagtgggaaaatgcacgcttgcggacacgacgtgcacacgacaatgcttctgggggctgccagaatactccaggatcgcaagagcgacctaatgggcaccgtgaagcttgtattccagccggcagaggagggccagggcggcgcgtactacgtgctgcaagaaggcgtccttgacgacgcgtcagccatattcggcttgcacgttgacccggccctccccgtcggcgtcgtttcgtccaggccagggcccttcgcggcgacgtccggtcggttcctggcgacggtcaccggtaaaggcgggcacgccgcgatgccccacgaatccatcgaccctgttgtagctgcagccactactgtcgtcagcctccagaagatcatctcccgagaaatcgatcccctgcagggcgcggttgtgtccgtcacttttctgaagggaggagaagcgtacaatgtcatcccagagaatgtggcctttggcggcaccatgaggagcatgacgaatgaaggtctatcgtatctcaagaagaggatcaaagaggcagcggtgcaccactgcagtgccagcgtggacttcatggaggacacgatgaagccgtacccggccgtggtcaacgacgaagggatgtacgctcacgccaaggaggtggccgagggcctccttggggagaagaacgtcagggtgggtccccaggtgatgggcgcggaggacttcgggttctacgcgcagaggatggcgggcgccttcttcaccatcggggtcggcaacgcgagcaccatggcgaccatccattccacccactcgcctcacttcgtcgtcgacgaggacgtgcttcccgtcggagctgcgttccatgctgctgtggcgattgaatatgtcaggaagaaccgtgcgtcgacctaaacgctaaactcaaataaatcagacggaacaaaacggcagtagtttgtcttaggtgtcactatatataatgcgagtatttacatctagtcgctctcgttcctgtgtcgttagaaacaaagcagagtgattgggattaattcttagatcagttgcgagttgcgactacatgacacactttgccgctaaactgaagcgctgccataaaaatccataaagcactagctagtcaatgcatgtgcgtgaaatatataaataaacaaaaaaaagtacagaacatataactctaagaatcaaactttttattcttgcgtccgactactaattcatagaaaattaatattagtattttgtggtgaggaagttcgcggtaacgtaagcagtcgcggatatgactcccgagccacctgaaacataatctatatatctttagtttacacttgtttttataccaaattataatagaaagaggattttttt

SEQ ID NO: 65043 - DNA, 2041 bp, Zea Mays
aacgctaacgccaaggctaatcccgaacccgaaatggcaggtagctctgctcgatgactcggcccctctcgaaagccacgaaaatcgctgggccgttcgattcactcacctcactccacctcttgactgaagaagccgtctgcctgcctccgactcccgcgtctctcctccaagtgatctccttccacctttgccgatcgcccgttgccaccggccgggcgatcctcgtacttccacttccaccatggcctcctcctcctcttcctcctcctcctcctcctcctcctcctcctcctcccgcttcctcctcccgctgctactgctctgttcgcacctctccctcgcctcggcagaggaggcggcgtcggcggcagcggacctcctcagcgaggcgcgcgcgccggggttcgccgcgtggctgcgcggcgtgcggcggcgcatccaccagcgccccgagctggccttccaggagttccgcaccagcgagctcgtgcgggccgagctcgacgcgatcggcgtcccgtaccggtggcccgtcgcccagaccggcgtcgtggccaccatcgcgggcgccgccgccggccccgtcgtcgcgctccgggccgacatggacgcgctccccgtgcaggagctggtggactgggagcacaagagccaggagagtgggaaaatgcacgcttgcggacacgacgtgcacacgacaatgcttctgggggctgccagaatactccaggatcgcaagagcgacctaatgcttgtattccagccggcagaggagggccagggcggcgcgtactacgtgctgcaagaaggcgtccttgacgacgcgtcagccatattcggcttgcacgttgacccggccctccccgtcggcgtcgtttcgtccaggccagggcccttcgcggcgacgtccggtcggttcctggcgacggtcaccggtaaaggcgggcacgccgcgatgccccacgaatccatcgaccctgttgtagctgcagccactactgtcgtcagcctccagaagatcatctcccgagaaatcgatcccctgcagggcgcggttgtgtccgtcacttttctgaagggaggagaagcgtacaatgtcatcccagagaatgtggcctttggcggcaccatgaggagcatgacgaatgaaggtctatcgtatctcaagaagaggatcaaagagatcgtcgaaggacaggcagcggtgcaccactgcagtgccagcgtggacttcatggaggacacgatgaagccgtacccggccgtggtcaacgacgaagggatgtacgctcacgccaaggaggtggccgagggcctccttggggagaagaacgtcagggtgggtccccaggtgatgggcgcggaggacttcgggttctacgcgcagaggatggcgggcgccttcttcaccatcggggtcggcaacgcgagcaccatggcgaccatccattccacccactcgcctcacttcgtcgtcgacgaggacgtgcttcccgtcggagctgcgttccatgctgctgtggcgattgaatatgtcaggaagaaccgtgcgtcgacctaaacgctaaactcaaataaatcagacggaacaaaacggcagtagtttgtcttaggtgtcactatatataatgcgagtatttacatctagtcgctctcgttcctgtgtcgttagaaacaaagcagagtgattgggattaattcttagatcagttgcgagttgcgactacatgacacactttgccgctaaactgaagcgctgccataaaaatccataaagcactagctagtcaatgcatgtgcgtgaaatatataaataaacaaaaaaaagtacagaacatataactctaagaatcaaactttttattcttgcgtccgactactaattcatagaaaattaatattagtattttgtggtgaggaagttcgcggtaacgtaagcagtcgcggatatgactcccgagccacctgaaacataatctatatatctttagtttacacttgtttttataccaaattataatagaaagaggattttttt

SEQ ID NO: 65044 - DNA, 1900 bp, Zea Mays
aaacaaacccggctctctcacttgggtgctgtttggttcaagaaatgtaacgcaaatggtaatgataatggtttacattcgattaatggcggtaataaatttgaataggctagtatcaatttttagtatggtatctgattacggttggactaaaacaaacatgatttaacgttatcggtcacccattgcgttacaaatatatgaaccaaacggcacattacttcaaggccgacgggctatctcactgatagtgataggaacagaacccgtgcatatttcagtcgtcgctcgcggagccgtggcgcatcgcgactcaggcactcaccgaccgcggatatggccccgccgccatggcctctccttgcgacttccctcctcctcatcctattccaccactcgcctcgcgccgcggtggcgtttccgccgtctctgggcgacagcctcctgggcgccgcccgcgcgccgggtttcgcggcttggctgcgcggcttgcggcgccgcatccacgagcgccccgagctcgccttccaggagcaccgcaccagcgagctcgtccgcgacgagctcgacgcgatcggggtgccgtacgcgtggcccgtcgcgcagacgggcgtcgtggcgaccatcgccggcggcagcgatggccccgtcgtcgcgctccgagccgacatggacgcgctacccttgcaggaattggtagactgggaacacaagagcaaggagagtggaaagatgcatgcttgtggacatgatgctcacaccacgatgcttcttggggcagctaaattgcttcatgctcggaaggatgatctgaagggtaccgtgaagcttgtcttccagccaggcgaagaaggctacggcggcgcttaccatgttctcagagaaggtgtcctggatgacgtgtctgccattttcggcttgcatgtggatccaggacttcccgtaggcaccgtttcgtccaggccagggccgtttctagcagcagcaggtagatttcgggtgacggtcactggaaaaggaggacatgctgcagggccgcaggatgctgtggatcccattgttgcagcatcctctgccatcgtcagccttcagcttcttgttgcccgcgaaattgatcccctccaggctgcagtggtctcggttacgttcatgaaaggaggtgatgcttacaacgtcattccagagtcagcatccttcggcgggaccttcaggagcttgacaacagaaggcttttcgtatctcatgaagaggatcaaagagaaggtcatgccgccgtccaccgctgcaccgccgccgtcgacttcatgcaggagaagctccgcccgtacccagccaccgtgaacgacgaagggatgtaccgtcacgccagagaagtggcagaggccatgcttgggcaggacaaggtgagtgtaggcgcgcagatgatgggcgccgaggatttctccttctacgcggagaagtttgcaggggcgttcttcatgatcggagtccgcaacaagagcatggaggaggcgatgcgtcctctccactccccgtacttcgtgatagatgaggacgtgctgcctgtaggagctgccttccactctgcagtagcgatggagtacctgaacaaatactcaacgacccggcaaactgagctgctgcgcattgagctgtgatagattattgcgcttgtaataagggttacgaggccgaggttatgttgcacaaaagaacgtttgcattgtgcccatagaataaatacagtttctccttgctctatgttttcatacaccaatttgttagaacttagggttagaacttaacatgatcgctattctccctccgtctaaaatataagttcgtatatatgtctatatttattatcattcattcggatagtaaaaagaggacaaaaaaa

SEQ ID NO: 65045 - DNA, 4397 bp, Zea Mays
ccttttcccacccctctctccctatcacccactgtcagtccaatcaatagttgccgttttggtgcttcaccgacaccgacactttctctcccctccttttctttagagagagatagaaaaaaaaacaaaagaaaagcctcagcacgctaatcatcagcagctggtaacaacgcggtggttgcgctgctcgcctctacaagcaacgcaccaacgccaacgcggcgcggcattattatacaccacaccaccacacccacccatcccacagctcatataccagagccggagcagcttagcgcagcccagagcggcgccgcgccaagcacaacccccacccgccacagccgcgtgcgcatgtgagcggtcgccgcggccgggagaccagaggaggggaggactacgtgcatttcgctgtgccgccgccgcggggttcgtgcgcgagcgagatccggcggggcggggcggggggcctgagatggaggctagcgcggggctggtggccggctcgcataaccggaacgagctggtggtgatccgccgcgaccgcgagtcgggagccgcgggcggcggcgcggcgcgccgggcggaggcgccgtgccagatatgcggcgacgaggtcggggtgggcttcgacggggagcccttcgtggcgtgcaacgagtgcgccttccccgtctgccgcgcctgctacgagtacgagcgccgcgagggctcgcaggcgtgcccgcagtgcaggacccgctacaagcgcctcaagggctgcccgcgggtggccggcgacgaggaggaggacggcgtcgacgacctggagggcgagttcggcctgcaggacggcgccgcccacgaggacgacccgcagtacgtcgccgagtccatgctcagggcgcagatgagctacggccgcggcggcgacgcgcaccccggcttcagccccgtccccaacgtgccgctcctcaccaacggccagatggttgatgacatcccgccggagcagcacgcgctcgtgccgtcctacatgagcggcggcggcggcgggggcaagaggatccacccgctccctttcgcagatcccaaccttccagtgcaaccgagatccatggacccgtccaaggatctggccgcctacggatatggcagcgtggcctggaaggagagaatggagggctggaagcagaagcaggagcgcctgcagcatgtcaggagcgagggtggcggtgattgggatggcgacgatgcagatctgccactaatggatgaagctaggcagccattgtccagaaaagtccctatatcatcaagccgaattaatccctacaggatgattatcgttatccggttggtggttttgggtttcttcttccactaccgagtgatgcatccggcgaaagatgcatttgcattgtggctcatatctgtaatctgtgaaatctggtttgcgatgtcctggattcttgatcagttcccaaagtggcttccaatcgagagagagacttacctggaccgtttgtcactaaggtttgacaaggaaggtcaaccctctcagcttgctccaatcgacttctttgtcagtacggttgatcccacaaaggaacctcccttggtcacagcgaacactgtcctttccatcctttctgtggattatccggttgagaaggtctcctgctatgtttctgatgatggtgctgcaatgcttacgtttgaagcattgtctgaaacatctgaatttgcaaagaaatgggttcctttcagcaaaaagtttaatatcgagcctcgtgctcctgagtggtacttccaacagaagatagactacctgaaagacaaggttgctgcttcatttgttagggagaggagggcgatgaagagagaatacgaggaattcaaggtaaggatcaatgccttggttgcaaaagcccaaaaggttcctgaggaaggatggacaatgcaagatggaagcccctggcctggaaacaacgtacgcgatcatcctggaatgattcaggtattccttggccaaagtggcggtcgtgatgtggaaggaaatgagttgcctcgcctggtttatgtctcgagagaaaagaggccaggttataaccatcacaagaaggctggtgccatgaatgcactggtccgtgtctctgctgtcttatcaaatgctgcatacctattgaacttggactgtgatcactacatcaacaatagcaaggccataaaagaggctatgtgtttcatgatggatcctttggtggggaagaaagtgtgctatgtacagttccctcagaggtttgatggtattgacaaaaatgatcgatacgctaacaggaacgttgtcttttttgacatcaacatgaaaggtttggacggtattcaaggacccatttatgtgggtactggatgtgttttcagacggcaggcactgtatggttatgatgctcctaaaacgaagaagccaccatcaagaacttgcaactgctggcccaagtggtgcctctcttgctgctgcagcaggaacaagaataaaaagaagactacaaaaccaaagacggagaagaagaaaagattatttttcaagaaagcagaaaacccatctcctgcatatgctttgggtgaaattgatgaaggtgctgatatcgagaaggccggaatcgtaaatcaacagaaactagagaagaaatttgggcagtcttctgtttttgtcgcatcaacacttcttgagaacggagggaccctgaagagcgcaagtccagcttctcttctgaaggaagctatacatgttatcagctgcggctacgaagacaagaccgactggggaaaagagattggctggatttacggatcgatcacagaggatatcttgactggatttaagatgcactgccatggctggcggtctatttactgcatcccgaagcggcctgcattcaaaggttctgcgcctctgaacctttccgaccgtcttcaccaggtccttcgctgggcccttgggtccgtcgaaattttcttcagcaagcactgcccactttggtacggatacggcggcgggctaaaattcctggaaaggttttcttatatcaactccatcgtttatccctggacgtccattcctctcctggcttactgtaccttgcctgccatctgcctgctcacggggaagtttatcacaccagagcttaccaatgtcgccagtatctggttcatggcacttttcatctgcatctccgtgaccggcatcctggaaatgaggtggagtggcgtggccatcgacgactggtggaggaacgagcagttctgggtcatcggaggcgtttcggcgcatctgttcgcggtgttccagggcctgctgaaggtgttcgccggcatcgacacgagcttcaccgtgacgtcgaaggccggggacgacgaggagttctcggagctgtacacgttcaagtggaccaccctgctgatacccccgaccacgctcctcctgctgaacttcatcggggtggtggccgggatctcgaacgcgatcaacaacgggtacgagtcgtggggccccctgttcgggaagctcttcttcgccttctgggtgatcgtccacctgtacccgttcctcaagggtctggtggggaggcagaacaggacgccgacgatcgtcatcgtctggtccatcctgctggcctcgatcttctcgctcctgtgggtccgcgtcgacccgttcctcgccaagagcaacggcccgctcctggaggagtgtggcctggactgcaactgaagtgggggccccctgtcactcgaagttctgtcacgggcgaattacgcctgattttttgttgttgttgttgttggaattctttgctgtagatagaaaccacatgtccacggcatctctgctgtgtccattggagcaggagagaggtgcctgctgctgtttgttgagtaaattaaaagttttaaagttatacagtgatgcacattccagtgcccagtgtattccctttttacagtctgtatattagcgacaaaggacatattggttaggagtttgattcttttgtagcaatgtgtcccgcccccccactgttgttgtaaaatccgcccattcgcccagaaccgcggtgggcggcgctgctagctttgtgatcatatagaaaacgacttggttgtttttggacattttgaattgaaggaaggatgaagaaggtatggaacacatgtttgtgttttgtgtttccgtcttccttttttttttggtcttcgggaatggtgtggagtggagcatgcatgaggacggtctcatcccggaggggctggcaggcagctggctgccaccaaaaagtcgaaagactactagatagaagcggcatgggcgctgcgaccgaccaaaccgccaagcgagaccggctgaggagggcatgggc

SEQ ID NO: 65046 - DNA, 4389 bp, Zea Mays
ccttttcccacccctctctccctatcacccactgtcagtccaatcaatagttgccgttttggtgcttcaccgacaccgacactttctctcccctccttttctttagagagagatagaaaaaaaaacaaaagaaaagcctcagcacgctaatcatcagcagctggtaacaacgcggtggttgcgctgctcgcctctacaagcaacgcaccaacgccaacgcggcgcggcattattatacaccacaccaccacacccacccatcccacagctcatataccagagccggagcagcttagcgcagcccagagcggcgccgcgccaagcacaacccccacccgccacagccgcgtgcgcatgtgagcggtcgccgcggccgggagaccagaggaggggaggactacgtgcatttcgctgtgccgccgccgcggggttcgtgcgcgagcgagatccggcggggcggggcggggggcctgagatggaggctagcgcggggctggtggccggctcgcataaccggaacgagctggtggtgatccgccgcgaccgcgagtcgggagccgcgggcggcggcgcggcgcgccgggcggaggcgccgtgccagatatgcggcgacgaggtcggggtgggcttcgacggggagcccttcgtggcgtgcaacgagtgcgccttccccgtctgccgcgcctgctacgagtacgagcgccgcgagggctcgcaggcgtgcccgcagtgcaggacccgctacaagcgcctcaagggctgcccgcgggtggccggcgacgaggaggaggacggcgtcgacgacctggagggcgagttcggcctgcaggacggcgccgcccacgaggacgacccgcagtacgtcgccgagtccatgctcagggcgcagatgagctacggccgcggcggcgacgcgcaccccggcttcagccccgtccccaacgtgccgctcctcaccaacggccagatggttgatgacatcccgccggagcagcacgcgctcgtgccgtcctacatgagcggcggcggcggcgggggcaagaggatccacccgctccctttcgcagatcccaaccttccagtgcaaccgagatccatggacccgtccaaggatctggccgcctacggatatggcagcgtggcctggaaggagagaatggagggctggaagcagaagcaggagcgcctgcagcatgtcaggagcgagggtggcggtgattgggatggcgacgatgcagatctgccactaatggatgaagctaggcagccattgtccagaaaagtccctatatcatcaagccgaattaatccctacaggatgattatcgttatccggttggtggttttgggtttcttcttccactaccgagtgatgcatccggcgaaagatgcatttgcattgtggctcatatctgtaatctgtgaaatctggtttgcgatgtcctggattcttgatcagttcccaaagtggcttccaatcgagagagagacttacctggaccgtttgtcactaaggtttgacaaggaaggtcaaccctctcagcttgctccaatcgacttctttgtcagtacggttgatcccacaaaggaacctcccttggtcacagcgaacactgtcctttccatcctttctgtggattatccggttgagaaggtctcctgctatgtttctgatgatggtgctgcaatgcttacgtttgaagcattgtctgaaacatctgaatttgcaaagaaatgggttcctttcagcaaaaagtttaatatcgagcctcgtgctcctgagtggtacttccaacagaagatagactacctgaaagacaaggttgctgcttcatttgttagggagaggagggcgatgaagagagaatacgaggaattcaaggtaaggatcaatgccttggttgcaaaagcccaaaaggttcctgaggaaggatggacaatgcaagatggaagcccctggcctggaaacaacgtacgcgatcatcctggaatgattcaggtattccttggccaaagtggcggtcgtgatgtggaaggaaatgagttgcctcgcctggtttatgtctcgagagaaaagaggccaggttataaccatcacaagaaggctggtgccatgaatgcactggtccgtgtctctgctgtcttatcaaatgctgcatacctattgaacttggactgtgatcactacatcaacaatagcaaggccataaaagaggctatgtgtttcatgatggatcctttggtggggaagaaagtgtgctatgtacagttccctcagaggtttgatggtattgacaaaaatgatcgatacgctaacaggaacgttgtcttttttgacatcaacatgaaaggtttggacggtattcaaggacccatttatgtgggtactggatgtgttttcagacggcaggcactgtatggttatgatgctcctaaaacgaagaagccaccatcaagaacttgcaactgctggcccaagtggtgcctctcttgctgctgcagcaggaacaagaataaaaagaagactacaaaaccaaagacggagaagaagaaaagattatttttcaagaaagcagaaaacccatctcctgcatatgctttgggtgaaattgatgaaggtgctccaggtgctgatatcgagaaggccggaatcgtaaatcaacagaaactagagaagaaatttgggcagtcttctgtttttgtcgcatcaacacttcttgagaacggagggaccctgaagagcgcaagtccagcttctcttctgaaggaagctatacatgttatcagctgcggctacgaagacaagaccgactggggaaaagagattggctggatttacggatcgatcacagaggatatcttgactggatttaagatgcactgccatggctggcggtctatttactgcatcccgaagcggcctgcattcaaaggttctgcgcctctgaacctttccgaccgtcttcaccaggtccttcgctgggcccttgggtccgtcgaaattttcttcagcaagcactgcccactttggtacggatacggcggcgggctaaaattcctggaaaggttttcttatatcaactccatcgtttatccctggacgtccattcctctcctggcttactgtaccttgcctgccatctgcctgctcacggggaagtttatcacaccagagtatctggttcatggcacttttcatctgcatctccgtgaccggcatcctggaaatgaggtggagtggcgtggccatcgacgactggtggaggaacgagcagttctgggtcatcggaggcgtttcggcgcatctgttcgcggtgttccagggcctgctgaaggtgttcgccggcatcgacacgagcttcaccgtgacgtcgaaggccggggacgacgaggagttctcggagctgtacacgttcaagtggaccaccctgctgatacccccgaccacgctcctcctgctgaacttcatcggggtggtggccgggatctcgaacgcgatcaacaacgggtacgagtcgtggggccccctgttcgggaagctcttcttcgccttctgggtgatcgtccacctgtacccgttcctcaagggtctggtggggaggcagaacaggacgccgacgatcgtcatcgtctggtccatcctgctggcctcgatcttctcgctcctgtgggtccgcgtcgacccgttcctcgccaagagcaacggcccgctcctggaggagtgtggcctggactgcaactgaagtgggggccccctgtcactcgaagttctgtcacgggcgaattacgcctgattttttgttgttgttgttgttggaattctttgctgtagatagaaaccacatgtccacggcatctctgctgtgtccattggagcaggagagaggtgcctgctgctgtttgttgagtaaattaaaagttttaaagttatacagtgatgcacattccagtgcccagtgtattccctttttacagtctgtatattagcgacaaaggacatattggttaggagtttgattcttttgtagcaatgtgtcccgcccccccactgttgttgtaaaatccgcccattcgcccagaaccgcggtgggcggcgctgctagctttgtgatcatatagaaaacgacttggttgtttttggacattttgaattgaaggaaggatgaagaaggtatggaacacatgtttgtgttttgtgtttccgtcttccttttttttttggtcttcgggaatggtgtggagtggagcatgcatgaggacggtctcatcccggaggggctggcaggcagctggctgccaccaaaaagtcgaaagactactagatagaagcggcatgggcgctgcgaccgaccaaaccgccaagcgagaccggctgaggagggcatgggc

SEQ ID NO: 65047 - DNA, 610 bp, Zea Mays
agcaatcaaagagaaggatatagacagtgaggctggtgtgaccagcaccagcaatggaggggccacatggaaagaaagctcccggaggaagaattaagggcgaacctattctattctatatccccttcaagtttcaagctaggggccggggctttttaaggcaacggtggagagcgtcagtggcagcagctcgtggtccgtccggggtttgctgctccgttttcttcagagcagcgtccatccatggagaggacgaagaaaccatgccttggtgtcgtcgctctgcttctcttcctgctcctggcgtcggccgcccatggagctcagcctgcagatgccaaggacatagcagttcgattagtggaaaaaaaaacacttgaattggaacacacaaaaaagatcgttctgaaagagacaatgccctgctgcactgcacacccttgtgctttaagaattgccttttcagttcttcaggagtgcgtgcaaagcatggctggtcgaggatagggaagtagcaacataaccttgtaaactgagtcatatatgtttagctgatagaataaatacatttgtatatatgcttggacactaacaagtaatatgaaatgat

SEQ ID NO: 65048 - DNA, 588 bp, Zea Mays
aagtttcaagctaggggccggggctttttaaggcaacggtggagagcgtcagtggcagcagctcgtggtccgtccggggtttgctgctccgttttcttcagagcagcgtccatccatggagaggacgaagaaaccatgccttggtgtcgtcgctctgcttctcttcctgctcctggcgtcggccgcccatggagctcagcctgcagatgccaaggacatagcaggtgacggcgacggcgagagggccacggtgaggacagggcacgggcacggctacagcagcagccacagcggcgggcacccgagcggcggcacgcccgagcagggcggcgcaggggtcgtcgatccccgtaacctcaacgccagaagccaccaccgccgtggcgcggcgaccagggcaaatgtatactcttcttggctcgtctgcacgcttgtcgcaggaggtgttatgctgctgctttgaggtactagctgggagatgacgtgtgatgcatgtacaaatttagggggtgtttggttgctcctgctaaagtttagctcgggtcacatcaagcgtttgacttttaaataggagtatgaaatatagac

SEQ ID NO: 65049 - DNA, 2053 bp, Zea Mays
atctgtcctgtcactcctgtcttgtctcccttttctattgttcattcacccccgtgcgctctctccctgccgtggcgacgactgggcgacagccgccgccgccgcagtcgcaaccgtacaccaggcgccaaggccttcttcgggaccttcgccggcggctgctgaagccagaatggacaaaagtgccatgaaaattggcccaactgggaacaaaatccgtattcgtttgccattatcactgagaaagcggttggccgaaggccttcaaaccatgagcacaggattacctgaggatacaacaaaacacgctgctaaggaagtacctgaatatactgatgacactgccaaggctaatttcattgtcccagacctgaatctgacaatcgctgctggcacgcaggataaaagggaaagcatttgccctgtaagaaaagggtcatgtgaagagcgacacacggacattatgagcaatgggctgcctcctgacagcagcgaaacaacaaagaagcaagcatgtgtaggagccatggacaacacccaaagcatggaaccttcaatcacaggagtgcaaagtgaagtggaaaagaataactccattaagaaaccctgtgaacctgctagtgaaaatatcttaagcaagaagctactctatgagacaaacagcaatacctcaaggaagagagtaactgaagaagctaagatcaacaacccaagcaagaacctgaaaacctctgcagtgaagtgtggagaggcaaatgactgtttcctaaccagacggtctgctgatcaatctaatgacaagaaatttagcaaaaaactgtgtagctctgcggtacaagctactgacagctgccagaacatttctggaatgaaacttcctacctctgttggcgtggctgtagaacaaagtaccagcactgcattctcggaggccacaaaagtgtataaagagtttgagaagcaggttaagaggactgtataccttgacaacttgtcttgcctagctacagatggagtcattacgacggctttgaaccagttcggtagtgtcaaacacgttagttttctgaccaactatacagttccatttgacattcccaaatctgcattagtagaaatggaaactgagaaggatgctgattctgtggtcaagatactagatgagttcccattcatgatatctgggatgccaaggcctgtgagggcgaagcatgccacagctgaaatgttcaatgaccgtccatgtaaacctggtataaagttagaattccgttgggtgggccctacagaccctgattatcataatgtcagaaagttcaagtttttgtccaagaggcatgagttggagaacttagcactgatcaagaatgaactgcgagaggagcaacttctcgcgaggcatcagcaggacaatctaaattttcattacatgaagcttgagactgtagacagcatgattacgagtggctgcatcaatcgcctgactcacatttacaacctccgtttcgctgacatgtattgagagtgtcaggtgtacatggacttgttttgacctcggaacatacctgttgggtggaattgagctgtgaacatgatgttacgatctgattaaagtctgcttttaatacttttcggctgttagtgttttttaaatgcttttaggctgttttttaaatgcttttagctgtgaacatatcctagtttggaccacacgtagctccctggttttcggcattgaacaatcagctgatggcgctgtatggatggaattcggactactgtactaagcatttaacaaaggagagcttgggtgctaaagatactgaatattactatatgtctaggcctacttttgtaatggagattttttcccctgttcttgcgcgcgcgcgtgtgtgtgtttgaaaaaatgaacaatttcctgtaaaatgcatagaccattcgtgctcaaacatgcccttagaatgggctgatcagacagacgtcaatatcaattttgtttcttacaatgatgtcattgaataataatagtttcttgagcaaactataataa

SEQ ID NO: 65050 - DNA, 1953 bp, Zea Mays
tgagcaccgactaggagtatattctgtgccaatgaaatgtctgcctctgaaaaccaggctgctgaagccagaatggacaaaagtgccatgaaaattggcccaactgggaacaaaatccgtattcgtttgccattatcactgagaaagcggttggccgaaggccttcaaaccatgagcacaggattacctgaggatacaacaaaacacgctgctaaggaagtacctgaatatactgatgacactgccaaggctaatttcattgtcccagacctgaatctgacaatcgctgctggcacgcaggataaaagggaaagcatttgccctgtaagaaaagggtcatgtgaagagcgacacacggacattatgagcaatgggctgcctcctgacagcagcgaaacaacaaagaagcaagcatgtgtaggagccatggacaacacccaaagcatggaaccttcaatcacaggagtgcaaagtgaagtggaaaagaataactccattaagaaaccctgtgaacctgctagtgaaaatatcttaagcaagaagctactctatgagacaaacagcaatacctcaaggaagagagtaactgaagaagctaagatcaacaacccaagcaagaacctgaaaacctctgcagtgaagtgtggagaggcaaatgactgtttcctaaccagacggtctgctgatcaatctaatgacaagaaatttagcaaaaaactgtgtagctctgcggtacaagctactgacagctgccagaacatttctggaatgaaacttcctacctctgttggcgtggctgtagaacaaagtaccagcactgcattctcggaggccacaaaagtgtataaagagtttgagaagcaggttaagaggactgtataccttgacaacttgtcttgcctagctacagatggagtcattacgacggctttgaaccagttcggtagtgtcaaacacgttagttttctgaccaactatacagttccatttgacattcccaaatctgcattagtagaaatggaaactgagaaggatgctgattctgtggtcaagatactagatgagttcccattcatgatatctgggatgccaaggcctgtgagggcgaagcatgccacagctgaaatgttcaatgaccgtccatgtaaacctggtataaagttagaattccgttgggtgggccctacagaccctgattatcataatgtcagaaagttcaagtttttgtccaagaggcatgagttggagaacttagcactgatcaagaatgaactgcgagaggagcaacttctcgcgaggcatcagcaggacaatctaaattttcattacatgaagcttgagactgtagacagcatgattacgagtggctgcatcaatcgcctgactcacatttacaacctccgtttcgctgacatgtattgagagtgtcaggtgtacatggacttgttttgacctcggaacatacctgttgggtggaattgagctgtgaacatgatgttacgatctgattaaagtctgcttttaatacttttcggctgttagtgttttttaaatgcttttaggctgttttttaaatgcttttagctgtgaacatatcctagtttggaccacacgtagctccctggttttcggcattgaacaatcagctgatggcgctgtatggatggaattcggactactgtactaagcatttaacaaaggagagcttgggtgctaaagatactgaatattactatatgtctaggcctacttttgtaatggagattttttcccctgttcttgcgcgcgcgcgtgtgtgtgtttgaaaaaatgaacaatttcctgtaaaatgcatagaccattcgtgctcaaacatgcccttagaatgggctgatcagacagacgtcaatatcaattttgtttcttacaatgatgtcattgaataataatagtttcttgagcaaactataataa

SEQ ID NO: 65051 - DNA, 764 bp, Zea Mays
gctcagcatgtgatgttgtagtatataaagatgaccaagggggtggcaactggcaagaggaggggacaccgccgctccactctctgcagctcatcagcagcagcagcatctctgagagagcccagagtaggcaactaggcatggagatcgagagggaagctccgggtagcgagaaggcgaggagctggagagctaatgcggcggcggcggcggcggcgcaggcgcagcaagtctctaagacgacgaagcctgacggcggtgaccagccgatgaaggagcctgcatggaagaggttcctggctcatgttgggccagggtttatggtgtcattggcatacctggatcctggcaacttggagacggacctgcaagcaggagcgaaccaccgatacgaggtactgcacgcgtaccattttcaccgcgcgtcgttccaaaaagcacgcggcgtttaattaatttgccgctcaacgtttactacgcgcggttctgcacctttttcattcgtcgatctcgcccccgcccgtatcaatcaaatcgatctccaaggcttttactactacagaacagaagcgatctccgattccccagaagcagaaccctacctacctaatttctgagtgcgagaacaaggttttgccttaatttgctttctcggcggtgtccatccttttcagctcctctgggtgatcctcattggcctcatcttcgcgctcgtcatccagtcgctagctgctaatctcggagtggtgacaggtgattcattt

SEQ ID NO: 65052 - DNA, 2146 bp, Zea Mays
ttcttattccatcctgctcatgacacccccccacacccaatgaacatggagcatgccgtcttcctcttcctggtttggcttaacacggcagcaataaccaccttgtgcgccggcggcggccaaactcggttctcctactcgggcttcgccggcgctaacctcaccgtcgacggcaacgccactgtgacgcccgacgggctcctggtgctgaccagcagcaagaccaacctccaaggccacgccttctaccacacgccgctgcagctgagcacgtctccgggcggcaaggtggcgtccttcgcggccgccttcgtgttcgccatcgtgtccgactacaccgacttcagcgcccacggtatggccttcgtggtggccccgaacaagggcttccccggcgcgttgccggccgggtacctggccctcctcaacgtccagaacaacggcaacgcgagcaaccacctcctggcggtggagctcgacaccacccagaacaccgacttcaaggacatcaacgccaaccatgtgtgggtggagtatgacggcgacgcgggccggatcgatgtgaccctggcacccataagggtgggcaataacaagccggcgaggcccttggtctcggccatctgtaatctctcgacggtgctcaaggagcagtcgtacgtcggcttctcgtcggcaacaggtgggatcaactcgagacactatgtgctcggctggagcttcgcgatgaacggtcctgctccagccatcgacatcgccaggctgccgaagctgcctccatttgggcccaagcctcgttccaaggttctggcgatcgtcctgccaatagcgacagcagcagccatcgtcgctgtcggcagcctcgccacccttctcgtgctgagaaagctgaggtacgctgaggtccttgaagagtgggagcttgagtttgggccgcaccgcttctctttcaaggatctgtaccacgcgaccagtgggttcaagagcaaacacctacttggtgccggtggattcggacaagtgtacaaaggagtccttggcagcagcaagtcggtctgcacggaggtggctgtgaagaggatctctcacgagtcaaggcaagggatgaaggagttcatcgccgaggtagtcagcatcgggcgcctccgacaccgtaatctggcacagctactcggctactgcagaaggaagggtgagctcctcctggtgtacgagtacatgccaaatggcagtcttgacaagtacctctactaccgcgaggaggagaacaaaccagtgcttgattgggctcaaaggttccatattatcaagggcgtggcatcggccttgctctacatccacgacaagtgggagaaggttgtcatacaccgagacgtcaaggcaagcaacgtgctcctggacagcgagatgaacggccgcctcggcgacttcgggctcgcaaggctgtacgaccacggcaccgacccgcagaccacgcacatcgtcggcaccatgggctacttagcccccgagctgatacgcaccggtagggcatccaagctcacagacgtgttcgccttcggtgctttccttcttgagatcacctgtgggcgaaggccagtcagtattgacgacgatgccgctcaagaaatgctagtggactgggtcctcgagcacttgcgcgaagaagggtctctcgctcacaccgtcgacgtgagtttacggggtcaatatgatgtcgatgaggtgttcctagtgctcaagctaggtctgctgtgctcgcatccatacacaaacataaggccagatatgcagcaagtcatgcaatatctcgacggaagcacaccacttccagatttgcagcccacagatatgaccttcagtgcaatggctctaatgcagaatgaaggattcgactcatatgccatgtccattcagtccattggcactatatctttcatatcaggtggaagatgacaagcatacatgcatgggacttagagagtgtgtgtgttgtgtcggtgtggatggcgtgcttccttttggcaatgtatatatactagtgtaaacaacgcgccttgcgtcttctttttccaatcagtccttcgtgttgcgtttggaagtccaatagatggtcttatccggagaacactcgccaagataactt

SEQ ID NO: 65053 - DNA, 1988 bp, Zea Mays
ggaaacgatttgcactggcggttttattacgccgaccgccagtgaaaatcgattttcactggcggttttattacgccgaccgccagtgaaaatcgattttcactggcggtcctcagttacccgcctgtacaaatgatgatttctactggcccctagcactggcggttacgaaaaacgccactataaataggtttacaaccgccactatagaacttctctgtactagtggacttctccggcgctcttcccagcggctacctgggcctcctcaacgtccagagcaacggcaactccagcaaccgcctcttcgccgtcgagctcgacacgatgcagaacgacgagttccaggacatcaacgacaaccacgtcggcgtcgacgtcaacagccttcactcggtgcagtcgtactacgccgggtactacggcggcggcggcggcagcggcggcttccgcaacttgaccttgattagcggagaggccatgcaggtttgggtggactacgacgctgaggtcgcacagatcaacgtgaccatggctccactcagcatggccaaacctgcgaggccacttgtgtcggccaggtacaatctctcaacgatcctgactgatgatggcccggcgttcgtcggcttctctgctgcgaccggtgggacgctgaaatcacggcactatgtcctcgggtggagcttcagcatcgaccgccctgctccggccattgacctcagcaagctaccgaagctgcctcgtgtttcggccaaggacaggactaggaccctggagatcgtcttgccggtagcaaccgcggcattcctccttgccgccggcatggccatcttgttactggtgcgacgacatcggaggtacgctgagctgcacgaagactgggagctcgagttcggaccacacaggttctcatacaaggatctgttccatgccacggacggcttcaagaactctaaccttctcggcatcggcgggtttgggagggtgtacaagggggtgcttcctgcgtccagaacagaaatcgcagtaaaacgggtgtcgcacgaatcgaagcagggcatgaaggagttcatctcggagatcgttagccttggacgcctgcaacaccgcaacctcgtccagctgctagggtactgtcgacggaaaggcgagctgctgctggtgtacgactacatgccaaacggaagcctcgacaagtgccttcacgaccgagaggggcagcacactttagactgggctttgagggtccaaattatcaaaggcgtcgcgtctggcttgtcgtacctccatctagactgggagaaagtggtcgtccatcgagatattaaagccagcaatgtcctcctcgacggcgacatgaacgggcggctaggagactttggcctcgcgcgactctacgaccacggcggggcagacggcccaaagaccacccatgtggtaggcaccatagggtacatagctcccgagcttggtcgcaccggacgacgacagtgacggcggcgccttgttattggtggactgggtgcttagtcactggcagaatggatcactcactgaaacagtggacatcaggcttcaaggggactacgacagtgacgaggcatccatggtactaaagctggggctactatgttcacacccattcgtggacgcaagaccaacaagcatgcgacaagtcacccagtaccttgatggccacgtagcattaccggactttatgccgccctgccatatactacccagcagcatgatgattccggagcaaagcgagggatttcttatgtacaacaatacgtcaagccaaatattcaaggcaagcaatgggagcatgtctagcctctcagggggaagatgacctagctgttatatgtgtgtgtgtctctctctcatgggatactgtaatgatccatagtgtatgtgagataggttagggtattagggatgcaagttgcgcaccaactatttgattaaccttctaatccaac

SEQ ID NO: 65054 - DNA, 1112 bp, Zea Mays
cagacacagggaacggaggcaagagagtggagatagctttcactggactgcaaggctgcttgctgccactcctcgaacccgtcgcccctgtctgcgccgtgttcctcttcccaatggcctcctcctcctccgtcccaccggaaccctagcgccgcggcccaccactaccagctcgctcggctcgtgtccagatcccacgccgcgccacaccacatggcggcggacgcggcgcagcagggcccgggcgtccaccggaggcgcggcggggccgccccgcgcgcctggtgctgctccttcgccggcgtgcccgacagccccgacctccgcccgatcccctcctcggcagcgtcccctgcggcggcgtcgaggaagctgccgcccaagtccccgtcggcggcgtccttctacggctcgcccacctcgtccaggctcgcgggcctcggcggcctcatcgacccgcgccgcatcctctcgcccggccgcgtctcccccatcgaccccgacggcgccgtcccgctccctcctcctacgccgccgccgccgccgcccgctgagtttccggcagctgtgggcaccgcggagcagccggcgccggtgctggcgtcggcattgccctcggcagcggcggcgccgcaggtggtgtccgtgcgggaggaagcggacgcgcacgcggctggcgtgctggatctgaagctcttcctgcgggggagggacgggaggtgcgtcctcatggagctcgactccagggtgttgtgcggctgcagcgacttcttcgccgccatggccccgcacgaggacgctgctgccactgctgctggtgccggcgctgccgggaagacgatcgaggtggacggggtcgataatttggatgctttcagggctgcagtggaactcatgtacgaccctgatccaatgcggggtcttgcagctgccggtgtgtcaagggctatagatgtgcttgaggcatgattagggaacaagaaatctattcctctgattagttgtggattgccagttggacattgtaagctgggctgcaggatggtcaactggcctcttggatttctttattttggtccaatggggtttccctcacatacacaacttcacag

SEQ ID NO: 65055 - DNA, 1855 bp, Zea Mays
cggaggcaagagagtggagatagctttcactggactgcaaggctgcttgctgccactcctcgaacccgtcgcccctgtctgcgccgtgttcctcttcccaatggcctcctcctcctccgtcccaccggaaccctagcgccgcggcccaccactaccagctcgctcggctcgtgtccagatcccacgccgcgccacaccacatggcggcggacgcggcgcagcagggcccgggcgtccaccggaggcgcggcggggccgccccgcgcgcctggtgctgctccttcgccggcgtgcccgacagccccgacctccgcccgatcccctcctcggcagcgtcccctgcggcggcgtcgaggaagctgccgcccaagtccccgtcggcggcgtccttctacggctcgcccacctcgtccaggctcgcgggcctcggcggcctcatcgacccgcgccgcatcctctcgcccggccgcgtctcccccatcgaccccgacggcgccgtcccgctccctcctcctacgccgccgccgccgccgcccgctgagtttccggcagctgtgggcaccgcggagcagccggcgccggtgctggcgtcggcattgccctcggcagcggcggcgccgcaggtggtgtccgtgcgggaggaagcggacgcgcacgcggctggcgtgctggatctgaagctcttcctgcgggggagggacgggaggtgcgtcctcatggagctcgactccagggtgttgtgcggctgcagcgacttcttcgccgccatggccccgcacgaggacgctgctgccactgctgctggtgccggcgctgccgggaagacgatcgaggtggacggggtcgataatttggatgctttcagggctgcagtggaactcatgtacgaccctgatccaatgcggggtcttgcagctgccggtgtgtcaagggctatagatgtgcttgaggtatgctcctctatcatgttcagcaagggaatcaaaacatgtttgacatacatagaagctgttccctggaatgagaacgaggaggagaagctgaagaatctctttgcaagattcacttttgacgaagcaatatcccaggatatactggcaagactgcgaccacacaactggaaaagctcagatgacctcgctgtacagcttattcaatctgtcactaacagcaccagcactatggcaagaaaagacatgcaatctttggtgaatggtcttctaagcaaaagttcagtctatcaaaaggactcgtcaggattaaacaaggagagcctgtatcagatctgttattcatgtctagagtcactggtggacctctttgaagaggccatagaaccaacatattacacaggtcaggctgtggtagttagagggagcaaaccactgatcgagcgaatctctacgcaaacagagaacctcaattggctattggatattctagtaaacattgacattgcagaagaatttgtagaactgtgggcgaagcaaggcaggctcattaggatgcacgagcaagcatcagcgatcgtcaggtatgagctaagtcgaatatcagctggtgtgttcattgcacttggtaaaggaaaagtgcagtgtcgtggtgacgtacgaagcctcctctttcatggatggttcagcacaatgttgttggattttggctggcttcagcgctgccccaaaggtctcgacctaagatcgttggaggagaatttagggcgaggccttttaaccctccctctcaggcagcagcaatgtttgttcgaggaatggttccagttctatgcgaccaaaggacccgagtgtccgaaccttattagagctttccaggactattgatgtgctacttgcctcat

SEQ ID NO: 65056 - DNA, 1199 bp, Zea Mays
ccacaatccactggtcagcagatcttgtggcgtgtagccattggttcccctgcccacctcaggcgggtcaagaactgtctgggtgctgaagctgccaccacctgaccaggtcactcctccaacagtcgagctccaagggattatggagataagctcctcatcaaatttcacaagaatctgctgttctggtatgctcctctatcatgttcagcaagggaatcaaaacatgtttgacatacatagaagctgttccctggaatgagaacgaggaggagaagctgaagaatctctttgcaagattcacttttgacgaagcaatatcccaggatatactggcaagactgcgaccacacaactggaaaagctcagatgacctcgctgtacagcttattcaatctgtcactaacagcaccagcactatggcaagaaaagacatgcaatctttggtgaatggtcttctaagcaaaagttcagtctatcaaaaggactcgtcaggattaaacaaggagagcctgtatcagatctgttattcatgtctagagtcactggtggacctctttgaagaggccatagaaccaacatattacacaggtcaggctgtggtagttagagggagcaaaccactgatcgagcgaatctctacgcaaacagagaacctcaattggctattggatattctagtaaacattgacattgcagaagaatttgtagaactgtgggcgaagcaaggcaggctcattaggatgcacgagcaagcatcagcgatcgtcaggtatgagctaagtcgaatatcagctggtgtgttcattgcacttggtaaaggaaaagtgcagtgtcgtggtgacgtacgaagcctcctctttcatggatggttcagcacaatgttgttggattttggctggcttcagcgctgccccaaaggtctcgacctaagatcgttggaggagaatttagggcgaggccttttaaccctccctctcaggcagcagcaatgtttgttcgaggaatggttccagttctatgcgaccaaaggacccgagtgtccgaaccttattagagctttccagttcttcccattgtatgtgaatagctggatgaatttgcttgaggataacatctgcggcgtggagtatgtaataacccaacccagtcatatgtcgaacttttgtactttttgtagcatgacagtcaatagtgtc

SEQ ID NO: 65057 - DNA, 574 bp, Zea Mays
gaagttcttgtggaaccgggtgaccagatggcaccattgccatgatcagactgtagcgacgattccgcttcggacagcgacacggcgagtggcgactccgggcttcacgaaggcccgcagccagcagccgactaggacgccggtgtccaagtcctccatggaggaagatcttgcgataaggtgaacgcactgtagattatccttccatgccggtgtcggtcatgagcagtgggcggccgcggcgacgagcgacaacagagcttcaaggaaaggtagtgttcagaggaacccactggataagacaatggtccgtgttgcaaaaagaggaaaacatgacataaatcaagtggggatgtcgtgcgcttgagactacaatgatgcaaattttctcatacaacggatggagttttagtaatcgaattgatttttaataaatttcgaaatatggttgttcttgagatattaaacatcgtgtatattggtttgagatgtaataattgaacaaccacatgcatctattggtgcagaagctagaatatttcaatatattccctattctaaaaaaagttaaata

SEQ ID NO: 65058 - DNA, 541 bp, Zea Mays
ggaactccaggttgttcatgctatattcgtcgttcattgataatatatcttttctatgcattattgtaacatgtgggtgaaatattgcaggcccaacttgaagaagagaggaggcaacgtttggagttggatgcgaggatgaggtccgagcagcagaggacggaggacattcttcgttatatacagtccgcaacgggtgtagctccaccaccttcgctattcactccaaatccacctccatctcagttttccactcctaatcaatcggcggcatcgaatgatcctcatgttttaccaactgagcctaattgcgtgcgtcgtttgtgaacttatttgtgagatatgtattgtcggtgatatattgtgatctttgtgaacttatttgtgagacatgtggacttatttgtgagacatgtgaacttatttatgagacatgtgaacttatttgtgttgttgctgctttacatgtgatgttgatgatatgtatgtggtgtttgatatgtattttctgtctgtttggatggaatatatacaaataaat

SEQ ID NO: 65059 - DNA, 2177 bp, Zea Mays
atgatgtcgacgacagcgcagaggacgacgtcctcaatatcttcggcagaagtttcagctgcgccttctgcatgaagctgctggatcgccctgtcacaacaccatgtggccacaatttctgcctgaagtgcttcaaccggtggacacataatggagcaagcgcatgtggaaaatgccgtagaccgatcccctacaaaatggtgcagcaaccacgaatcaactctgcaatagtgagtgccatccgtgcggccaggatgtcaaagaacactaatccagcagcagccggctcatcagcaggctcgcatcactatatacagaatgttgataggcccgacagggcatacacaactgaaagggccaagcgaggcggaaaggcaaacgcttcgagcggccagatctttgtgacgactgcgccggatcattttgggccaatccttgccgaacatgaccccaggaggaacaccggtgtgcgagttggagaaacatgggaagatagacttgagtgtaggcaatggggtgctcatctgcctcacatagccggaattgctgggcagagcagatttggtgctcaatcagtcgccctgtccggaggctacgaagatgatgaagaccacggggagtggttcctttataccggaagtggcgggagggatctaagtggaaacaagcgaacaaataaggagcaaggttttgatcaaacatttgtgaagatgaatgaggctctccgacaaagctgcttgaggggttaccctgttcgggttgtacggtcccataaagagaaacgctcttcgtacgctcctgaattgggtgtgaggtatgatggaatttacaggattgagaagtgttggaggaagattggtgttcagggaacgttcaaagtctgcaggtatctgtttgtacgctgtgacaatgaaccagcaccttggaccagtgatgatcatggtgaccgtccaaggccattgcccaacattcccgagttaaaagatgcaactgatataaatgagagagatgagcgtccttcatggggctacgatgagaaggaaggccgctggaaatggatgtacgagccgccaacgagcaggaaacctgttcgcactgggcttcgtcctaagaccggcaagcaagcccggaaaagagcaaggagtgatgagatgcctaacgaccctgaaaaactcctgaatgagtttagctgttgtatctgcttccaagtgatggcagagccactcactgctccctgtggtgacagcttctgcaaggcttgtctgctgggggcatatgataaccagtcctccgtgagagaaagaagccatggcggccgcactctgagggctcagaagatcgtcaagagatgcccatcctgtgcaactgacatcagcgacttcctagcggatccacagatcaaccgagacataatggatgtgattgagtcactgcaacggaaaggcgacaccaccaccaaggacgacgctgcttcatatggatatggtgctgacaaggccgaggaattccgtggtggtgacctgcaagaggaagctgatccggagatggatgctgaggataactctgaatctgacacggatgctgatgcttcttgtggcagaactgtggttgggatcaaggatcaggaaggccagcagctgcagccccagaagcgcaagggtggcgttgccattattggcactgatgatggtcctagcaaaaggattacagcaagtgctgatgtggaacagaaaggtaataagagccatgaatagcggatggtggtggatgctagctgatcgatgatggcttggaaacacaaattaagtcagcatgttgttgtagccatattgcatgtatggcgccgagactgagagaggtttggactgttttcgttgattgcgtactcttgatgcatgcgaaccggattggataaactttgtttttgcggaaaaaaaacatgcaggttggaataccagtactgtcgtcgtttaggtttatttattatatggaagatgtttaatctatttttaagttactagtaggcatgcatgcacacgtatatgtgtttaatttgtggttgtgatcggtatagtcctctagctataacttgcatatgtatatgtgctaatgccgtatctaaaaagaaatgtcacacttattctatgcatgcttatttatgacaaattgagatgata

SEQ ID NO: 65060 - DNA, 605 bp, Zea Mays
atttaaaacattggtatatacagtgcggatagcgtgacagcgtcaacgccagccatggcggcggctcagtcctccaccgattcgttggctccgcacctccgccgccgtccgcgccgcctcgtattcgaccgccgctacggctggatctttgacgaatggacgcaccccgccgaccaagccctctccggcggccgcggaatgttctgtgcgctgacgatggcgcggtcgctggtgagcgctgcggcgtgctcgagttctggaacgccccaaaagactccacaagaagcagcaagcctggttccgtgaacttgaatgctcgggagttgtagctgatcttaagttaatacagacttgaagccattctgaactagaatgcaccacaactggttgcatgtgttccgtaaagaagcatgatcatctgtaagcacggtatcagaaaattatgagacacttatccttagcaaaaagctatttgtcctgtttctactctaatgtggcaatgatggcacatttattttactggggcactaaccatgaactcatggcagtactgaatgacaagggccattctatttttaaacctgaattaacgtagcgaatgaaaa

SEQ ID NO: 65061 - DNA, 2329 bp, Zea Mays
attccctcggacgccgtgccgcgtggtgtcgtgtcgcctattcttcctcttgcaccgcagtgttcttgccgccggcaactcggctcggctcaacaagccacgcaaccttccgccgtcgagactcgtgaggcgtcgtcgcccctgccctctctgccgacaggggacagggtggagagttgcccgggctcgggttgactcgtgtgggcgcctctttcacgcgttcgtttcgttgtttcagaaagttgtgtgctattcattgattgccatgtcaacacgtagggaggttgtcttgtatcacccattgcctgcaccaggagtgacaaacaacctcaaggatgggatccagtcaaaagttatggaaacggttggcaatgcaatcaactcattcgatccaaatgcgttgcctcggcatatagaaggggcattgggaacagctggaaacctcattaactcatttgagccaaaatggtctgggaaaaatgagtttgatttaaatggggaagctgatttccttgatggatatgaatgccctgatgaatattggggctctgcacctgtgaaggcgcacaaaccagttaacattaagaacctgctgggtggcgttattgcgataatcggtcgcaatttgggaaatactgaagctgaacagccaaaggacactaagaccagtgtctcattccttgggtcggctgatgatggtaacacattcttgcattcctcagtctacatgccaagtgctccaccagtacttgatgaagaagccttaaattacaacatttatagggctgtactggaagcagagccaccagaatggcttcctgacagttatgctagtgcgtgtatgcagtgcgctgctctttttactgcccttacacgtggaaggcatcattgtcgattctgtggagggatattttgcagggcatgctcaaagggacgatcgctgttgcctgccaagttccgtgagcggaatccgcaaagagtctgtgatgcttgttatgataggcttgatccattgcagaacttattgattaattctgtcagcaatgcctcacaaactgcaaagcatgatgtcatggattggacttgtgcaagagggtggttaaattttcccattggattaacaatggagcatgagatatacaaggcagcgaataccttgacaagttacagccaggtggcaagaataaaccctgagaagtctattccccatgcagttcttagtggagcaagtgggcttgccatattgacagttgtaaaagctggtgctattcttacttacaaacttggaactggcctagtagttgctcgaagatctgatggatcatggtctgcaccatctgctatactttctgctggttttggatggggagcacaggttggtggtgagcttatggatttcatcatagtgcttcgtggcccagaagctgtccaaactttctgcagtcgaatgcatttttcacttggggcaggtgtaagtgctgcagcaggacctgtgggcagagtagcagaagcagacctgagagctggtgataaaggatcaggagtttgctatacatacagctgcagcaaaggtaactgttgtcttactttgtatctttcaaccttttgatgccatgtttaatctgccaatggtttgggcttgtcactgtggaagaattaaatatgcaatgaccatacaatttatcagaaaatgtagcctacaaaagctttaatcagttttggcaattcataagtttaatgcattgttggaatcgaatattagtttgtttagatcttagcccatttgttaacatctttcctgattgagtgctaatatggatattcgtttgagttcattttccaacttttgagtattaaccacgagtgccaatatgtccttcatggaaaatgttccatcagtcatggatgaatctacctgatctggttatacgtagccacaactaatttaacggttttttttgtttgacataaaggtgcatttattggtgtctcattagaagggaatctagttgccacacggatggatgctaatctgcggttttatggtgacccatatctaacaaccagcgacattctcacggggaatgtggaacagccaaatgctgccaaatttctttacactgcactggataatctatactcagggctggattggtagtgtacatatgtactttgaatttttttttcgattgtaaaagttgtatatatccacaaaatgctttcgtttgttcggcgtggcaaaataattaatgaaatgctctgtattaatgaacttccgtgcgactgtccgttgatgatgatttaatatgatgttgatgctcgtattcgg

SEQ ID NO: 65062 - DNA, 1777 bp, Zea Mays
attccctcggacgccgtgccgcgtggtgtcgtgtcgcctattcttcctcttgcaccgcagtgttcttgccgccggcaactcggctcggctcaacaagccacgcaaccttccgccgtcgagactcgtgaggcgtcgtcgcccctgccctctctgccgacaggggacagggtggagagttgcccgggctcgggttgactcgtgtgggcgcctctttcacgcgttcggaggttgtcttgtatcacccattgcctgcaccaggagtgacaaacaacctcaaggatgggatccagtcaaaagttatggaaacggttggcaatgcaatcaactcattcgatccaaatgcgttgcctcggcatatagaaggggcattgggaacagctggaaacctcattaactcatttgagccaaaatggtctgggaaaaatgagtttgatttaaatggggaagctgatttccttgatggatatgaatgccctgatgaatattggggctctgcacctgtgaaggcgcacaaaccagttaacattaagaacctgctgggtggcgttattgcgataatcggtcgcaatttgggaaatactgaagctgaacagccaaaggacactaagaccagtgtctcattccttgggtcggctgatgatggtaacacattcttgcattcctcagtctacatgccaagtgctccaccagtacttgatgaagaagccttaaattacaacatttatagggctgtactggaagcagagccaccagaatggcttcctgacagttatgctagtgcgtgtatgcagtgcgctgctctttttactgcccttacacgtggaaggcatcattgtcgattctgtggagggatattttgcagggcatgctcaaagggacgatcgctgttgcctgccaagttccgtgagcggaatccgcaaagagtctgtgatgcttgttatgataggcttgatccattgcagaacttattgattaattctgtcagcaatgcctcacaaactgcaaagcatgatgtcatggattggacttgtgcaagagggtggttaaattttcccattggattaacaatggagcatgagatatacaaggcagcgaataccttgacaagttacagccaggtggcaagaataaaccctgagaagtctattccccatgcagttcttagtggagcaagtgggcttgccatattgacagttgtaaaagctggtgctattcttacttacaaacttggaactggcctagtagttgctcgaagatctgatggatcatggtctgcaccatctgctatactttctgctggttttggatggggagcacaggttggtggtgagcttatggatttcatcatagtgcttcgtggcccagaagctgtccaaactttctgcagtcgaatgcatttttcacttggggcaggtgtaagtgctgcagcaggacctgtgggcagagtagcagaagcagacctgagagctggtgataaaggatcaggagtttgctatacatacagctgcagcaaagcgacattctcacggggaatgtggaacagccaaatgctgccaaatttctttacactgcactggataatctatactcagggctggattggtagtgtacatatgtactttgaatttttttttcgattgtaaaagttgtatatatccacaaaatgctttcgtttgttcggcgtggcaaaataattaatgaaatgctctgtattaatgaacttccgtgcgactgtccgttgatgatgatttaatatgatgttgatgctcgtattcgg

SEQ ID NO: 65063 - DNA, 5715 bp, Zea Mays
cctacatctagctcgttttcggccattccaccgcacgttgccttccgcccttcccttccagcaggcgctgggcaggctgcagctgctttttaccgatggacgcgacggcgtcggacccctcgtcggggcgcagacggcagctgcagggcccccgcccgccgcggcttgccgtcaacgtggagtccctcaagatcaagaagccggccgtcacgcgacgactgaagaccaccgaggtcatcgaagtccagcttgccgacttcaaggccgccgttcagcgcctgacaggtcttggcgccgctgtcgccgcaaccgactacatggacatgaaatacacaggaccaggaccgtctatggtgtcgtcaccacgggtggagttcagtgacggatctacggcggggtgctccagcccccctccgtctgagaagacagtggaggaggaaggaaaaaaaagaggaaggagaggagaaggaaggaagaggaaggaagaagaggaggaaggaagaggaaggaagagaaaaaaagaggaagaagagagaaaaaaggagtccccgcggccacgactgtggttactctcgcccaccaccaccgctgtctcagcctccgcgagggcgaggctagcggccaccgagagggcgatctggccgctgtctctgccccgccctcctacggactacggagaggacgcggacagcttggcagccgttcttagcctgccgggacggccggggatcctgtcgcctgcggctctgccgccggctgcgttctctgggcagttctcggcgctgccgtttgacccaagctgcctctcatggctcaaggagctgacccccttcctgccctctgcaagcagatgcgtagaggagctggaatgcctgttcacgctgaaacgaagcaccctgctgcttcccggaatgccatgtccggccaccgtctcgacgtttgagttgttcagagatgtcctagaaatgtcatggatcgatgacaggaataaatgcaagaacaatcccagaacgcgacggaggcggtgagagaggtggacaacgcagtgtgcgaggacggcatccgccggggctgaagagcctcagcaggttccaccgctgcttgacgatggaggttggctgcgagcgccagtaggtatgagctctctcgcgccttggtcaccgccgccgctgtggtgctcatgagcagcatcattatcccgtgcccatggccatggccgcaaggtcggggagctctattcccgtgccaacgcctcgcaatgtggcggcgaggagccgagcgagcgatgatggatttcttcgcgcgacgccaaggagccgggacaagctgatttctcgaacgagaacaaggagaaaaggaaagattgggaggacaacgctcggtgaatatattcgtcgtgaagtaaatcaggcaatggagaaggagcacctgctggacatgttggtgatgccgagcaatctctgaaagctgaacctgttggtgacccacaagttggagtatattcgccatcaatcagtcgtctctttcagcagcttgttcatgttcgaactatcatctcatccttcaatgggaagctgccatctgatgcttggttcaatcatgtaaaaaatttgacctcagatgcagaagaatctctcgaatatctgcactacaagatgatgctggccaagcttggggttgggatagagttcaagaaagtaatgcccaatgtgtcagggacttgttccaaaacaacagctttaagcttcatgcacttactagcttcacaggaacttgtttttttaccagttaccgacaaattggagggccttcgacctggaagccctggtttgactggtgtagttcttggaaactacagtgagatattgtcacttagttcttcggtcatgcggtgcatccttttgtgtcgtggcattttaggcattattaacatagttaacatgaggcttaagaaggatagtctggaacttcctgcatttgcttttgatgatctgacatatgctggtcagaacaagggaactggaatgaatgcgcatcgtgtgccggcacacatgactgaccctatatatttgttgcctatgtttatcaggagtcttttgtgtttggatctctcaaactgcagtggccttacacagctgcctgcttccattggcaacctttctaatctggttgcattgaacctctctcactgttattcccttcacacactgccggcgtcagtaggaagactgaagaacttgcaaattcttgttctttcctgctgccatgaactaaggattttaccagtgtcactttgtgagctttccaagctaaggttgctggatttagcaggctgttccggccttcaaaacttacctgcttctttagtaaatctttgcaatctagagattctgaacctatcatattgcaaagaactgaaggagcttccacaaccatttggtaacctccaggaactgaagtacttgaatttatcaggcagccatcgggttgacttggatgttgagtgcctatatacacttgcaaatttgaagtccctaactttgtcgccgcttacaaatattcaaggctttcctggttccttcaaagatcttgcgaatcgcttggatagtttaagattgtggaagaaccagatccatccccagtgtggcccaaaggctgtttctttgcattcatataggtgttatgagcaaagtatcattgacatgttactttctgatgaggctgacaatagtagcaaccagatagtcacttctgcttgcatagttggtgaaagtggcatgggaaagactgagctagtccatcgaatttacaataaccgaatgattttggatacctttgatttgagaatatggctgcatatgtgtgataaaaagaggctattaggtaagatagtagagctcactacttttgcatcctgtggtgatgcctcaatcagtgttcttgaagaaattgtaatagaagaacttgctagcaagaggttgttacttgtactagacgattctgaaatcaaggaccagtatttctggggttatctatggaagctacttaatgtttgtgcaaaaggaagcgctgtcattgtaactaccaagagcatggtagatgctaaccagactggagcaatgcaaaccttttacttgagtcctctatccaaagaagaatgctttatgattttcaaggaacatgtgcttgaagatttagttgtgaataattactgtcagttagaaagcattggctggaagtttgcggagaaatgtggtggcaatccaatgtgcattaaagccctaagtgggttgttatgtcattctgaagttggattgtctgaaattgatatgattgttgatggtatcttaccagcattaagattatgctacgatcttttgccagcacaccttcagcagtgcttcaaattttgttccctattccccaaagattatatttttgtcaagcaccatatcatccgattatggatagctgaaggcttagtcttctgtgaagaaggtactaagccagaagatactgctctgcattattttgaccaactattctgcagatcatttttccagcgttctccatttcatagtgatcataaagatagctttgttatgcatgagctatttcatgatctggcacactctgtttccaagaatgagtgcttcagatgtgaggaaccattctgcagcttagctgaaaatgtttcccacctatcccttgttctttcagattttaagacaactgcactttctaatgaagtaaggaatttgcagtcttttctggttgtcagaagatgtttcccagtggtgagaatttttactttggatgatattttcgtgaaacatagattcttaagggcactaaatttgagctatacagacatactagagttgccaatttctattggaaacatgaagcacctgcggctcttggctctcaacaacaccaagatcaaaagccttcctattgagataggacaagtaaacagtcttcagacattggaactgaaggattgttgccacctcattgacttaccaggaagcataagtaatttggcaaagctgcgacaccttgatgtgcaaaaagaatcgggcaacattattgttggcatgcctcatggtataggatatctgacagatctccaaactctcacaatgttcaacattgggaatgatatgttgcattgttcgatttcagagttgaacaatctgaatggactaaggggacatgttcatgtaactaggcttgagaatattatgacagccaatgatgccagagaagcaaatatgatgggtaaacacttgctagaggctttgacactggagtggtcttaccaggatgaaggcatggacgatgacatgggcaaagaaattgctagtgagattcttcaaaatcttcaacctaacagcaacattatggagcttatcattcgaaattatgctggagatctgtttcctgtctggatgcaggacaattacctttgcaagctcacctcagttacacttgataactgccatggctgtagtgagctcccttaccttggtgatctaccatctcttaaatctctcttcatacagagaataaatgttgttgaaagatttggaatcgagaccagttctttggccactgaagtaaaatatcccactagatttccatcactggaggtgctgaatatatgcgagatgtatgatttgcagttctgggttagcacgagagaggaggattttccacgactctttcgactttctatcagtagatgcccgaaactaaccaaattgcctcgccttatttccctagtgcatgtgtcatttcattacggtgttgaactgccgaccttctcagaacttccatcactggagtcactaaagatcgaaggcttccagaagattagatctattagtttcccacatcaattgacaaccttgaataagttggaaattattgactgcaaagagctgttatcaataaatgcctattccttgtctgtttcaaattttaaagttgtcaggtgcctaaagcttgatttggttggaagttcaatggaagaccatatcagccacaaagtggttaatggaaggaatatcctgacaaggaagcatatggtgctaaaaactttgacccatacaaatctcttggatgatggcagcaagtgggaaaagtttggagaaaagaatatatttggctacatattcccaaggtgagaacataatgtgggaatgtagagagactactaaaattttagactgtttacatcagtttcatcttttgagttgccttttgaccgttctcgttcccattgcagtaggatatacttcctcaattctaaattataagttgctttgatttttttggtatatcagttctgctatgtatctagatataacatatgtctaggtaaataacaaagtctatgtattaaaaaaagtcaaagcgacttataatttggaatggagggagtaaatattataaaatattggattcctaaactttgttaatgtatcttactagttttaaattagacacttcttgttttttcttaaaccacgtaggagaaccgcacgtcatttctttgagaagaaatatagaaatcccctcgtgggtttaggcacactggcattaaatagaacaacaaacccacacatactgacagacccaaaaacgacccttggtggtttcagtttttaggaccagatcctggaaggctgaagccctagccaggtgcca

SEQ ID NO: 65064 - DNA, 5242 bp, Zea Mays
tgccttccgcccttcccttccagcaggcgctgggcaggctgcagctgctttttaccgatggacgcgacggcgtcggacccctcgtcggggcgcagacggcagctgcagggcccccgcccgccgcggcttgccgtcaacgtggagtccctcaagatcaagaagccggccgtcacgcgacgactgaagaccaccgaggtcatcgaagtccagcttgccgacttcaaggccgccgttcagcgcctgacaggtcttggcgccgctgtcgccgcaaccgactacatggacatgaaatacacaggaccaggaccgtctatggtgtcgtcaccacgggtggagttcagtgacggatctacggcggggtgctccagcccccctccgtctgagaagacagtggaggaggaaggaaaaaaaagaggaaggagaggagaaggaaggaagaggaaggaagaagaggaggaaggaagaggaaggaagagaaaaaaagaggaagaagagagaaaaaaggagtccccgcggccacgactgtggttactctcgcccaccaccaccgctgtctcagcctccgcgagggcgaggctagcggccaccgagagggcgatctggccgctgtctctgccccgccctcctacggactacggagaggacgcggacagcttggcagccgttcttagcctgccgggacggccggggatcctgtcgcctgcggctctgccgccggctgcgttctctgggcagttctcggcgctgccgtttgacccaagctgcctctcatggctcaaggagctgacccccttcctgccctctgcaagcagatgcgtagaggagctggaatgcctgttcacgctgaaacgaagcaccctgctgcttcccggaatgccatgtccggccaccgtctcgacgtttgagttgttcagagatgtcctagaaattaaatcaggcaatggagaaggagcacctgctggacatgttggtgatgccgagcaatctctgaaagctgaacctgttggtgacccacaagttggagtatattcgccatcaatcagtcgtctctttcagcagcttgttcatgttcgaactatcatctcatccttcaatgggaagctgccatctgatgcttggttcaatcatgtaaaaaatttgacctcagatgcagaagaatctctcgaatatctgcactacaagatgatgctggccaagcttggggttgggatagagttcaagaaagtaatgcccaatgtgtcagggacttgttccaaaacaacagctttaagcttcatgcacttactagcttcacaggaacttgtttttttaccagttaccgacaaattggagggccttcgacctggaagccctggtttgactggtgtagttcttggaaactacagtgagatattgtcacttagttcttcggtcatgcggtgcatccttttgtgtcgtggcattttaggcattattaacatagttaacatgaggcttaagaaggatagtctggaacttcctgcatttgcttttgatgatctgacatatgctggtcagaacaagggaactggaatgaatgcgcatcgtgtgccggcacacatgactgaccctatatatttgttgcctatgtttatcaggagtcttttgtgtttggatctctcaaactgcagtggccttacacagctgcctgcttccattggcaacctttctaatctggttgcattgaacctctctcactgttattcccttcacacactgccggcgtcagtaggaagactgaagaacttgcaaattcttgttctttcctgctgccatgaactaaggattttaccagtgtcactttgtgagctttccaagctaaggttgctggatttagcaggctgttccggccttcaaaacttacctgcttctttagtaaatctttgcaatctagagattctgaacctatcatattgcaaagaactgaaggagcttccacaaccatttggtaacctccaggaactgaagtacttgaatttatcaggcagccatcgggttgacttggatgttgagtgcctatatacacttgcaaatttgaagtccctaactttgtcgccgcttacaaatattcaaggctttcctggttccttcaaagatcttgcgaatcgcttggatagtttaagattgtggaagaaccagatccatccccagtgtggcccaaaggctgtttctttgcattcatataggtgttatgagcaaagtatcattgacatgttactttctgatgaggctgacaatagtagcaaccagatagtcacttctgcttgcatagttggtgaaagtggcatgggaaagactgagctagtccatcgaatttacaataaccgaatgattttggatacctttgatttgagaatatggctgcatatgtgtgataaaaagaggctattaggtaagatagtagagctcactacttttgcatcctgtggtgatgcctcaatcagtgttcttgaagaaattgtaatagaagaacttgctagcaagaggttgttacttgtactagacgattctgaaatcaaggaccagtatttctggggttatctatggaagctacttaatgtttgtgcaaaaggaagcgctgtcattgtaactaccaagagcatggtagatgctaaccagactggagcaatgcaaaccttttacttgagtcctctatccaaagaagaatgctttatgattttcaaggaacatgtgcttgaagatttagttgtgaataattactgtcagttagaaagcattggctggaagtttgcggagaaatgtggtggcaatccaatgtgcattaaagccctaagtgggttgttatgtcattctgaagttggattgtctgaaattgatatgattgttgatggtatcttaccagcattaagattatgctacgatcttttgccagcacaccttcagcagtgcttcaaattttgttccctattccccaaagattatatttttgtcaagcaccatatcatccgattatggatagctgaaggcttagtcttctgtgaagaaggtactaagccagaagatactgctctgcattattttgaccaactattctgcagatcatttttccagcgttctccatttcatagtgatcataaagatagctttgttatgcatgagctatttcatgatctggcacactctgtttccaagaatgagtgcttcagatgtgaggaaccattctgcagcttagctgaaaatgtttcccacctatcccttgttctttcagattttaagacaactgcactttctaatgaagtaaggaatttgcagtcttttctggttgtcagaagatgtttcccagtggtgagaatttttactttggatgatattttcgtgaaacatagattcttaagggcactaaatttgagctatacagacatactagagttgccaatttctattggaaacatgaagcacctgcggctcttggctctcaacaacaccaagatcaaaagccttcctattgagataggacaagtaaacagtcttcagacattggaactgaaggattgttgccacctcattgacttaccaggaagcataagtaatttggcaaagctgcgacaccttgatgtgcaaaaagaatcgggcaacattattgttggcatgcctcatggtataggatatctgacagatctccaaactctcacaatgttcaacattgggaatgatatgttgcattgttcgatttcagagttgaacaatctgaatggactaaggggacatgttcatgtaactaggcttgagaatattatgacagccaatgatgccagagaagcaaatatgatgggtaaacacttgctagaggctttgacactggagtggtcttaccaggatgaaggcatggacgatgacatgggcaaagaaattgctagtgagattcttcaaaatcttcaacctaacagcaacattatggagcttatcattcgaaattatgctggagatctgtttcctgtctggatgcaggacaattacctttgcaagctcacctcagttacacttgataactgccatggctgtagtgagctcccttaccttggtgatctaccatctcttaaatctctcttcatacagagaataaatgttgttgaaagatttggaatcgagaccagttctttggccactgaagtaaaatatcccactagatttccatcactggaggtgctgaatatatgcgagatgtatgatttgcagttctgggttagcacgagagaggaggattttccacgactctttcgactttctatcagtagatgcccgaaactaaccaaattgcctcgccttatttccctagtgcatgtgtcatttcattacggtgttgaactgccgaccttctcagaacttccatcactggagtcactaaagatcgaaggcttccagaagattagatctattagtttcccacatcaattgacaaccttgaataagttggaaattattgactgcaaagagctgttatcaataaatgcctattccttgtctgtttcaaattttaaagttgtcaggtgcctaaagcttgatttggttggaagttcaatggaagaccatatcagccacaaagtggttaatggaaggaatatcctgacaaggaagcatatggtgctaaaaactttgacccatacaaatctcttggatgatggcagcaagtgggaaaagtttggagaaaagaatatatttggctacatattcccaaggtgagaacataatgtgggaatgtagagagactactaaaattttagactgtttacatcagtttcatcttttgagttgccttttgaccgttctcgttcccattgcagtaggatatacttcctcaattctaaattataagttgctttgatttttttggtatatcagttctgctatgtatctagatataacatatgtctaggtaaataacaaagtctatgtattaaaaaaagtcaaagcgacttataatttggaatggagggagtaaatattataaaatattggattcctaaactttgttaatgtatcttactagttttaaattagacacttcttgttttttcttaaaccacgtaggagaaccgcacgtcatttctttgagaagaaatatagaaatcccctcgtgggtttaggcacactggcattaaatagaacaacaaacccacacatactgacagacccaaaaacgacccttggtggtttcagtttttaggaccagatcctggaaggctgaagccctagccaggtgcca

SEQ ID NO: 65065 - DNA, 4370 bp, Zea Mays
caggtagttgccggccatggcgtgccgacgcaaggcaccttcgccgtcggtcaggggtaaatcaggcaatggagaaggagcacctgctggacatgttggtgatgccgagcaatctctgaaagctgaacctgttggtgacccacaagttggagtatattcgccatcaatcagtcgtctctttcagcagcttgttcatgttcgaactatcatctcatccttcaatgggaagctgccatctgatgcttggttcaatcatgtaaaaaatttgacctcagatgcagaagaatctctcgaatatctgcactacaagatgatgctggccaagcttggggttgggatagagttcaagaaagtaatgcccaatgtgtcagggacttgttccaaaacaacagctttaagcttcatgcacttactagcttcacaggaacttgtttttttaccagttaccgacaaattggagggccttcgacctggaagccctggtttgactggtgtagttcttggaaactacagtgagatattgtcacttagttcttcggtcatgcggtgcatccttttgtgtcgtggcattttaggcattattaacatagttaacatgaggcttaagaaggatagtctggaacttcctgcatttgcttttgatgatctgacatatgctggtcagaacaagggaactggaatgaatgcgcatcgtgtgccggcacacatgactgaccctatatatttgttgcctatgtttatcaggagtcttttgtgtttggatctctcaaactgcagtggccttacacagctgcctgcttccattggcaacctttctaatctggttgcattgaacctctctcactgttattcccttcacacactgccggcgtcagtaggaagactgaagaacttgcaaattcttgttctttcctgctgccatgaactaaggattttaccagtgtcactttgtgagctttccaagctaaggttgctggatttagcaggctgttccggccttcaaaacttacctgcttctttagtaaatctttgcaatctagagattctgaacctatcatattgcaaagaactgaaggagcttccacaaccatttggtaacctccaggaactgaagtacttgaatttatcaggcagccatcgggttgacttggatgttgagtgcctatatacacttgcaaatttgaagtccctaactttgtcgccgcttacaaatattcaaggctttcctggttccttcaaagatcttgcgaatcgcttggatagtttaagattgtggaagaaccagatccatccccagtgtggcccaaaggctgtttctttgcattcatataggtgttatgagcaaagtatcattgacatgttactttctgatgaggctgacaatagtagcaaccagatagtcacttctgcttgcatagttggtgaaagtggcatgggaaagactgagctagtccatcgaatttacaataaccgaatgattttggatacctttgatttgagaatatggctgcatatgtgtgataaaaagaggctattaggtaagatagtagagctcactacttttgcatcctgtggtgatgcctcaatcagtgttcttgaagaaattgtaatagaagaacttgctagcaagaggttgttacttgtactagacgattctgaaatcaaggaccagtatttctggggttatctatggaagctacttaatgtttgtgcaaaaggaagcgctgtcattgtaactaccaagagcatggtagatgctaaccagactggagcaatgcaaaccttttacttgagtcctctatccaaagaagaatgctttatgattttcaaggaacatgtgcttgaagatttagttgtgaataattactgtcagttagaaagcattggctggaagtttgcggagaaatgtggtggcaatccaatgtgcattaaagccctaagtgggttgttatgtcattctgaagttggattgtctgaaattgatatgattgttgatggtatcttaccagcattaagattatgctacgatcttttgccagcacaccttcagcagtgcttcaaattttgttccctattccccaaagattatatttttgtcaagcaccatatcatccgattatggatagctgaaggcttagtcttctgtgaagaaggtactaagccagaagatactgctctgcattattttgaccaactattctgcagatcatttttccagcgttctccatttcatagtgatcataaagatagctttgttatgcatgagctatttcatgatctggcacactctgtttccaagaatgagtgcttcagatgtgaggaaccattctgcagcttagctgaaaatgtttcccacctatcccttgttctttcagattttaagacaactgcactttctaatgaagtaaggaatttgcagtcttttctggttgtcagaagatgtttcccagtggtgagaatttttactttggatgatattttcgtgaaacatagattcttaagggcactaaatttgagctatacagacatactagagttgccaatttctattggaaacatgaagcacctgcggctcttggctctcaacaacaccaagatcaaaagccttcctattgagataggacaagtaaacagtcttcagacattggaactgaaggattgttgccacctcattgacttaccaggaagcataagtaatttggcaaagctgcgacaccttgatgtgcaaaaagaatcgggcaacattattgttggcatgcctcatggtataggatatctgacagatctccaaactctcacaatgttcaacattgggaatgatatgttgcattgttcgatttcagagttgaacaatctgaatggactaaggggacatgttcatgtaactaggcttgagaatattatgacagccaatgatgccagagaagcaaatatgatgggtaaacacttgctagaggctttgacactggagtggtcttaccaggatgaaggcatggacgatgacatgggcaaagaaattgctagtgagattcttcaaaatcttcaacctaacagcaacattatggagcttatcattcgaaattatgctggagatctgtttcctgtctggatgcaggacaattacctttgcaagctcacctcagttacacttgataactgccatggctgtagtgagctcccttaccttggtgatctaccatctcttaaatctctcttcatacagagaataaatgttgttgaaagatttggaatcgagaccagttctttggccactgaagtaaaatatcccactagatttccatcactggaggtgctgaatatatgcgagatgtatgatttgcagttctgggttagcacgagagaggaggattttccacgactctttcgactttctatcagtagatgcccgaaactaaccaaattgcctcgccttatttccctagtgcatgtgtcatttcattacggtgttgaactgccgaccttctcagaacttccatcactggagtcactaaagatcgaaggcttccagaagattagatctattagtttcccacatcaattgacaaccttgaataagttggaaattattgactgcaaagagctgttatcaataaatgcctattccttgtctgtttcaaattttaaagttgtcaggtgcctaaagcttgatttggttggaagttcaatggaagaccatatcagccacaaagtggttaatggaaggaatatcctgacaaggaagcatatggtgctaaaaactttgacccatacaaatctcttggatgatggcagcaagtgggaaaagtttggagaaaagaatatatttggctacatattcccaaggtgagaacataatgtgggaatgtagagagactactaaaattttagactgtttacatcagtttcatcttttgagttgccttttgaccgttctcgttcccattgcagtaggatatacttcctcaattctaaattataagttgctttgatttttttggtatatcagttctgctatgtatctagatataacatatgtctaggtaaataacaaagtctatgtattaaaaaaagtcaaagcgacttataatttggaatggagggagtaaatattataaaatattggattcctaaactttgttaatgtatcttactagttttaaattagacacttcttgttttttcttaaaccacgtaggagaaccgcacgtcatttctttgagaagaaatatagaaatcccctcgtgggtttaggcacactggcattaaatagaacaacaaacccacacatactgacagacccaaaaacgacccttggtggtttcagtttttaggaccagatcctggaaggctgaagccctagccaggtgcca

SEQ ID NO: 65066 - DNA, 4488 bp, Zea Mays
gtgagaggcgcccaggcgagcatcgacacctgacggatttagtggccaggcagcgccggccaaggcatatggtgggcgatggagtcctgccaaattgcagccctcgcagacgaccacggcttgggcagcacaaacaagcgacatgttcctagctgggttgttgccgattttctagtaaatcaggcaatggagaaggagcacctgctggacatgttggtgatgccgagcaatctctgaaagctgaacctgttggtgacccacaagttggagtatattcgccatcaatcagtcgtctctttcagcagcttgttcatgttcgaactatcatctcatccttcaatgggaagctgccatctgatgcttggttcaatcatgtaaaaaatttgacctcagatgcagaagaatctctcgaatatctgcactacaagatgatgctggccaagcttggggttgggatagagttcaagaaagtaatgcccaatgtgtcagggacttgttccaaaacaacagctttaagcttcatgcacttactagcttcacaggaacttgtttttttaccagttaccgacaaattggagggccttcgacctggaagccctggtttgactggtgtagttcttggaaactacagtgagatattgtcacttagttcttcggtcatgcggtgcatccttttgtgtcgtggcattttaggcattattaacatagttaacatgaggcttaagaaggatagtctggaacttcctgcatttgcttttgatgatctgacatatgctggtcagaacaagggaactggaatgaatgcgcatcgtgtgccggcacacatgactgaccctatatatttgttgcctatgtttatcaggagtcttttgtgtttggatctctcaaactgcagtggccttacacagctgcctgcttccattggcaacctttctaatctggttgcattgaacctctctcactgttattcccttcacacactgccggcgtcagtaggaagactgaagaacttgcaaattcttgttctttcctgctgccatgaactaaggattttaccagtgtcactttgtgagctttccaagctaaggttgctggatttagcaggctgttccggccttcaaaacttacctgcttctttagtaaatctttgcaatctagagattctgaacctatcatattgcaaagaactgaaggagcttccacaaccatttggtaacctccaggaactgaagtacttgaatttatcaggcagccatcgggttgacttggatgttgagtgcctatatacacttgcaaatttgaagtccctaactttgtcgccgcttacaaatattcaaggctttcctggttccttcaaagatcttgcgaatcgcttggatagtttaagattgtggaagaaccagatccatccccagtgtggcccaaaggctgtttctttgcattcatataggtgttatgagcaaagtatcattgacatgttactttctgatgaggctgacaatagtagcaaccagatagtcacttctgcttgcatagttggtgaaagtggcatgggaaagactgagctagtccatcgaatttacaataaccgaatgattttggatacctttgatttgagaatatggctgcatatgtgtgataaaaagaggctattaggtaagatagtagagctcactacttttgcatcctgtggtgatgcctcaatcagtgttcttgaagaaattgtaatagaagaacttgctagcaagaggttgttacttgtactagacgattctgaaatcaaggaccagtatttctggggttatctatggaagctacttaatgtttgtgcaaaaggaagcgctgtcattgtaactaccaagagcatggtagatgctaaccagactggagcaatgcaaaccttttacttgagtcctctatccaaagaagaatgctttatgattttcaaggaacatgtgcttgaagatttagttgtgaataattactgtcagttagaaagcattggctggaagtttgcggagaaatgtggtggcaatccaatgtgcattaaagccctaagtgggttgttatgtcattctgaagttggattgtctgaaattgatatgattgttgatggtatcttaccagcattaagattatgctacgatcttttgccagcacaccttcagcagtgcttcaaattttgttccctattccccaaagattatatttttgtcaagcaccatatcatccgattatggatagctgaaggcttagtcttctgtgaagaaggtactaagccagaagatactgctctgcattattttgaccaactattctgcagatcatttttccagcgttctccatttcatagtgatcataaagatagctttgttatgcatgagctatttcatgatctggcacactctgtttccaagaatgagtgcttcagatgtgaggaaccattctgcagcttagctgaaaatgtttcccacctatcccttgttctttcagattttaagacaactgcactttctaatgaagtaaggaatttgcagtcttttctggttgtcagaagatgtttcccagtggtgagaatttttactttggatgatattttcgtgaaacatagattcttaagggcactaaatttgagctatacagacatactagagttgccaatttctattggaaacatgaagcacctgcggctcttggctctcaacaacaccaagatcaaaagccttcctattgagataggacaagtaaacagtcttcagacattggaactgaaggattgttgccacctcattgacttaccaggaagcataagtaatttggcaaagctgcgacaccttgatgtgcaaaaagaatcgggcaacattattgttggcatgcctcatggtataggatatctgacagatctccaaactctcacaatgttcaacattgggaatgatatgttgcattgttcgatttcagagttgaacaatctgaatggactaaggggacatgttcatgtaactaggcttgagaatattatgacagccaatgatgccagagaagcaaatatgatgggtaaacacttgctagaggctttgacactggagtggtcttaccaggatgaaggcatggacgatgacatgggcaaagaaattgctagtgagattcttcaaaatcttcaacctaacagcaacattatggagcttatcattcgaaattatgctggagatctgtttcctgtctggatgcaggacaattacctttgcaagctcacctcagttacacttgataactgccatggctgtagtgagctcccttaccttggtgatctaccatctcttaaatctctcttcatacagagaataaatgttgttgaaagatttggaatcgagaccagttctttggccactgaagtaaaatatcccactagatttccatcactggaggtgctgaatatatgcgagatgtatgatttgcagttctgggttagcacgagagaggaggattttccacgactctttcgactttctatcagtagatgcccgaaactaaccaaattgcctcgccttatttccctagtgcatgtgtcatttcattacggtgttgaactgccgaccttctcagaacttccatcactggagtcactaaagatcgaaggcttccagaagattagatctattagtttcccacatcaattgacaaccttgaataagttggaaattattgactgcaaagagctgttatcaataaatgcctattccttgtctgtttcaaattttaaagttgtcaggtgcctaaagcttgatttggttggaagttcaatggaagaccatatcagccacaaagtggttaatggaaggaatatcctgacaaggaagcatatggtgctaaaaactttgacccatacaaatctcttggatgatggcagcaagtgggaaaagtttggagaaaagaatatatttggctacatattcccaaggtgagaacataatgtgggaatgtagagagactactaaaattttagactgtttacatcagtttcatcttttgagttgccttttgaccgttctcgttcccattgcagtaggatatacttcctcaattctaaattataagttgctttgatttttttggtatatcagttctgctatgtatctagatataacatatgtctaggtaaataacaaagtctatgtattaaaaaaagtcaaagcgacttataatttggaatggagggagtaaatattataaaatattggattcctaaactttgttaatgtatcttactagttttaaattagacacttcttgttttttcttaaaccacgtaggagaaccgcacgtcatttctttgagaagaaatatagaaatcccctcgtgggtttaggcacactggcattaaatagaacaacaaacccacacatactgacagacccaaaaacgacccttggtggtttcagtttttaggaccagatcctggaaggctgaagccctagccaggtgcca

SEQ ID NO: 65067 - DNA, 3559 bp, Zea Mays
taagactatgttatttgttttgagatagaaacatatactaatgttattaagttcagaagcatatataatagacggtcgtaacaccttggtcttcgtgtatcgatttatcatagagtgaaaattgtaggataagaaataaacaatctaaagtgttagcgcgcgggcaccagcacgcgagcgtcggtccattttctttagctcctctagtagaagataaagtggtggggccattcgagtactgagcctctccgtgccaaccaagcgaagtcttcgtcaacgcttgcgggagctgtcaggtgtcagccaaacccctcctcgttctcagcctcacagtcacagcagctttacgcaatacgcaccaagccaccaacagctgattctctactaatccaatctccaaaccaaccatcgagttctcgcgccacgtactgatccggcaatggacaacaatggagagaagacgacgaccatcatccacactctgcgagatgcgctgcttcactttgcagtcaagtccaagaagctcgcgtcgccactgctggagccattcgggcgggcgaccgagccgaccaccgtcaacgacgacgagctgatggcgctcaagtccaaactgcggcggatccgcgccaccctccgcgacgccgagagcctgtccgtcaccgattgctccgtccagctgtggctggccgagctcggcgacctcgagaaccgggccgaggatgtggtcgaggagctggagtacgagtcccgccgctcggcgcagctggaggagctcaagcaagacttgctctacgccgccacgacgcggaagcagcgccgggaggtggcgctgctgttcgcgcccccgcccgcgaggcggctccgccgcaagatcgacgacgtctgggcgaggtacgaagagatcgcgtcggacaggaagacgctccggctgcggccaggcgacggcggctgcgcgccccggcccgcggccagcccgctcgtgccaagcagcgtgcttccccgtaccgagcgcctccacgggaggcatggcgacgtcgagagggtcgccgcgctggtcctcggggatccggacggcgggacgagctacgccgtcgtgcccatcgtcgggatggccggcgtcggcaagactgctctgatgcagcacgtctgcggcatggagacggtgaagtcgtgctttgaactgacgcgctgggtttgggtctcccaggattttgacgttgtcagcgtgacccgcaagattgttgaggcgatcaccagatcgcgcccggagtgcggcgagctgagcacgcttcatgagctcatagttgagcaccttgccgggaagaggtgcttgatcgttcttgacgacgtgtgggatgacaatcccagccactggaacagcctgacggccccgctgagccactgcgcgccagggagtgcggttgccgtgacgacgaggagcaacaaggttgccaggatggtgagcaccaaggtgtatcatctcaaatgcttgtcagatgaagactgctggcttgtatgccagcgacgggcactgccaaatagcggtgccaacgtccacaaagaactcgttgagatcggtgagaggatcgccaagaaatgccacggcttgccattggcggcagaggcagctggtagcgtcctgagcacttcagccgtctgggagcactggaatgaagtcctgaataacgacttgtgggctgacaatgaggtgaagaacctggtactgccggtgctgaaggtgagctacgaccacctgtccatgccgctgaagcgcagcttcgcgttttgttcattgtttccaaagggcttcgtgttcgacaaagatctgctagtccagctgtggactgcgcagggctttgtggatgctgaaggagactgcagccttgaagcgatcgccaatggttacttcaatgacttggtgtcaaggtgcttcttccacccttccccatctcatgctctcagcgaagggaagtttgttatgcacgacctgtatcaagagcttgctcagtttgtttcaggcaatgaatgtaggatgatacagctccctaattcgacgaaaatagatgagagctctcggcatttgtccttggtcgacgaggagtccgattcggtcgaagaaataaacctgagctggttctgtggtcatcgtgatctccggaccttcatgttcattgcaagaacagaacagaaccccgaggagatgaccttcagaacaaagattccatctgagctgatcacaggttttgaatgcttaagggctttagatttgagcaactctaatatcatggagctaccgaaatccattggaagtctgatacacctaaggttccttggtctggacaacaccgcaattcagatgctgcctgagtcaatttgtgctcttctccacttgcagacaataaagcttaaccattgttcttcccttactcagttgcctcagggcatcaagctcctattgaacctaaggtgcttagagattccacattcaggcataaagatgccttctgggattggagagttgactaggctgcagagactaccttttttcgccatcgagaatgagcctgctggatgcaccatagcagacctcaacgaactggtaaacctcgaaggacatcttcacatcacaggtttaaacaacctggatggtgcacaagcttccatcgccaacctttggaacaagccgcggattaaaagtcttacactcgaatggtccggagttacaaattttagcaagtccctttgtgatccgcaaggaaacgctgtgagctgcatatcagacagtcagcaccctgcaatcagtgcaacagcagatcaggttttgaattgcctcaagccacattcaaatctggaggagcttagcatcaagggttataacggatccttttctcggtcatggttaggatggctgcccttggacaggttagcttctattgaactgaaagactgtcgtaattgcaaagaagtaccgccccttggctgcctaccatcactgaaacacattttgatacaatcactgccaagtgtgaagctgattggtccagagttctttggaaatgctggagataccacttctaacattaggagcagaatctgtaatgtgtttcctgcactgaagtcactaaagttcagcaacatggaagcttgggaggaatggctcggtgtcaagagtgagcacttccccaatcttaaatatttcagcatcgtcagatgcagcaaactgaagctgttgcccaagttcacttcagaaccaaagctgaaaatacggtactgtgacctgctgcaaatgcctttgtgtcagaatccggtgaagcacataccagctaaaaaggaaatctcatatacgtgcattgcggaaggtgacattttagttcttgaagcttcctgttcctatggtgcatagaatcctagacggtaatcattgatctgcttaatcagggttgcagtgcaaggatgtcatcaatgcaactaggagctgattggtaggcgccggcgccaggatccagcccaaggagcagcaggagcaagaaagggaagtgatcaacaaagtggctagcaa

SEQ ID NO: 65068 - DNA, 3330 bp, Zea Mays
gtccattttctttagctcctctagtagaagataaagtggtggggccattcgagtactgagcctctccgtgccaaccaagcgaagtcttcgtcaacgcttgcgggagctgtcaggtgtcagccaaacccctcctcgttctcagcctcacagtcacagcagctttacgcaatacgcaccaagccaccaacagctgattctctactaatccaatctccaaaccaaccatcgagttctcgcgccacgtactgatccggcaatggacaacaatggagagaagacgacgaccatcatccacactctgcgagatgcgctgcttcactttgcagtcaagtccaagaagctcgcgtcgccactgctggagccattcgggcgggcgaccgagccgaccaccgtcaacgacgacgagctgatggcgctcaagtccaaactgcggcggatccgcgccaccctccgcgacgccgagagcctgtccgtcaccgattgctccgtccagctgtggctggccgagctcggcgacctcgagaaccgggccgaggatgtggtcgaggagctggagtacgagtcccgccgctcggcgcagctggaggagctcaagcaagacttgctctacgccgccacgacgcggaagcagcgccgggaggtggcgctgctgttcgcgcccccgcccgcgaggcggctccgccgcaagatcgacgacgtctgggcgaggtacgaagagatcgcgtcggacaggaagacgctccggctgcggccaggcgacggcggctgcgcgccccggcccgcggccagcccgctcgtgccaagcagcgtgcttccccgtaccgagcgcctccacgggaggcatggcgacgtcgagagggtcgccgcgctggtcctcggggatccggacggcgggacgagctacgccgtcgtgcccatcgtcgggatggccggcgtcggcaagactgctctgatgcagcacgtctgcggcatggagacggtgaagtcgtgctttgaactgacgcgctgggtttgggtctcccaggattttgacgttgtcagcgtgacccgcaagattgttgaggcgatcaccagatcgcgcccggagtgcggcgagctgagcacgcttcatgagctcatagttgagcaccttgccgggaagaggtgcttgatcgttcttgacgacgtgtgggatgacaatcccagccactggaacagcctgacggccccgctgagccactgcgcgccagggagtgcggttgccgtgacgacgaggagcaacaaggttgccaggatggtgagcaccaaggtgtatcatctcaaatgcttgtcagatgaagactgctggcttgtatgccagcgacgggcactgccaaatagcggtgccaacgtccacaaagaactcgttgagatcggtgagaggatcgccaagaaatgccacggcttgccattggcggcagaggcagctggtagcgtcctgagcacttcagccgtctgggagcactggaatgaagtcctgaataacgacttgtgggctgacaatgaggtgaagaacctggtactgccggtgctgaaggtgagctacgaccacctgtccatgccgctgaagcgcagcttcgcgttttgttcattgtttccaaagggcttcgtgttcgacaaagatctgctagtccagctgtggactgcgcagggctttgtggatgctgaaggagactgcagccttgaagcgatcgccaatggttacttcaatgacttggtgtcaaggtgcttcttccacccttccccatctcatgctctcagcgaagggaagtttgttatgcacgacctgtatcaagagcttgctcagtttgtttcaggcaatgaatgtaggatgatacagctccctaattcgacgaaaatagatgagagctctcggcatttgtccttggtcgacgaggagtccgattcggtcgaagaaataaacctgagctggttctgtggtcatcgtgatctccggaccttcatgttcattgcaagaacagaacagaaccccgaggagatgaccttcagaacaaagattccatctgagctgatcacaggttttgaatgcttaagggctttagatttgagcaactctaatatcatggagctaccgaaatccattggaagtctgatacacctaaggttccttggtctggacaacaccgcaattcagatgctgcctgagtcaatttgtgctcttctccacttgcagacaataaagcttaaccattgttcttcccttactcagttgcctcagggcatcaagctcctattgaacctaaggtgcttagagattccacattcaggcataaagatgccttctgggattggagagttgactaggctgcagagactaccttttttcgccatcgagaatgagcctgctggatgcaccatagcagacctcaacgaactggtaaacctcgaaggacatcttcacatcacaggtttaaacaacctggatggtgcacaagcttccatcgccaacctttggaacaagccgcggattaaaagtcttacactcgaatggtccggagttacaaattttagcaagtccctttgtgatccgcaaggaaacgctgtgagctgcatatcagacagtcagcaccctgcaatcagtgcaacagcagatcaggttttgaattgcctcaagccacattcaaatctggaggagcttagcatcaagggttataacggatccttttctcggtcatggttaggatggctgcccttggacaggttagcttctattgaactgaaagactgtcgtaattgcaaagaagtaccgccccttggctgcctaccatcactgaaacacattttgatacaatcactgccaagtgtgaagctgattggtccagagttctttggaaatgctggagataccacttctaacattaggagcagaatctgtaatgtgtttcctgcactgaagtcactaaagttcagcaacatggaagcttgggaggaatggctcggtgtcaagagtgagcacttccccaatcttaaatatttcagcatcgtcagatgcagcaaactgaagctgttgcccaagttcacttcagaaccaaagctgaaaatacggtactgtgacctgctgcaaatgcctttgtgtcagaatccggtgaagcacataccagctaaaaaggaaatctcatatacgtgcattgcggaaggtgacattttagttcttgaagcttcctgttcctatggtgcatagaatcctagacggtaatcattgatctgcttaatcagaggcgccggcgccaggatccagcccaaggagcagcaggagcaagaaagggaagtgatcaacaaagtggctagcaa

SEQ ID NO: 65069 - DNA, 463 bp, Zea Mays
ctcaacctacttcccctgcattgataattgtcctttcatacttctatttcaaattaagaaaaaatggggatatttgtggatatttgcattttgctacctacttttctttactttaagacaacacccaactacaacatagaaagaagaaaaaggaaacaatactctatctcactcactttcctcctcctctactctcctcccttgtgcccatgtcgccgccttgttcttgatctcaaatccaaaaccttctttccaatccacatcgatagaaccaaatcatctcactcccaaatcacttgccatcacaagctataagcatcggtctttgaagatgttagtagtgataggacaacaacggtggaaaagatacacaacaggagtagtgacctcgatccacaacatgtcatcaatttgaagagatagtagtttccttctgtgagcatatacccatatgacacccttg

SEQ ID NO: 65070 - DNA, 1923 bp, Zea Mays
ctcaacctacttcccctgcattgataattgtcctttcatacttctatttcaaattaagaaaaaatggggatatttgtggatatttgcattttgctacctacttttctttactttaagacaacacccaactacaacatagaaagaagaaaaaggaaacaatactctatctcactcactttcctcctcctctactctcctcccttgtgcccatgtcgccgccttgttcttgatctcaaatccaaaaccttctttccaatccacatcgatagaaccaaatcatctcactcccaaatcacttgccatcacaagctataagcatcggtctttgaagatgttagtagtgataggacaacaacggtggaaaagatacacaacaggagtagtgacctcgatccacaacatgtcatcaatttgaagagatagtagtttccttctgtgagaaagtgaagttcagttccatgtcggtatcttcctgacttaaagaaagtaggactatctcgagataaagttgttagagcgaggtattgcaaggatggattcgagaacggtgttcagaacgacgcttgtccgcctgcttcttgctatattggtggcggtcaatctgctattagatatgacacatgccattcgacagataagacaaaaagctggtaagccattggccggacaagctgcccatttctttcatcatcttcttgacaaagatcttaagtgctttacatcacattgcatttggtcaatagaaaaatgatggatacattgggagcaaaattggtaaataaatatatgaacatcacaggtgggataaataatgaacttagacttatgtagttttataacagagtcaagtctactagcacaataatttagttgtaaaaatgagtgtgacacatgcacagtaataatccttcgtcatttgtttggacaatacattagcaaaattctaagtgcatgagttgtttgtcccttggcttaaacatctgtcttaaaaaatatgtgggttatctaaagataactacataagtacatacctaataatataaaacacatattgcaaagcttatatcttaaaacttctctgtgttattaggtataggttaagagacaacaaatagactatggagttgtaatggtcatggtctaaaataggcattataaactaatacttgaagggtttgtttttcatagaaatgacggcaaatatatttcctccccactctctgcaattgcattatattacataaaagtgctttgcttttatgaagaattagacttaaatgatatatgttagtgtcgactttgcacaaatctaacttaccgttcttggagaatggctaaaagatttttaaaacactttgtacagtccccctcccctaaacccccctctcccccaaaaaaatatcaatctaaatttgctggagtcaaataagttatttttgttatatccatattgttgcccaaaaaatatgggagatctcaactacattttcatagaatcagagttgattcacaaactttttaacgccgttgaacatttacaaaacatgagtcgatgcacaagctttatcaaaaaaattcagtaccaatgtctaaaacaacacttttcgtgacacgagaattattatatctaacttgaggacaacaagaaaatgtaggagaaatactacaaaagtttataacaaccacttgggatgacctaaacaactcgagacccaatgtatatatgaaacaacatctgatgtttaattagttcatcctcttatatgcaacaggacagcaacaaaagcttctagtaggggggaaaacccattggcacataattaatgagccaataacatatatatagagagctgaaacacattagtttacttcttggcaagtatagctgtatagcaccttgaagatcattaatcagttaaaaat

SEQ ID NO: 65071 - DNA, 1927 bp, Zea Mays
ctcaacctacttcccctgcattgataattgtcctttcatacttctatttcaaattaagaaaaaatggggatatttgtggatatttgcattttgctacctacttttctttactttaagacaacacccaactacaacatagaaagaagaaaaaggaaacaatactctatctcactcactttcctcctcctctactctcctcccttgtgcccatgtcgccgccttgttcttgatctcaaatccaaaaccttctttccaatccacatcgatagaaccaaatcatctcactcccaaatcacttgccatcacaagctataagcatcggtctttgaagatgttagtagtgataggacaacaacggtggaaaagatacacaacaggagtagtgacctcgatccacaacatgtcatcaatttgaagagatagtagtttccttctgtgagaaagtgaagttcagttccatgtcggtatcttcctgacttaaagaaagtaggactatctcgagataaagttgttagagcgaggtattgcaaggatggattcgagaacggtgttcagaacgacgcttgtccgcctgcttgtgacttgctatattggtggcggtcaatctgctattagatatgacacatgccattcgacagataagacaaaaagctggtaagccattggccggacaagctgcccatttctttcatcatcttcttgacaaagatcttaagtgctttacatcacattgcatttggtcaatagaaaaatgatggatacattgggagcaaaattggtaaataaatatatgaacatcacaggtgggataaataatgaacttagacttatgtagttttataacagagtcaagtctactagcacaataatttagttgtaaaaatgagtgtgacacatgcacagtaataatccttcgtcatttgtttggacaatacattagcaaaattctaagtgcatgagttgtttgtcccttggcttaaacatctgtcttaaaaaatatgtgggttatctaaagataactacataagtacatacctaataatataaaacacatattgcaaagcttatatcttaaaacttctctgtgttattaggtataggttaagagacaacaaatagactatggagttgtaatggtcatggtctaaaataggcattataaactaatacttgaagggtttgtttttcatagaaatgacggcaaatatatttcctccccactctctgcaattgcattatattacataaaagtgctttgcttttatgaagaattagacttaaatgatatatgttagtgtcgactttgcacaaatctaacttaccgttcttggagaatggctaaaagatttttaaaacactttgtacagtccccctcccctaaacccccctctcccccaaaaaaatatcaatctaaatttgctggagtcaaataagttatttttgttatatccatattgttgcccaaaaaatatgggagatctcaactacattttcatagaatcagagttgattcacaaactttttaacgccgttgaacatttacaaaacatgagtcgatgcacaagctttatcaaaaaaattcagtaccaatgtctaaaacaacacttttcgtgacacgagaattattatatctaacttgaggacaacaagaaaatgtaggagaaatactacaaaagtttataacaaccacttgggatgacctaaacaactcgagacccaatgtatatatgaaacaacatctgatgtttaattagttcatcctcttatatgcaacaggacagcaacaaaagcttctagtaggggggaaaacccattggcacataattaatgagccaataacatatatatagagagctgaaacacattagtttacttcttggcaagtatagctgtatagcaccttgaagatcattaatcagttaaaaat

SEQ ID NO: 65072 - DNA, 1253 bp, Zea Mays
ctcaacctacttcccctgcattgataattgtcctttcatacttctatttcaaattaagaaaaaatggggatatttgtggatatttgcattttgctacctacttttctttactttaagacaacacccaactacaacatagaaagaagaaaaaggaaacaatactctatctcactcactttcctcctcctctactctcctcccttgtgcccatgtcgccgccttgttcttgatctcaaatccaaaaccttctttccaatccacatcgatagaaccaaatcatctcactcccaaatcacttgccatcacaagctataagcatcggtctttgaagatgttagtagtgataggacaacaacggtggaaaagatacacaacaggagtagtgacctcgatccacaacatgtcatcaatttgaagagatagtagtttccttctgtgagaaagtaggactatctcgagataaagttgttagagcgaggtattgcaaggatggattcgagaacggtgttcagaacgacgcttgtccgcctgcttcttgctatattggtggcggtcaatctgctattagatatgacacatgccattcgacagataagacaaaaagctgggcccaagagtacccgctacgacaatgccgtctgtattgtagcagcacactctcatgtaggttagataacgataaagctagtttagaataagattagaattatagataagattatatctagggcttagagatcaagtaaccctctctatatgaggagaaggattgtatcaattgaagataaacaagagattaaaagaaaattccttctctcttgcagaggagaaggattgtatcaattgaagataaacaagagatttgaagaaaattccttctctcttgcaggccgtgggcaaagccctatgaccggcctccccatcacccctaaccctagttgtcgccctctaaccctcgcagtcccatccaataaacaatacccatgatactgtagcaccatgggtactatagcaccacacccatctgttgccccctcaacaatttctgccctcacactagtaaccacataacattagccccaaacgttgaccataacaatctagtataggagaaaccttgtcgatcctagaatgttggacgaccctccccagccttttgttcccccggcggcgggccccatcccggtgacctccggtgcagcagccaccaccagcacgtcaccctctctgcgcccgtaccacataactccttc

SEQ ID NO: 65073 - DNA, 998 bp, Zea Mays
ctcaacctacttcccctgcattgataattgtcctttcatacttctatttcaaattaagaaaaaatggggatatttgtggatatttgcattttgctacctacttttctttactttaagacaacacccaactacaacatagaaagaagaaaaaggaaacaatactctatctcactcactttcctcctcctctactctcctcccttgtgcccatgtcgccgccttgttcttgatctcaaatccaaaaccttctttccaatccacatcgatagaaccaaatcatctcactcccaaatcacttgccatcacaagctataagcatcggtctttgaagatgttagtagtgataggacaacaacggtggaaaagatacacaacaggagtagtgacctcgatccacaacatgtcatcaatttgaagagatagtagtttccttctgtgagaaagtgaagttcagttccatgtcggtatcttcctgacttaaagaaagtaggactatctcgagataaagttgttagagcgaggtattgcaaggatggattcgagaacggtgttcagaacgacgcttgtccgcctgcttcttgctatattggtggcggtcaatctgctattagatatgacacatgccattcgacagataagacaaaaagctgtgaggctgaggtcaaggcgcggggccctgcggaaactgccgatgctgatgacgcaggcaatgcaatggtagtagctccattcctggctctggtttcctgtgaaaccagacgttggccctgtttatttcggcttttcgcagcttttagccaccagaagctgctgtggacagccaaacactcagcttttcagccagcttctataaaattcgtttgggtaaaaaccattcaaaatcaacataaacatataatcggttgagtcgtcgcaatagtagtaatctgtcactttatagatcctgagtcttatggacaattttatcttcctccacacgtaatcctaatgatactcag

SEQ ID NO: 65074 - DNA, 948 bp, Zea Mays
ctcaacctacttcccctgcattgataattgtcctttcatacttctatttcaaattaagaaaaaatggggatatttgtggatatttgcattttgctacctacttttctttactttaagacaacacccaactacaacatagaaagaagaaaaaggaaacaatactctatctcactcactttcctcctcctctactctcctcccttgtgcccatgtcgccgccttgttcttgatctcaaatccaaaaccttctttccaatccacatcgatagaaccaaatcatctcactcccaaatcacttgccatcacaagctataagcatcggtctttgaagatgttagtagtgataggacaacaacggtggaaaagatacacaacaggagtagtgacctcgatccacaacatgtcatcaatttgaagagatagtagtttccttctgtgaggactatctcgagataaagttgttagagcgaggtattgcaaggatggattcgagaacggtgttcagaacgacgcttgtccgcctgcttcttgctatattggtggcggtcaatctgctattagatatgacacatgccattcgacagataagacaaaaagctgtgaggctgaggtcaaggcgcggggccctgcggaaactgccgatgctgatgacgcaggcaatgcaatggtagtagctccattcctggctctggtttcctgtgaaaccagacgttggccctgtttatttcggcttttcgcagcttttagccaccagaagctgctgtggacagccaaacactcagcttttcagccagcttctataaaattcgtttgggtaaaaaccattcaaaatcaacataaacatataatcggttgagtcgtcgcaatagtagtaatctgtcactttatagatcctgagtcttatggacaattttatcttcctccacacgtaatcctaatgatactcag

SEQ ID NO: 65075 - DNA, 925 bp, Zea Mays
ctcaacctacttcccctgcattgataattgtcctttcatacttctatttcaaattaagaaaaaatggggatatttgtggatatttgcattttgctacctacttttctttactttaagacaacacccaactacaacatagaaagaagaaaaaggaaacaatactctatctcactcactttcctcctcctctactctcctcccttgtgcccatgtcgccgccttgttcttgatctcaaatccaaaaccttctttccaatccacatcgatagaaccaaatcatctcactcccaaatcacttgccatcacaagctataagcatcggtctttgaagatgttagtagtgataggacaacaacggtggaaaagatacacaacaggagtagtgacctcgatccacaacatgtcatcaatttgaagagatagtagtttccttctgtgagaaagtgaagttcagttccatgtcggtatcttcctgacttaaagaaagtaggactatctcgagataaagttgttagagcgaggtattgcaaggatggattcgagaacggtgttcagaacgacgcttgtccgcctgctttgaggctgaggtcaaggcgcggggccctgcggaaactgccgatgctgatgacgcaggcaatgcaatggtagtagctccattcctggctctggtttcctgtgaaaccagacgttggccctgtttatttcggcttttcgcagcttttagccaccagaagctgctgtggacagccaaacactcagcttttcagccagcttctataaaattcgtttgggtaaaaaccattcaaaatcaacataaacatataatcggttgagtcgtcgcaatagtagtaatctgtcactttatagatcctgagtcttatggacaattttatcttcctccacacgtaatcctaatgatactcag

SEQ ID NO: 65076 - DNA, 788 bp, Zea Mays
ctcaacctacttcccctgcattgataattgtcctttcatacttctatttcaaattaagaaaaaatggggatatttgtggatatttgcattttgctacctacttttctttactttaagacaacacccaactacaacatagaaagaagaaaaaggaaacaatactctatctcactcactttcctcctcctctactctcctcccttgtgcccatgtcgccgccttgttcttgatctcaaatccaaaaccttctttccaatccacatcgatagaaccaaatcatctcactcccaaatcacttgccatcacaagctataagcatcggtctttgaagatgttagtagtgataggacaacaacggtggaaaagatacacaacaggagtagtgacctcgatccacaacatgtcatcaatttgaagagatagtagtttccttctgtgagtgaggctgaggtcaaggcgcggggccctgcggaaactgccgatgctgatgacgcaggcaatgcaatggtagtagctccattcctggctctggtttcctgtgaaaccagacgttggccctgtttatttcggcttttcgcagcttttagccaccagaagctgctgtggacagccaaacactcagcttttcagccagcttctataaaattcgtttgggtaaaaaccattcaaaatcaacataaacatataatcggttgagtcgtcgcaatagtagtaatctgtcactttatagatcctgagtcttatggacaattttatcttcctccacacgtaatcctaatgatactcag

SEQ ID NO: 65077 - DNA, 3987 bp, Zea Mays
ctcgggtggtccctgcgcgccgccgtcgggtcttcttctgcgcgcccattccgttctccctgcgctcgcccatggcgtcaaccactcatccccttccgttgtcccctgccgtgctatgctcgatctccagccgagctccactgtcaacgcagcaagctgccgtcctcgcgcaccggatgcgatctctgcgttcagctccataagtcgcacgccctttagctctagatgccgagcagcaggccgcgcgccggacccgcacccttcctttgcgtgtgttcatcgcgcccagcctgcttgtgctcaggttttcgccgcagacgttgtggagtttgccgttctgtgtgtagcgggaaagctttgcgagtttgcgcgccgtcgctcagctcgctcaaatcctggccatggttcccgtcacgctctgtgtcggtatgctggcccgacgctgtcgtccttcttcatcctcgtcttcgcctcgacctcgcgtggtgctcggccgtacacagttgctggtcgtcgacgcccctgcgagttgtcaagtcatccctcatgttcacctccatatgatgggtggcgtgggtggtaatgtcctggcgcgctattcgtttggggttcgaggatgtgcttgaaccagagatattccgtggttgctggacgtccttgcaccatggaaacgtcgaagcttcattccgtaggtctccaacttggcgccaaggaaagaaattcctaggaaccgggtaatgaagcaagattcgtgcaacgtttgccaagtgttcgacgtattacttgacctcggattcgttgtcatccgcgtgtagttgaatcattttagtcatggtacgataattgatcgcacgatgtggaagacgagccaagtcgaccccaagcgtgagcttctccacaaggtgatgctgatggacgaacctgaagatggacagacgaagcaagtaccagaacaaaggctgatcgtcatgtgatcgacgtctaacaaacactaacctagtgtttcttccaggcaagccccggtgcattctcccctcccttgtgttttaaatgctttttcaccttatctagtgcattaggtgataggagttgtgtgaaaaacaattgatgcattacaattccttggaaactccttaatcccggttttataaaaagaactgataatgcttagccatgcttagaaactgaaaaatcatttgttttcaaaaagaaggattgtggaacattggttatgggcctttcatttcaaaaatcaaagcaaacttatggtgatgattccacttcagccggagtgggttcatcattcggaaaagagtacccctgtcaggtaccaaaaatgggaaatggtttgaatacatctagaccagacgctgagctgacaaggtctcccgtctatgtcgattaaggactgttcgatgttggcctgttgtggtggagaccttgcaactagtcacatgctccggtaagcctgaacccggctattccatacgtgaaaagacaaccgcgcactgggtgtgggagatggtgggagtagcgtgtaccctccttgctagaggctggatggaggagtaacacggaccggttcacgttgtggaggatctatgggaacggttgacatatgcaagggttaagttctacatatgtcgtgtggttagggatccccagctgggtataatcggttcgaatcatcgttgctcctcggtcatggagactctaccctccgaccactcatcgtagttgacaagtgaaatatgaattggctaaaagaaagctagaccaggacaagtggatgctctagattatgcaaatctagattcaggaaaagtacttaacttgtgaagtaaaattttggcataaggattcaatactagtaagcccttctgccaaatgagtctttgaaatttggtaagcccttgattcctaatcagccagcatatccttgagagtcttttctttagtcgggtaagtcttgctgagtaattgcgtactcagggttttattccctgttgttttttaggactaaaattttgtgctgctgatgatggtgttaagtgccggtgggctcgaccttcttataagtctaagtactcttctatacttcttattgaggatggtccttgagctagcatatattttaaaactacaaataatttataacagttcaaagttatttttttgatcacttttgtaatcactccaatcatatataacgtaaacttgatgtaacttgtaaaatttggtaataagatttctgctgcaaaatgttggtatgtgatttgtgtttactttatcctgcggtcctggttgtaagtggtttatccgaggtccttggggcactcggacagatcctgttaagttatctggtgcacatgcatagccgtctgaggtctttgagacaaggacaggtgcatgtgggcccaataacttgggaggttctgccacacctttatctcccaaacgaagtacactcaagatctacttaagaggtttgggatgaaagatgcaaagcctacaaagacacctatgggaacagacggatatttggacctcaacaaaggaggtaagttcgttgatcaaaaggcataccggtctatgataggatctttactttatctttgcgctagtagaccagatattatgctaagtgtatgcatatgtgctagatttcaatccgaccccaaggagtgtcaccttgtggccgttaagcgaattcttagatattagtttctacgccttgtctcgggatctggtatccaaaggggtctacctttaacctaatcggatattctgattccgactatgccgggtgcaaggttgataggaagagcacctctaggacttgtcaatttctgggaagatccctagtgtcttggagctctaggaaacaaacatctgttgccctatccaccgctgaggccgagtatgttgccgcaggacagtgttgcgcgcaactgctttggatgaggcaaaccctccgggactttggctacaatctgagaaaagtctcactcctatgtgataatgagagtgcaattcgcttggcggataatcctgttgaacacaaccgcactaagcacatagacatccagtatcacttttcgagagaccaccagcaaaaggaagatatctatatttgtcatattagcatcgagaaccagctagctgatatcttcaccaagcctttagatgagaaaaggttttgcaggttgcgtagtgagctaaatgtcttagattcgcgtaacttggattgatctatagcatacatgtgttctatgcctatgatcatgttactttaagccttattgtctttaattgcttatatttggtgctcaagttgtacaagtcatcaccggacctcacaagtccctatgcaaatgatgcacgtgtttagggggagatgtgccacaacttgactcccttgacactaacctgtttgttgagtattcttgaaagggaaaagtgaacttggacaaagaaagagcttccactgcattccggtataaacgtatcttgtcccaagttctttgttgtgctctcattgaaattttgctcttatttgacattttggtgaggcaatgagattaaagggccacaaaggtctcctgttttggtgcttaatggcaaagggggagaaattaaggccaaagcaaatggatcagccaaccacttgtgaatttcaaaaatattagagctagaatctttatgtttgatcaaaaccctttattgcaaaattattctcttatgggggagaagtttcattatgggaaaagggggagtttgtggcatttgatcaaatttactcttgaaatatctctctatttgcccaaacaaatgtgtttgacttagagataggaaaaagaatttgttttgtgaaaataaaccaagtggtggcaaaagtgatccaaatatgccaaattctatgtgagaaaaattggtcttcaatttgcacttctttaaagaatgatattgcactttgggttgcttttt

SEQ ID NO: 65078 - DNA, 1887 bp, Zea Mays
gttgaacatgcccacgtccgctcggcgagacccgacgaaaacgtcgacttcgcaccagcccgctcgccgggaacacgctctacctcgcattccagacgagcgcgacggccctggagtacgacttgggtgggcacgcgggagatgccgccgctgccatgcctggactggcagcgcgttgtgctcgccaccagggacgatggtcgtctgggactcgccatgacagtgttctcttcctgagaaagagaggacgggctcacatggaaagtttcctttctgtagccctgggtgaattggtgactagatcaataaatttcatcatcaacaagttctcgaagccgccgacacttgccatggaggaaagcctacaaaggactcttctccgagcacaggtcatcgacgaggaggccatggggcggcacattccaaatcaagccatgatccagcagttaggcatgctgagagatgccatgcaccggggctcttacgcactcgacgccttcaggtacaagcctcactatggagaggacgacagtgttcaagttgtgagtggattcatgtccctatccaagttaccctttgcaaaggatccctatttcttcagtcgaactgcacagtctcgggaacaactacaagaggcacttgacagattgggctccatgattgttgatctgaatgagttggtgatgttcttggcgagctaccctcgtctgcatcgccaaccttacagcatgcatatcttactgggtaactgcatgtttggtcgccaggtggaagcagaacttgtcattaattttttgctgcacacacagcctcatagctctgaagaactggaggtcctgccaattatcggtccatgcagagtcggcaagagcaccctagtcgctcatgtttgcaaagatgaaagagtccaagatcatttctcagaaatcttgtggctgaatgaccttgcttttacagatgacgagcgagctttcagacagggatatgcaatggagcatcagaatcaagtgtcgaactggaacaaagacaagagatcgctagttgttatagaactatctggaaatctccatgaagatgcttggaacaggttctatcttgcttgcaaacggagcttttgtagcgggagtaaaatcgtagtcacaagcagttcagacagagctgcaaagtttggaacagcacaggctctagctctgaagcatctatctcatgaagcatactggtatttcttcaagacacttgcgtttggaagcatggatcctgagacacacccaaggcttgcacaggttctgaggttcttcagagtgttcgtccagaagcatgtctccagattcggcacgcatccatacgatcttctgaaccagaacagaccaataaggattagccgaatgggtacagcttctgaatatttcactattcatcgtcagtatcattgctcttcacaagaggaggttcctaagataagagtccacgatgtggtgtatggaagcatgaagacttgcagaaaatttgaggtcctatcatggagatctccaatacccccctactacagctatgccaatacttatgagattcaagagcgaaggactacaagtgccaagaggaagcgttctacggaagatggagtcacattttgctaattttgccattacctgtgtcatgtaggaatattgtttcgttcagttttttctgggtaggatgccacaagttacaacacagaccaagtgtaaataaaacctgtgaagtgtcacaggttatagttacagcataatcaaactgtactataataactcttgtatttccgttatgctataataactcttgtatttccgttatgctataatggaaatgaggttgctatataatcatcacactaagcttttctgtttt

SEQ ID NO: 65079 - DNA, 1783 bp, Zea Mays
cttctcggccttttattgatttggttagcttagttttgtggatggcgtcggtgtagttttttgtgcggacttgcgatgtactcttcaccattgatctgaagtctctccgggcctcaaagtgttctcttcctgagaaagagaggacgggctcacatggaaagtttcctttctgtagccctgggtgaattggtgactagatcaataaatttcatcatcaacaagttctcgaagccgccgacacttgccatggaggaaagcctacaaaggactcttctccgagcacaggtcatcgacgaggaggccatggggcggcacattccaaatcaagccatgatccagcagttaggcatgctgagagatgccatgcaccggggctcttacgcactcgacgccttcaggtacaagcctcactatggagaggacgacagtgttcaagttgtgagtggattcatgtccctatccaagttaccctttgcaaaggatccctatttcttcagtcgaactgcacagtctcgggaacaactacaagaggcacttgacagattgggctccatgattgttgatctgaatgagttggtgatgttcttggcgagctaccctcgtctgcatcgccaaccttacagcatgcatatcttactgggtaactgcatgtttggtcgccaggtggaagcagaacttgtcattaattttttgctgcacacacagcctcatagctctgaagaactggaggtcctgccaattatcggtccatgcagagtcggcaagagcaccctagtcgctcatgtttgcaaagatgaaagagtccaagatcatttctcagaaatcttgtggctgaatgaccttgcttttacagatgacgagcgagctttcagacagggatatgcaatggagcatcagaatcaagtgtcgaactggaacaaagacaagagatcgctagttgttatagaactatctggaaatctccatgaagatgcttggaacaggttctatcttgcttgcaaacggagcttttgtagcgggagtaaaatcgtagtcacaagcagttcagacagagctgcaaagtttggaacagcacaggctctagctctgaagcatctatctcatgaagcatactggtatttcttcaagacacttgcgtttggaagcatggatcctgagacacacccaaggcttgcacaggttctgaggttcttcagagtgttcgtccagaagcatgtctccagattcggcacgcatccatacgatcttctgaaccagaacagaccaataaggattagccgaatgggtacagcttctgaatatttcactattcatcgtcagtatcattgctcttcacaagaggaggttcctaagataagagtccacgatgtggtgtatggaagcatgaagacttgcagaaaatttgaggtcctatcatggagatctccaatacccccctactacagctatgccaatacttatgagattcaagagcgaaggactacaagtgccaagaggaagcgttctacggaagatggagtcacattttgctaattttgccattacctgtgtcatgtaggaatattgtttcgttcagttttttctgggtaggatgccacaagttacaacacagaccaagtgtaaataaaacctgtgaagtgtcacaggttatagttacagcataatcaaactgtactataataactcttgtatttccgttatgctataataactcttgtatttccgttatgctataatggaaatgaggttgctatataatcatcacactaagcttttctgtttt

SEQ ID NO: 65080 - DNA, 1919 bp, Zea Mays
cttctcggccttttattgatttggttagcttagttttgtggatggcgtcggtgtagttttttgtgcggacttgcgatgtactcttcaccattgatctgaagtctctccgggcctcaaaggtggtctacagagtaattacacggatcatacatgtgttctcttcctgagaaagagaggacgggctcacatggaaagtttcctttctgtagccctgggtgaattggtgactagatcaataaatttcatcatcaacaagttctcgaagccgccgacacttgccatggaggaaagcctacaaaggactcttctccgagcacaggtcatcgacgaggaggccatggggcggcacattccaaatcaagccatgatccagcagttaggcatgctgagagatgccatgcaccggggctcttacgcactcgacgccttcaggtacaagcctcactatggagaggacgacagtgttcaagttgtgagtggattcatgtccctatccaagttaccctttgcaaaggatccctatttcttcagtcgaactgcacagtctcgggaacaactacaagaggcacttgacagattgggctccatgattgttgatctgaatgagttggtgatgttcttggcgagctaccctcgtctgcatcgccaaccttacagcatgcatatcttactgggtaactgcatgtttggtcgccaggtggaagcagaacttgtcattaattttttgctgcacacacagcctcatagctctgaagaactggaggtcctgccaattatcggtccatgcagagtcggcaagagcaccctagtcgctcatgtttgcaaagatgaaagagtccaagatcatttctcagaaatcttgtggctgaatgaccttgcttttacagatgacgagcgagctttcagacagggatatgcaatggagcatcagaatcaagtgtcgaactggaacaaagacaagagatcgctagttgttatagaactatctggaaatctccatgaagatgcttggaacaggttctatcttgcttgcaaacggagcttttgtagcgggagtaaaatcgtagtcacaagcagttcagacagagctgcaaagtttggaacagcacaggctctagctctgaagcatctatctcatgaagcatactggtatttcttcaagacacttgcgtttggaagcatggatcctgagacacacccaaggcttgcacaggtagccatggagatagccagaacgcagaatcgttcaatcaacgccgcgtacatcatctgttatttgatgaggaacaattttaacatccacttttggtgcaaggttctgaggttcttcagagtgttcgtccagaagcatgtctccagattcggcacgcatccatacgatcttctgaaccagaacagaccaataaggattagccgaatgggtacagcttctgaatatttcactattcatcgtcagtatcattgctcttcacaagaggaggttcctaagataagagtccacgatgtggtgtatggaagcatgaagacttgcagaaaatttgaggtcctatcatggagatctccaatacccccctactacagctatgccaatacttatgagattcaagagcgaaggactacaagtgccaagaggaagcgttctacggaagatggagtcacattttgctaattttgccattacctgtgtcatgtaggaatattgtttcgttcagttttttctgggtaggatgccacaagttacaacacagaccaagtgtaaataaaacctgtgaagtgtcacaggttatagttacagcataatcaaactgtactataataactcttgtatttccgttatgctataataactcttgtatttccgttatgctataatggaaatgaggttgctatataatcatcacactaagcttttctgtttt

SEQ ID NO: 65081 - DNA, 2374 bp, Zea Mays
cctgttcttctctcccctcctgctactgccgcccggctccgctccgctcccctcccgaaccccgttccacctccacccgccgctcccgtcccgtcccgtccatacccgcgccgctctcgactcgctcctcgacctcaaggctacctacctcgacgggccccgcaccgtacccgcccgctagctcccgcggctgcagcagcaggacgagctcgccgccgccgtgcactagaagaagaggtcgctgtcggtcgccccgccccgcccaatcctggttcctggacctgcgccgcgtcgtttcgcctcaggttccagtgtctcgatttgccaggataacttgtataattgaagctttcctttgtacgatgatgggggcatgccatggaccagaactgagggggctagggtttgctatgtggtagtagctcctgcttcaggtggcgtcagctgttctgggtggggtaatatgatgaaacagatatttggacggcgcaaggcgtccaaaaccgcagacaaggagttcactggtgggaggacgttcagccagctgtcggggtctggagttgctgacctgagtggccaaccgccaattctgtcgagtactgggcacgcctatgggagtggaaaccgtacggggttccaagactcgaggataaatgataatttgttttcttccaacttccgtccgttgccgagctttaaggatgtgccgaatacagagaaacagaatctgctcatcaaaaagttggacgtttgttgcactctgtttgactttacggatgcgtcaaagaacatgaaggagaaggaaataaagacgctgatgttgttggagatagatgagtatgtaaggactgctaacgtgaagttccctgagatcgttgtggaggcaatcacaaaaatgatttcggtgaacttgttcaggacactaatttccccacctagggagaagaaggcgcttcaagcttttgatctagaagaggacgaaccgttgatggaccctgcgtggccacatttgtaccatgtgtatgagttgctcttgacatttgtccagtctccacaaaatgatgctaagctggctaagagatatattgactattcctttattctgaggctgcttgacctctttgactcggaggacgctagggagagggatcgccttaagatggtgcttcaccgtatctatgggaagttcatggtgtatcggccatttatccggaaagctatcaataacatattctaccagttcatatatgaaacagaaaagcacaatggaattgcagagctcttggagatttttggaagtatcatcaatgggtttgctttgccactcaaggaagagcacaaactgttccttgtaaggaccttaattccacttcacaagccaaggtgcactacaatgtaccatcaacagttgtcttactgcattacacagtttgttgaaaaagattgcaagcttgcggattctgttattaggggcctcataaaatattggcctatcaccaacagcacaaaggaggtactgttcttgggtgagttggaagaggtactagatgcaacacaacctggcgagtttcaaaaatgtatggttcctctttctcaccagatcgctcgctgctcgaacagccctcacttccagtaaggtgatcctgcctatcgtcttccctgcattggagaaaaatataaatgggcactggaatcaagtcgtgcgaagcctcagcctgaatgtccgaaagctattctccgatcgtgacccccaaatgttcaatgaatgcttgcggggttatgaggaagacaaagacagagagaaggaatttagactgaagcaagagttggcatggaaacgtctcgatgagattgcatcagcaaaagtcacaagtggtgaggctgtcctcgtgtctccaaccttgcatcgtcaaccttcagtcttgtaggaacctgcgctacatgagtggtccttgcagagtcgttagacattgtacaggattgggttgtagataaaagcgggtatatgaagccaccaaggcaggtgtgcgaaatcgaggaaagagagatgaggagccagtagtgcatcatttctgtacatcccgtgccatggcttcttttggcatcctggtggttcactttgctgctgtagtccgttgtttgggagaatggatgttttttttcttcttataatggaaaatgtcgagatggcgtgcagtcagtttaaatgataaaagttataagcttttcctttcgcatatagttttgatacaatttgtcatggttgtgaatgcaagcgaatcatatcaaatccctgagaatgctgtaacgcggtggtcacatgtgtggggatttttttattttatccccaggaaaaaatattttaattttcatc

SEQ ID NO: 65082 - DNA, 2319 bp, Zea Mays
cctgttcttctctcccctcctgctactgccgcccggctccgctccgctcccctcccgaaccccgttccacctccacccgccgctcccgtcccgtcccgtccatacccgcgccgctctcgactcgctcctcgacctcaaggctacctacctcgacgggccccgcaccgtacccgcccgctagctcccgcggctgcagcagcaggacgagctcgccgccgccgtgcactagaagaagaggtcgctgtcggtcgccccgccccgcccaatcctggttcctggacctgcgccgcgtcgtttcgcctcaggttccagtgtctcgatttgccaggataacttgtataattgaagctttcctttgtacgatgatgggggcatgccatggaccagaactgagggggctagggtttgctatgtggtagtagctcctgcttcaggtggcgtcagctgttctgggtggggtaatatgatgaaacagatatttggacggcgcaaggcgtccaaaaccgcagacaaggagttcactggtgggaggacgttcagccagctgtcggggtctggagttgctgacctgagtggccaaccgccaattctgtcgagtactgggcacgcctatgggagtggaaaccgtacggggttccaagactcgaggataaatgataatttgttttcttccaacttccgtccgttgccgagctttaaggatgtgccgaatacagagaaacagaatctgctcatcaaaaagttggacgtttgttgcactctgtttgactttacggatgcgtcaaagaacatgaaggagaaggaaataaagacgctgatgttgttggagatagatgagtatgtaaggactgctaacgtgaagttccctgagatcgttgtggaggcaatcacaaaaatgatttcggtgaacttgttcaggacactaatttccccacctagggagaagaaggcgcttcaagcttttgatctagaagaggacgaaccgttgatggaccctgcgtggccacatttgtaccatgtgtatgagttgctcttgacatttgtccagtctccacaaaatgatgctaagctggctaagagatatattgactattcctttattctgaggctgcttgacctctttgactcggaggacgctagggagagggatcgccttaagatggtgcttcaccgtatctatgggaagttcatggtgtatcggccatttatccggaaagctatcaataacatattctaccagttcatatatgaaacagaaaagcacaatggaattgcagagctcttggagatttttggaagtatcatcaatgggtttgctttgccactcaaggaagagcacaaactgttccttgtaaggaccttaattccacttcacaagccaagcacaaaggaggtactgttcttgggtgagttggaagaggtactagatgcaacacaacctggcgagtttcaaaaatgtatggttcctctttctcaccagatcgctcgctgctcgaacagccctcacttccaggttgctgagagagtattgtttttctggaacaatactcacttcgagaatcttgttaagcaaaacagtaaggtgatcctgcctatcgtcttccctgcattggagaaaaatataaatgggcactggaatcaagtcgtgcgaagcctcagcctgaatgtccgaaagctattctccgatcgtgacccccaaatgttcaatgaatgcttgcggggttatgaggaagacaaagacagagagaaggaatttagactgaagcaagagttggcatggaaacgtctcgatgagattgcatcagcaaaagtcacaagtggtgaggctgtcctcgtgtctccaaccttgcatcgtcaaccttcagtcttgtaggaacctgcgctacatgagtggtccttgcagagtcgttagacattgtacaggattgggttgtagataaaagcgggtatatgaagccaccaaggcaggtgtgcgaaatcgaggaaagagagatgaggagccagtagtgcatcatttctgtacatcccgtgccatggcttcttttggcatcctggtggttcactttgctgctgtagtccgttgtttgggagaatggatgttttttttcttcttataatggaaaatgtcgagatggcgtgcagtcagtttaaatgataaaagttataagcttttcctttcgcatatagttttgatacaatttgtcatggttgtgaatgcaagcgaatcatatcaaatccctgagaatgctgtaacgcggtggtcacatgtgtggggatttttttattttatccccaggaaaaaatattttaattttcatc

SEQ ID NO: 65083 - DNA, 833 bp, Zea Mays
ggagacttaagatggtcttttctcaaggttgctgagagagtattgtttttctggaacaatactcacttcgagaatcttgttaagcaaaacagtaaggtgatcctgcctatcgtcttccctgcattggagaaaaatataaatgggcactggaatcaagtcgtgcgaagcctcagcctgaatgtccgaaagctattctccgatcgtgacccccaaatgttcaatgaatgcttgcggggttatgaggaagacaaagacagagagaaggaatttagactgaagcaagagttggcatggaaacgtctcgatgagattgcatcagcaaaagtcacaagtggtgaggctgtcctcgtgtctccaaccttgcatcgtcaaccttcagtcttgtaggaacctgcgctacatgagtggtccttgcagagtcgttagacattgtacaggattgggttgtagataaaagcgggtatatgaagccaccaaggcaggtgtgcgaaatcgaggaaagagagatgaggagccagtagtgcatcatttctgtacatcccgtgccatggcttcttttggcatcctggtggttcactttgctgctgtagtccgttgtttgggagaatggatgttttttttcttcttataatggaaaatgtcgagatggcgtgcagtcagtttaaatgataaaagttataagcttttcctttcgcatatagttttgatacaatttgtcatggttgtgaatgcaagcgaatcatatcaaatccctgagaatgctgtaacgcggtggtcacatgtgtggggatttttttattttatccccaggaaaaaatattttaattttcatc

SEQ ID NO: 65084 - DNA, 5359 bp, Zea Mays
gttacttttaaccccttccatatgaaaccgttggatctggattagatgctctggatagtttgattgcacgcttgcaccaaaatgagtgattgcacagaatatgtcctccttataaggccttgttcggttattcctattatacatagatttgatgggactgaaaaaaatttaaaagaacttttacttatttgggatttaaacccatcaaatctcactcaatccacatggattgagccagagaccttatgccaatgccatgcgcgcactgccatgcccactgaagcaacgagcctctctaactcccagcccgtcgccggcgctgccttcctctaccgtctctctcatccatccctctctgccctcctcctatgcccccctccccaatgcctccgcggcggagctccgccaagcgacaagatttgtcccccctcccctgccaacgcctccgttgagcatcggacgcgaatctcctcaccgtccgcagcttgttcggccgtcgactacgtcccctcccgggactcatactaggcggcaatggcacgacaaccccacttatatttctttgaagatgcaagctgccatgtagtcccgagaggcttacaagatcacagattttattcattgctgagagattttttttgcagaatgctttatgacgtgtgtctaattgattgcatttgcattcacccggacggttagttgtgcctttctctgtaactattttctccgatgtagttcactcccatacaggaatactgcattcctttgattttttttttttttttgcctcaaactaactaggagaactgcgtggtaaaatcaagaagagcagcattccttttaacttattagaaccattattaagagagatgttaaatgctcaaatgcctgaaatctaaactcactcgaccaatatgagccacatgatgagcacctgtgctgctcaccatcctcatgtccagcagcgacccacatccacctctgccgccgtgctagcccacccaagcttttagttccccgccaccagcaccaccaatcaccaaccactgatcttcgagcagcacagtaagcagcgcccctctgcccctgcccaccatttgctggcatcaccagtctggcttgcatccatggcccttcctctaagactgacacagctaccccctgccactcacgcacaccaggtaatctgaaatctcgtaatttcaaacgcctgaagcataggttgtatttgtgtttaaactgccaatcattattatttttagtattctgttcagttggttgagaaggaactgaaccctggctgcatgtgtattcttttcctcagtggggaaatcatgatgtccgaactactagtcggtggctaaatgttgtgtgatcatcttgttttgtattgatcaggtgagcattagtaccagttaattgttaaatgatgcagaagttgaatttgtactaacttaactacatattttcgtttacatataaactgagttcgcttaatggtttccatgctacagaaattgctatcctggcttacagttctgttttgaaaatgaaatgagaatgtgatctgaatgttaatagtttgctgtgggacactcctttttttgcggaattttctcaagaacactgttatagtgtaaattggccatcaaacacagtacattcgatcagtgtcatacaacaaataaaatagatttttggaagttttactataggacaccaataatattctgaaccataacagtgtctttaagtaacagccattgtttatataagtgtcccactgtaaattttgccttgttaaaataattatattggtgggctgtggttaccacaatttgtttgcgacataactgagatcactatttgttctctaacttttctccagcttcactagcctgtttggaaaaatgttattattctggttgtggtctaaattttatgcatcatattccataacttaccaatttgtgatcaaggaacaacttcaacaatatattgggacagttgttaaatattattgtccactccataaaatattacattgaaactgtgaacatcagtttaataacactgaaaagaactctttcttctgagttctgattgtatagtctttggataattatgcccctgggtattcttacctacaccctcgtctctccacatcaccttacccatggaaggagggaagtagagactttaagctcaagaggggatgcttatgttctctattaacctgtttttcatatctaatgtaattgtgtgttagtattttttgtggatgatgacagggtgtctgacgatgtatttgaagcacctcaacaaaagctggagtgaatttgaaccactaaataattagaaaggtcaccctgctgcttgatgtctccctcatgtaacaccttaacgtttcttctttgcccctcccctgttttcttttgcttcccctgcaacctgtcagacaccgatcaagcaggtagcatgtagcctatgtaatccctggtcttttaggtctggcaccattcataccctttcccaaacgtaaaataaggtgggattgcacttgcacctaggagtggtaatgacctctaaattttatactataaaatttaagaatcggatcgggctctatttctattcatttttgaactaaaactaattaagggctcaaacaaattgtgaaggaacatgtggatcattcatttgagggctcaaacaaaaaatcatttgggatccaagtttttatttctctgggtcattcatttgacacaaatacctgtattttggagcaagaaaacgtggaacaaaaatgataacctactagaattacctaatgtgtacccacattcacctctactatcatatcgtcagtggagtgcaacatggttgtgtgttccgttctgcggtttaaacatagattgagtttcacttaatggttcatgattctagttgtcatgtggaattcggcgcctaagcagttcatgtcttgctcttctctactatgtactctagtacttgtcatggaacataactaatcaatctttattaaaatgttgtgaccaatatatattttaattaagttgggtttgctactttatattttgattgacaccttattcgtggttggatggctgatatgagggcgcctttacagtgcaatggagaccttaaagtttgggattagtagatggtttggtccttaagcaagatgtcctcggtcaataccgatggaaactctggttcctacagcagcaaatcagcctaccaaactttttcttggggactatcaaatttgcccccaggagaagaacttgatcgcatgtttggacaggaccccctggttcttccggctattgagggaagacagtgtgggatggatcctggatgactagcattacatctatcatacatttgtccagttctctggagttttttatcctttgttttgtaccttcctatgtttctccatttgtcaaggcctaaattccatctttagttacttctggaaatttttctcccatttatttgattccgatttctggataaaagttgctccttggtaatcatgaggagggctctgaaaagatccttgctcagatggtcgccaaggattgtacaatctcaagaattttgtcagtgcttatggttgatttgggctcttctaccagggggtagttgcagcagtcgctagccaagaagatcattatagtttgctgctttataaggtgacacaagggttcctgggtttctcagtctttgactgagagcttctttgtgcaataccatggtgcggtttttcctcaccggccgagtatctgtttttgaaggtagggtttgtacttttcttcttttttaacaaagagataaattgctcgcctttgtgttccagaagaaaaatctcagcaattgtcaaacttcagtttttagttaaggttaatagataccaaacaaaggatactatactattgtttaatacatcgtatattatttggctagtgccagcctttgggctatagaatcctctaccaaataagtagcagatttatttggatggaaggagtgtatctcttattaaatacatacgacaaacatttaaggaacgaacgtcacaaggttatcaatagtaagcttgactgaccttgagttgaacaaaaactttcatgaagacgtatctttggcaatgaattggacaggtaaggttcaagaacacttcagctaaataaatgagtagagttaacatatatctttctcaagggatgggggactaggggagtcactagcattgattgtgcaccttgaatccctttcttttcttatataaggaggtatcctctacactaaactacgaacaagtatcagagacactctctgtcaggtgtctgcaatggacaacctcaaaacccattctgaatatgccgatcaacctcaggggccacaagcaaatgccgtttctttcgctttaccaacaggtcaggtcttagacttagatagtcatatgattggccaacagcacacgaatctgtcatcattctggttctcccttgagcagcacaggctgcagttggatcaggcccttcaactccataaccaacagttgcaggtgtcactgcagcagcaaatatctatgcagaactcaactctactgaaccttgtggaatctatgacaagagatgtgctgatgcaaaagaatgatgagatagccagcctgcgagtagagttgcagaggaaccaagaggatctagaaacaacactgcatgacagagatgagtggatgaaggtcgctatggccgcttatgaaattaatcagacacttatccgcatgcttcgtaccgtgcagctggaagcgaattctcatgtttcatctaatgatctagatgctccaagttatagtgaagcatcgagcatggcgaggacagcattggagacagcacagcccaatctgatctgcaaggtctgcaactctggtaatgccggcgtacttatgttgccatgccaacacctctgtgcatgtaagccgtgcgtagcctggcttgcgacatgtcctatctgtggtgctgtgaagactgatgctatcgaggctcgatttgtttataagaagtaaaaacgccaaagcagcaatccgaattcgtttataagagcatgtcagctttcctttttttcgtgttaggtgttataggctgtagccttgttctgttatgcattctggtataatgttctggtagtcttcatgccgatgccatgtttctggattctcaaaatgttttgatatagttgccatgttgtcttcggttactatatttttctgaagtatctgtcttttcttatatggaattaacttccattgaactacggtgttgacgcg

SEQ ID NO: 65085 - DNA, 5243 bp, Zea Mays
gttacttttaaccccttccatatgaaaccgttggatctggattagatgctctggatagtttgattgcacgcttgcaccaaaatgagtgattgcacagaatatgtcctccttataaggccttgttcggttattcctattatacatagatttgatgggactgaaaaaaatttaaaagaacttttacttatttgggatttaaacccatcaaatctcactcaatccacatggattgagccagagaccttatgccaatgccatgcgcgcactgccatgcccactgaagcaacgagcctctctaactcccagcccgtcgccggcgctgccttcctctaccgtctctctcatccatccctctctgccctcctcctatgcccccctccccaatgcctccgcggcggagctccgccaagcgacaagatttgtcccccctcccctgccaacgcctccgttgagcatcggacgcgaatctcctcaccgtccgcagcttgttcggccgtcgactacgtcccctcccgggactcatactagaatgctttatgacgtgtgtctaattgattgcatttgcattcacccggacggttagttgtgcctttctctgtaactattttctccgatgtagttcactcccatacaggaatactgcattcctttgattttttttttttttttgcctcaaactaactaggagaactgcgtggtaaaatcaagaagagcagcattccttttaacttattagaaccattattaagagagatgttaaatgctcaaatgcctgaaatctaaactcactcgaccaatatgagccacatgatgagcacctgtgctgctcaccatcctcatgtccagcagcgacccacatccacctctgccgccgtgctagcccacccaagcttttagttccccgccaccagcaccaccaatcaccaaccactgatcttcgagcagcacagtaagcagcgcccctctgcccctgcccaccatttgctggcatcaccagtctggcttgcatccatggcccttcctctaagactgacacagctaccccctgccactcacgcacaccaggtaatctgaaatctcgtaatttcaaacgcctgaagcataggttgtatttgtgtttaaactgccaatcattattatttttagtattctgttcagttggttgagaaggaactgaaccctggctgcatgtgtattcttttcctcagtggggaaatcatgatgtccgaactactagtcggtggctaaatgttgtgtgatcatcttgttttgtattgatcaggtgagcattagtaccagttaattgttaaatgatgcagaagttgaatttgtactaacttaactacatattttcgtttacatataaactgagttcgcttaatggtttccatgctacagaaattgctatcctggcttacagttctgttttgaaaatgaaatgagaatgtgatctgaatgttaatagtttgctgtgggacactcctttttttgcggaattttctcaagaacactgttatagtgtaaattggccatcaaacacagtacattcgatcagtgtcatacaacaaataaaatagatttttggaagttttactataggacaccaataatattctgaaccataacagtgtctttaagtaacagccattgtttatataagtgtcccactgtaaattttgccttgttaaaataattatattggtgggctgtggttaccacaatttgtttgcgacataactgagatcactatttgttctctaacttttctccagcttcactagcctgtttggaaaaatgttattattctggttgtggtctaaattttatgcatcatattccataacttaccaatttgtgatcaaggaacaacttcaacaatatattgggacagttgttaaatattattgtccactccataaaatattacattgaaactgtgaacatcagtttaataacactgaaaagaactctttcttctgagttctgattgtatagtctttggataattatgcccctgggtattcttacctacaccctcgtctctccacatcaccttacccatggaaggagggaagtagagactttaagctcaagaggggatgcttatgttctctattaacctgtttttcatatctaatgtaattgtgtgttagtattttttgtggatgatgacagggtgtctgacgatgtatttgaagcacctcaacaaaagctggagtgaatttgaaccactaaataattagaaaggtcaccctgctgcttgatgtctccctcatgtaacaccttaacgtttcttctttgcccctcccctgttttcttttgcttcccctgcaacctgtcagacaccgatcaagcaggtagcatgtagcctatgtaatccctggtcttttaggtctggcaccattcataccctttcccaaacgtaaaataaggtgggattgcacttgcacctaggagtggtaatgacctctaaattttatactataaaatttaagaatcggatcgggctctatttctattcatttttgaactaaaactaattaagggctcaaacaaattgtgaaggaacatgtggatcattcatttgagggctcaaacaaaaaatcatttgggatccaagtttttatttctctgggtcattcatttgacacaaatacctgtattttggagcaagaaaacgtggaacaaaaatgataacctactagaattacctaatgtgtacccacattcacctctactatcatatcgtcagtggagtgcaacatggttgtgtgttccgttctgcggtttaaacatagattgagtttcacttaatggttcatgattctagttgtcatgtggaattcggcgcctaagcagttcatgtcttgctcttctctactatgtactctagtacttgtcatggaacataactaatcaatctttattaaaatgttgtgaccaatatatattttaattaagttgggtttgctactttatattttgattgacaccttattcgtggttggatggctgatatgagggcgcctttacagtgcaatggagaccttaaagtttgggattagtagatggtttggtccttaagcaagatgtcctcggtcaataccgatggaaactctggttcctacagcagcaaatcagcctaccaaactttttcttggggactatcaaatttgcccccaggagaagaacttgatcgcatgtttggacaggaccccctggttcttccggctattgagggaagacagtgtgggatggatcctggatgactagcattacatctatcatacatttgtccagttctctggagttttttatcctttgttttgtaccttcctatgtttctccatttgtcaaggcctaaattccatctttagttacttctggaaatttttctcccatttatttgattccgatttctggataaaagttgctccttggtaatcatgaggagggctctgaaaagatccttgctcagatggtcgccaaggattgtacaatctcaagaattttgtcagtgcttatggttgatttgggctcttctaccagggggtagttgcagcagtcgctagccaagaagatcattatagtttgctgctttataaggtgacacaagggttcctgggtttctcagtctttgactgagagcttctttgtgcaataccatggtgcggtttttcctcaccggccgagtatctgtttttgaaggtagggtttgtacttttcttcttttttaacaaagagataaattgctcgcctttgtgttccagaagaaaaatctcagcaattgtcaaacttcagtttttagttaaggttaatagataccaaacaaaggatactatactattgtttaatacatcgtatattatttggctagtgccagcctttgggctatagaatcctctaccaaataagtagcagatttatttggatggaaggagtgtatctcttattaaatacatacgacaaacatttaaggaacgaacgtcacaaggttatcaatagtaagcttgactgaccttgagttgaacaaaaactttcatgaagacgtatctttggcaatgaattggacaggtaaggttcaagaacacttcagctaaataaatgagtagagttaacatatatctttctcaagggatgggggactaggggagtcactagcattgattgtgcaccttgaatccctttcttttcttatataaggaggtatcctctacactaaactacgaacaagtatcagagacactctctgtcaggtgtctgcaatggacaacctcaaaacccattctgaatatgccgatcaacctcaggggccacaagcaaatgccgtttctttcgctttaccaacaggtcaggtcttagacttagatagtcatatgattggccaacagcacacgaatctgtcatcattctggttctcccttgagcagcacaggctgcagttggatcaggcccttcaactccataaccaacagttgcaggtgtcactgcagcagcaaatatctatgcagaactcaactctactgaaccttgtggaatctatgacaagagatgtgctgatgcaaaagaatgatgagatagccagcctgcgagtagagttgcagaggaaccaagaggatctagaaacaacactgcatgacagagatgagtggatgaaggtcgctatggccgcttatgaaattaatcagacacttatccgcatgcttcgtaccgtgcagctggaagcgaattctcatgtttcatctaatgatctagatgctccaagttatagtgaagcatcgagcatggcgaggacagcattggagacagcacagcccaatctgatctgcaaggtctgcaactctggtaatgccggcgtacttatgttgccatgccaacacctctgtgcatgtaagccgtgcgtagcctggcttgcgacatgtcctatctgtggtgctgtgaagactgatgctatcgaggctcgatttgtttataagaagtaaaaacgccaaagcagcaatccgaattcgtttataagagcatgtcagctttcctttttttcgtgttaggtgttataggctgtagccttgttctgttatgcattctggtataatgttctggtagtcttcatgccgatgccatgtttctggattctcaaaatgttttgatatagttgccatgttgtcttcggttactatatttttctgaagtatctgtcttttcttatatggaattaacttccattgaactacggtgttgacgcg

SEQ ID NO: 65086 - DNA, 4613 bp, Zea Mays
gttacttttaaccccttccatatgaaaccgttggatctggattagatgctctggatagtttgattgcacgcttgcaccaaaatgagtgattgcacagaatatgtcctccttataaggccttgttcggttattcctattatacatagatttgatgggactgaaaaaaatttaaaagaacttttacttatttgggatttaaacccatcaaatctcactcaatccacatggattgagccagagaccttatgccaatgccatgcgcgcactgccatgcccactgaagcaacgagcctctctaactcccagcccgtcgccggcgctgccttcctctaccgtctctctcatccatccctctctgccctcctcctatgcccccctccccaatgcctccgcggcggagctccgccaagcgacaagatttgtcccccctcccctgccaacgcctccgttgagcatcggacgcgaatctcctcaccgtccgcagcttgttcggccgtcgactacgtcccctcccgggactcatactaggcggcaatggcacgacaaccccacttatatttctttgaagatgcaagctgccatgtagtcccgagaggcttacaagatcacagattttattcattgctgagagattttttttgcagaatgctttatgacgtgtgtctaattgattgcatttgcattcacccggacgtggggaaatcatgatgtccgaactactagtcggtggctaaatgttgtgtgatcatcttgttttgtattgatcagaaattgctatcctggcttacagttctgttttgaaaatgaaatgagaatgtgatctgaatgttaatagtttgctgtgggacactcctttttttgcggaattttctcaagaacactgttatagtgtaaattggccatcaaacacagtacattcgatcagtgtcatacaacaaataaaatagatttttggaagttttactataggacaccaataatattctgaaccataacagtgtctttaagtaacagccattgtttatataagtgtcccactgtaaattttgccttgttaaaataattatattggtgggctgtggttaccacaatttgtttgcgacataactgagatcactatttgttctctaacttttctccagcttcactagcctgtttggaaaaatgttattattctggttgtggtctaaattttatgcatcatattccataacttaccaatttgtgatcaaggaacaacttcaacaatatattgggacagttgttaaatattattgtccactccataaaatattacattgaaactgtgaacatcagtttaataacactgaaaagaactctttcttctgagttctgattgtatagtctttggataattatgcccctgggtattcttacctacaccctcgtctctccacatcaccttacccatggaaggagggaagtagagactttaagctcaagaggggatgcttatgttctctattaacctgtttttcatatctaatgtaattgtgtgttagtattttttgtggatgatgacagggtgtctgacgatgtatttgaagcacctcaacaaaagctggagtgaatttgaaccactaaataattagaaaggtcaccctgctgcttgatgtctccctcatgtaacaccttaacgtttcttctttgcccctcccctgttttcttttgcttcccctgcaacctgtcagacaccgatcaagcaggtagcatgtagcctatgtaatccctggtcttttaggtctggcaccattcataccctttcccaaacgtaaaataaggtgggattgcacttgcacctaggagtggtaatgacctctaaattttatactataaaatttaagaatcggatcgggctctatttctattcatttttgaactaaaactaattaagggctcaaacaaattgtgaaggaacatgtggatcattcatttgagggctcaaacaaaaaatcatttgggatccaagtttttatttctctgggtcattcatttgacacaaatacctgtattttggagcaagaaaacgtggaacaaaaatgataacctactagaattacctaatgtgtacccacattcacctctactatcatatcgtcagtggagtgcaacatggttgtgtgttccgttctgcggtttaaacatagattgagtttcacttaatggttcatgattctagttgtcatgtggaattcggcgcctaagcagttcatgtcttgctcttctctactatgtactctagtacttgtcatggaacataactaatcaatctttattaaaatgttgtgaccaatatatattttaattaagttgggtttgctactttatattttgattgacaccttattcgtggttggatggctgatatgagggcgcctttacagtgcaatggagaccttaaagtttgggattagtagatggtttggtccttaagcaagatgtcctcggtcaataccgatggaaactctggttcctacagcagcaaatcagcctaccaaactttttcttggggactatcaaatttgcccccaggagaagaacttgatcgcatgtttggacaggaccccctggttcttccggctattgagggaagacagtgtgggatggatcctggatgactagcattacatctatcatacatttgtccagttctctggagttttttatcctttgttttgtaccttcctatgtttctccatttgtcaaggcctaaattccatctttagttacttctggaaatttttctcccatttatttgattccgatttctggataaaagttgctccttggtaatcatgaggagggctctgaaaagatccttgctcagatggtcgccaaggattgtacaatctcaagaattttgtcagtgcttatggttgatttgggctcttctaccagggggtagttgcagcagtcgctagccaagaagatcattatagtttgctgctttataaggtgacacaagggttcctgggtttctcagtctttgactgagagcttctttgtgcaataccatggtgcggtttttcctcaccggccgagtatctgtttttgaaggtagggtttgtacttttcttcttttttaacaaagagataaattgctcgcctttgtgttccagaagaaaaatctcagcaattgtcaaacttcagtttttagttaaggttaatagataccaaacaaaggatactatactattgtttaatacatcgtatattatttggctagtgccagcctttgggctatagaatcctctaccaaataagtagcagatttatttggatggaaggagtgtatctcttattaaatacatacgacaaacatttaaggaacgaacgtcacaaggttatcaatagtaagcttgactgaccttgagttgaacaaaaactttcatgaagacgtatctttggcaatgaattggacaggtaaggttcaagaacacttcagctaaataaatgagtagagttaacatatatctttctcaagggatgggggactaggggagtcactagcattgattgtgcaccttgaatccctttcttttcttatataaggaggtatcctctacactaaactacgaacaagtatcagagacactctctgtcaggtgtctgcaatggacaacctcaaaacccattctgaatatgccgatcaacctcaggggccacaagcaaatgccgtttctttcgctttaccaacaggtcaggtcttagacttagatagtcatatgattggccaacagcacacgaatctgtcatcattctggttctcccttgagcagcacaggctgcagttggatcaggcccttcaactccataaccaacagttgcaggtgtcactgcagcagcaaatatctatgcagaactcaactctactgaaccttgtggaatctatgacaagagatgtgctgatgcaaaagaatgatgagatagccagcctgcgagtagagttgcagaggaaccaagaggatctagaaacaacactgcatgacagagatgagtggatgaaggtcgctatggccgcttatgaaattaatcagacacttatccgcatgcttcgtaccgtgcagctggaagcgaattctcatgtttcatctaatgatctagatgctccaagttatagtgaagcatcgagcatggcgaggacagcattggagacagcacagcccaatctgatctgcaaggtctgcaactctggtaatgccggcgtacttatgttgccatgccaacacctctgtgcatgtaagccgtgcgtagcctggcttgcgacatgtcctatctgtggtgctgtgaagactgatgctatcgaggctcgatttgtttataagaagtaaaaacgccaaagcagcaatccgaattcgtttataagagcatgtcagctttcctttttttcgtgttaggtgttataggctgtagccttgttctgttatgcattctggtataatgttctggtagtcttcatgccgatgccatgtttctggattctcaaaatgttttgatatagttgccatgttgtcttcggttactatatttttctgaagtatctgtcttttcttatatggaattaacttccattgaactacggtgttgacgcg

SEQ ID NO: 65087 - DNA, 4240 bp, Zea Mays
gttacttttaaccccttccatatgaaaccgttggatctggattagatgctctggatagtttgattgcacgcttgcaccaaaatgagtgattgcacagaatatgtcctccttataaggccttgttcggttattcctattatacatagatttgatgggactgaaaaaaatttaaaagaacttttacttatttgggatttaaacccatcaaatctcactcaatccacatggattgagccagagaccttatgccaatgccatgcgcgcactgccatgcccactgaagcaacgagcctctctaactcccagcccgtcgccggcgctgccttcctctaccgtctctctcatccatccctctctgccctcctcctatgcccccctccccaatgcctccgcggcggagctccgccaagcgacaagatttgtcccccctcccctgccaacgcctccgttgagcatcggacgcgaatctcctcaccgtccgcagcttgttcggccgtcgactacgtcccctcccgggactcatactagtggggaaatcatgatgtccgaactactagtcggtggctaaatgttgtgtgatcatcttgttttgtattgatcagaaattgctatcctggcttacagttctgttttgaaaatgaaatgagaatgtgatctgaatgttaatagtttgctgtgggacactcctttttttgcggaattttctcaagaacactgttatagtgtaaattggccatcaaacacagtacattcgatcagtgtcatacaacaaataaaatagatttttggaagttttactataggacaccaataatattctgaaccataacagtgtctttaagtaacagccattgtttatataagtgtcccactgtaaattttgccttgttaaaataattatattggtgggctgtggttaccacaatttgtttgcgacataactgagatcactatttgttctctaacttttctccagcttcactagcctgtttggaaaaatgttattattctggttgtggtctaaattttatgcatcatattccataacttaccaatttgtgatcaaggaacaacttcaacaatatattgggacagttgttaaatattattgtccactccataaaatattacattgaaactgtgaacatcagtttaataacactgaaaagaactctttcttctgagttctgattgtatagtctttggataattatgcccctgggtattcttacctacaccctcgtctctccacatcaccttacccatggaaggagggaagtagagactttaagctcaagaggggatgcttatgttctctattaacctgtttttcatatctaatgtaattgtgtgttagtattttttgtggatgatgacagggtgtctgacgatgtatttgaagcacctcaacaaaagctggagtgaatttgaaccactaaataattagaaaggtagcatgtagcctatgtaatccctggtcttttaggtctggcaccattcataccctttcccaaacgtaaaataaggtgggattgcacttgcacctaggagtggtaatgacctctaaattttatactataaaatttaagaatcggatcgggctctatttctattcatttttgaactaaaactaattaagggctcaaacaaattgtgaaggaacatgtggatcattcatttgagggctcaaacaaaaaatcatttgggatccaagtttttatttctctgggtcattcatttgacacaaatacctgtattttggagcaagaaaacgtggaacaaaaatgataacctactagaattacctaatgtgtacccacattcacctctactatcatatcgtcagtggagtgcaacatggttgtgtgttccgttctgcggtttaaacatagattgagtttcacttaatggttcatgattctagttgtcatgtggaattcggcgcctaagcagttcatgtcttgctcttctctactatgtactctagtacttgtcatggaacataactaatcaatctttattaaaatgttgtgaccaatatatattttaattaagttgggtttgctactttatattttgattgacaccttattcgtggttggatggctgatatgagggcgcctttacagtgcaatggagaccttaaagtttgggattagtagatggtttggtccttaagcaagatgtcctcggtcaataccgatggaaactctggttcctacagcagcaaatcagcctaccaaactttttcttggggactatcaaatttgcccccaggagaagaacttgatcgcatgtttggacaggaccccctggttcttccggctattgagggaagacagtgtgggatggatcctggatgactagcattacatctatcatacatttgtccagttctctggagttttttatcctttgttttgtaccttcctatgtttctccatttgtcaaggcctaaattccatctttagttacttctggaaatttttctcccatttatttgattccgatttctggataaaagttgctccttggtaatcatgaggagggctctgaaaagatccttgctcagatggtcgccaaggattgtacaatctcaagaattttgtcagtgcttatggttgatttgggctcttctaccagggggtagttgcagcagtcgctagccaagaagatcattatagtttgctgctttataaggtgacacaagggttcctgggtttctcagtctttgactgagagcttctttgtgcaataccatggtgcggtttttcctcaccggccgagtatctgtttttgaaggtagggtttgtacttttcttcttttttaacaaagagataaattgctcgcctttgtgttccagaagaaaaatctcagcaattgtcaaacttcagtttttagttaaggttaatagataccaaacaaaggatactatactattgtttaatacatcgtatattatttggctagtgccagcctttgggctatagaatcctctaccaaataagtagcagatttatttggatggaaggagtgtatctcttattaaatacatacgacaaacatttaaggaacgaacgtcacaaggttatcaatagtaagcttgactgaccttgagttgaacaaaaactttcatgaagacgtatctttggcaatgaattggacaggtaaggttcaagaacacttcagctaaataaatgagtagagttaacatatatctttctcaagggatgggggactaggggagtcactagcattgattgtgcaccttgaatccctttcttttcttatataaggaggtatcctctacactaaactacgaacaagtatcagagacactctctgtcaggtgtctgcaatggacaacctcaaaacccattctgaatatgccgatcaacctcaggggccacaagcaaatgccgtttctttcgctttaccaacaggtcaggtcttagacttagatagtcatatgattggccaacagcacacgaatctgtcatcattctggttctcccttgagcagcacaggctgcagttggatcaggcccttcaactccataaccaacagttgcaggtgtcactgcagcagcaaatatctatgcagaactcaactctactgaaccttgtggaatctatgacaagagatgtgctgatgcaaaagaatgatgagatagccagcctgcgagtagagttgcagaggaaccaagaggatctagaaacaacactgcatgacagagatgagtggatgaagatgctccaagttatagtgaagcatcgagcatggcgaggacagcattggagacagcacagcccaatctgatctgcaaggtctgcaactctggtaatgccggcgtacttatgttgccatgccaacacctctgtgcatgtaagccgtgcgtagcctggcttgcgacatgtcctatctgtggtgctgtgaagactgatgctatcgaggctcgatttgtttataagaagtaaaaacgccaaagcagcaatccgaattcgtttataagagcatgtcagctttcctttttttcgtgttaggtgttataggctgtagccttgttctgttatgcattctggtataatgttctggtagtcttcatgccgatgccatgtttctggattctcaaaatgttttgatatagttgccatgttgtcttcggttactatatttttctgaagtatctgtcttttcttatatggaattaacttccattgaactacggtgttgacgcg

SEQ ID NO: 65088 - DNA, 3670 bp, Zea Mays
gttacttttaaccccttccatatgaaaccgttggatctggattagatgctctggatagtttgattgcacgcttgcaccaaaatgagtgattgcacagaatatgtcctccttataaggccttgttcggttattcctattatacatagatttgatgggactgaaaaaaatttaaaagaacttttacttatttgggatttaaacccatcaaatctcactcaatccacatggattgagccagagaccttatgccaatgccatgcgcgcactgccatgcccactgaagcaacgagcctctctaactcccagcccgtcgccggcgctgccttcctctaccgtctctctcatccatccctctctgccctcctcctatgcccccctccccaatgcctccgcggcggagctccgccaagcgacaagatttgtcccccctcccctgccaacgcctccgttgagcatcggacgcgaatctcctcaccgtccgcagcttgttcggccgtcgactacgtcccctcccgggactcatactagtggggaaatcatgatgtccgaactactagtcggtggctaaatgttgtgtgatcatcttgttttgtattgatcagggtgtctgacgatgtatttgaagcacctcaacaaaagctggagtgaatttgaaccactaaataattagaaaggtcaccctgctgcttgatgtctccctcatgtaacaccttaacgtttcttctttgcccctcccctgttttcttttgcttcccctgcaacctgtcagacaccgatcaagcaggtagcatgtagcctatgtaatccctggtcttttaggtctggcaccattcataccctttcccaaacgtaaaataaggtgggattgcacttgcacctaggagtggtaatgacctctaaattttatactataaaatttaagaatcggatcgggctctatttctattcatttttgaactaaaactaattaagggctcaaacaaattgtgaaggaacatgtggatcattcatttgagggctcaaacaaaaaatcatttgggatccaagtttttatttctctgggtcattcatttgacacaaatacctgtattttggagcaagaaaacgtggaacaaaaatgataacctactagaattacctaatgtgtacccacattcacctctactatcatatcgtcagtggagtgcaacatggttgtgtgttccgttctgcggtttaaacatagattgagtttcacttaatggttcatgattctagttgtcatgtggaattcggcgcctaagcagttcatgtcttgctcttctctactatgtactctagtacttgtcatggaacataactaatcaatctttattaaaatgttgtgaccaatatatattttaattaagttgggtttgctactttatattttgattgacaccttattcgtggttggatggctgatatgagggcgcctttacagtgcaatggagaccttaaagtttgggattagtagatggtttggtccttaagcaagatgtcctcggtcaataccgatggaaactctggttcctacagcagcaaatcagcctaccaaactttttcttggggactatcaaatttgcccccaggagaagaacttgatcgcatgtttggacaggaccccctggttcttccggctattgagggaagacagtgtgggatggatcctggatgactagcattacatctatcatacatttgtccagttctctggagttttttatcctttgttttgtaccttcctatgtttctccatttgtcaaggcctaaattccatctttagttacttctggaaatttttctcccatttatttgattccgatttctggataaaagttgctccttggtaatcatgaggagggctctgaaaagatccttgctcagatggtcgccaaggattgtacaatctcaagaattttgtcagtgcttatggttgatttgggctcttctaccagggggtagttgcagcagtcgctagccaagaagatcattatagtttgctgctttataaggtgacacaagggttcctgggtttctcagtctttgactgagagcttctttgtgcaataccatggtgcggtttttcctcaccggccgagtatctgtttttgaaggtagggtttgtacttttcttcttttttaacaaagagataaattgctcgcctttgtgttccagaagaaaaatctcagcaattgtcaaacttcagtttttagttaaggttaatagataccaaacaaaggatactatactattgtttaatacatcgtatattatttggctagtgccagcctttgggctatagaatcctctaccaaataagtagcagatttatttggatggaaggagtgtatctcttattaaatacatacgacaaacatttaaggaacgaacgtcacaaggttatcaatagtaagcttgactgaccttgagttgaacaaaaactttcatgaagacgtatctttggcaatgaattggacaggtaaggttcaagaacacttcagctaaataaatgagtagagttaacatatatctttctcaagggatgggggactaggggagtcactagcattgattgtgcaccttgaatccctttcttttcttatataaggaggtatcctctacactaaactacgaacaagtatcagagacactctctgtcaggtgtctgcaatggacaacctcaaaacccattctgaatatgccgatcaacctcaggggccacaagcaaatgccgtttctttcgctttaccaacaggtcaggtcttagacttagatagtcatatgattggccaacagcacacgaatctgtcatcattctggttctcccttgagcagcacaggctgcagttggatcaggcccttcaactccataaccaacagttgcaggtgtcactgcagcagcaaatatctatgcagaactcaactctactgaaccttgtggaatctatgacaagagatgtgctgatgcaaaagaatgatgagatagccagcctgcgagtagagttgcagaggaaccaagaggatctagaaacaacactgcatgacagagatgagtggatgaaggtcgctatggccgcttatgaaattaatcagacacttatccgcatgcttcgtaccgtgcagctggaagcgaattctcatgtttcatctaatgatctagatgctccaagttatagtgaagcatcgagcatggcgaggacagcattggagacagcacagcccaatctgatctgcaaggtctgcaactctggtaatgccggcgtacttatgttgccatgccaacacctctgtgcatgtaagccgtgcgtagcctggcttgcgacatgtcctatctgtggtgctgtgaagactgatgctatcgaggctcgatttgtttataagaagtaaaaacgccaaagcagcaatccgaattcgtttataagagcatgtcagctttcctttttttcgtgttaggtgttataggctgtagccttgttctgttatgcattctggtataatgttctggtagtcttcatgccgatgccatgtttctggattctcaaaatgttttgatatagttgccatgttgtcttcggttactatatttttctgaagtatctgtcttttcttatatggaattaacttccattgaactacggtgttgacgcg

SEQ ID NO: 65089 - DNA, 981 bp, Zea Mays
caagcttcttcatctcctccgtccttcaccgcttccttgaccctctctctcccccaccccacccacggaaagcttcgagctttcactctataccccagggagaaggaaggaagccggcacagtctactggccttgtggtgccggcaactgactaggatcgagaaatagggttcttggagagcggccggtccatggcacagcggggcgagctggggcggcagctcccgctgagaggccccctcaaagccctagaggcagacatccaccacgctaacgccatggcagatgctattcagaggaattatggtggcgcatgtgtgcagatgaggctgtcgttcagctccctggctccattgtttttgtacttcatccaatggctggactgcggctgctgttatgcccttcccagctatttaggattgtttcacattctcatatgcaaggtttatgctgatggagatagctcagtgtcgacatatgaaaggcgggcaagccttagggaattctacggtagtctctagcctatatgagcgtgttgtaacccctgcatcaatctgctttggactggaattctcataagtcttcttccattgcagcaattatctatccgattctgcagcagcttgagagtagtttgatcgagagggacctgaaagggaagggccgatgcaaggatatagtgagtaggaggaggatggaggattggaaaaaggtttccggtagggatgtggaaagggaggatgaatgcgggatttgcatggaggcatgcaccaagatggtcctgcctaattgcagtcatgcaatgtgcataaagtgctatagggactggtataagagatcagagtcttgccctttctgccgaggaagcctcaaaagaatccgctcgacagacctttgggtgcttacaaattccaacgatgtcatcgaccctgcacatttagaaaaggaaaacccaaggaggtcctggttgaggatacgaat

SEQ ID NO: 65090 - DNA, 822 bp, Zea Mays
aagggttgggcaaacacccagggggactcacataccggaatccgagcactggcgcgcgtgacgacggggaaaggcggatctatggtggggctcaactccggcgacgaattgaggtggctccgaggattccccggcgggtaagggttgcggtagtattccttgaaccaatctgacttctcgccagcaactcgctggggtcagggacggtgcggatgactccccggtgcagcggcactcccccacacgacggagctggttctctctttcttcgatgacggcgcggcgagcggggagtaagcgagaatagggagcgaacgagtccctgggcactacggttttatatcccgcagggatggtcacgccgagctggcggattacgcgcggcgatggcggcgtccgcagcggctgcgtggttacggcaggggaggacgaccaacagtgctctagagccgatgatagctgggccctcgttggcagcaattattcccccaagtccgtggagtcagtccgagactgaaacagcggacccgcgctccagcgacagatgatggaacgcgactgacatagtcggcccaccagtcgacgtcgagcatgtatcggagggcgcgtatgggtggataacgaggcgggcccgcgtgccagtgatccacactctccatggctgcctggaccaagcgcgtggaaggaaagagcaatgggccaacagtgaggcggtcaacccatatagggggatatgaagtttgtggaaagacagctgtttaatgagagatattaagtgaacaatatgatgtggtactgaagcatcaaaacagaaaatgtgat

SEQ ID NO: 65091 - DNA, 1522 bp, Zea Mays
caatttcaaacttctatattttaaaacttccaccataattgacgcttcattatatatgtgaagcatcccattttttttcaacatttatatatttcaagtaaaaactgaatatacaaaaaaaatgagtcactaaatgtgtcattaggcatgtgatttctggacccagtttccactcaaagaactgggcttacacttgtttttattttctcttcctaataaactagcggcaaaacttttgcttccctttcagagaaaaaatatgtgacattaaaaatagttaccaacactacactattgctaaatcctagtgacatgatgttacataaagttgaagtaatggctgaagtcgcatatcaagactcaaaagatttaaatcatcaaacaggaaataacttcagtagtttggttggtggcgtgcactactgtacaagcattgcgactctagtgtgcagatcaatttcatgagattgcgagtagtacatattctatgaaaattggttgttaatctaacacaagtactgttctacacctggatcacctaaaaaacggagaattacaattagtaattgttacttagaagtagctatactgttagcaattactttgaagtaaccattacaaaagtgactcagtaatccgaactttcagaagtattggtttagatagttgtcaactcagacggattatctcagcttttggcttctcaaatgtataagatttctttgtctattgatgcattaatgcaatagtatgcaagtatagttcaaagcagactttgcacaggatgaaaaatcaaaattttggagcacatagaactgtgtgctttaattttccttcattattatgtgagagcctccagtactggggtctgtcctattttatgatgcaagtgaaattaaattattaacaagtctggaaagttgttgaactaaaatacttctgttgatgggatcttgtgatcagcttctgccatgcccttggaaacatcaccaacttctttaggatagaattctgggggaacatcaaaatagctacttttttccactgcttgctccacagttatgatcggtgggctcaaatcttctgtgtcatattcaataacaacctgcttggctgccatgtcagcatacctttgtgtttctgcaatctgaggaagaggtaatgatttagcaatactgatatggtcattaatattcatgattgtcttttatcaaagagatttttaagagaacaaaattcctgtgagttgttatactacaaacatgaaagggcaagtaccacaatgccaagagcttgaccagcatactcagcaattggatcaccaaatagtggttcgtcaccaaacgtagaggatgatccaatatttagtcctccacttggaatatcctttgcggaaacaaaagagatgatcttctctgatgctaaagaggatttgaattttatacttttgacataagcaaggggttgtgtgctgtaaataaattctccatagaggcaattctttggagcaggaatatcatcc

SEQ ID NO: 65092 - DNA, 3617 bp, Zea Mays
atggagggccgcgacgacgacgacacgggaggggccggcgacggcgcgggtgtcgggaagggcggggagaagaaggggaggaagtcgccggagtccaaggccgtcatcgacaaggccggggagggcaaccggatggtcttcttcgatggcccggcgctggcgttcgacctggaggacctgctccgcgcctccgccgaggttctcggcaagggcgcattcgggacggcgtaccgggccgtgctggaggacgtcaccacggtcgtcgtcaagcggctcagcaaggaggtcagcgccgggcgccgtgacttcgagcagcagatggagctggtcggccggattcgccatcgcaacgtcgtcgagctccgcgcctactactactccaaggacgagaagctgcttgtgtacgattactacaccagcggaagtgtatccaacatgcttcatggttttgggtacccgttgccatctctagccctgtcgtcctgtccacgccctcagccaaaccctagcactcggtcgcgcacaggcacaacgcagcgcagtcgcgccgtcggcattcagccgtcgcggactcgccgcccacccaggtcccaggctgggagagtggcagacacccactccgccactcgtcctcagccaccgaccaccgtccgtggttccccgttcgccaccggccaccgccagtccaccacccccccggcgcggcggcgcccctcctcctcccacacagcacacatgcgcacggcttcagctgcagttcatgaacacgactgaaggattgcaatggttctgttttttctgaatagcaccatgccaggactgccatccgagaaggagtcgatacccaacctcatcttgcgaggctttggcaccatcgaccgtgtgaaggcgaagctggagcaggcctgccctgaagtggtgtcatgtgccgatatcttggctctggtagcaagggacgtcgttgtactgaccaaagggcctcacggggatgttccaatctggcggagagatggtagaagatcggtgaagcaagatgcactggacaacctccacgcgcccttcttcgatgttggtcggaacatgtgccagttcttcatgcccaagggcctcaacgccaaggaccagattgttctgctaggcgtgggcgtctgccgtgtgccgactactgtctggtggctggtgtccagcggggtggaatccggtgggggcgtcaggtcggactccggtggacggagggacgcagtccggtggccgacgggctggcaggtggagctcgacgcgtcgcgcgggacagggacggggcgaacgacggaacaggcagatgacactcgacgccgacagaagcttggcggccgtggctcgggggtcgggactcggggctcgggcagaccgcagatggcctcacggccagccgaccaggcacagcggcgtcgcggcttaacgtgggtgagcaggtgaggcttcaggcggcgactgtgttctggagacctgagggagtgagggttagcgatggattggctgggacttggagccgcttaggctgggccggcggacctgctaattttttttggtatggcttgggccataatgggccctccgcccctgcttgtatgcaaatgtaatatttttgattgtctgctggttatatatatatatctgtctgtgctgaaaaatggaagcaaaacgtctcattttttttttgcaatttggctcttttttcgaaacaatttcatgtttggacccctgaataacttaatgtcatttttggaccctttactcggcgtcatggctcatggcgctgaggtaacacatctcggcgccatggcctatggtgccgaggtatctagtgcgctggcgactcagatggtggcctagcacgctgatgtggcctagctcggcgccacagatcgtggcgtcgagctaagagatggcttccgccgtgtaagcataactggcattggcaggtacaagattattgattctcgtgctgaaaacatccatttgagactttgggtcacatcaaatggaacgggaaaaaatatcacgttaacaaatgcatagaagttaaggctttgtttgggagtaagtggaatgaagagaattgaggtgactagaatccctcactatttaaaattgaatagtaggggattctagctccctcaatcccctccattactcttgcttccaaacaagccctaagagaaacgaaagcatacatggtcctatctccctcattaaaataagcattcacaacttcatttagatcgtgaccatgttcctgagtaaaaaaaatcggctatccgttgtagctgatgagtcgaaaaggcaatcatatttgtagtaaacaatgattatgtgtaatatctgcttcttcagtcatactacttgacgaagaataacttattatttaatgaagttaaaaccactacgggttaatatgccacacactgaatagtaagtatttccttattttaaataacattctttccgtataactggcttgaacaactgacggatagaaaacatttaatattcaacaataaaataccattgtgtcattgtgtggctggattggattgctctgcggctgcgacaaaaagtggaaccaaccatcattgcatgcatgcagatgcttgatgcttttggtcatgactcatgagagagaatggtcaatggtgtgtgtatggctgtgcacatgcagatgcacttagtctgttggacgcggggacctgaattaaccggttggctgttgtgtgtgtgcgagtcaagcgtttgaagtgttggcagggagctcggcgccatgatctacggcgccgagctcggacatgtaggcgccagcaaagcataaggggtccagggcattcagtatcttggcgccataagtcatggtgtcgtgacgtgttacctcgacgccatgacctatggcgccggcaaatggtctaaaaacgacattaagtcgttcaggggtccaaacgtgaatttgtttcagaaaagggccaacttgtaaaaagttcggcaaaatgtccaggtctgtggccctgtcgtgtttcgggtctcctcgggttcgagtctgggtctagggctttcccagtaatataattcatgttttcgtcgggtctttaattcgagttttgggggcgggtctgcggacgctgcacctgactcgaacccacaccattgccaactctagaaagtgactaaggcttctgccaaaagtcacgatatgccgtttgaccaaggccgtgaggcgaaggaaaccataaaaaaaaccaagcaaactagaaaatgcgtgaatcaacgaacacgtaaactaccccataacatcagaagggatttgccaaaaaaaagtttaagaaacgtttgaaatcatttcgaatttatgtctcaagaactcacggttgtcttaaatcttatgcttgttcaaatattgtagacttcaatgtacttaaaggaagcgcaaaattctagtaacaagctgacgtgcccttactaaatttggttggagaaggatccttaatggcctctaggtaagggttgacttttggggcaacacctcacttttgattgaggtagtcttggctctcaaagataagagaatgtcttttgtggcatctttt

SEQ ID NO: 65093 - DNA, 2278 bp, Zea Mays
atggagggccgcgacgacgacgacacgggaggggccggcgacggcgcgggtgtcgggaagggcggggagaagaaggggaggaagtcgccggagtccaaggccgtcatcgacaaggccggggagggcaaccggatggtcttcttcgatggcccggcgctggcgttcgacctggaggacctgctccgcgcctccgccgaggttctcggcaagggcgcattcgggacggcgtaccgggccgtgctggaggacgtcaccacggtcgtcgtcaagcggctcagcaaggaggtcagcgccgggcgccgtgacttcgagcagcagatggagctggtcggccggattcgccatcgcaacgtcgtcgagctccgcgcctactactactccaaggacgagaagctgcttgtgtacgattactacaccagcggaagtgtatccaacatgcttcatggttttgggtacccgttgccatctctagccctgtcgtcctgtccacgccctcagccaaaccctagcactcggtcgcgcacaggcacaacgcagcgcagtcgcgccgtcggcattcagccgtcgcggactcgccgcccacccaggtcccaggctgggagagtggcagacacccactccgccactcgtcctcagccaccgaccaccgtccgtggttccccgttcgccaccggccaccgccagtccaccacccccccggcgcggcggcgcccctcctcctcccacacagcacacatgcgcacggcttcagctgcagttcatgaacacgactgaaggattgcaatggttctgttttttctgaatagcaccatgccaggactgccatccgagaaggagtcgatacccaacctcatcttgcgaggctttggcaccatcgaccgtgtgaaggcgaagctggagcaggcctgccctgaagtggtgtcatgtgccgatatcttggctctggtagcaagggacgtcgttgtactgaccaaagggcctcacggggatgttccaatctggcggagagatggtagaagatcggtgaagcaagatgcactggacaacctccacgcgcccttcttcgatgttggtcggaacatgtgccagttcttcatgcccaagggcctcaacgccaaggaccagattgttctgctaggtacccctccttggagaacatagggcttttgctgatggtgatgctgtattctgggataaggaatatgctcatgcattgaaatgttacactctagtacgtccttggttatctcctaatatttaacctgcatttatagttaccagtttagcacttcagaatatatctattgtcaagccgctgcatgtcgagaattctgatgaatttgataactagtgctggttttaccttactataaggccttgttcgtttccgtcggattgcacccggaatcgttccaactaatcaaaatttatataaattagagaagcaatccggtcaggaatcgttccgacccaccaatccagccgaaacgaacaagccctaatgattttccttatctttaacaatgtgcactcatacattagtgttcaaaaagaagcacataaaagtttcttcaaacatgctatgaaatttggtatcttattgttaaaccttgctttacctgctagtgtttatgcgcaaaattagaacttactgcctaatgtttatgattttaagattataatatttttgtcaatatgtgccaaaataaggtaacgttcatcctgaatcagcgattgtctaagcctgcagaagtgttagtaggaaccgtgctggggctgtatgaggacatcagatacaagtctgagtaaaaaaaagtgcacctgaaacaggttgatattattggactgggttctgggggttgatattattggactgggttctggtaccgaggtggaccagaaacttaagtatgctaatgatctttcctcgggtgtgatactcggaagagagcttgtgaaataagtgcatgcaccgctggtgcccagaagtttgatgcctactggtaagatactttacatctactgatttatgagccgtagaccggacaggagatgaagatgatgccttacatgaatgccaaggcaccgaacggtgaagcctgggtggccatcattactcacctattgatgcatttgttctcactaagacgtaggaattctttggactatgtatttagctcagaaatttctgtttctgtatgttgtacctcttatactaactcataattctttaccttacaatattcagatgactatatataacatttgatacaaaaac

SEQ ID NO: 65094 - DNA, 2667 bp, Zea Mays
atggagggccgcgacgacgacgacacgggaggggccggcgacggcgcgggtgtcgggaagggcggggagaagaaggggaggaagtcgccggagtccaaggccgtcatcgacaaggccggggagggcaaccggatggtcttcttcgatggcccggcgctggcgttcgacctggaggacctgctccgcgcctccgccgaggttctcggcaagggcgcattcgggacggcgtaccgggccgtgctggaggacgtcaccacggtcgtcgtcaagcggctcagcaaggaggtcagcgccgggcgccgtgacttcgagcagcagatggagctggtcggccggattcgccatcgcaacgtcgtcgagctccgcgcctactactactccaaggacgagaagctgcttgtgtacgattactacaccagcggaagtgtatccaacatgcttcatggttttgggtacccgttgccatctctagccctgtcgtcctgtccacgccctcagccaaaccctagcactcggtcgcgcacaggcacaacgcagcgcagtcgcgccgtcggcattcagccgtcgcggactcgccgcccacccaggtcccaggctgggagagtggcagacacccactccgccactcgtcctcagccaccgaccaccgtccgtggttccccgttcgccaccggccaccgccagtccaccacccccccggcgcggcggcgcccctcctcctcccacacagcacacatgcgcacggcttcagctgcagttcatgaacacgactgaaggattgcaatggttctgttttttctgaatagcaccatgccaggactgccatccgagaaggagtcgatacccaacctcatcttgcgaggctttggcaccatcgaccgtgtgaaggcgaagctggagcaggcctgccctgaagtggtgtcatgtgccgatatcttggctctggtagcaagggacgtcgttgtactgaccaaagggcctcacggggatgttccaatctggcggagagatggtagaagatcggtgaagcaagatgcactggacaacctccacgcgcccttcttcgatgttggtcggaacatgtgccagttcttcatgcccaagggcctcaacgccaaggaccagattgttctgctagctataggtacccctccttggagaacatagggcttttgctgatggtgatgctgtattctgggataaggaatatgctcatgcattgaaatgttacactctagtacgtccttggttatctcctaatatttaacctgcatttatagttaccagtttagcacttcagaatatatctattgtcaagccgctgcatgtcgagaattctgatgaatttgataactagtgctggttttaccttactataaggccttgttcgtttccgtcggattgcacccggaatcgttccaactaatcaaaatttatataaattagagaagcaatccggtcaggaatcgttccgacccaccaatccagccgaaacgaacaagccctaatgattttccttatctttaacaatgtgcactcatacattagtgttcaaaaagaagcacataaaagtttcttcaaacatgctatgaaatttggtatcttattgttaaaccttgctttacctgctagtgtttatgcgcaaaattagaacttactgcctaatgtttatgattttaagattataatatttttgtcaatatgtgccaaaataaggtaacgttcatcctgaatcagcgattgtctaagcctgcagaagtgttagtaggaaccgtgctggggctgtatgaggacatcagatacaagtctgagtaaaaaaaagtgcacctgaaacaggttgatattattggactgggttctgggggttgatattattggactgggttctggtaccgaggtggaccagaaacttaagtatgctaatgatctttcctcgggtgtgatactcggaagagagcttgtgaaataagtgcatgcaccgctggtgcccaggtaaggggtcagcgccttttgttttctgccacctcacatacgtttcagtagttttgattgggtaatcatctgtatagacttcaccttgtgattcatcctgatatgtaataacgaattttgcacgtaaagacacataggtttgtcaggatgcatgcttgttagctgtttgcttatatgatcctgaaagcccttaagaggctttatttatggttaaaagctcgaacaattaaggatgtcagtgctggttctgatctcttcgaggtagaaccaacaaagtggtttcctgatagagctgcctcttgtatgctttgcacaatactttttcgtctaaaatttttgcacttgccatcattgctaattttgtggttattttcaaagggtagaagtttgatgcctactggtaagatactttacatctactgatttatgagccgtagaccggacaggagatgaagatgatgccttacatgaatgccaaggcaccgaacggtgaagcctgggtggccatcattactcacctattgatgcatttgttctcactaagacgtaggaattctttggactatgtatttagctcagaaatttctgtttctgtatgttgtacctcttatactaactcataattctttaccttacaatattcagatgactatatataacatttgatacaaaaac

SEQ ID NO: 65095 - DNA, 1430 bp, Zea Mays
atggagggccgcgacgacgacgacacgggaggggccggcgacggcgcgggtgtcgggaagggcggggagaagaaggggaggaagtcgccggagtccaaggccgtcatcgacaaggccggggagggcaaccggatggtcttcttcgatggcccggcgctggcgttcgacctggaggacctgctccgcgcctccgccgaggttctcggcaagggcgcattcgggacggcgtaccgggccgtgctggaggacgtcaccacggtcgtcgtcaagcggctcagcaaggaggtcagcgccgggcgccgtgacttcgagcagcagatggagctggtcggccggattcgccatcgcaacgtcgtcgagctccgcgcctactactactccaaggacgagaagctgcttgtgtacgattactacaccagcggaagtgtatccaacatgcttcatggttttgggtacccgttgccatctctagccctgtcgtcctgtccacgccctcagccaaaccctagcactcggtcgcgcacaggcacaacgcagcgcagtcgcgccgtcggcattcagccgtcgcggactcgccgcccacccaggtcccaggctgggagagtggcagacacccactccgccactcgtcctcagccaccgaccaccgtccgtggttccccgttcgccaccggccaccgccagtccaccacccccccggcgcggcggcgcccctcctcctcccacacagcacacatgcgcacggcttcagctgcagttcatgaacacgactgaaggattgcaatggttctgttttttctgaatagcaccatgccaggactgccatccgagaaggagtcgatacccaacctcatcttgcgaggctttggcaccatcgaccgtgtgaaggcgaagctggagcaggcctgccctgaagtggtgtcatgtgccgatatcttggctctggtagcaagggacgtcgttgtactgaccaaagggcctcacggggatgttccaatctggcggagagatggtagaagatcggtgaagcaagatgcactggacaacctccacgcgcccttcttcgatgttggtcggaacatgtgccagttcttcatgcccaagggcctcaacgccaaggaccagattgttctgctagaagtttgatgcctactggtaagatactttacatctactgatttatgagccgtagaccggacaggagatgaagatgatgccttacatgaatgccaaggcaccgaacggtgaagcctgggtggccatcattactcacctattgatgcatttgttctcactaagacgtaggaattctttggactatgtatttagctcagaaatttctgtttctgtatgttgtacctcttatactaactcataattctttaccttacaatattcagatgactatatataacatttgatacaaaaac

SEQ ID NO: 65096 - DNA, 2661 bp, Zea Mays
atggagggccgcgacgacgacgacacgggaggggccggcgacggcgcgggtgtcgggaagggcggggagaagaaggggaggaagtcgccggagtccaaggccgtcatcgacaaggccggggagggcaaccggatggtcttcttcgatggcccggcgctggcgttcgacctggaggacctgctccgcgcctccgccgaggttctcggcaagggcgcattcgggacggcgtaccgggccgtgctggaggacgtcaccacggtcgtcgtcaagcggctcagcaaggaggtcagcgccgggcgccgtgacttcgagcagcagatggagctggtcggccggattcgccatcgcaacgtcgtcgagctccgcgcctactactactccaaggacgagaagctgcttgtgtacgattactacaccagcggaagtgtatccaacatgcttcatggttttgggtacccgttgccatctctagccctgtcgtcctgtccacgccctcagccaaaccctagcactcggtcgcgcacaggcacaacgcagcgcagtcgcgccgtcggcattcagccgtcgcggactcgccgcccacccaggtcccaggctgggagagtggcagacacccactccgccactcgtcctcagccaccgaccaccgtccgtggttccccgttcgccaccggccaccgccagtccaccacccccccggcgcggcggcgcccctcctcctcccacacagcacacatgcgcacggcttcagctgcagttcatgaacacgactgaaggattgcaatggttctgttttttctgaatagcaccatgccaggactgccatccgagaaggagtcgatacccaacctcatcttgcgaggctttggcaccatcgaccgtgtgaaggcgaagctggagcaggcctgccctgaagtggtgtcatgtgccgatatcttggctctggtagcaagggacgtcgttgtactgaccaaagggcctcacggggatgttccaatctggcggagagatggtagaagatcggtgaagcaagatgcactggacaacctccacgcgcccttcttcgatgttggtcggaacatgtgccagttcttcatgcccaagggcctcaacgccaaggaccagattgttctgctaggtacccctccttggagaacatagggcttttgctgatggtgatgctgtattctgggataaggaatatgctcatgcattgaaatgttacactctagtacgtccttggttatctcctaatatttaacctgcatttatagttaccagtttagcacttcagaatatatctattgtcaagccgctgcatgtcgagaattctgatgaatttgataactagtgctggttttaccttactataaggccttgttcgtttccgtcggattgcacccggaatcgttccaactaatcaaaatttatataaattagagaagcaatccggtcaggaatcgttccgacccaccaatccagccgaaacgaacaagccctaatgattttccttatctttaacaatgtgcactcatacattagtgttcaaaaagaagcacataaaagtttcttcaaacatgctatgaaatttggtatcttattgttaaaccttgctttacctgctagtgtttatgcgcaaaattagaacttactgcctaatgtttatgattttaagattataatatttttgtcaatatgtgccaaaataaggtaacgttcatcctgaatcagcgattgtctaagcctgcagaagtgttagtaggaaccgtgctggggctgtatgaggacatcagatacaagtctgagtaaaaaaaagtgcacctgaaacaggttgatattattggactgggttctgggggttgatattattggactgggttctggtaccgaggtggaccagaaacttaagtatgctaatgatctttcctcgggtgtgatactcggaagagagcttgtgaaataagtgcatgcaccgctggtgcccaggtaaggggtcagcgccttttgttttctgccacctcacatacgtttcagtagttttgattgggtaatcatctgtatagacttcaccttgtgattcatcctgatatgtaataacgaattttgcacgtaaagacacataggtttgtcaggatgcatgcttgttagctgtttgcttatatgatcctgaaagcccttaagaggctttatttatggttaaaagctcgaacaattaaggatgtcagtgctggttctgatctcttcgaggtagaaccaacaaagtggtttcctgatagagctgcctcttgtatgctttgcacaatactttttcgtctaaaatttttgcacttgccatcattgctaattttgtggttattttcaaagggtagaagtttgatgcctactggtaagatactttacatctactgatttatgagccgtagaccggacaggagatgaagatgatgccttacatgaatgccaaggcaccgaacggtgaagcctgggtggccatcattactcacctattgatgcatttgttctcactaagacgtaggaattctttggactatgtatttagctcagaaatttctgtttctgtatgttgtacctcttatactaactcataattctttaccttacaatattcagatgactatatataacatttgatacaaaaac

SEQ ID NO: 65097 - DNA, 2678 bp, Zea Mays
atggagggccgcgacgacgacgacacgggaggggccggcgacggcgcgggtgtcgggaagggcggggagaagaaggggaggaagtcgccggagtccaaggccgtcatcgacaaggccggggagggcaaccggatggtcttcttcgatggcccggcgctggcgttcgacctggaggacctgctccgcgcctccgccgaggttctcggcaagggcgcattcgggacggcgtaccgggccgtgctggaggacgtcaccacggtcgtcgtcaagcggctcagcaaggaggtcagcgccgggcgccgtgacttcgagcagcagatggagctggtcggccggattcgccatcgcaacgtcgtcgagctccgcgcctactactactccaaggacgagaagctgcttgtgtacgattactacaccagcggaagtgtatccaacatgcttcatggttttgggtacccgttgccatctctagccctgtcgtcctgtccacgccctcagccaaaccctagcactcggtcgcgcacaggcacaacgcagcgcagtcgcgccgtcggcattcagccgtcgcggactcgccgcccacccaggtcccaggctgggagagtggcagacacccactccgccactcgtcctcagccaccgaccaccgtccgtggttccccgttcgccaccggccaccgccagtccaccacccccccggcgcggcggcgcccctcctcctcccacacagcacacatgcgcacggcttcagctgcagttcatgaacacgactgaaggattgcaatggttctgttttttctgaatagcaccatgccaggactgccatccgagaaggagtcgatacccaacctcatcttgcgaggctttggcaccatcgaccgtgtgaaggcgaagctggagcaggcctgccctgaagtggtgtcatgtgccgatatcttggctctggtagcaagggacgtcgttgtactgaccaaagggcctcacggggatgttccaatctggcggagagatggtagaagatcggtgaagcaagatgcactggacaacctccacgcgcccttcttcgatgttggtcggaacatgtgccagttcttcatgcccaagggcctcaacgccaaggaccagattgttctgctagctgtgcatgagctataggtacccctccttggagaacatagggcttttgctgatggtgatgctgtattctgggataaggaatatgctcatgcattgaaatgttacactctagtacgtccttggttatctcctaatatttaacctgcatttatagttaccagtttagcacttcagaatatatctattgtcaagccgctgcatgtcgagaattctgatgaatttgataactagtgctggttttaccttactataaggccttgttcgtttccgtcggattgcacccggaatcgttccaactaatcaaaatttatataaattagagaagcaatccggtcaggaatcgttccgacccaccaatccagccgaaacgaacaagccctaatgattttccttatctttaacaatgtgcactcatacattagtgttcaaaaagaagcacataaaagtttcttcaaacatgctatgaaatttggtatcttattgttaaaccttgctttacctgctagtgtttatgcgcaaaattagaacttactgcctaatgtttatgattttaagattataatatttttgtcaatatgtgccaaaataaggtaacgttcatcctgaatcagcgattgtctaagcctgcagaagtgttagtaggaaccgtgctggggctgtatgaggacatcagatacaagtctgagtaaaaaaaagtgcacctgaaacaggttgatattattggactgggttctgggggttgatattattggactgggttctggtaccgaggtggaccagaaacttaagtatgctaatgatctttcctcgggtgtgatactcggaagagagcttgtgaaataagtgcatgcaccgctggtgcccaggtaaggggtcagcgccttttgttttctgccacctcacatacgtttcagtagttttgattgggtaatcatctgtatagacttcaccttgtgattcatcctgatatgtaataacgaattttgcacgtaaagacacataggtttgtcaggatgcatgcttgttagctgtttgcttatatgatcctgaaagcccttaagaggctttatttatggttaaaagctcgaacaattaaggatgtcagtgctggttctgatctcttcgaggtagaaccaacaaagtggtttcctgatagagctgcctcttgtatgctttgcacaatactttttcgtctaaaatttttgcacttgccatcattgctaattttgtggttattttcaaagggtagaagtttgatgcctactggtaagatactttacatctactgatttatgagccgtagaccggacaggagatgaagatgatgccttacatgaatgccaaggcaccgaacggtgaagcctgggtggccatcattactcacctattgatgcatttgttctcactaagacgtaggaattctttggactatgtatttagctcagaaatttctgtttctgtatgttgtacctcttatactaactcataattctttaccttacaatattcagatgactatatataacatttgatacaaaaac

SEQ ID NO: 65098 - DNA, 2159 bp, Zea Mays
atggagggccgcgacgacgacgacacgggaggggccggcgacggcgcgggtgtcgggaagggcggggagaagaaggggaggaagtcgccggagtccaaggccgtcatcgacaaggccggggagggcaaccggatggtcttcttcgatggcccggcgctggcgttcgacctggaggacctgctccgcgcctccgccgaggttctcggcaagggcgcattcgggacggcgtaccgggccgtgctggaggacgtcaccacggtcgtcgtcaagcggctcagcaaggaggtcagcgccgggcgccgtgacttcgagcagcagatggagctggtcggccggattcgccatcgcaacgtcgtcgagctccgcgcctactactactccaaggacgagaagctgcttgtgtacgattactacaccagcggaagtgtatccaacatgcttcatggttttgggtacccgttgccatctctagccctgtcgtcctgtccacgccctcagccaaaccctagcactcggtcgcgcacaggcacaacgcagcgcagtcgcgccgtcggcattcagccgtcgcggactcgccgcccacccaggtcccaggctgggagagtggcagacacccactccgccactcgtcctcagccaccgaccaccgtccgtggttccccgttcgccaccggccaccgccagtccaccacccccccggcgcggcggcgcccctcctcctcccacacagcacacatgcgcacggcttcagctgcagttcatgaacacgactgaaggattgcaatggttctgttttttctgaatagcaccatgccaggactgccatccgagaaggagtcgatacccaacctcatcttgcgaggctttggcaccatcgaccgtgtgaaggcgaagctggagcaggcctgccctgaagtggtgtcatgtgccgatatcttggctctggtagcaagggacgtcgttgtactgaccaaagggcctcacggggatgttccaatctggcggagagatggtagaagatcggtgaagcaagatgcactggacaacctccacgcgcccttcttcgatgttggtcggaacatgtgccagttcttcatgcccaagggcctcaacgccaaggaccagattgttctgctagctgtgcatgagctataggtacccctccttggagaacatagggcttttgctgatggtgatgctgtattctgggataaggaatatgctcatgcattgaaatgttacactctaaagtgttagtaggaaccgtgctggggctgtatgaggacatcagatacaagtctgagtaaaaaaaagtgcacctgaaacaggttgatattattggactgggttctgggggttgatattattggactgggttctggtaccgaggtggaccagaaacttaagtatgctaatgatctttcctcgggtgtgatactcggaagagagcttgtgaaataagtgcatgcaccgctggtgcccaggtaaggggtcagcgccttttgttttctgccacctcacatacgtttcagtagttttgattgggtaatcatctgtatagacttcaccttgtgattcatcctgatatgtaataacgaattttgcacgtaaagacacataggtttgtcaggatgcatgcttgttagctgtttgcttatatgatcctgaaagcccttaagaggctttatttatggttaaaagctcgaacaattaaggatgtcagtgctggttctgatctcttcgaggtagaaccaacaaagtggtttcctgatagagctgcctcttgtatgctttgcacaatactttttcgtctaaaatttttgcacttgccatcattgctaattttgtggttattttcaaagggtagaagtttgatgcctactggtaagatactttacatctactgatttatgagccgtagaccggacaggagatgaagatgatgccttacatgaatgccaaggcaccgaacggtgaagcctgggtggccatcattactcacctattgatgcatttgttctcactaagacgtaggaattctttggactatgtatttagctcagaaatttctgtttctgtatgttgtacctcttatactaactcataattctttaccttacaatattcagatgactatatataacatttgatacaaaaac

SEQ ID NO: 65099 - DNA, 1398 bp, Zea Mays
cagaactaactcaatcaaaagtgaggtgctgccccaaaagtcaacacttacccagaggccattaagggtccttcctcaaccaaatttagtaagggcaagcgagtttgttactagaattttgcgcttcgtttaagtatattgaagtctacaatatctggacaagtctaagatttgagacaaccgtgagttcttgaaaaataaattcgaaatgatttttattttactactgtatacgatggttagattgatgttggtaactgactaactgttatgaatactgcgatatatatttctatgtgctactgatcttatgatatgttttgtgtttatctttcggctgtgcatgagctataggtacccctccttggagaacatagggcttttgctgatggtgatgctgtattctgggataaggaatatgctcatgcattgaaatgttacactctagtaacgttcatcctgaatcagcgattgtctaagcctgcagaagtgttagtaggaaccgtgctggggctgtatgaggacatcagatacaagtctgagtaaaaaaaagtgcacctgaaacaggttgatattattggactgggttctgggggttgatattattggactgggttctggtaccgaggtggaccagaaacttaagtatgctaatgatctttcctcgggtgtgatactcggaagagagcttgtgaaataagtgcatgcaccgctggtgcccaggtaaggggtcagcgccttttgttttctgccacctcacatacgtttcagtagttttgattgggtaatcatctgtatagacttcaccttgtgattcatcctgatatgtaataacgaattttgcacgtaaagacacataggtttgtcaggatgcatgcttgttagctgtttgcttatatgatcctgaaagcccttaagaggctttatttatggttaaaagctcgaacaattaaggatgtcagtgctggttctgatctcttcgaggtagaaccaacaaagtggtttcctgatagagctgcctcttgtatgctttgcacaatactttttcgtctaaaatttttgcacttgccatcattgctaattttgtggttattttcaaagggtagaagtttgatgcctactggtaagatactttacatctactgatttatgagccgtagaccggacaggagatgaagatgatgccttacatgaatgccaaggcaccgaacggtgaagcctgggtggccatcattactcacctattgatgcatttgttctcactaagacgtaggaattctttggactatgtatttagctcagaaatttctgtttctgtatgttgtacctcttatactaactcataattctttaccttacaatattcagatgactatatataacatttgatacaaaaac

SEQ ID NO: 65100 - DNA, 1165 bp, Zea Mays
ccagcccctacgcgcgtgcgctcggtagggcacgcaccacaacctctcctcacctcctctctcaacgctcccctcctctctcgagcatgacttctccggcgctagactccctcgcgcggccatgcgccggcagagggcaagacgaccgtccccagccatcgacgtctggtctaaagcggaagcctgagttgccatcgtctctatgctgcttccgggggccggatctaggagcgtcgcactgataagtgaccggatctggacatctccatcttccctttctttatttccctttcagtcgatctagcgccctgcgccgccttgctatcgtcacctgatgtgttcgccgacgtgccagtgcgccttctcaccagccgttgggatttcgacggtctgggccttgatgccaacgcgctctgtctgcctgccacctgtttggcgtcttctatggacacaccgtcgccgcctgatgtgttcaccgacgtgccagtgtgcctactcgccagtcgttgggaccttgacggcctaggcctcgatgccgatgttatcctcctatcagcgcacctatttggcgtattctacaactacggtggtgccgaaggacgcccatcgacatggggaacccttagaaagccaccactgcctctttacaggatcatgcgtcggccattccgtgaccccgctgtctccttaactactcctccaccatcttagtcacgcctgtgtcggccaagccttcctccagccctcaaggggaacgagctgcgcgttcaagtggtcgaccatctccaagtctacgtgaggtgcctgcagaggttcaatcagggaggaatttgaaatggacgtgttgccttggtcttgttatatttatgagttctttgtctggtgcctcttaaatttattctcttcatgatgttagaaacatgtttccaaagagaagacaaaactgagtggggtagtaaagcgattgtaggaatcacatgaaccggcttgcacacaagctatgaagattaagaagttgaaggcttctttagagacctcctgctttgtgccaagacaaaggttgccaaagtttgacttgcatctctaggtcgcagcgacaaaaaggtgggcgatgcggcggcgacgcgggagcataaccaccagtgggactggagtttgacgtcga

SEQ ID NO: 65101 - DNA, 1170 bp, Zea Mays
ccctccagcattgaaataagtggccatgtgcttacaatagggaaaggttattcgtgcaccttctagagtgacgcatgggaaaatctctccagttcattacgatgaggaattgggaaattccttattcaattgcttgccaaaatgtcgtgcggtactacaagcagaacgccgatgaaacatgggtcgacgtctcgctgaatagcctgcttccaggctcagtcctcaattgccagcgccagctgtcaggatgtctcatctaggaaaagcctaatggctactcaaaggtggaacacgttgaggtggacgataggtcagagcacaacatctacaagctgttgggggcaagcaacagttctgcagttgtacagaagcactgaccatagacagtgaatttgttaatgcacttacagagaggtcaggctaaacttctctcagaaggttgggaaggaggatctaaaagaggctgcttagaaatctccacaggggcagggggtaggatcctagctgtaactgttccatagggaggctagctgcatacattggtttcagatgaattttggagcatgtttcctcctcaaatatcacttcttctttaggaagcccaattgaaaaagctgtagatctaatttgattcttcctttcctcccgtggtgggatcaatcaaatacgaaatggccaagaactgctgacgatgatgacaacgtggccaccatcgccgccctcagacaaagaagctagagataataaaggggtctctaagaaagaatttctatctgaaaatcttttcaccaaatgtcctagacatcaccatggttgacctccctggaataacatgtacctgtgccacttggagatcagcccagtgatattgagtcaagaataagagcaatgaccatacaatacattaggcatctaagttgtattatcttcgttgtttctcctgcaaatgctgacttagctcattctgatgctctccaactagcaaggcttgctgatcctaatgggtctcgtacaatccttcctatcactaagtttatcatgggcaggggcactcatgctcgtaacttgttcctaggaaatgtgattccagtcaagtttggttatcttgttggtgattcatgtgcaagagacacccggtttttcatggttgtccctgctcctcatatttaa

SEQ ID NO: 65102 - DNA, 820 bp, Zea Mays
gcagggaggggcacgctgccggggcacgggcaacgcagagacgggcggggagatgaggctgcacggtgccgacggagaggagcctcacggcggcggggccggatgaatcaggcgagcacacggtccgccaatggtggtgggggcgcacgaaggctgctccagctcatgcattcgtcggaggcgcagcaggccgcgcacgccacgccagagaacaagcagcccgcgtccgctggagatcagcccgctcggagagagccagcaggccaccgtgccaatctctcccgtgccgtggagctggaggagaagaggtgcttcggggagggagaaggaatgcggcctagcaacacgtgctagacgacgtggaggaagctgtagaagaatgtggaaagatttgagtgggtctgtgctgacggaaacggcgtgcgggtgtattgctgaccaaaggagacaatgaatgggcaatactgagtatgaacttaaactaagggtagaaatgagtattgtagcgaaactgaggtaccagtataaaaatcccgttatataatcatggtgattagatttaatatgtcgactatatagacacatttacttgtggacgtgccgtagaatagtgacaaagatctgatgcttagtaggagggctcaagactcgagaggttgacaggaggtacaagttttgtgaacacaaggtagatttgtccattgtaatttgggttgatgatgtatgattgtcaacggatagtgtcttgggtcgagtcgtggactgatcggggcgtgagattttatatgtgcaaccatatcgatcagcttgtggtgtgcag

SEQ ID NO: 65103 - DNA, 1436 bp, Zea Mays
tgggaactctacaactactatggatcctcttatacattgtaaaaaaaacaacattgatgcttttgaaggggcaaggctgaggggaatgccaagagcaatgtgaagaaaagcatcaggggtgcagcagtatcgttgtccgaactaggtgagtatgagaaggcatcaacattccttgagaagctaattaaggtaatccctgataaagcagaagcataccgtttgcttggtgaagtaaagtttgaactcaaggattatgaagggagttcatcatcatacagaagtgctttatcttcatcagataatattgattttgaagttctccgtggactgacaaattcattacttgctgctaagaagccagatgaggcagttgatataattctgttatgccgtcgaaagttgaatgaaaagagtcaaacaggactagcagatttggaggctacaaatgacaatggtcgccaaaagcctcaagatattgacccgatccaagttgacctgcttttagggaaggcttattccgattggggtcatatcagtgatgctatttctgtctacgataagctaataactgatcatcctgaagacttccgtggttatttagcaaagggaatcatattaaaggaaaatggtaaagcaggtgatgcagaaagaatgtttattcaggcaaaattcttcgccccggaggcagcgaaggcactagttgatcgctatgcgcaaagatagtcgataagagattgaatggtgttgttttaaaccaatgagatcattcggattccagaaaaacgatcaacatgtttggaacgtcttgtatgatagcaacattatgggatctgggacattttgaattgtattgttttagaacaggcctgacgcagtatcgaaaaaagccttcccactgagacaagagattctgggttcgacagtctctgaaaaaatgcagggcaagccctgcccttggttattccttctttctgaaaaaaatgcagggtaagccttgcccttggttattccttctctctgaaaaaatgctgggtaagccttgccctgggttattccttgctcagacctcgctcacgcggaagccgccagcagcccttttattgctttagaacagcagaaatgaaacatgtatgctttgcctgggaacaatgctcagttaaacattttgatatacgtgtttagtccattatataaaaaattatttcgatgtgttggaacaaattgtgttgtcacggcacgagcctcagtgttctccatatccataatcacgtgaaatatgatcgtggttgaggtaatatatgtcatcttgccatgaatagttagggtcatatccctttgttgctctggttaaaagtcagtggtattccctgtgcatgcaacatgtgtggacattgtatttgtgattcaatagttctatagataatgtggttataaaa

SEQ ID NO: 65104 - DNA, 2122 bp, Zea Mays
atcccgttcgttcattgtgtactactggattctcacaccgcagcatccgttcacgtgtcttcaccccgagtgctgtctctctccttcctctctgctacggctgggtgaggcggggggctactgccgccgcctaacgccaggttccgaggccttcgtcggtctatttgccggcgatgaacatccaccagggatggttgcaacaatttgggcatagcgttggtatcagtggttcgaagatggttctccatatgacccacaatgtattcagttttcgatgctttgctgccaatgggcgtggcttcagtgcggattctaccaataagagaaaaattaaaagcaagaagaggcgaaaggatgttgcactggaatcaagtgaggtaatatctggaaatccaaggaacagggaccaataattaagaactgaaagtgaaaacaaatctggtaaaaaagtcatggataagaaatttttggaaaaagtggaagcggttcgaaggtctgctcttgagaaaaagaaagctgaagagaacaaagattatcaagctattgattatgatgctccaattgagtcagataaaagtactattggctttggtactagggttggaattggtgttgcagttgttatatttggactagtcttcgcttttggggatttcctgccttatggaagtgttagccctagcaaagaaagtgcagtagttaaacaaaagctttctcaagaggaagaagaaaaatttaagaatgcactgcaaggctttcaagcaacgctgagtaagtcgcctaatgatcctactgctcttgagggtgcagcagtatcgttgtccgaactaggtgagtatgagaaggcatcaacattccttgagaagctaattaaggtaatccctgataaagcagaagcataccgtttgcttggtgaagtaaagtttgaactcaaggattatgaagggagttcatcatcatacagaagtgctttatcttcatcagataatattgattttgaagttctccgtggactgacaaattcattacttgctgctaagaagccagatgaggcagttgatataattctgttatgccgtcgaaagttgaatgaaaagagtcaaacaggactagcagatttggaggctacaaatgacaatggtcgccaaaagcctcaagatattgacccgatccaagttgacctgcttttagggaaggcttattccgattggggtcatatcagtgatgctatttctgtctacgataagctaataactgatcatcctgaagacttccgtggttatttagcaaagggaatcatattaaaggaaaatggtaaagcaggtgatgcagaaagaatgtttattcaggcaaaattcttcgccccggaggcagcgaaggcactagttgatcgctatgcgcaaagatagtcgataagagattgaatggtgttgttttaaaccaatgagatcattcggattccagaaaaacgatcaacatgtttggaacgtcttgtatgatagcaacattatgggatctgggacattttgaattgtattgttttagaacaggcctgacgcagtatcgaaaaaagccttcccactgagacaagagattctgggttcgacagtctctgaaaaaatgcagggcaagccctgcccttggttattccttctttctgaaaaaaatgcagggtaagccttgcccttggttattccttctctctgaaaaaatgctgggtaagccttgccctgggttattccttgctcagacctcgctcacgcggaagccgccagcagcccttttattgctttagaacagcagaaatgaaacatgtatgctttgcctgggaacaatgctcagttaaacattttgatatacgtgtttagtccattatataaaaaattatttcgatgtgttggaacaaattgtgttgtcacggcacgagcctcagtgttctccatatccataatcacgtgaaatatgatcgtggttgaggtaatatatgtcatcttgccatgaatagttagggtcatatccctttgttgctctggttaaaagtcagtggtattccctgtgcatgcaacatgtgtggacattgtatttgtgattcaatagttctatagataatgtggttataaaa

SEQ ID NO: 65105 - DNA, 2000 bp, Zea Mays
cccgttcgttcattgtgtactactggattctcacaccgcagcatccgttcacgtgtcttcaccccgagtgctgtctctctccttcctctctgctacggctgggtgaggcggggggctactgccgccgcctaacgccaggttccgaggccttcgtcggtctatttgccggcgatgaacatccaccagggatggttgcaacaatttgggcatagcgttggtatcagtggttcgaagatggttctccatatgacccacaatgtattcagttttcgatgctttgctgccaatgggcgtggcttcagtgcggattctaccaataagagaaaaattaaaagcaagaagaggcgaaaggatgttgcactggaatcaaggtctgctcttgagaaaaagaaagctgaagagaacaaagattatcaagctattgattatgatgctccaattgagtcagataaaagtactattggctttggtactagggttggaattggtgttgcagttgttatatttggactagtcttcgcttttggggatttcctgccttatggaagtgttagccctagcaaagaaagtgcagtagttaaacaaaagctttctcaagaggaagaagaaaaatttaagaatgcactgcaaggctttcaagcaacgctgagtaagtcgcctaatgatcctactgctcttgagggtgcagcagtatcgttgtccgaactaggtgagtatgagaaggcatcaacattccttgagaagctaattaaggtaatccctgataaagcagaagcataccgtttgcttggtgaagtaaagtttgaactcaaggattatgaagggagttcatcatcatacagaagtgctttatcttcatcagataatattgattttgaagttctccgtggactgacaaattcattacttgctgctaagaagccagatgaggcagttgatataattctgttatgccgtcgaaagttgaatgaaaagagtcaaacaggactagcagatttggaggctacaaatgacaatggtcgccaaaagcctcaagatattgacccgatccaagttgacctgcttttagggaaggcttattccgattggggtcatatcagtgatgctatttctgtctacgataagctaataactgatcatcctgaagacttccgtggttatttagcaaagggaatcatattaaaggaaaatggtaaagcaggtgatgcagaaagaatgtttattcaggcaaaattcttcgccccggaggcagcgaaggcactagttgatcgctatgcgcaaagatagtcgataagagattgaatggtgttgttttaaaccaatgagatcattcggattccagaaaaacgatcaacatgtttggaacgtcttgtatgatagcaacattatgggatctgggacattttgaattgtattgttttagaacaggcctgacgcagtatcgaaaaaagccttcccactgagacaagagattctgggttcgacagtctctgaaaaaatgcagggcaagccctgcccttggttattccttctttctgaaaaaaatgcagggtaagccttgcccttggttattccttctctctgaaaaaatgctgggtaagccttgccctgggttattccttgctcagacctcgctcacgcggaagccgccagcagcccttttattgctttagaacagcagaaatgaaacatgtatgctttgcctgggaacaatgctcagttaaacattttgatatacgtgtttagtccattatataaaaaattatttcgatgtgttggaacaaattgtgttgtcacggcacgagcctcagtgttctccatatccataatcacgtgaaatatgatcgtggttgaggtaatatatgtcatcttgccatgaatagttagggtcatatccctttgttgctctggttaaaagtcagtggtattccctgtgcatgcaacatgtgtggacattgtatttgtgattcaatagttctatagataatgtggttataaaa

SEQ ID NO: 65106 - DNA, 2122 bp, Zea Mays
gttcgttcattgtgtactactggattctcacaccgcagcatccgttcacgtgtcttcaccccgagtgctgtctctctccttcctctctgctacggctgggtgaggcggggggctactgccgccgcctaacgccaggttccgaggccttcgtcggtctatttgccggcgatgaacatccaccagggatggttgcaacaatttgggcatagcgttggtatcagtggttcgaagatggttctccatatgacccacaatgtattcagttttcgatgctttgctgccaatgggcgtggcttcagtgcggattctaccaataagagaaaaattaaaagcaagaagaggcgaaaggatgttgcactggaatcaagtgaggtaatatctggaaatccaaggaacagggaccaatgggtgccagaattaagaactgaaagtgaaaacaaatctggtaaaaaagtcatggataagaaatttttggaaaaagtggaagcggttcgaaggtctgctcttgagaaaaagaaagctgaagagaacaaagattatcaagctattgattatgatgctccaattgagtcagataaaagtactattggctttggtactagggttggaattggtgttgcagttgttatatttggactagtcttcgcttttggggatttcctgccttatggaagtgttagccctagcaaagaaagtgcagtagttaaacaaaagctttctcaagaggaagaagaaaaatttaagaatgcactgcaaggctttcaagcaacgctgagtaagtcgcctaatgatcctactgctcttgagggtgcagcagtatcgttgtccgaactaggtgagtatgagaaggcatcaacattccttgagaagctaattaaggtaatccctgataaagcagaagcataccgtttgcttggtgaagtaaagtttgaactcaaggattatgaagggagttcatcatcatacagaagtgctttatcttcatcagataatattgattttgaagttctccgtggactgacaaattcattacttgctgctaagaagccagatgagttgatataattctgttatgccgtcgaaagttgaatgaaaagagtcaaacaggactagcagatttggaggctacaaatgacaatggtcgccaaaagcctcaagatattgacccgatccaagttgacctgcttttagggaaggcttattccgattggggtcatatcagtgatgctatttctgtctacgataagctaataactgatcatcctgaagacttccgtggttatttagcaaagggaatcatattaaaggaaaatggtaaagcaggtgatgcagaaagaatgtttattcaggcaaaattcttcgccccggaggcagcgaaggcactagttgatcgctatgcgcaaagatagtcgataagagattgaatggtgttgttttaaaccaatgagatcattcggattccagaaaaacgatcaacatgtttggaacgtcttgtatgatagcaacattatgggatctgggacattttgaattgtattgttttagaacaggcctgacgcagtatcgaaaaaagccttcccactgagacaagagattctgggttcgacagtctctgaaaaaatgcagggcaagccctgcccttggttattccttctttctgaaaaaaatgcagggtaagccttgcccttggttattccttctctctgaaaaaatgctgggtaagccttgccctgggttattccttgctcagacctcgctcacgcggaagccgccagcagcccttttattgctttagaacagcagaaatgaaacatgtatgctttgcctgggaacaatgctcagttaaacattttgatatacgtgtttagtccattatataaaaaattatttcgatgtgttggaacaaattgtgttgtcacggcacgagcctcagtgttctccatatccataatcacgtgaaatatgatcgtggttgaggtaatatatgtcatcttgccatgaatagttagggtcatatccctttgttgctctggttaaaagtcagtggtattccctgtgcatgcaacatgtgtggacattgtatttgtgattcaatagttctatagataatgtggttataaaa

SEQ ID NO: 65107 - DNA, 2413 bp, Zea Mays
gtgtactactggattctcacaccgcagcatccgttcacgtgtcttcaccccgagtgctgtctctctccttcctctctgctacggctgggtgaggcggggggctactgccgccgcctaacgccaggttccgaggccttcgtcggtctatttgccggcgatgaacatccaccagggatggttgcaacaatttgggcatagcgttggtatcagtggttcgaagatggttctccatatgacccacaatgtattcagttttcgatgctttgctgccaatgggcgtggcttcagtgcggattctaccaataagagaaaaattaaaagcaagaagaggcgaaaggatgttgcactggaatcaagtgaggtaatatctggaaatccaaggaacagggaccaatgggtgccagaattaagaactgaaagtgaaaacaaatctggtaaaaaagtcatggataagaaatttttggaaaaagtggaagcggttcgaaggtctgctcttgagaaaaagaaagctgaagagaacaaagattatcaagctattgattatgatgctccaattgagtcagataaaagtactattggctttggtactagggttggaattggtgttgcagttgttatatttggactagtcttcgcttttggggatttcctgccttatggaagtgttagccctagcaaagaaagtgcagtagttaaacaaaagctttctcaagaggaagaagaaaaatttaagaatgcactgcaaggctttcaagcaacgctgagtaagtcgcctaatgatcctactgctcttgagggtgcagcagtatcgttgtccgaactaggtgagtatgagaaggcatcaacattccttgagaagctaattaaggtaatccctgataaagcagaagcataccgtttgcttggtgaagtaaagtttgaactcaaggattatgaagggagttcatcatcatacagaagtgctttatctataatattgattttgaagttctccgtggactgacaaattcattacttgctgctaagaagccagatgagtaccatctgccttgtctgtaggcggatcatctgatcatcagttatgtgggaagctagaccgaaaccactgaaaacagtttgctattcccgaccattctgactgtcaagtgagatattgatagaaattgcattggctgtgacatatttgagaaaacagggagagataacagcaaatatcagtagctgtagagcaccagagaccttccagcaatgaccttgcacctacagcagcactgacctccaatcctccattcgccttcaccattcaccaaacatgaacagaagcaggatgaagggctgcaagggcagttgatataattctgttatgccgtcgaaagttgaatgaaaagagtcaaacaggactagcagatttggaggctacaaatgacaatggtcgccaaaagcctcaagatattgacccgatccaagttgacctgcttttagggaaggcttattccgattggggtcatatcagtgatgctatttctgtctacgataagctaataactgatcatcctgaagacttccgtggttatttagcaaagggaatcatattaaaggaaaatggtaaagcaggtgatgcagaaagaatgtttattcaggcaaaattcttcgccccggaggcagcgaaggcactagttgatcgctatgcgcaaagatagtcgataagagattgaatggtgttgttttaaaccaatgagatcattcggattccagaaaaacgatcaacatgtttggaacgtcttgtatgatagcaacattatgggatctgggacattttgaattgtattgttttagaacaggcctgacgcagtatcgaaaaaagccttcccactgagacaagagattctgggttcgacagtctctgaaaaaatgcagggcaagccctgcccttggttattccttctttctgaaaaaaatgcagggtaagccttgcccttggttattccttctctctgaaaaaatgctgggtaagccttgccctgggttattccttgctcagacctcgctcacgcggaagccgccagcagcccttttattgctttagaacagcagaaatgaaacatgtatgctttgcctgggaacaatgctcagttaaacattttgatatacgtgtttagtccattatataaaaaattatttcgatgtgttggaacaaattgtgttgtcacggcacgagcctcagtgttctccatatccataatcacgtgaaatatgatcgtggttgaggtaatatatgtcatcttgccatgaatagttagggtcatatccctttgttgctctggttaaaagtcagtggtattccctgtgcatgcaacatgtgtggacattgtatttgtgattcaatagttctatagataatgtggttataaaa

SEQ ID NO: 65108 - DNA, 2041 bp, Zea Mays
gtgtactactggattctcacaccgcagcatccgttcacgtgtcttcaccccgagtgctgtctctctccttcctctctgctacggctgggtgaggcggggggctactgccgccgcctaacgccaggttccgaggccttcgtcggtctatttgccggcgatgaacatccaccagggatggttgcaacaatttgggcatagcgttggtatcagtggttcgaagatggttctccatatgacccacaatgtattcagttttcgatgctttgctgccaatgggcgtggcttcagtgcggattctaccaataagagaaaaattaaaagcaagaagaggcgaaaggatgttgcactggaatcaagtgaggtaatatctggaaatccaaggaacagggaccaatgtctgctcttgagaaaaagaaagctgaagagaacaaagattatcaagctattgattatgatgctccaattgagtcagataaaagtactattggctttggtactagggttggaattggtgttgcagttgttatatttggactagtcttcgcttttggggatttcctgccttatggaagtgttagccctagcaaagaaagtgcagtagttaaacaaaagctttctcaagaggaagaagaaaaatttaagaatgcactgcaaggctttcaagcaacgctgagtaagtcgcctaatgatcctactgctcttgagggtgcagcagtatcgttgtccgaactaggtgagtatgagaaggcatcaacattccttgagaagctaattaaggtaatccctgataaagcagaagcataccgtttgcttggtgaagtaaagtttgaactcaaggattatgaagggagttcatcatcatacagaagtgctttatctactaacaattgaaacagtcatcagataatattgattttgaagttctccgtggactgacaaattcattacttgctgctaagaagccagatgaggcagttgatataattctgttatgccgtcgaaagttgaatgaaaagagtcaaacaggactagcagatttggaggctacaaatgacaatggtcgccaaaagcctcaagatattgacccgatccaagttgacctgcttttagggaaggcttattccgattggggtcatatcagtgatgctatttctgtctacgataagctaataactgatcatcctgaagacttccgtggttatttagcaaagggaatcatattaaaggaaaatggtaaagcaggtgatgcagaaagaatgtttattcaggcaaaattcttcgccccggaggcagcgaaggcactagttgatcgctatgcgcaaagatagtcgataagagattgaatggtgttgttttaaaccaatgagatcattcggattccagaaaaacgatcaacatgtttggaacgtcttgtatgatagcaacattatgggatctgggacattttgaattgtattgttttagaacaggcctgacgcagtatcgaaaaaagccttcccactgagacaagagattctgggttcgacagtctctgaaaaaatgcagggcaagccctgcccttggttattccttctttctgaaaaaaatgcagggtaagccttgcccttggttattccttctctctgaaaaaatgctgggtaagccttgccctgggttattccttgctcagacctcgctcacgcggaagccgccagcagcccttttattgctttagaacagcagaaatgaaacatgtatgctttgcctgggaacaatgctcagttaaacattttgatatacgtgtttagtccattatataaaaaattatttcgatgtgttggaacaaattgtgttgtcacggcacgagcctcagtgttctccatatccataatcacgtgaaatatgatcgtggttgaggtaatatatgtcatcttgccatgaatagttagggtcatatccctttgttgctctggttaaaagtcagtggtattccctgtgcatgcaacatgtgtggacattgtatttgtgattcaatagttctatagataatgtggttataaaa

SEQ ID NO: 65109 - DNA, 2128 bp, Zea Mays
gtgtactactggattctcacaccgcagcatccgttcacgtgtcttcaccccgagtgctgtctctctccttcctctctgctacggctgggtgaggcggggggctactgccgccgcctaacgccaggttccgaggccttcgtcggtctatttgccggcgatgaacatccaccagggatggttgcaacaatttgggcatagcgttggtatcagtggttcgaagatggttctccatatgacccacaatgtattcagttttcgatgctttgctgccaatgggcgtggcttcagtgcggattctaccaataagagaaaaattaaaagcaagaagaggcgaaaggatgttgcactggaatcaagtgaggtaatatctggaaatccaaggaacagggaccaatgggtgccagaattaagaactgaaagtgaaaacaaatctggtaaaaaagtcatggataagaaatttttggaaaaagtggaagcggttcgaaggtctgctcttgagaaaaagaaagctgaagagaacaaagattatcaagctattgattatgatgctccaattgagtcagataaaagtactattggctttggtactagggttggaattggtgttgcagttgttatatttggactagtcttcgcttttggggatttcctgccttatggaagtgttagccctagcaaagaaagtgcagtagttaaacaaaagctttctcaagaggaagaagaaaaatttaagaatgcactgcaaggctttcaagcaacgctgagtaagtcgcctaatgatcctactgctcttgagggtgcagcagtatcgttgtccgaactaggtgagtatgagaaggcatcaacattccttgagaagctaattaaggtaatccctgataaagcagaagcataccgtttgcttggtgaagtaaagtttgaactcaaggattatgaagggagttcatcatcatacagaagtgctttatctactaacaattgaaacagtcatcagataatattgattttgaagttctccgtggactgacaaattcattacttgctgctaagaagccagatgagttgatataattctgttatgccgtcgaaagttgaatgaaaagagtcaaacaggactagcagatttggaggctacaaatgacaatggtcgccaaaagcctcaagatattgacccgatccaagttgacctgcttttagggaaggcttattccgattggggtcatatcagtgatgctatttctgtctacgataagctaataactgatcatcctgaagacttccgtggttatttagcaaagggaatcatattaaaggaaaatggtaaagcaggtgatgcagaaagaatgtttattcaggcaaaattcttcgccccggaggcagcgaaggcactagttgatcgctatgcgcaaagatagtcgataagagattgaatggtgttgttttaaaccaatgagatcattcggattccagaaaaacgatcaacatgtttggaacgtcttgtatgatagcaacattatgggatctgggacattttgaattgtattgttttagaacaggcctgacgcagtatcgaaaaaagccttcccactgagacaagagattctgggttcgacagtctctgaaaaaatgcagggcaagccctgcccttggttattccttctttctgaaaaaaatgcagggtaagccttgcccttggttattccttctctctgaaaaaatgctgggtaagccttgccctgggttattccttgctcagacctcgctcacgcggaagccgccagcagcccttttattgctttagaacagcagaaatgaaacatgtatgctttgcctgggaacaatgctcagttaaacattttgatatacgtgtttagtccattatataaaaaattatttcgatgtgttggaacaaattgtgttgtcacggcacgagcctcagtgttctccatatccataatcacgtgaaatatgatcgtggttgaggtaatatatgtcatcttgccatgaatagttagggtcatatccctttgttgctctggttaaaagtcagtggtattccctgtgcatgcaacatgtgtggacattgtatttgtgattcaatagttctatagataatgtggttataaaa

SEQ ID NO: 65110 - DNA, 2210 bp, Zea Mays
gtgtactactggattctcacaccgcagcatccgttcacgtgtcttcaccccgagtgctgtctctctccttcctctctgctacggctgggtgaggcggggggctactgccgccgcctaacgccaggttccgaggccttcgtcggtctatttgccggcgatgaacatccaccagggatggttgcaacaatttgggcatagcgttggtatcagtggttcgaagatggttctccatatgacccacaatgtattcagttttcgatgctttgctgccaatgggcgtggcttcagtgcggattctaccaataagagaaaaattaaaagcaagaagaggcgaaaggatgttgcactggaatcaagtgaggtaatatctggaaatccaaggaacagggaccaatgggtgccagaattaagaactgaaagtgaaaacaaatctggtaaaaaagtcatggataagaaatttttggaaaaagtggaagcggttcgaaggtctgctcttgagaaaaagaaagctgaagagaacaaagattatcaagctattgattatgatgctccaattgagtcagataaaagtactattggctttggtactagggttggaattggtgttgcagttgttatatttggactagtcttcgcttttggggatttcctgccttatggaagtgttagccctagcaaagaaagtgcagtagttaaacaaaagctttctcaagaggaagaagaaaaatttaagaatgcactgcaaggctttcaagcaacgctgagtaagtcgcctaatgatcctactgctcttgagctcttttgcgctttcgagaaaaaaaacaacattgatgcttttgaaggggcaaggctgaggggaatgccaagagcaatgtgaagaaaagcatcaggggtgcagcagtatcgttgtccgaactaggtgagtatgagaaggcatcaacattccttgagaagctaattaaggtaatccctgataaagcagaagcataccgtttgcttggtgaagtaaagtttgaactcaaggattatgaagggagttcatcatcatacagaagtgctttatcttcatcagataatattgattttgaagttctccgtggactgacaaattcattacttgctgctaagaagccagatgaggcagttgatataattctgttatgccgtcgaaagttgaatgaaaagagtcaaacaggactagcagatttggaggctacaaatgacaatggtcgccaaaagcctcaagatattgacccgatccaagttgacctgcttttagggaaggcttattccgattggggtcatatcagtgatgctatttctgtctacgataagctaataactgatcatcctgaagacttccgtggttatttagcaaagggaatcatattaaaggaaaatggtaaagcaggtgatgcagaaagaatgtttattcaggcaaaattcttcgccccggaggcagcgaaggcactagttgatcgctatgcgcaaagatagtcgataagagattgaatggtgttgttttaaaccaatgagatcattcggattccagaaaaacgatcaacatgtttggaacgtcttgtatgatagcaacattatgggatctgggacattttgaattgtattgttttagaacaggcctgacgcagtatcgaaaaaagccttcccactgagacaagagattctgggttcgacagtctctgaaaaaatgcagggcaagccctgcccttggttattccttctttctgaaaaaaatgcagggtaagccttgcccttggttattccttctctctgaaaaaatgctgggtaagccttgccctgggttattccttgctcagacctcgctcacgcggaagccgccagcagcccttttattgctttagaacagcagaaatgaaacatgtatgctttgcctgggaacaatgctcagttaaacattttgatatacgtgtttagtccattatataaaaaattatttcgatgtgttggaacaaattgtgttgtcacggcacgagcctcagtgttctccatatccataatcacgtgaaatatgatcgtggttgaggtaatatatgtcatcttgccatgaatagttagggtcatatccctttgttgctctggttaaaagtcagtggtattccctgtgcatgcaacatgtgtggacattgtatttgtgattcaatagttctatagataatgtggttataaaa

SEQ ID NO: 65111 - DNA, 2178 bp, Zea Mays
gtgtactactggattctcacaccgcagcatccgttcacgtgtcttcaccccgagtgctgtctctctccttcctctctgctacggctgggtgaggcggggggctactgccgccgcctaacgccaggttccgaggccttcgtcggtctatttgccggcgatgaacatccaccagggatggttgcaacaatttgggcatagcgttggtatcagtggttcgaagatggttctccatatgacccacaatgtattcagttttcgatgctttgctgccaatgggcgtggcttcagtgcggattctaccaataagagaaaaattaaaagcaagaagaggcgaaaggatgttgcactggaatcaagtgaggtaatatctggaaatccaaggaacagggaccaatgggtgccagaattaagaactgaaagtgaaaacaaatctggtaaaaaagtcatggataagaaatttttggaaaaagtggaagcggttcgaaggtctgctcttgagaaaaagaaagctgaagagaacaaagattatcaagctattgattatgatgctccaattgagtcagataaaagtactattggctttggtactagggttggaattggtgttgcagttgttatatttggactagtcttcgcttttggggatttcctgccttatggaagtgttagccctagcaaagaaagtgcagtagttaaacaaaagctttctcaagaggaagaagaaaaatttaagaatgcactgcaaggctttcaagcaacgctgactcttttgcgctttcgagaaaaaaaacaacattgatgcttttgaaggggcaaggctgaggggaatgccaagagcaatgtgaagaaaagcatcaggggtgcagcagtatcgttgtccgaactaggtgagtatgagaaggcatcaacattccttgagaagctaattaaggtaatccctgataaagcagaagcataccgtttgcttggtgaagtaaagtttgaactcaaggattatgaagggagttcatcatcatacagaagtgctttatcttcatcagataatattgattttgaagttctccgtggactgacaaattcattacttgctgctaagaagccagatgaggcagttgatataattctgttatgccgtcgaaagttgaatgaaaagagtcaaacaggactagcagatttggaggctacaaatgacaatggtcgccaaaagcctcaagatattgacccgatccaagttgacctgcttttagggaaggcttattccgattggggtcatatcagtgatgctatttctgtctacgataagctaataactgatcatcctgaagacttccgtggttatttagcaaagggaatcatattaaaggaaaatggtaaagcaggtgatgcagaaagaatgtttattcaggcaaaattcttcgccccggaggcagcgaaggcactagttgatcgctatgcgcaaagatagtcgataagagattgaatggtgttgttttaaaccaatgagatcattcggattccagaaaaacgatcaacatgtttggaacgtcttgtatgatagcaacattatgggatctgggacattttgaattgtattgttttagaacaggcctgacgcagtatcgaaaaaagccttcccactgagacaagagattctgggttcgacagtctctgaaaaaatgcagggcaagccctgcccttggttattccttctttctgaaaaaaatgcagggtaagccttgcccttggttattccttctctctgaaaaaatgctgggtaagccttgccctgggttattccttgctcagacctcgctcacgcggaagccgccagcagcccttttattgctttagaacagcagaaatgaaacatgtatgctttgcctgggaacaatgctcagttaaacattttgatatacgtgtttagtccattatataaaaaattatttcgatgtgttggaacaaattgtgttgtcacggcacgagcctcagtgttctccatatccataatcacgtgaaatatgatcgtggttgaggtaatatatgtcatcttgccatgaatagttagggtcatatccctttgttgctctggttaaaagtcagtggtattccctgtgcatgcaacatgtgtggacattgtatttgtgattcaatagttctatagataatgtggttataaaa

SEQ ID NO: 65112 - DNA, 1954 bp, Zea Mays
gtgtactactggattctcacaccgcagcatccgttcacgtgtcttcaccccgagtgctgtctctctccttcctctctgctacggctgggtgaggcggggggctactgccgccgcctaacgccaggttccgaggccttcgtcggtctatttgccggcgatgaacatccaccagggatggttgcaacaatttgggcatagcgttggtatcagtggttcgaagatggttctccatatgacccacaatgtattcagttttcgatgctttgctgccaatgggcgtggcttcagtgcggattctaccaataagagaaaaattaaaagcaagaagaggcgaaaggatgttgcactggaatcaaggtctgctcttgagaaaaagaaagctgaagagaacaaagattatcaagctattgattatgatgctccaattgagtcagataaaagtactattggctttggtactagggttggaattggtgttgcagttgttatatttggactagtcttcgcttttggggatttcctgccttatggaagtgttagccctagcaaagaaagtgcagtagttaaacaaaagctttctcaagaggaagaagaaaaatttaagaatgcactgcaaggctttcaagcaacgctgaggtgcagcagtatcgttgtccgaactaggtgagtatgagaaggcatcaacattccttgagaagctaattaaggtaatccctgataaagcagaagcataccgtttgcttggtgaagtaaagtttgaactcaaggattatgaagggagttcatcatcatacagaagtgctttatcttcatcagataatattgattttgaagttctccgtggactgacaaattcattacttgctgctaagaagccagatgaggcagttgatataattctgttatgccgtcgaaagttgaatgaaaagagtcaaacaggactagcagatttggaggctacaaatgacaatggtcgccaaaagcctcaagatattgacccgatccaagttgacctgcttttagggaaggcttattccgattggggtcatatcagtgatgctatttctgtctacgataagctaataactgatcatcctgaagacttccgtggttatttagcaaagggaatcatattaaaggaaaatggtaaagcaggtgatgcagaaagaatgtttattcaggcaaaattcttcgccccggaggcagcgaaggcactagttgatcgctatgcgcaaagatagtcgataagagattgaatggtgttgttttaaaccaatgagatcattcggattccagaaaaacgatcaacatgtttggaacgtcttgtatgatagcaacattatgggatctgggacattttgaattgtattgttttagaacaggcctgacgcagtatcgaaaaaagccttcccactgagacaagagattctgggttcgacagtctctgaaaaaatgcagggcaagccctgcccttggttattccttctttctgaaaaaaatgcagggtaagccttgcccttggttattccttctctctgaaaaaatgctgggtaagccttgccctgggttattccttgctcagacctcgctcacgcggaagccgccagcagcccttttattgctttagaacagcagaaatgaaacatgtatgctttgcctgggaacaatgctcagttaaacattttgatatacgtgtttagtccattatataaaaaattatttcgatgtgttggaacaaattgtgttgtcacggcacgagcctcagtgttctccatatccataatcacgtgaaatatgatcgtggttgaggtaatatatgtcatcttgccatgaatagttagggtcatatccctttgttgctctggttaaaagtcagtggtattccctgtgcatgcaacatgtgtggacattgtatttgtgattcaatagttctatagataatgtggttataaaa

SEQ ID NO: 65113 - DNA, 1984 bp, Zea Mays
ctcttcaacacgcacccttcacctctaccgcaccaggtggcgcctcctccccaagcagcatatccaaaccaggatccgattccttccaactggactccttggactagctcatgggatcaacagcagccgaccagtaccttcaacaccatgatgttgcagcctcccctcgccatcaccgactggatccccgactctggggcctccaaccacaccaccctgacgtccgtgaggtaatatctggaaatccaaggaacagggaccaatgggtgccagaattaagaactgaaagtgaaaacaaatctggtaaaaaagtcatggataagaaatttttggaaaaagtggaagcggttcgaaggtctgctcttgagaaaaagaaagctgaagagaacaaagattatcaagctattgattatgatgctccaattgagtcagataaaagtactattggctttggtactagggttggaattggtgttgcagttgttatatttggactagtcttcgcttttggggatttcctgccttatggaagtgttagccctagcaaagaaagtgcagtagttaaacaaaagctttctcaagaggaagaagaaaaatttaagaatgcactgcaaggctttcaagcaacgctgagtaagtcgcctaatgatcctactgctcttgagggtgcagcagtatcgttgtccgaactaggtgagtatgagaaggcatcaacattccttgagaagctaattaaggtaatccctgataaagcagaagcataccgtttgcttggtgaagtaaagtttgaactcaaggattatgaagggagttcatcatcatacagaagtgctttatcttcatcagataatattgattttgaagttctccgtggactgacaaattcattacttgctgctaagaagccagatgaggcagttgatataattctgttatgccgtcgaaagttgaatgaaaagagtcaaacaggactagcagatttggaggctacaaatgacaatggtcgccaaaagcctcaagatattgacccgatccaagttgacctgcttttagggaaggcttattccgattggggtcatatcagtgatgctatttctgtctacgataagctaataactgatcatcctgaagacttccgtggttatttagcaaagggaatcatattaaaggaaaatggtaaagcaggtgatgcagaaagaatgtttattcaggcaaaattcttcgccccggaggcagcgaaggcactagttgatcgctatgcgcaaagatagtcgataagagattgaatggtgttgttttaaaccaatgagatcattcggattccagaaaaacgatcaacatgtttggaacgtcttgtatgatagcaacattatgggatctgggacattttgaattgtattgttttagaacaggcctgacgcagtatcgaaaaaagccttcccactgagacaagagattctgggttcgacagtctctgaaaaaatgcagggcaagccctgcccttggttattccttctttctgaaaaaaatgcagggtaagccttgcccttggttattccttctctctgaaaaaatgctgggtaagccttgccctgggttattccttgctcagacctcgctcacgcggaagccgccagcagcccttttattgctttagaacagcagaaatgaaacatgtatgctttgcctgggaacaatgctcagttaaacattttgatatacgtgtttagtccattatataaaaaattatttcgatgtgttggaacaaattgtgttgtcacggcacgagcctcagtgttctccatatccataatcacgtgaaatatgatcgtggttgaggtaatatatgtcatcttgccatgaatagttagggtcatatccctttgttgctctggttaaaagtcagtggtattccctgtgcatgcaacatgtgtggacattgtatttgtgattcaatagttctatagataatgtggttataaaa

SEQ ID NO: 65114 - DNA, 1373 bp, Zea Mays
ggggaatgccaagagcaatgtgaagaaaagcatcaggggtgcagcagtatcgttgtccgaactaggtgagtatgagaaggcatcaacattccttgagaagctaattaaggtaatccctgataaagcagaagcataccgtttgcttggtgaagtaaagtttgaactcaaggattatgaagggagttcatcatcatacagaagtgctttatctactaacaattgaaacagtcatcagataatattgattttgaagttctccgtggactgacaaattcattacttgctgctaagaagccagatgaggcagttgatataattctgttatgccgtcgaaagttgaatgaaaagagtcaaacaggactagcagatttggaggctacaaatgacaatggtcgccaaaagcctcaagatattgacccgatccaagttgacctgcttttagggaaggcttattccgattggggtcatatcagtgatgctatttctgtctacgataagctaataactgatcatcctgaagacttccgtggttatttagcaaagggaatcatattaaaggaaaatggtaaagcaggtgatgcagaaagaatgtttattcaggcaaaattcttcgccccggaggcagcgaaggcactagttgatcgctatgcgcaaagatagtcgataagagattgaatggtgttgttttaaaccaatgagatcattcggattccagaaaaacgatcaacatgtttggaacgtcttgtatgatagcaacattatgggatctgggacattttgaattgtattgttttagaacaggcctgacgcagtatcgaaaaaagccttcccactgagacaagagattctgggttcgacagtctctgaaaaaatgcagggcaagccctgcccttggttattccttctttctgaaaaaaatgcagggtaagccttgcccttggttattccttctctctgaaaaaatgctgggtaagccttgccctgggttattccttgctcagacctcgctcacgcggaagccgccagcagcccttttattgctttagaacagcagaaatgaaacatgtatgctttgcctgggaacaatgctcagttaaacattttgatatacgtgtttagtccattatataaaaaattatttcgatgtgttggaacaaattgtgttgtcacggcacgagcctcagtgttctccatatccataatcacgtgaaatatgatcgtggttgaggtaatatatgtcatcttgccatgaatagttagggtcatatccctttgttgctctggttaaaagtcagtggtattccctgtgcatgcaacatgtgtggacattgtatttgtgattcaatagttctatagataatgtggttataaaa

SEQ ID NO: 65115 - DNA, 1238 bp, Zea Mays
attgactcaagatatgaatagagtgagaaatctcaggacgggtgatcccaaggtagaaaatgctcccaacaagccgacgttagtgagtgggatcaacaagtgctgcatggttagaggacttgttcctaggctctcgggcagagggcttgtctgctggctctgctagaggcagttgatataattctgttatgccgtcgaaagttgaatgaaaagagtcaaacaggactagcagatttggaggctacaaatgacaatggtcgccaaaagcctcaagatattgacccgatccaagttgacctgcttttagggaaggcttattccgattggggtcatatcagtgatgctatttctgtctacgataagctaataactgatcatcctgaagacttccgtggttatttagcaaagggaatcatattaaaggaaaatggtaaagcaggtgatgcagaaagaatgtttattcaggcaaaattcttcgccccggaggcagcgaaggcactagttgatcgctatgcgcaaagatagtcgataagagattgaatggtgttgttttaaaccaatgagatcattcggattccagaaaaacgatcaacatgtttggaacgtcttgtatgatagcaacattatgggatctgggacattttgaattgtattgttttagaacaggcctgacgcagtatcgaaaaaagccttcccactgagacaagagattctgggttcgacagtctctgaaaaaatgcagggcaagccctgcccttggttattccttctttctgaaaaaaatgcagggtaagccttgcccttggttattccttctctctgaaaaaatgctgggtaagccttgccctgggttattccttgctcagacctcgctcacgcggaagccgccagcagcccttttattgctttagaacagcagaaatgaaacatgtatgctttgcctgggaacaatgctcagttaaacattttgatatacgtgtttagtccattatataaaaaattatttcgatgtgttggaacaaattgtgttgtcacggcacgagcctcagtgttctccatatccataatcacgtgaaatatgatcgtggttgaggtaatatatgtcatcttgccatgaatagttagggtcatatccctttgttgctctggttaaaagtcagtggtattccctgtgcatgcaacatgtgtggacattgtatttgtgattcaatagttctatagataatgtggttataaaa

SEQ ID NO: 65116 - DNA, 1095 bp, Zea Mays
agagggcttgtctgctggctctgctagagttgatataattctgttatgccgtcgaaagttgaatgaaaagagtcaaacaggactagcagatttggaggctacaaatgacaatggtcgccaaaagcctcaagatattgacccgatccaagttgacctgcttttagggaaggcttattccgattggggtcatatcagtgatgctatttctgtctacgataagctaataactgatcatcctgaagacttccgtggttatttagcaaagggaatcatattaaaggaaaatggtaaagcaggtgatgcagaaagaatgtttattcaggcaaaattcttcgccccggaggcagcgaaggcactagttgatcgctatgcgcaaagatagtcgataagagattgaatggtgttgttttaaaccaatgagatcattcggattccagaaaaacgatcaacatgtttggaacgtcttgtatgatagcaacattatgggatctgggacattttgaattgtattgttttagaacaggcctgacgcagtatcgaaaaaagccttcccactgagacaagagattctgggttcgacagtctctgaaaaaatgcagggcaagccctgcccttggttattccttctttctgaaaaaaatgcagggtaagccttgcccttggttattccttctctctgaaaaaatgctgggtaagccttgccctgggttattccttgctcagacctcgctcacgcggaagccgccagcagcccttttattgctttagaacagcagaaatgaaacatgtatgctttgcctgggaacaatgctcagttaaacattttgatatacgtgtttagtccattatataaaaaattatttcgatgtgttggaacaaattgtgttgtcacggcacgagcctcagtgttctccatatccataatcacgtgaaatatgatcgtggttgaggtaatatatgtcatcttgccatgaatagttagggtcatatccctttgttgctctggttaaaagtcagtggtattccctgtgcatgcaacatgtgtggacattgtatttgtgattcaatagttctatagataatgtggttataaaa

SEQ ID NO: 65117 - DNA, 2524 bp, Zea Mays
tatatcaccaaagctggacgaagcaaaccgagccaaaacgacgtgtccagacacgaaaatacacagcatagcagtcgtcgtatagatatacagtgaacaagtgatcgttggtccatggcagcctcgccgctgccgagatgggcgccgacaccaagcccgaccagaccactcagggtgtcgagcgccggcggccaaacagccgtgtcttcgtcatcatggagctgggcattctgccgctcgttcatcggctccgccgtcgtctacccgccgtggaggcgctctacaccaccgccaccgccaccgccagcgccagcgggtgatccggcggcggccaatgctgctgcggacgatggtcgtcgtcacggccggttttgctctcatccgttggactgtgttggagccagagactgcagccttccagaggacgccggcggcggccgtgaggtgttcctgacatgggaggatctttcggtgacagcgtcgtcgtcgactggcgggaaggcgaaacccgcggtaattctcgacaagatcagcgggtacgcgcgccctggtgaggtgctggccgtcatggggccttcggggtgtggcaagacaaccctacttgatgccctagctggacgacttggttctgacaagagaaggacggcgggtaacatcttgatcaatgggcgacgagagaaacttgcctttggaacatctaataatgttacaagcagcggtggatggtgcaccatgcatacctgtcttctcattgcattgaaggcctacgtgacccaagagacgctgctgatggcgacgctgacggtgacggaggccgtccactactcggcgcagctgcagctgccggactcggtgccgccggccgacaagcgggagcgcgccgaccgcgccatcaagcagatggggctcgccgcggtggccgggcaccggatcggcggccgcgtgtgcaaggggatcagcggcgggcagcgccggcgcgtgagcatctgcgtcgagctgctggcgtcgccggcgctggtgttcctcgacgagcccaccagcgggctcgacagcgccgcgtcgttccacgtcatgagccgcatcgccgggctcgcgcgggccgagagggtcacggtcgtcgccaccatgcaccagcccagcagcgaggtgttccagctcttccatggcctctgcctcatggcgtacgggaggatggtgtattttgggccagcgtcggatgccatccagttctttgattcgaatggttacccatgtcctatgagaaggaacccttcagaccacttcttgatgatgataaacaaagatttcgaggaacttgaggaagaagggtccaccgcccttctgttaccaagtgcgactgaagtcatagaaactttggtagattctttaatgtctcagagaagtttggcaataagaaacgaagcattatttatgatgaaacagcagggcgcagctttcacaaagaaaaggcaagctactttcttgaccaaatgtgtggtgttaaccaagagatcagtaatcaacatgcatcgagacatgggctactactggttgcggttcggtatttatatagccatctgtgtgagcattggcaccatcttcttcaacgttggctatggttttgcatcgatccaagcaagagcgtctatgttaatgtttacatcaaccctattgacaatgatgtcaatcgggggattcccctcgtttgtcgaggacatgaaggtgttcagaaaagagcagctgaatgggcattacggtgctactgcatttgtcatcgctaacacggtctcatcaacactgtacctggggatcatctccataataccgggcgcagtatgctactacttgaccgggctccagaggcgcttggaccacttcctctacttcgcggcggtgctatgggcttgcacgatgctggtcgaagggctgatgatgatcgtcgctgcccttgtgcctgatttcctgctgggcataattactggctcagggatacagggcctgctaatgctcaacgctggtttcttcaggcttccacacgacctccccaaacccttgtggaagtacccgacgtactacatctcctaccacaagtacgctacgcaggggctctacaagaacgagttcctaggtttagtgttcgatgatggtgtgttaggaaaggggctcactgttagtggtgactatatactgaggaccagcttgcaggtcgagatgggctactcgaagtgggtggaccttgcaatattgcttgccatggtcttcatctatcgggtccttttcttagtcactattaaagtaggtgaggcggtcaaacccatgattaaatgcatgtcgattaaagtttaagaagggttttatatgttttcttttcttttcttttcttttcttttctttactttagccagagatagatatgatatgatgccgccgtcagttggctgcacatcatcaatgcattgtaacagtataagcttgttcaacctccaacaaataatggaccttgacaaattgttgggagtttaag

SEQ ID NO: 65118 - DNA, 2521 bp, Zea Mays
tatatcaccaaagctggacgaagcaaaccgagccaaaacgacgtgtccagacacgaaaatacacagcatagcagtcgtcgtatagatatacagtgaacaagtgatcgttggtccatggcagcctcgccgctgccgagatgggcgccgacaccaagcccgaccagaccactcagggtgtcgagcgccggcggccaaacagccgtgtcttcgtcatcatggagctgggcattctgccgctcgttcatcggctccgccgtcgtctacccgccgtggaggcgctctacaccaccgccaccgccaccgccagcgccagcgggtgatccggcggcggccaatgctgctgcggacgatggtcgtcgtcacggccggttttgctctcatccgttggactgtgttggagccagagactgcagccttccagaggacgccggcggcggccgtgaggtgttcctgacatgggaggatctttcggtgacagcgtcgtcgtcgactggcgggaaggcgaaacccgcggtaattctcgacaagatcagcgggtacgcgcgccctggtgaggtgctggccgtcatggggccttcggggtgtggcaagacaaccctacttgatgccctagctggacgacttggttctgacaagagaaggacggcgggtaacatcttgatcaatgggcgacgagagaaacttgcctttggaacatctaataatgttacaagcagcggtggatggtgcaccatgcatacctgtcttctcattgcattgaaggcctacgtgacccaagagacgctgctgatggcgacgctgacggtgacggaggccgtccactactcggcgcagctgcagctgccggactcggtgccgccggccgacaagcgggagcgcgccgaccgcgccatcaagcagatggggctcgccgcggtggccgggcaccggatcggcggccgcgtgtgcaaggggatcagcggcgggcagcgccggcgcgtgagcatctgcgtcgagctgctggcgtcgccggcgctggtgttcctcgacgagcccaccagcgggctcgacagcgccgcgtcgttccacgtcatgagccgcatcgccgggctcgcgcgggccgagagggtcacggtcgtcgccaccatgcaccagcccagcagcgaggtgttccagctcttccatggcctctgcctcatggcgtacgggaggatggtgtattttgggccagcgtcggatgccatccagttctttgattcgaatggttacccatgtcctatgagaaggaacccttcagaccacttcttgatgatgataaacaaagatttcgaggaacttgaggaagaagggtccaccgcccttctgttaccaagtgcgactgaagtcatagaaactttggtagattctttaatgtctcagagaagtttggcaataagaaacgaagcattatttatgatgaaacagggcgcagctttcacaaagaaaaggcaagctactttcttgaccaaatgtgtggtgttaaccaagagatcagtaatcaacatgcatcgagacatgggctactactggttgcggttcggtatttatatagccatctgtgtgagcattggcaccatcttcttcaacgttggctatggttttgcatcgatccaagcaagagcgtctatgttaatgtttacatcaaccctattgacaatgatgtcaatcgggggattcccctcgtttgtcgaggacatgaaggtgttcagaaaagagcagctgaatgggcattacggtgctactgcatttgtcatcgctaacacggtctcatcaacactgtacctggggatcatctccataataccgggcgcagtatgctactacttgaccgggctccagaggcgcttggaccacttcctctacttcgcggcggtgctatgggcttgcacgatgctggtcgaagggctgatgatgatcgtcgctgcccttgtgcctgatttcctgctgggcataattactggctcagggatacagggcctgctaatgctcaacgctggtttcttcaggcttccacacgacctccccaaacccttgtggaagtacccgacgtactacatctcctaccacaagtacgctacgcaggggctctacaagaacgagttcctaggtttagtgttcgatgatggtgtgttaggaaaggggctcactgttagtggtgactatatactgaggaccagcttgcaggtcgagatgggctactcgaagtgggtggaccttgcaatattgcttgccatggtcttcatctatcgggtccttttcttagtcactattaaagtaggtgaggcggtcaaacccatgattaaatgcatgtcgattaaagtttaagaagggttttatatgttttcttttcttttcttttcttttcttttctttactttagccagagatagatatgatatgatgccgccgtcagttggctgcacatcatcaatgcattgtaacagtataagcttgttcaacctccaacaaataatggaccttgacaaattgttgggagtttaag

SEQ ID NO: 65119 - DNA, 2525 bp, Zea Mays
gccaaaacgacgtgtccagacacgaaaatacacagcatagcagtcgtcgtatagatatacagtgaacaagtgatcgttggtccatggcagcctcgccgctgccgagatgggcgccgacaccaagcccgaccagaccactcagggtgtcgagcgccggcggccaaacagccgtgtcttcgtcatcatggagctgggcattctgccgctcgttcatcggctccgccgtcgtctacccgccgtggaggcgctctacaccaccgccaccgccaccgccagcgccagcgggtgatccggcggcggccaatgctgctgcggacgatggtcgtcgtcacggccggttttgctctcatccgttggactgtgttggagccagagactgcagccttccagaggacgccggcggcggccgtgaggtgttcctgacatgggaggatctttcggtgacagcgtcgtcgtcgactggcgggaaggcgaaacccgcggtaattctcgacaagatcagcgggtacgcgcgccctggtgaggtgctggccgtcatggggccttcggggtgtggcaagacaaccctacttgatgccctagctggacgacttggttctgacaagagaaggacggcgggtaacatcttgatcaatgggcgacgagagaaacttgcctttggaacatctgtaagttctatttctatctactgctagagaataatgttacaagcagcggtggatggtgcaccatgcatacctgtcttctcattgcattgaaggcctacgtgacccaagagacgctgctgatggcgacgctgacggtgacggaggccgtccactactcggcgcagctgcagctgccggactcggtgccgccggccgacaagcgggagcgcgccgaccgcgccatcaagcagatggggctcgccgcggtggccgggcaccggatcggcggccgcgtgtgcaaggggatcagcggcgggcagcgccggcgcgtgagcatctgcgtcgagctgctggcgtcgccggcgctggtgttcctcgacgagcccaccagcgggctcgacagcgccgcgtcgttccacgtcatgagccgcatcgccgggctcgcgcgggccgagagggtcacggtcgtcgccaccatgcaccagcccagcagcgaggtgttccagctcttccatggcctctgcctcatggcgtacgggaggatggtgtattttgggccagcgtcggatgccatccagttctttgattcgaatggttacccatgtcctatgagaaggaacccttcagaccacttcttgatgatgataaacaaagatttcgagtaggaacttgaggaagaagggtccaccgcccttctgttaccaagtgcgactgaagtcatagaaactttggtagattctttaatgtctcagagaagtttggcaataagaaacgaagcattatttatgatgaaacagcagggcgcagctttcacaaagaaaaggcaagctactttcttgaccaaatgtgtggtgttaaccaagagatcagtaatcaacatgcatcgagacatgggctactactggttgcggttcggtatttatatagccatctgtgtgagcattggcaccatcttcttcaacgttggctatggttttgcatcgatccaagcaagagcgtctatgttaatgtttacatcaaccctattgacaatgatgtcaatcgggggattcccctcgtttgtcgaggacatgaaggtgttcagaaaagagcagctgaatgggcattacggtgctactgcatttgtcatcgctaacacggtctcatcaacactgtacctggggatcatctccataataccgggcgcagtatgctactacttgaccgggctccagaggcgcttggaccacttcctctacttcgcggcggtgctatgggcttgcacgatgctggtcgaagggctgatgatgatcgtcgctgcccttgtgcctgatttcctgctgggcataattactggctcagggatacagggcctgctaatgctcaacgctggtttcttcaggcttccacacgacctccccaaacccttgtggaagtacccgacgtactacatctcctaccacaagtacgctacgcaggggctctacaagaacgagttcctaggtttagtgttcgatgatggtgtgttaggaaaggggctcactgttagtggtgactatatactgaggaccagcttgcaggtcgagatgggctactcgaagtgggtggaccttgcaatattgcttgccatggtcttcatctatcgggtccttttcttagtcactattaaagtaggtgaggcggtcaaacccatgattaaatgcatgtcgattaaagtttaagaagggttttatatgttttcttttcttttcttttcttttcttttctttactttagccagagatagatatgatatgatgccgccgtcagttggctgcacatcatcaatgcattgtaacagtataagcttgttcaacctccaacaaataatggaccttgacaaattgttgggagtttaag

SEQ ID NO: 65120 - DNA, 1283 bp, Zea Mays
acctgaactattgcgctcgtatcttcttccttgtgcgcgtgcagccgccgtgcttgcgggttgcggccctgcctctctcctctccggctctcccaccggccaccggccaccggccgccaccgtcgccgccatgccttttcgattccagttcccatggctcaagaacccaactacaaacggcggcacctccaacatagacactaaccctagcccccgcttccccaaccccttcctccctatccaagcccatgtcacctccttcctctcctccttcccccgggcgctcccgccgccgccgccctgggcgcgcatcacctcgccagcctccacctccggggccctacctacctctgagatcgaggagcggctcgccggggtgcccgtgtacgcgctcgccaacgccgcccaggagttcgtgcttgtgtcgtccacacgcgtgggagggcaagggggcgagagcgtgagtccaacgcaggcgctcgggctgctctgcttccggaaggaagatgctgacgcgctgctggagcagatggatggcgatatgcgcgccggctctggtgtcgttcctgtcgcgctgaacaaggttatccaaatgaagtcggatggtgtggcgtttagattcctccctgattcatctcaggtggctaatgcaattaagttgatgcaagatgaaggactgtatgccggagagggatttccaggagtgccagtttttcagtcaaggagcctggtcttgatgagtgacaacaagagatatcgtccagtttttttcagaaaggaggacttggataactcactgcaccggacctcccgtgatcagcaaaaacctaatcctgctgttaggtttggtgacactcaggtttcttctttggaagatatcattaaatctatgaagctcctcctcaaaatgggatgatgttgtatttattcctcctggatttgaccttgctactggctcgacaccatcacagctccgcaagtagttcattctttagaaggttgttaccagtgttattcctagcaacattatatttgactgtctggacactttgatagtagtacattatatatacacattatttcttagacagtgtatgtgcttttgtgccctgaactcgaattactgttagttcctgtgttagatgtatgtagtgtgacattagttagctggaaactgatgtagaatctcggtagcattcagttttgttatgccacttaaattaatacattttttgaggcgataattaatacctttcatctgttaacgaaagattgcacttctt

SEQ ID NO: 65121 - DNA, 1004 bp, Zea Mays
acctgaactattgcgctcgtatcttcttccttgtgcgcgtgcagccgccgtgcttgcgggttgcggccctgcctctctcctctccggctctcccaccggccaccggccaccggccgccaccgtcgccgccatgccttttcgattccagttcccatggctcaagaacccaactacaaacggcggcacctccaacatagacactaaccctagcccccgcttccccaaccccttcctccctatccaagcccatgtcacctccttcctctcctccttcccccgggcgctcccgccgccgccgccctgggcgcgcatcacctcgccagcctccacctccggggccctacctacctctgagatcgaggagcggctcgccggggtgcccgtgtacgcgctcgccaacgccgcccaggagttcgtgcttgtgtcgtccacacgcgtgggagggcaagggggcgagagcgtgagtccaacgcaggcgctcgggctgctctgcttccggaaggaagatgctgacgcgctgctggagcagatggatggcgatatgcgcgccggctctggtgtcgttcctgtcgcgctgaacaaggttatccaaatgaagtcggatggtgtggcgtttagattcctccctgattcatctcaggtggctaatgcaattaagttgatgcaagatgaaggactgtatgccggagagggatttccaggagtgccagtttttcagtcaaggagcctggtcttgatgagtgacaacaagagatatcgtccagtttttttcagaaaggaggacttggataactcactgcaccggacctcccgtgatcagcaaaaacctaatcctgctgttaggtttggtgacactcaggtttcttctttggaagatatcattaaatctatgaaggatagctcctcctcaaaatgggatgatgttgtatttattcctcctggatttgaccttgctactggctcgacaccatcacagctccgcaagtagttcattctttagaagg

SEQ ID NO: 65122 - DNA, 330 bp, Zea Mays
ccatcatccatggagtgcagaggacatcagagcgagagagagaagaaaatttgtcgctgcggggtgggagctgtgaaggaccgccgcgcacgctggccatctgcgacctcactgcggctgtattggcttgccggtgaatcaccaaagctcgtgtacctgggctctgcgtgggtggtcacgattgggtatccaggcagggtggctaccttgtcagactccatctttgccgacgtggttcgacctccaccgcgattagggcatagcgccaccggattcacgcgcgaggtttcgaggatctgaagaatcatcctggtaactcgaatctcaagt

SEQ ID NO: 65123 - DNA, 1713 bp, Zea Mays
ccctcctgactcccgttgcgcgggcgagcagcggaccattgattcgcacacgcatcctcagctcagagccgccggccaccggatgatgatgatgatgaataggccgcaaccgcagcaagccggcccgctgcagctcctccgttcgctaggactaggagtaggcggaggcggaggcgcccggcggggggccatgaagtcggccacgtcgctcctgctcggcgccgcgctcgccaccgccttcttcctgctctacacctccctctgccgcgacctcggcagcgccgctgccgccgcgcccaggtcgggatcgccgccgccgacgacgccgcggcgggagcaggagaccggcgacacggccgccgctcggcaggaggccgccacgggagagggcggggaagaacgtgtggctgcgagcagcgacggcgaccacagaggcggcgacgccacagcggaggagaatggtcagagcaaggaggaggagcagcggcggattgtgatgcctgccacgtcaactacccacgaggccacctcccaccatagaccgcagccgaagcagcagaagaagagcccaccaccagcgtcccaggatctggcggacctgctccggcgagcggcgacggcggacaagacggtgctgatgacggcgatcaacgaggcgtgggcagcgccagggtcgttcctggacctgttcctggagagcttccgccagggcgaggacacagcgggcctgccgcggcacctgctggtcgtggccatggacggcagggccctggagcgatgcaacgccgtgcaccccttctgctacctgttccgcgtcgacggcatggacttcgccgccgagcagaagtacatggagggcgactacctggagatgatgtggcgccggaaccggttccagcagagcgtgctggagctgggctacagcttcctcttcacggacgtggacatcctgtggttccggagcccgttcccgcgcctgccccgcgccgcgcaggtcgtcatgtcggccgacttcttcgtcggcgacgccgactcgcccaacaactaccccaacggcggcctcctctacgtccgctcctcgcccgccacggtgggcttctaccgccactggcaggcgtcgcgcgcgcggttcccgggccaccacgagcagtacgtcttcgacaggatcgtcaaggaagggtacgccggcgcccgggtgcagttcctggacacggccgtcttcgggggcttctgccagcacggcgacgacctgggcagggtggccaccatgcacgccaactgctgcgtggggctggacaacaagctcttcgacctcaagaacgtgctacaggactggaagacctacagagcgcgcgccgccgctggcaacgcgcagggtttctcgtggcgggtgcccggaaaatgcatacactgactcagctggctccatccttgtctaaactctggaggggttgagctcatttttcgattgttcgccagatagtacaacttaacagctacatctcttttttttccctaatgtatacatacatatattgtttatatatatatatttgtaaagctttttatggaatgtagaaaaattattattaatgacgcaaacaccaccgcgtttcatctcaatccgcgcatatctcaaacgcaacgtcgaggacaaggaccaagcatatgcagggctccgtccattccacaacaccatccgcggggttacaa

SEQ ID NO: 65124 - DNA, 1912 bp, Zea Mays
aggcgttgacacgtgttagagcgcggacacgaaatcggattctaacgcagctctgagcagcggtgtcctgagtccgtgaacgtgtcctctcccccgcggttcccttcaacgtcgcctccctagagatccgccgcttctctgccctctgctcgtcgattcggcgcctcctctccttcacgcgcccacgctgccgtcgcctcctcctcactgtcgtccatgccgtgtagccgcctacggccatggccgctggagccagcgactatttgacggtggagtaccactccagagactcccctctttcccctccgacgacgagggagccaccggcggcagcggcgtcctcgtacaccacggtgggcacggtgggcgatcttctcatgaagtggtggtagtgcctcgtggacgtcgacggagacgcggcgtgcctgcccctcgtcctcctgctccttgtcttctccgccgccccgtctcctgctcacggctgcgaccgctgcgtgcgccggtccagggccacctattaccaggcctcctcgctcgccctcaacggtggggtcgtccaactggcggttcatgtcgcgggaccacgggccggcgtggagcacggcgcaggcgccgctgtagttccggctggtggtgaccggtggctacgacggcaagtgggtgtgggcggagtcggaggtgctgccgcgccggtgggaggccggccgcgtctatgacgccggggtgcaggtctccgacgtcgcgcaggaagggtgctacctctgcgacacgcgcaagtggcagtgatgctcgcacgagctggattgtacagttttttgttttggtcgggaatgggacgaaagatatgaaatgatgattagcggagccggagagccgaatcaaatctattaaccggtggcgctggaagggagttttttggaacctaagatgtcgttgaagaacatcccgttactccacgccggacttgccgcgcgccgcatgcaaggtgctcgacggtttgctgctgcactgggcaggcatggcagcaggccggggctactgggaggacaggtgcgccggatgttctcgccggagaccaccgtcccggagccgctgcccaacccagactactccttcacgttgaagtacatcgtcggtgtcctccgacctggcagcatctcgggttgctgcagttgatcgccgtgccgcgaggatgacgtcgtcggtgtcctccgatgacaaggaggatgacgtcggcggctccggctccgcgaaggcctcaaggcctgcagcagacttccgcctctcgtccatggcggcctctacggcctgcattgagagcttcacaaacctcatctccatcccaatctcatttgtgctactcgcatcgttcttcggtttctttctttggaggaacaagatggacgacacacacgaggttggctgatgacgctcgacatacgagagcaacaagatgcgcgaagagcaagctgcgacgcgtgctactgtgccagtcgcccactgcctgctctgcggagttcaccatggaggttggcgacgaactcgtgaggttggacaaacaacgtcgggtccgacggtggaggatccatttccgacgaggtagagccgggagccggcaactgggagtgaaacacagaggaatggaagagccgttttgctccatggttacggttgatgcctgtttagagttgttaaaattggagaggatagcaaaagaacaaagagccagctgttataatactactattctaattacaagtttgggaatactatttttaagaagcccagagattgggacaccacggttccaaaaaactcgctggaagggtgctgccgtcgattcctctaccggtggcgctggaacacaagtaaccggcagttgccgaccattaccaagatctctaaagggctc

SEQ ID NO: 65125 - DNA, 572 bp, Zea Mays
tctgagcagcggtgtcctgagtccgtgaacgtgtcctctcccccgcggttcccttcaacgtcgcctccctagagatccgccgcttctctgccctctgctcgtcgattcggcgcctcctctccttcacgcgcccacgctgccgtcgcctcctcctcactgtcgtccatgccgtgtagccgcctacggccatggccgctggagccagcgactatttgacggtggagtaccactccagagactcccctctttcccctccgacgacgagggagccaccggcggcagcggcgtcctcgtacaccacggtgggcacggtgggcgatcttctcatgaagtggtggtagtgcctcgtggacgtcgacggagacgcggcgtgcctgcccctcgtcctcctgctccttgtcttctccgccgccccgtctcctgctcacggctgcgaccgctgcgtgcgccggtccagggccacctattaccaggcctcctcgctcgccctcaacgcactcagcaagccggttcgaattcatcgtcgccttccattccatgacgtcgtgcgcgtgcgtgtggttggattttgg

SEQ ID NO: 65126 - DNA, 1590 bp, Zea Mays
agcgcccgccgagtcgctctcgcctgcctccagccccgctctcgcctcctgctgggcgctatcgccctcactatagcctgcattggcacaagcctaacatggactgctaaaaaacctttgacagcctggcggcaaaaccctccccaatacccatttctcgcaaatccccgccacccccatttccaccgccagattcggtgccgtcaggatcgatttcttgtgcatcttggagcatctacaagggagaagtcttgacaagcgcatgggcggaggtggaaatggggaatcgtgcgatctcctccaagtcctttttgagggggccttggctggaggagctgctggtgttgttgttgaaacagctttatatcctattgatacaataaagaccaggcttcaggctgcacaaggcggaagtaaaattcaatggaaaggcatgtatgatgggttagctggaaatattgtcggtgttcttcccgcttctgcaatttttgttggagtatatgaaccagctaaaagaaaactactggaattgtttcctaaaaatttgagcgctattgctcatttgactgcaggagcaattggaggggctgcttcttctctcattcgtgttcccacggaggtggttaaacaaagaatgcaaatgagtcagtacaagactgcacctgatgccgttcgccttatccttgctcaagaaggaattaaagggctatggttcctttctcctgcgagatctgccatttgatgccattcaattttgcatatatgagcaactccgaattggttatcgattaacggctaagagggagttgcacgacacagagactgcaattattggtgcttttgctggtgccattactggcgctttaaccacacccctcgatgtcatgaagacaagattgatgattcaggtggatcttgagactgcatgaactcttggacctgatggcactttttagggaccactgattatttcgaagtttcttctgattccagggacaaacaaaccaatatagaggattcattgactgtgctcaaactatcatgcgagaggaaggtgctggcgcattttttaagggtatcgagccaagggtactatggattggcattggcgggtcgatcttctttgctgttctggagaaaacaaaatcggttctagctgagaggaatacccgtaggtgagaggatgaacgaaagctcttggcatcgtgatcatttccctatggcacgaggcggaaatgcgcctggccagattttggagccccagtttcccattctattctgttccgtttgagctacgttgatggagactcatgttgcgtgatattccctctgtttttttattcgtcgctttttagtttaaaaataaactagcagttgacaaatattcgagaacgagataatactagctaagatagttggccttttcaggcattacgatgagcctagagtaaggtaacgtagaaacagcaacaagcaaactagcactacaacgatagtaaggctgtcttctatcttttatttcaaatattacttgtgaactgtataatctataatacaaaataaagttttacgtgactgcgtgatcaaagc

SEQ ID NO: 65127 - DNA, 1602 bp, Zea Mays
agcgcccgccgagtcgctctcgcctgcctccagccccgctctcgcctcctgctgggcgctatcgccctcactatagcctgcattggcacaagcctaacatggactgctaaaaaacctttgacagcctggcggcaaaaccctccccaatacccatttctcgcaaatccccgccacccccatttccaccgccagattcggtgccgtcaggatcgatttcttgtgcatcttggagcatctacaagggagggggccttggctggaggagctgctggtgttgttgttgaaacagctttatatcctattgatacaataaagaccaggcttcaggctgcacaaggcggaagtaaaattcaatggaaaggcatgtatgatgggttagctggaaatattgtcggtgttcttccactgcaggagcaattggaggggctgcttcttctctcattcgtgttcccacggaggtggttaaacaaagaatgcaaatgagtcagtacaagactgcacctgatgccgttcgccttatccttgctcaagaaggaattaaaggtctttatgctggctatggttcctttctcctgcgagatctgccatttgatgccattcaattttgcatatatgagcaactccgaattggttatcgattaacggctaagagggagttgcacgacacagagactgcaattattggtgcttttgctggtgccattactggcgctttaaccacacccctcgatgtcatgaagacaagattgatgattcaggtggatcttgagactgcatgaactcttggacctgatggcactttttagggaccactgattatttcgaagtttcttctgattccagggacaaacaaaccaatatagaggattcattgactgtgctcaaactatcatgcgagaggaaggtgctggcgcattttttaaggtaaaacttttgcattgcaatagacgcagtaacaagaacttgcacattgatgatcagaaacaacagtcatttacatcacgtcacatttcagactccgtgtgataccacattcgaagcatctttgcatgtttatgtcttctgttgctatctttctggttgcagggtatcgagccaagggtactatggattggcattggcgggtcgatcttctttgctgttctggagaaaacaaaatcggttctagctgagaggaatacccgtaggtgagaggatgaacgaaagctcttggcatcgtgatcatttccctatggcacgaggcggaaatgcgcctggccagattttggagccccagtttcccattctattctgttccgtttgagctacgttgatggagactcatgttgcgtgatattccctctgtttttttattcgtcgctttttagtttaaaaataaactagcagttgacaaatattcgagaacgagataatactagctaagatagttggccttttcaggcattacgatgagcctagagtaaggtaacgtagaaacagcaacaagcaaactagcactacaacgatagtaaggctgtcttctatcttttatttcaaatattacttgtgaactgtataatctataatacaaaataaagttttacgtgactgcgtgatcaaagc

SEQ ID NO: 65128 - DNA, 638 bp, Zea Mays
tttacttaatatattgaattattgaatacaattatacctctgccttggcaaagataggttcccgaaagatgcgattacaattaccagaatgcgtgaacagtaaaggaatattgttcactatttataggcacaggacacagcctgtgaggaattacaattatgcccctcataaaagtttacaacattgactcagacctttatggactaaaaggtcattctatctttaagtcggtttgtaataccgaagcttcatgaagagaaaccttcggccatctcacacaagcagcttcagccgaaagtcgcttcttcctagaagaccttcggcgacgaagcatagacccaacattaaccattctattattaagcaaataatatacttttaacatttgtatattctctgacacgaattcctgcgttccctaatacccctctttcttcctttcccgtttgtactttttccccttttctctggtttttgttcctccggtacaaacaaattcttagcgtatgatgacggtgggtcatgcatgtactttcttgtagtcttctaggtaacagttttgtttaaaaccttgaatcaagctgaggcaccgtacccaaattaatgaaccattaaattttatacagtttatatagat

SEQ ID NO: 65129 - DNA, 1310 bp, Zea Mays
cacggttgaaactggtaagtatagtaaagaattccgtttcttcgccctaaccttttcactgctccagcgaaggccgccgccctcagcaacggcatcagcgtcttcccctccctcgtctcgtcaatcccctcgcgccctctcctccggtcctccgcacacggcacaccgtccggtgaccctgcaatggaagggcgccgctcaaatgaagtatcatctgccgaagctgtcttggtgggagcattgtcgtctggtgtcaatgctcccacgtggtttgtgctcaagattacgtttttgctccttgcattgtgttttacggctatgcttgctctagcattttcgtcgaagaactttgtaatcgttgcacatgttcttctgctggtgactattggaaccgtgctatttgtgctgcttaacaggtttctggctgaagttgggctcgtgcctgttgaacagcagatgaaggagatgggcatccacaaaacagaagccacagatgaagacaagagaaattaatcagtgacaccttttttttttgatatggaaagcagtttaacattcaatggacagagtgacattatctctcatgatagaatcagcactcacttcagagacatgaagttcagacaccacaattttgcacagatgaccatacatctttgtacgtacttccaaatggaaacccaggtcgaaatctgtagtgaaaagggatgtagctgcaagcagagcacatcaagcctgctttccctcttccttgggcttgctcttttttttttacttggtgtagcagaagcatgagcaccagggaaactgaaacaagaactccattgccagagaaatcaccaatacttttgtttggagaagtgtgcccaagggatttgcatgcaatgtaacccttacatatacgacatggatgccgtttatcagtggacattaggatttatggtctttgtgcaatatatatggtcgtgtcagactatcgttcctttcatttattctttattaaccctcataaacctgattgtgagaagtcatgatggcttttgattctttgaaggtcgattgaaatgttggaaaagccttccggatggaaagcatatgttctttagctgccgatgggtaaccttttggtcgttcaggttcagtgcatacgaatgtctcattgtttcaactcttttctcttacgtttgcattgtcaggtgtttgcttgctaaaagcgccgcactagaatcgtgtaaaattgtacaacttttcaggtctacacgagttaaaagcgccgcattgccgttagctggttctcactcttgctctct

SEQ ID NO: 65130 - DNA, 2301 bp, Zea Mays
ggctgaggttcaccgagccgccgcttcggttctcctctaaaaccctagaaactaactcccacctcccggttcccgccgtcctcgctcgccccccattctccggccctccccaccgccaccattttccccggcgacatgggccgcaatcttccagccgagcaagtggaagcacccaggagcagcaagatggacaagaagagaaagaaggacaagaagcggaagctggcagccgaggccgaggaggaggcggcggtgacggcgacagtggagaccgtgaagagcagcaagaagaagcgggtggagaatgaacccggcgcaggagcagtggaggcggagaacggcgctgagaagaccgtggcggtgaccgggaagggttcggaggaccctaagtacgcgccgctacggtcgttctccgctgccgagctgccgtctcaggtgctcgaatgctgcagcgcgttcgcgcggccgtcacctatccaggcacacgcctggccgttcctcctcgacggccgggacttcatcggcatcgccgccaccggatccggaaagacaatcgcctttggcgtgccggcgctgatgcacatcaggaagaaggtaggggggaaagcagggaagaaggctgtgccacggtgcctcgtgctatcaccaacgagggagctcgctcagcagattgcagatgtacttagtgaggctggtgcaccatgtgggataaaatcagtctgtctttatggtggaactaaaaaggaaccccaaatatctgcccttaaatctggagtggttctagatgaagcagataggatgctggatttgggttttgaacctgaagtcagggcaattttgagccaaacatcatctgtacgccagatggttatgttcagtgcaacatggcctcttgctgtccacaaattagcccaggagtttatggatccaaatccgataaaggttgttattggatcagaagaccttgctgctaaccatgacgtgatgcaaattgttgaagtattggatgatagaacaagggattcaagattacttgccttgcttgacaaataccatcaagcacaaagcaacagggttttggtttttgtgctgtacaagaaagaagctgcacgagtggaaacaatgcttcagagaaggggatggaaggctgtttcagtccatggcgacaaggctcagcatgatagaacaaaagctttatctttatttaaagaagggaaatgcccattaatgattgctacagatgtcgcttcacgtggacttgatattcctgatgttgaagtagtgattaactatagttatcctttgaccactgaggactacgtccacaggataggaaggactggtcgtgctggcaagaaaggtgttgcacatacctttttcactcaagcgaacaaggcacttgctggtgaacttgtgaatgttctgcgggaggctgatcaggttgttcctccagcccttatgaaatttggcacacatgtcaagaaaaaggaatctaagatatacggatctcatttcaaggaacttacagcagatgctcctaaatccacgaagatcacatttggcgattctgatgaggactgatgtgatgacagcttaggccttgttcgtttctatcggattggtaggccggaacgattcctatccggattgcttctctaatttatataaactttgattagctggaacgattccgggtgcaatccgacggaaacgaacaaggccttactgatttttcatccctgctgacggaagcttgatttctccgttggtgatgctatggatgtgatcagatcagccatttgcaagctgattgcagccacggatgagtattgtggcagtgggcaatcccaaaatatagctctcttgttataggttagtttattatgagtagcattcggcttatgtttttctggaccgtccccattatgcattagcttgggctgcttggctgtatgtaataataagcaacattctgcttattatgatttgcattctcttggaggcttagtttggaaacttaaatcgtctccggtatttccagggattgagtgggaaaataagctattttcccactcaatcttcagggaaaccggaggggatttaagttttcaaactagcccagagtgtagttaaattcagtgcgtccttagtacaagcagcccggttatggtaatgataggatagtgaaaggtgtacttctatcctggttagagtaaaaaaagaatatggttttccgtgttatagtaaaaaaaagaggatggttttgcagttggattttgattgggttccatgtgtttgaat

SEQ ID NO: 65131 - DNA, 2193 bp, Zea Mays
ggctgaggttcaccgagccgccgcttcggttctcctctaaaaccctagaaactaactcccacctcccggttcccgccgtcctcgctcgccccccattctccggccctccccaccgccaccattttccccggcgacatgggccgcaatcttccagccgagcaagtggaagcacccaggagcagcaagatggacaagaagagaaagaaggacaagaagcggaagctggcagccgaggccgaggaggaggcggcggtgacggcgacagtggagaccgtgaagagcagcaagaagaagcgggtggagaatgaacccggcgcaggagcagtggaggcggagaacggcgctgagaagaccgtggcggtgaccgggaagggttcggaggaccctaagtacgcgccgctacggtcgttctccgctgccgagctgccgtctcaggtgctcgaatgctgcagcgcgttcgcgcggccgtcacctatccaggcacacgcctggccgttcctcctcgacggccgggacttcatcggcatcgccgccaccggatccggaaagacaatcgcctttggcgtgccggcgctgatgcacatcaggaagaaggtaggggggaaagcagggaagaaggctgtgccacggtgcctcgtgctatcaccaacgagggagctcgctcagcaggttctagatgaagcagataggatgctggatttgggttttgaacctgaagtcagggcaattttgagccaaacatcatctgtacgccagatggttatgttcagtgcaacatggcctcttgctgtccacaaattagcccaggagtttatggatccaaatccgataaaggttgttattggatcagaagaccttgctgctaaccatgacgtgatgcaaattgttgaagtattggatgatagaacaagggattcaagattacttgccttgcttgacaaataccatcaagcacaaagcaacagggttttggtttttgtgctgtacaagaaagaagctgcacgagtggaaacaatgcttcagagaaggggatggaaggctgtttcagtccatggcgacaaggctcagcatgatagaacaaaagctttatctttatttaaagaagggaaatgcccattaatgattgctacagatgtcgcttcacgtggacttgatattcctgatgttgaagtagtgattaactatagttatcctttgaccactgaggactacgtccacaggataggaaggactggtcgtgctggcaagaaaggtgttgcacatacctttttcactcaagcgaacaaggcacttgctggtgaacttgtgaatgttctgcgggaggctgatcaggttgttcctccagcccttatgaaatttggcacacatgtcaagaaaaaggaatctaagatatacggatctcatttcaaggaacttacagcagatgctcctaaatccacgaagatcacatttggcgattctgatgaggactgatgtgatgacagcttaggccttgttcgtttctatcggattggtaggccggaacgattcctatccggattgcttctctaatttatataaactttgattagctggaacgattccgggtgcaatccgacggaaacgaacaaggccttactgatttttcatccctgctgacggaagcttgatttctccgttggtgatgctatggatgtgatcagatcagccatttgcaagctgattgcagccacggatgagtattgtggcagtgggcaatcccaaaatatagctctcttgttataggttagtttattatgagtagcattcggcttatgtttttctggaccgtccccattatgcattagcttgggctgcttggctgtatgtaataataagcaacattctgcttattatgatttgcattctcttggaggcttagtttggaaacttaaatcgtctccggtatttccagggattgagtgggaaaataagctattttcccactcaatcttcagggaaaccggaggggatttaagttttcaaactagcccagagtgtagttaaattcagtgcgtccttagtacaagcagcccggttatggtaatgataggatagtgaaaggtgtacttctatcctggttagagtaaaaaaagaatatggttttccgtgttatagtaaaaaaaagaggatggttttgcagttggattttgattgggttccatgtgtttgaat

SEQ ID NO: 65132 - DNA, 2058 bp, Zea Mays
ggctgaggttcaccgagccgccgcttcggttctcctctaaaaccctagaaactaactcccacctcccggttcccgccgtcctcgctcgccccccattctccggccctccccaccgccaccattttccccggcgacatgggccgcaatcttccagccgagcaagtggaagcacccaggagcagcaagatggacaagaagagaaagaaggacaagaagcggaagctggcagccgaggccgaggaggaggcggcggtgacggcgacagtggagaccgtgaagagcagcaagaagaagcgggtggagaatgaacccggcgcaggagcagtggaggcggagaacggcgctgagaagaccgtggcggtgaccgggaagggttcggaggaccctaagtacgcgccgctacggtcgttctccgctgccgagctgccgtctcaggtgctcgaatgctgcagcgcgttcgcgcggccgtcacctatccaggcacacgcctggccgttcctcctcgacggccgggacttcatcggcatcgccgccaccggatccggaaagacaatcgcctttggcgtgccggcgctgatgcacatcaggaagaaggtaggggggaaagcagggaagaaggctgtgccacggtgcctcgtgctatcaccaacgagggagctcgctcagcagattgcagatgtacttagtgaggctggtgcaccatgtgggataaaatcagtctgtctttatggtggaactaaaaaggaaccccaaatatctgcccttaaatctggagtggatatagtcataggaactcctggtcgtatgaaagaccttattgaaatgggtgtttgctgtcttaatgaggtttcgtttgtggttctagatgaagcagataggatgctggatttgggttttgaacctgaagtcagggcaattttgagccaaacatcatctgtacgccagatggttatgttcagtgcaacatggcctcttgctgtccacaaattagcccaggagtttatggatccaaatccgataaaggttgttattggatcagaagaccttgctgctaaccatgacgtgatgcaaattgttgaagtattggatgatagaacaagggattcaagattacttgccttgcttgacaaataccatcaagcacaaagcaacagggttttggtttttgtgctgtacaagaaagaagctgcacgagtggaaacaatgcttcagagaaggggatggaaggctgtttcagtccatggcgacaaggctcagcatgatagaacaaaagctttatctttatttaaagaagggaaatgcccattaatgattgctacagatgtcgcttcacgtggacttgatattcctgatgttgaagtagtgattaactatagttatcctttgaccactgaggactacgtccacaggataggaaggactggtcgtgctggcaagaaaggtgttgcacatacctttttcactcaagcgaacaaggccttactgatttttcatccctgctgacggaagcttgatttctccgttggtgatgctatggatgtgatcagatcagccatttgcaagctgattgcagccacggatgagtattgtggcagtgggcaatcccaaaatatagctctcttgttataggttagtttattatgagtagcattcggcttatgtttttctggaccgtccccattatgcattagcttgggctgcttggctgtatgtaataataagcaacattctgcttattatgatttgcattctcttggaggcttagtttggaaacttaaatcgtctccggtatttccagggattgagtgggaaaataagctattttcccactcaatcttcagggaaaccggaggggatttaagttttcaaactagcccagagtgtagttaaattcagtgcgtccttagtacaagcagcccggttatggtaatgataggatagtgaaaggtgtacttctatcctggttagagtaaaaaaagaatatggttttccgtgttatagtaaaaaaaagaggatggttttgcagttggattttgattgggttccatgtgtttgaat

SEQ ID NO: 65133 - DNA, 2375 bp, Zea Mays
ggctgaggttcaccgagccgccgcttcggttctcctctaaaaccctagaaactaactcccacctcccggttcccgccgtcctcgctcgccccccattctccggccctccccaccgccaccattttccccggcgacatgggccgcaatcttccagccgagcaagtggaagcacccaggagcagcaagatggacaagaagagaaagaaggacaagaagcggaagctggcagccgaggccgaggaggaggcggcggtgacggcgacagtggagaccgtgaagagcagcaagaagaagcgggtggagaatgaacccggcgcaggagcagtggaggcggagaacggcgctgagaagaccgtggcggtgaccgggaagggttcggaggaccctaagtacgcgccgctacggtcgttctccgctgccgagctgccgtctcaggtgctcgaatgctgcagcgcgttcgcgcggccgtcacctatccaggcacacgcctggccgttcctcctcgacggccgggacttcatcggcatcgccgccaccggatccggaaagacaatcgcctttggcgtgccggcgctgatgcacatcaggaagaaggtaggggggaaagcagggaagaaggctgtgccacggtgcctcgtgctatcaccaacgagggagctcgctcagcagattgcagatgtacttagtgaggctggtgcaccatgtgggataaaatcagtctgtctttatggtggaactaaaaaggaaccccaaatatctgcccttaaatctggagtggatatagtcataggaactcctggtcgtatgaaagaccttattgaaatgggtgtttgctgtcttaatgaggtttcgtttgtgatgaagcagataggatgctggatttgggttttgaacctgaagtcagggcaattttgagccaaacatcatctgtacgccagatggttatgttcagtgcaacatggcctcttgctgtccacaaattagcccaggagtttatggatccaaatccgataaaggttgttattggatcagaagaccttgctgctaaccatgacgtgatgcaaattgttgaagtattggatgatagaacaagggattcaagattacttgccttgcttgacaaataccatcaagcacaaagcaacagggttttggtttttgtgctgtacaagaaagaagctgcacgagtggaaacaatgcttcagagaaggggatggaaggctgtttcagtccatggcgacaaggctcagcatgatagaacaaaagctttatctttatttaaagaagggaaatgcccattaatgattgctacagatgtcgcttcacgtggacttgatattcctgatgttgaagtagtgattaactatagttatcctttgaccactgaggactacgtccacaggataggaaggactggtcgtgctggcaagaaaggtgttgcacatacctttttcactcaagcgaacaaggcacttgctggtgaacttgtgaatgttctgcgggaggctgatcaggttgttcctccagcccttatgaaatttggcacacatgtcaagaaaaaggaatctaagatatacggatctcatttcaaggaacttacagcagatgctcctaaatccacgaagatcacatttggcgattctgatgaggactgatgtgatgacagcttaggccttgttcgtttctatcggattggtaggccggaacgattcctatccggattgcttctctaatttatataaactttgattagctggaacgattccgggtgcaatccgacggaaacgaacaaggccttactgatttttcatccctgctgacggaagcttgatttctccgttggtgatgctatggatgtgatcagatcagccatttgcaagctgattgcagccacggatgagtattgtggcagtgggcaatcccaaaatatagctctcttgttataggttagtttattatgagtagcattcggcttatgtttttctggaccgtccccattatgcattagcttgggctgcttggctgtatgtaataataagcaacattctgcttattatgatttgcattctcttggaggcttagtttggaaacttaaatcgtctccggtatttccagggattgagtgggaaaataagctattttcccactcaatcttcagggaaaccggaggggatttaagttttcaaactagcccagagtgtagttaaattcagtgcgtccttagtacaagcagcccggttatggtaatgataggatagtgaaaggtgtacttctatcctggttagagtaaaaaaagaatatggttttccgtgttatagtaaaaaaaagaggatggttttgcagttggattttgattgggttccatgtgtttgaat

SEQ ID NO: 65134 - DNA, 2288 bp, Zea Mays
ggctgaggttcaccgagccgccgcttcggttctcctctaaaaccctagaaactaactcccacctcccggttcccgccgtcctcgctcgccccccattctccggccctccccaccgccaccattttccccggcgacatgggccgcaatcttccagccgagcaagtggaagcacccaggagcagcaagatggacaagaagagaaagaaggacaagaagcggaagctggcagccgaggccgaggaggaggcggcggtgacggcgacagtggagaccgtgaagagcagcaagaagaagcgggtggagaatgaacccggcgcaggagcagtggaggcggagaacggcgctgagaagaccgtggcggtgaccgggaagggttcggaggaccctaagtacgcgccgctacggtcgttctccgctgccgagctgccgtctcaggtgctcgaatgctgcagcgcgttcgcgcggccgtcacctatccaggcacacgcctggccgttcctcctcgacggccgggacttcatcggcatcgccgccaccggatccggaaagacaatcgcctttggcgtgccggcgctgatgcacatcaggaagaaggtaggggggaaagcagggaagaaggctgtgccacggtgcctcgtgctatcaccaacgagggagctcgctcagcagattgcagatgtacttagtgaggctggtgcaccatgtgggataaaatcagtctgtctttatggtggaactaaaaaggaaccccaaatatctgcccttaaatctggagtggatatagtcataggaactcctggtcgtatgaaagaccttattgaaatgggtgtttgctgtcttaatgaggtttcgtttgtggttctagatgaagcagataggatgctggatttgggttttgaacctgaagtcagggcaattttgagccaaacatcatctgtacgccagatggttatgttcagtgcaacatggcctcttgctgtccacaaattagcccaggagtttatggatccaaatccgataaaggttgttattggatcagaagaccttgctgctaaccatgacgtgatgcaaattgttgaagtattggatgatagaacaagggattcaagattacttgccttgcttgacaaataccatcaagcacaaagcaacagggttttggtttttgtgctgtacaagaaagaagctgcacgagtggaaacaatgcttcagagaagattgctacagatgtcgcttcacgtggacttgatattcctgatgttgaagtagtgattaactatagttatcctttgaccactgaggactacgtccacaggataggaaggactggtcgtgctggcaagaaaggtgttgcacatacctttttcactcaagcgaacaaggcacttgctggtgaacttgtgaatgttctgcgggaggctgatcaggttgttcctccagcccttatgaaatttggcacacatgtcaagaaaaaggaatctaagatatacggatctcatttcaaggaacttacagcagatgctcctaaatccacgaagatcacatttggcgattctgatgaggactgatgtgatgacagcttaggccttgttcgtttctatcggattggtaggccggaacgattcctatccggattgcttctctaatttatataaactttgattagctggaacgattccgggtgcaatccgacggaaacgaacaaggccttactgatttttcatccctgctgacggaagcttgatttctccgttggtgatgctatggatgtgatcagatcagccatttgcaagctgattgcagccacggatgagtattgtggcagtgggcaatcccaaaatatagctctcttgttataggttagtttattatgagtagcattcggcttatgtttttctggaccgtccccattatgcattagcttgggctgcttggctgtatgtaataataagcaacattctgcttattatgatttgcattctcttggaggcttagtttggaaacttaaatcgtctccggtatttccagggattgagtgggaaaataagctattttcccactcaatcttcagggaaaccggaggggatttaagttttcaaactagcccagagtgtagttaaattcagtgcgtccttagtacaagcagcccggttatggtaatgataggatagtgaaaggtgtacttctatcctggttagagtaaaaaaagaatatggttttccgtgttatagtaaaaaaaagaggatggttttgcagttggattttgattgggttccatgtgtttgaat

SEQ ID NO: 65135 - DNA, 1753 bp, Zea Mays
ctagatattgcaaaagctactggttgatccatgtcacaatgtttcctattcccattaactacccaccaatgccaatcattgctctgtaccactcagaacttaaggcgttggagaaacacaatgggcgatttgattttagccactggaatatgttacagatacatactgtacatggttctgttctgctgacaccgacatagtacaatccgtgccactgtcctgaatcctgatatgatcttttggagccacctcatcctctccatgtatcatgtctaacatatgagggcaatattattcaatgccttctcttttccttatttgcaggttaaattatagtattcttagataggatattttgttttccatattactctacaaaatctttgcattatctatgtcctatcattgccacctaaaaccgtttttttacacaaaagaagttttaagggctatcttttatccttggagccgtaaggtaatactcatcttaggaagttgtacttgtgttcaatgaaacagcaacagggttttggtttttgtgctgtacaagaaagaagctgcacgagtggaaacaatgcttcagagaaggggatggaaggctgtttcagtccatggcgacaaggctcagcatgatagaacaaaagctttatctttatttaaagaagggaaatgcccattaatgattgctacagatgtcgcttcacgtggacttgatattcctgatgttgaagtagtgattaactatagttatcctttgaccactgaggactacgtccacaggataggaaggactggtcgtgctggcaagaaaggtgttgcacatacctttttcactcaagcgaacaaggcacttgctggtgaacttgtgaatgttctgcgggaggctgatcaggttgttcctccagcccttatgaaatttggcacacatgtcaagaaaaaggaatctaagatatacggatctcatttcaaggaacttacagcagatgctcctaaatccacgaagatcacatttggcgattctgatgaggactgatgtgatgacagcttaggccttgttcgtttctatcggattggtaggccggaacgattcctatccggattgcttctctaatttatataaactttgattagctggaacgattccgggtgcaatccgacggaaacgaacaaggccttactgatttttcatccctgctgacggaagcttgatttctccgttggtgatgctatggatgtgatcagatcagccatttgcaagctgattgcagccacggatgagtattgtggcagtgggcaatcccaaaatatagctctcttgttataggttagtttattatgagtagcattcggcttatgtttttctggaccgtccccattatgcattagcttgggctgcttggctgtatgtaataataagcaacattctgcttattatgatttgcattctcttggaggcttagtttggaaacttaaatcgtctccggtatttccagggattgagtgggaaaataagctattttcccactcaatcttcagggaaaccggaggggatttaagttttcaaactagcccagagtgtagttaaattcagtgcgtccttagtacaagcagcccggttatggtaatgataggatagtgaaaggtgtacttctatcctggttagagtaaaaaaagaatatggttttccgtgttatagtaaaaaaaagaggatggttttgcagttggattttgattgggttccatgtgtttgaat

SEQ ID NO: 65136 - DNA, 1049 bp, Zea Mays
gaataatttggttctggttttaagtgcaaatctagctgcgccgatttaaatagagataaatatggtcaagactcaagaagcacataatgtacgagcaaatatagtttgacatgcttccggttgcaagagtccagctgattaccgaggtccaactagccagaaactggttgtttctgcttcaactaaacaagacaattaatcaacttcgcagctcatgcagtagagcgtgcaaagaattttacaaggactgccaagaacgataggcttacaacttcacatacccttacaaggatgatgaccagactgaaacctgcacccttgccaggattgcttatgagcaaagaataagctccccttttgcagcactcgtcatttcaattctggtttccgtttgcctcagctcattgaaacttacatcagtggcattgcttgttctgcctctttcttcaccaattgcgttgctagcttccgttacgttctcagaggagctaagccactctgcctctttctctgagggaggagagtttctactgtcgccttcatcaacactttccctcactgatttccattctagccttcttaagaaacattcctcaatatcatccagtgatacgtcttcactgtcgttactgtatctaatgtaaggcagatggaaatcggttgatgtgtgcctcctggacacaccaattagctgctcactgtctactcttagtgcagtggccttgtcaatatctcttggtcttccgttagcactgccattatagtttttctcactgccactatcattttcatcatcctgttggtcatggccatcatcctcgtcaagttcaccagatgaagataacgaagatgagaatgaagaataggcccctgcatcatcatcctcgcgttcccgaagtgttttgagaattaaggttttgagcaagttcatcacttgaacagcatgcatcagtgctgtcagaggatcggacatctgtatggaggaaaatttcgatgttcttgttagcacaagtgtcacagcaaacaaggtcgacgatgtgttagaggac

SEQ ID NO: 65137 - DNA, 1709 bp, Zea Mays
tttccctccaaaagccgcacagcagcaaccgccggcgcgcgcacctcacttccatgatccatcgcagaggagagcagcagccagacgtcgcggcgtgaccgtgactccgtgagagcgcgcccgctgcactgcactgcatctgaatgaggagctgggcgagggcggcgctgggcgtcgcggagctgctcgtcagcgcggccatccacctgggctacgccttctacatcttcggcaccgcggtcgccgccgacgtctcagcctccctcgtgaagggcctgatggccggcggcggcgtggccaaggacgtcgccgtcgatggtgaggacgaggccgcggcggtgctcgacgacggggccgtgccgcccatcgtgctggtgcacggcatcttcggcttcggcaaaggcaggctgggcgggctgtcgtacttcgccggcgcggagaagaaggacgaccgggtgctggtgccggacctgggctcgctcaccagcgtccacgacaggcgggcaggtggactacggcgaggagcacagccgggagtacgggcactcgcggttcggtcggacgtacgcgcgaggccactaccccgcgtgggacgaggagcacccggtgcacctggtgggccactcggccggcgctcaggtgatccggctgctgcagcagatgctccacgaccgggagttcgaggggcacggcgacacctcggagcgctgggtgctgagcgtcacctccctctccggcgcgctgaacggcaccacgcgcgcctacatcgacgggatgcgcgccgagaaagaaggcggcgggcggtggctgcgccccgtctgcctcctccagatctgccgcgtcggcagcgtgctctaccactggctggacctcccctggctgaagcgctactacgacttcggcttcgaccacttcggcatgtcgcggcgcgtcgtgggcgtggcggggctcgcggagatcctgctcgacgccggcagcggcggcgggcggcgggggcccttcgccacgggggactggatcctgccggacctcaccatccagggcgccgcccggatcaacgccagggtgcgcacgttcccggccaccttctacttcagctacgccagccggcgcaccgccaggtcgccgccaggcagcgccggcgccacggtgccgtccggggtgacgaggatccacccgctgctcttcatccgcgtcctgcagatgtgccgctggcgctaccccgccggcgctgacccgccgtaccaggggtacagggacgaggactgggaggacaacgacggcgcgctcaacaccttctccatgacccacccgaggatccccgtcgagcatcccagcgtccaggtggagaaggatgaggattgccgtccgctgcgcccggggatctggtactacaagatcgtggaggcggaccacatgacgttcgtcatcaaccggcggcgaggaggcgtgcagttcgacctcgtctacgacagcatcttcgacaactgccggaaacatgtcttccggactgccccgccgccgacgctaccggtccagagctgattccacaccaacgacgtccgcgagaggccgtacaccattattccagcggtcgttccgactgattgacattatttgtgaatatatcgtttgttattactgtctaacttccgctgccgcctgaaattaacaagcctactcaatgagtataataaccccatcaaaat

SEQ ID NO: 65138 - DNA, 1907 bp, Zea Mays
aaatcaacccattttccctccgcccagatcgctgtgaagttgaccccgcttccctcccagctcagcgacctccttgccgattacgagtgccgtgtgtgccccgctccaccacaaatcgatcggaaacgcacgcccctttctcttcgccttttcgcgtcgtccagatctcagtcgttcttcgctccatgagctaggaatccgaggtgtcctctaggctaagcgaagttggccggcggcggctaggatggggttgatatccgggatgatgatgggggtcattgttggcgtcgccatcatggccggctggagccgcgtcatgcgccgacgcagcacgaagcgcatcgccaaggctgcggatatcaaggtgcttgggtctctcagcagggacgacctcaggaagctgtgcggtgataacttcccggagtggatatccttcccgcagtttgagcaggttaaatggttgaacaagcatctgagcaaactttggccttttgttgtagaagtattcgtattcaaaatcttcaaccaggtcaaatcatcatggatatagatttccgttggggtggtaatccaagcataatcctagctgttgatgctgtagttgcatcactgccaattcagctcaaggatcttcaggtctatactgtcatacgtgttatatttcaactgtctgaagacatcccttgcatttctgctgttgttgtggctctccttgctgatccagagccaaaaattcagtacaccctgaaggccattggaggaagcctaactgcagttcctggactttctgacatgattgatgacactgtcgattcaattgtttctgatatgctcttgtggccacacaggcatgttgttaaacttggtgtcaatgttgatacgagtgacttggagcttaaacctcagggaagactttctgttactgtggtaaaagcaacttctttgagaaataaggagatgatcggtaaatcagacccttatgtgaaactgtatgtgcggccaatgtttaaggtcaaaacaaaagtcatagatgatgacctgaatccggaatggaatgaaacatttgacttgattgtcgaagacaaagaaacccaatctgttatttttgaggtttacgacgaagacaaacttcagcaagacaagagactaggtgtggcaaaactagcagtaaacactcttgaatctgagattacccaagacgccactctgaagctgctacattcactggatccaattaaaaataaggacaccaaggataggggcacattacatcttaaggtaaagtaccacccctttacaaaggaagagcagctggaagccctagagatggaaaaacaagccatagaggagaggaagcgtctgaaggaggctgggataattggtagcacaatggatgctgttggttctggtgttggatttgtgggtactggcattggcgctggcctcggtttcgttggttcaggaattggtgctggcgcaggccttgttacctctggtattggtgctgtcagcagtggccttggtaaagccgggaagttcatgggcaggactgtgacagggcctttcagcatgtcccgcaagaacggcagcagctctactgctccccagcatgatcaaccttcggcgtagtctgatgtacagtgaaagacaattgtcatatttgtgacagggttgccattctactctgtatacgtgctatacctaggactatacgtagcacttcgtttttgtttctgccactgcctggtgcctggttatatgaaatatgttttcgtcgttgtattgaaacgaggatctttcaaagtaaagattgctgtaaattgcatcagctttcccgaactatatgaaatttgtgcagtctgttgaagtaaaaaaagaaaagaaaatccactgatggcctagtctag

SEQ ID NO: 65139 - DNA, 2112 bp, Zea Mays
aaatcaacccattttccctccgcccagatcgctgtgaagttgaccccgcttccctcccagctcagcgacctccttgccgattacgagtgccccacaaatcgatcggaaacgcacgcccctttctcttcgccttttcgcgtcgtccagatctcagtcgttcttcgctccatgagctaggaatccgaggtgtcctctaggctaagcgaagttggccggcggcggctaggatggggttgatatccgggatgatgatgggggtcattgttggcgtcgccatcatggccggctggagccgcgtcatgcgccgacgcagcacgaagcgcatcgccaaggctgcggatatcaaggtgcttgggtctctcagcagggacgacctcaggaagctgtgcggtgataacttcccggagtggatatccttcccgcagtttgagcaggttaaatggttgaacaagcatctgagcaaactttggccttttgttgtagaagctgcaacagtagtggttaaggaatccgttgaaccactgctagatgattaccggcctccaggaataaaatctttgaagttcagcaaattttctcttggaaatgtgtcaccaaagatagaagtggtgagagctgtctcactaggtcgcggaattgaagtagcctctctgtatttgcccggggaaggcttaccacggtttatcccttcctcagactccactcatgtattcgtattcaaaatcttcaaccaggtcaaatcatcatggatatagatttccgttggggtggtaatccaagcataatcctagctgttgatgctgtagttgcatcactgccaattcagctcaaggatcttcaggtctatactgtcatacgtgttatatttcaactgtctgaagacatcccttgcatttctgctgttgttgtggctctccttgctgatccagagccaaaaattcagtacaccctgaaggccattggaggaagcctaactgcagttcctggactttctgacatgattgatgacactgtcgattcaattgtttctgatatgctcttgtggccacacaggcatgttgttaaacttggtgtcaatgttgatacgagtgacttggagcttaaacctcagggaagactttctgttactgtggtaaaagcaacttctttgagaaataaggagatgatcggtaaatcagacccttatgtgaaactgtatgtgcggccaatgtttaaggtcaaaacaaaagtcatagatgatgacctgaatccggaatggaatgaaacatttgacttgattgtcgaagacaaagaaacccaatctgttatttttgaggtttacgacgaagacaaacttcagcaagacaagagactaggtgtggcaaaactagcagtaaacactcttgaatctgagattacccaagacgccactctgaagctgctacattcactggatccaattaaaaataaggacaccaaggataggggcacattacatcttaaggtaaagtaccacccctttacaaaggaagagcagctggaagccctagagatggaaaaacaagccatagaggagaggaagcgtctgaaggaggctgggataattggtagcacaatggatgctgttggttctggtgttggatttgtgggtactggcattggcgctggcctcggtttcgttggttcaggaattggtgctggcgcaggccttgttacctctggtattggtgctgtcagcagtggccttggtaaagccgggaagttcatgggcaggactgtgacagggcctttcagcatgtcccgcaagaacggcagcagctctactgctccccagcatgatcaaccttcggcgtagtctgatgtacagtgaaagacaattgtcatatttgtgacagggttgccattctactctgtatacgtgctatacctaggactatacgtagcacttcgtttttgtttctgccactgcctggtgcctggttatatgaaatatgttttcgtcgttgtattgaaacgaggatctttcaaagtaaagattgctgtaaattgcatcagctttcccgaactatatgaaatttgtgcagtctgttgaagtaaaaaaagaaaagaaaatccactgatggcctagtctag

SEQ ID NO: 65140 - DNA, 2106 bp, Zea Mays
aaatcaacccattttccctccgcccagatcgctgtgaagttgaccccgcttccctcccagctcagcgacctccttgccgattacgagtgccgtgtgtgccccgctccagtaagccaacagctcattcctcctcaccacgctgctcgttactaaccaagcaatcaatttcctcctctttccattctcccagccacaaatcgatcggaaacgcacgcccctttctcttcgccttttcgcgtcgtccagatctcagtcgttcttcgctccatgagctaggaatccgaggtgtcctctaggctaagcgaagttggccggcggcggctaggatggggttgatatccgggatgatgatgggggtcattgttggcgtcgccatcatggccggctggagccgcgtcatgcgccgacgcagcacgaagcgcatcgccaaggctgcggatatcaaggtgcttgggtctctcagcagggacgacctcaggaagctgtgcggtgataacttcccggagtggatatccttcccgcagtttgagcaggttaaatggttgaacaagcatctgagcaaactttggccttttgttgtagaagctgcaacagtagtggttaaggaatccgttgaaccactgctagatgattaccggcctccaggaataaaatctttgaagttcagcaaattttctcttggaaatgtgtcaccaaagatagaaggtattcgtattcaaaatcttcaaccaggtcaaatcatcatggatatagatttccgttggggtggtaatccaagcataatcctagctgttgatgctgtagttgcatcactgccaattcagctcaaggatcttcaggtctatactgtcatacgtgttatatttcaactgtctgaagacatcccttgcatttctgctgttgttgtggctctccttgctgatagccaaaaattcagtacaccctgaaggccattggaggaagcctaactgcagttcctggactttctgacatgattgatgacactgtcgattcaattgtttctgatatgctcttgtggccacacaggcatgttgttaaacttggtgtcaatgttgatacgagtgacttggagcttaaacctcagggaagactttctgttactgtggtaaaagcaacttctttgagaaataaggagatgatcggtaaatcagacccttatgtgaaactgtatgtgcggccaatgtttaaggtcaaaacaaaagtcatagatgatgacctgaatccggaatggaatgaaacatttgacttgattgtcgaagacaaagaaacccaatctgttatttttgaggtttacgacgaagacaaacttcagcaagacaagagactaggtgtggcaaaactagcagtaaacactcttgaatctgagattacccaagacgccactctgaagctgctacattcactggatccaattaaaaataaggacaccaaggataggggcacattacatcttaaggtaaagtaccacccctttacaaaggaagagcagctggaagccctagagatggaaaaacaagccatagaggagaggaagcgtctgaaggaggctgggataattggtagcacaatggatgctgttggttctggtgttggatttgtgggtactggcattggcgctggcctcggtttcgttggttcaggaattggtgctggcgcaggccttgttacctctggtattggtgctgtcagcagtggccttggtaaagccgggaagttcatgggcaggactgtgacagggcctttcagcatgtcccgcaagaacggcagcagctctactgctccccagcatgatcaaccttcggcgtagtctgatgtacagtgaaagacaattgtcatatttgtgacagggttgccattctactctgtatacgtgctatacctaggactatacgtagcacttcgtttttgtttctgccactgcctggtgcctggttatatgaaatatgttttcgtcgttgtattgaaacgaggatctttcaaagtaaagattgctgtaaattgcatcagctttcccgaactatatgaaatttgtgcagtctgttgaagtaaaaaaagaaaagaaaatccactgatggcctagtctag

SEQ ID NO: 65141 - DNA, 1428 bp, Zea Mays
gttaatttgcgtttattcatttggtattcgtattcaaaatcttcaaccaggtcaaatcatcatggatatagatttccgttggggtggtaatccaagcataatcctagctgttgatgctgtagttgcatcactgccaattcagctcaaggatcttcaggtctatactgtcatacgtgttatatttcaactgtctgaagacatcccttgcatttctgctgttgttgtggctctccttgctgatccagagccaaaaattcagtacaccctgaaggccattggaggaagcctaactgcagttcctggactttctgacatgattgatgacactgtcgattcaattgtttctgatatgctcttgtggccacacaggcatgttgttaaacttggtgtcaatgttgatacgagtgacttggagcttaaacctcagggaagactttctgttactgtggtaaaagcaacttctttgagaaataaggagatgatcggtaaatcagacccttatgtgaaactgtatgtgcggccaatgtttaaggtcaaaacaaaagtcatagatgatgacctgaatccggaatggaatgaaacatttgacttgattgtcgaagacaaagaaacccaatctgttatttttgaggtttacgacgaagacaaacttcagcaagacaagagactaggtgtggcaaaactagcagtaaacactcttgaatctgagattacccaagacgccactctgaagctgctacattcactggatccaattaaaaataaggacaccaaggataggggcacattacatcttaaggtaaagtaccacccctttacaaaggaagagcagctggaagccctagagatggaaaaacaagccatagaggagaggaagcgtctgaaggaggctgggataattggtagcacaatggatgctgttggttctggtgttggatttgtgggtactggcattggcgctggcctcggtttcgttggttcaggaattggtgctggcgcaggccttgttacctctggtattggtgctgtcagcagtggccttggtaaagccgggaagttcatgggcaggactgtgacagggcctttcagcatgtcccgcaagaacggcagcagctctactgctccccagcatgatcaaccttcggcgtagtctgatgtacagtgaaagacaattgtcatatttgtgacagggttgccattctactctgtatacgtgctatacctaggactatacgtagcacttcgtttttgtttctgccactgcctggtgcctggttatatgaaatatgttttcgtcgttgtattgaaacgaggatctttcaaagtaaagattgctgtaaattgcatcagctttcccgaactatatgaaatttgtgcagtctgttgaagtaaaaaaagaaaagaaaatccactgatggcctagtctag

SEQ ID NO: 65142 - DNA, 1203 bp, Zea Mays
aagtatctagtacccaccagagccaaaaattcagtacaccctgaaggccattggaggaagcctaactgcagttcctggactttctgacatgattgatgacactgtcgattcaattgtttctgatatgctcttgtggccacacaggcatgttgttaaacttggtgtcaatgttgatacgagtgacttggagcttaaacctcagggaagactttctgttactgtggtaaaagcaacttctttgagaaataaggagatgatcggtaaatcagacccttatgtgaaactgtatgtgcggccaatgtttaaggtcaaaacaaaagtcatagatgatgacctgaatccggaatggaatgaaacatttgacttgattgtcgaagacaaagaaacccaatctgttatttttgaggtttacgacgaagacaaacttcagcaagacaagagactaggtgtggcaaaactagcagtaaacactcttgaatctgagattacccaagacgccactctgaagctgctacattcactggatccaattaaaaataaggacaccaaggataggggcacattacatcttaaggtaaagtaccacccctttacaaaggaagagcagctggaagccctagagatggaaaaacaagccatagaggagaggaagcgtctgaaggaggctgggataattggtagcacaatggatgctgttggttctggtgttggatttgtgggtactggcattggcgctggcctcggtttcgttggttcaggaattggtgctggcgcaggccttgttacctctggtattggtgctgtcagcagtggccttggtaaagccgggaagttcatgggcaggactgtgacagggcctttcagcatgtcccgcaagaacggcagcagctctactgctccccagcatgatcaaccttcggcgtagtctgatgtacagtgaaagacaattgtcatatttgtgacagggttgccattctactctgtatacgtgctatacctaggactatacgtagcacttcgtttttgtttctgccactgcctggtgcctggttatatgaaatatgttttcgtcgttgtattgaaacgaggatctttcaaagtaaagattgctgtaaattgcatcagctttcccgaactatatgaaatttgtgcagtctgttgaagtaaaaaaagaaaagaaaatccactgatggcctagtctag

SEQ ID NO: 65143 - DNA, 1106 bp, Zea Mays
agacagtattttgaacattctagccctaccagcaactataaatcaatgcatgttgttaaacttggtgtcaatgttgatacgagtgacttggagcttaaacctcagggaagactttctgttactgtggtaaaagcaacttctttgagaaataaggagatgatcggtaaatcagacccttatgtgaaactgtatgtgcggccaatgtttaaggtcaaaacaaaagtcatagatgatgacctgaatccggaatggaatgaaacatttgacttgattgtcgaagacaaagaaacccaatctgttatttttgaggtttacgacgaagacaaacttcagcaagacaagagactaggtgtggcaaaactagcagtaaacactcttgaatctgagattacccaagacgccactctgaagctgctacattcactggatccaattaaaaataaggacaccaaggataggggcacattacatcttaaggtaaagtaccacccctttacaaaggaagagcagctggaagccctagagatggaaaaacaagccatagaggagaggaagcgtctgaaggaggctgggataattggtagcacaatggatgctgttggttctggtgttggatttgtgggtactggcattggcgctggcctcggtttcgttggttcaggaattggtgctggcgcaggccttgttacctctggtattggtgctgtcagcagtggccttggtaaagccgggaagttcatgggcaggactgtgacagggcctttcagcatgtcccgcaagaacggcagcagctctactgctccccagcatgatcaaccttcggcgtagtctgatgtacagtgaaagacaattgtcatatttgtgacagggttgccattctactctgtatacgtgctatacctaggactatacgtagcacttcgtttttgtttctgccactgcctggtgcctggttatatgaaatatgttttcgtcgttgtattgaaacgaggatctttcaaagtaaagattgctgtaaattgcatcagctttcccgaactatatgaaatttgtgcagtctgttgaagtaaaaaaagaaaagaaaatccactgatggcctagtctag

SEQ ID NO: 65144 - DNA, 451 bp, Zea Mays
atgacggaaatagatatgcaggaagtaagagcaaagaacaaatcaggttctcatttaaacaagcttgggtacaacaatgtaatgctcaagttcaaagagaggacagggaaaacttacaacaagctacagttcaaaaataaatgggacaagctgaaaaaagattatagtaattggaaacaattgggaaaagatacaggatgtggttgggaccctaacaagaagttgtatgttgctccagattggtggtggaagaaggcaaacatagcattagcaagtttaaagacaagtcactccaaaatgcaaaagaattgagtgtcatgtttgaagatcttcggaacaccggtgatgatcattgggcccaaccagtggtgagctaccctaagacactgaagcacaaatacaagatgccatcaacattgaagatgaaaatgctagtgattgtggggaagac

SEQ ID NO: 65145 - DNA, 2588 bp, Zea Mays
cttgctcgtcgcaccgctactattctaattttcaagagccatactccgatagttttctcttcttggtttcggcaaagggaacgaaggcttacctcaaaggtaacccatggagaaagaagagcagcaggccaatgattataccgacgaggacactgattacactgatgatgaggaggaggactacaacgacgacgaggactacactccagagcccgagacggcgtccaaacgccagaagcgccacaccctggagcagattcgggaactcagagctgcataccaacggtgtgaccacccagatgcgccgacacgccgcgcgctcggcgcaaagattggcctggagggcaggcaggtgcagtactggttccagaaccaacgctcccagacgcaggcgaaggccctggcgcagaacaacagggtggtccagcaggagaacgccgcgctgatggccgagaacgcgtcgctccggcacgccatactgaccgggtcctgcctcgcatgcggcggcgcgacgacggcggcggcgcccgccgagctgccgccggagagcaggcgcctggtggcggagaacgcgcggctcaggggcgagtacgcgcgcgccaccgcgctgctcaaccagatcctgctctcggcgccggcgcccccaggcccagcagcagcggcagtcgtcgtctcctccagctccgtcgcccgccccgtggccgaccgcgccgctcggctccgcggccacgcggaggccgccatggaccagttcctgctgctcgccaccaagggggagccgctgtggctgcccaccacccccgacggggaggcgctcaactaccagctggggtacaagcacaagaaagcactcccggtgcaccacgggctctgcccggacgagttcgtcatggaggcctccagggccactggcgtcgtcagagcctctgccacctacctcgtcgccacgcttacagacgcgaggcgctggtccgagatgttccccagcgtcgtggcgagtgtgaccgccaggagggacgcagccatctccggcggcgttttcggctcgcatattcagctgatgaacgcggagctgcaggtgcattcgccgcgtctgctcaaccgcagcatcaacttcttgaggtacaccaagcgggtggcggaggggcggtgggcggtgatggacgtgtccgtggacggcatccttggaccgccaggcagccgcgtcgctgacgccgccgccgccgctgccgctgcaaacggcgtcactcttgtgccggcatggtacacgggctgcaggctgctgccgtccggctgcctcgttgaggacatgcgcaatggctactgcaaggtcacatgggttgtccacgcggagtacgacgagaccaccgtgccaacgatgttcaggccactgttccgctctgggaaggctctcggcgcgcaccgttggctcgcgtcgctgcagaggcagtgcgagttcctcgctgtcctgcactccagccaggtctccagaggcggcgacaacacagcagccgccatttcgtcgatggggaagagaggggtcctggagctggcccagcgcatggtggcggatttctactcggctgtgtctggtcccgtcacccagccgtcgagcagcatcgacgagtggtacggcagcgccggcgccggcgccaggaggaccgacaccgccgtgcgcatggtgacctcgaagaaagccggcaccgtggccgaccttgtgctgagcgccagcaccacggtttggctgccgaacactccgccgcagctcgtgttccgttacctccgcgacgaccagcgccgtggcgagtgggacgccttcttcgccagtagcgcagcggtgacggagctctgctctgtgcccacgggccatctcaatggcaacgctgtctccgtcctctactccaatgttaccgatggaaccgaccgcaagaagacgctgatcctgcaggaggcgtgcacggacgcgtcctgctccatggtggtctacgctccggtcgaagaggattccatgcgcgcggtcatgaacggtggcgaccacgcctccgtcttcctgttgccgtcggggttcgccgtccttccggacggccacggcagggctcgccacgccccgagctcctcctccagcacacccgtcggctgcgacgacaccactgctgggtccctgctcaccgtggcatgtcaggcgctggtgcccggctcatccccgtctgacaaccgcgctgccccaggggccttcgacgacgttggcaagctgctctgtcgtgcactggagaagatcaaggctgccgtcaagaccgacatcgtcaccccagcttgatgcagaagggcgaggcagaagagtcgggcacaatgtcgaacaataatgcttctaccatttgatatttgtcgacaaaataatgacgtttagactcagttatcagcggggcagtaccccatcgtcgttctcgttttcaccgtttttccccccgcgtttgtcatggatttatgtcggtttaataatgtttatatgttaggatggtttgtcatgatgttttcttgtagtgattgggttgttagtacttgttgcttaaaaatttcagtttttcttt

SEQ ID NO: 65146 - DNA, 2596 bp, Zea Mays
ctcgtcgcaccgctactattctaattttcaagagccatactccgatagttttctcttcttggtttcggcaaagggaacgaaggcttacctcaaagtactactacaaggtaacccatggagaaagaagagcagcaggccaatgattataccgacgaggacactgattacactgatgatgaggaggaggactacaacgacgacgaggactacactccagagcccgagacggcgtccaaacgccagaagcgccacaccctggagcagattcgggaactcagagctgcataccaacggtgtgaccacccagatgcgccgacacgccgcgcgctcggcgcaaagattggcctggagggcaggcaggtgcagtactggttccagaaccaacgctcccagacgcaggcgaaggccctggcgcagaacaacagggtggtccagcaggagaacgccgcgctgatggccgagaacgcgtcgctccggcacgccatactgaccgggtcctgcctcgcatgcggcggcgcgacgacggcggcggcgcccgccgagctgccgccggagagcaggcgcctggtggcggagaacgcgcggctcaggggcgagtacgcgcgcgccaccgcgctgctcaaccagatcctgctctcggcgccggcgcccccaggcccagcagcagcggcagtcgtcgtctcctccagctccgtcgcccgccccgtggccgaccgcgccgctcggctccgcggccacgcggaggccgccatggaccagttcctgctgctcgccaccaagggggagccgctgtggctgcccaccacccccgacggggaggcgctcaactaccagctggggtacaagcacaagaaagcactcccggtgcaccacgggctctgcccggacgagttcgtcatggaggcctccagggccactggcgtcgtcagagcctctgccacctacctcgtcgccacgcttacagacgcgaggcgctggtccgagatgttccccagcgtcgtggcgagtgtgaccgccaggagggacgcagccatctccggcggcgttttcggctcgcatattcagctgatgaacgcggagctgcaggtgcattcgccgcgtctgctcaaccgcagcatcaacttcttgaggtacaccaagcgggtggcggaggggcggtgggcggtgatggacgtgtccgtggacggcatccttggaccgccaggcagccgcgtcgctgacgccgccgccgccgctgccgctgcaaacggcgtcactcttgtgccggcatggtacacgggctgcaggctgctgccgtccggctgcctcgttgaggacatgcgcaatggctactgcaaggtcacatgggttgtccacgcggagtacgacgagaccaccgtgccaacgatgttcaggccactgttccgctctgggaaggctctcggcgcgcaccgttggctcgcgtcgctgcagaggcagtgcgagttcctcgctgtcctgcactccagccaggtctccagaggcggcgacaacacagcagccgccatttcgtcgatggggaagagaggggtcctggagctggcccagcgcatggtggcggatttctactcggctgtgtctggtcccgtcacccagccgtcgagcagcatcgacgagtggtacggcagcgccggcgccggcgccaggaggaccgacaccgccgtgcgcatggtgacctcgaagaaagccggcaccgtggccgaccttgtgctgagcgccagcaccacggtttggctgccgaacactccgccgcagctcgtgttccgttacctccgcgacgaccagcgccgtggcgagtgggacgccttcttcgccagtagcgcagcggtgacggagctctgctctgtgcccacgggccatctcaatggcaacgctgtctccgtcctctactccaatgttaccgatggaaccgaccgcaagaagacgctgatcctgcaggaggcgtgcacggacgcgtcctgctccatggtggtctacgctccggtcgaagaggattccatgcgcgcggtcatgaacggtggcgaccacgcctccgtcttcctgttgccgtcggggttcgccgtccttccggacggccacggcagggctcgccacgccccgagctcctcctccagcacacccgtcggctgcgacgacaccactgctgggtccctgctcaccgtggcatgtcaggcgctggtgcccggctcatccccgtctgacaaccgcgctgccccaggggccttcgacgacgttggcaagctgctctgtcgtgcactggagaagatcaaggctgccgtcaagaccgacatcgtcaccccagcttgatgcagaagggcgaggcagaagagtcgggcacaatgtcgaacaataatgcttctaccatttgatatttgtcgacaaaataatgacgtttagactcagttatcagcggggcagtaccccatcgtcgttctcgttttcaccgtttttccccccgcgtttgtcatggatttatgtcggtttaataatgtttatatgttaggatggtttgtcatgatgttttcttgtagtgattgggttgttagtacttgttgcttaaaaatttcagtttttcttt

SEQ ID NO: 65147 - DNA, 785 bp, Zea Mays
cttgaacctggaacctgttgattacaggtgtgcgacgagcttgaggacatgatggaagaaggtggcatactagtagattaccacggatgtgatttctttccagaacgttggtttgacctcgtagttgtgctccagactgacaactcaattctgcatgatcgcctgacggaggttacatgggttccaaactcgccaacaacatagagtgcgaaatcttccaagtgctcctcgaggaggcgagggagagctacagagaggacatcgtgatgccattgcgaagtgacaacgtggaggatattagtaggaacgtaggtgcactgacagactgggtaaacaattggagacctagttagacctgtcaaaagaaatgttgccttatgtgttgtatttggatatgtattgggtggaccagctgccatgtttgtaatgtacggggtgttttggttaaagaaacgaagtcgttcatcctcgtcttattcttttcttctaatggagtcaattacttaaatcattaccacaacattacttaagttaatatgtgctacatgcacaaggaatgcgatgatgctataaaaattcatgaggcagtgtggtctgcggaaattttgtttttaaattttttttatgatcggtcgggaaaccgatcgaaattcaacggatttttcaaccagaatgcattttcaaattaaaaaaacaaatttatattttttggtcgaaaatgtattatcgtcgaaattcattgtttttactaaaaaactatgattaagtttggaaaaaaaatcaaa

SEQ ID NO: 65148 - DNA, 789 bp, Zea Mays
cttgaacctggaacctgttgattacaggtgtgcgacgagcttgaggacatgatggaagaaggtggcatactagtagattaccacggatgtgatttctttccagaacgttggtttgacctcgtagttgtgctccagactgacaactcaattctgcatgatcgcctgacgggtagaggttacatgggttccaaactcgccaacaacatagagtgcgaaatcttccaagtgctcctcgaggaggcgagggagagctacagagaggacatcgtgatgccattgcgaagtgacaacgtggaggatattagtaggaacgtaggtgcactgacagactgggtaaacaattggagacctagttagacctgtcaaaagaaatgttgccttatgtgttgtatttggatatgtattgggtggaccagctgccatgtttgtaatgtacggggtgttttggttaaagaaacgaagtcgttcatcctcgtcttattcttttcttctaatggagtcaattacttaaatcattaccacaacattacttaagttaatatgtgctacatgcacaaggaatgcgatgatgctataaaaattcatgaggcagtgtggtctgcggaaattttgtttttaaattttttttatgatcggtcgggaaaccgatcgaaattcaacggatttttcaaccagaatgcattttcaaattaaaaaaacaaatttatattttttggtcgaaaatgtattatcgtcgaaattcattgtttttactaaaaaactatgattaagtttggaaaaaaaatcaaa

SEQ ID NO: 65149 - DNA, 2475 bp, Zea Mays
ccaaaattaaaaaaattacccctgccactgattatgtacgtgccggtttgttactattttacatcttgtgtccttttctccaattcctctttgttcctcaccagggaaagagctcccattagggttccccatcacctgctcatagcagcgcatcctctgctcatcgcgacagccgtcatcctagctagcaacgctccgtgtggcggcgctcacagcgcctgacggcattgacccttgctcctagcgtaggtggcaatcgcatcgcccttccgtgggctcgcagtagtggcattatctagcatcggttctctgcagcgccccaagccgacggtctcctagctgtgacgaccatccccatcagcgacaaccctctcgatgctctgtatgttttggaggcaatgcaagtggtattttggagcatgtttttttgataatatgttttttattaaaaacaatcagagtacaagcaggggaaaacttgagttggtgtgcacctacttgcgaaattgagtttgttgtattatgactactaaggtagttgctgctgcctgattgtttgtatccagattcacaatccaccctcattagttgttgctgccagcttgtttgttatccagattcatagctataatgacacattattttgggggtagatggtgtatcttagttgtatgattttttgacatcagtgtatatagttcacgtttttactttagtgtttataattttgcaaaacttgacacttgaatagagcagggggtataaagtctttgatctgcagaaatacaaggacccaaaggtacttgacacttgaacagagcatctcttccaatagactattctaaatttctaatgcaccaatattttttgttgtgctctactacagtatggctaagaaggttgtttgggataatgcaattttgaagcacctaattgacatttgtaaggaggggattttagctggttgggataatgaccttttttgttgtgctttactaaagtgtgacttcttagctcaaaggatgttctgagtttattctatgtttttgtgttggaccaaattatattatctatgacttacatgttctggttttttgtttagatgcacgataatatggaagacttagcaaaaaagcgtcatgaatctcttcacttactgaattatcacagcatgctgcaattcttggaaatttaggcactctttacaataaacggtatttccacaaaggtgaatatagagaaacagaagctctagagtctggttatcaatgggtcatgagatgtttggatcgttcaagatatttttataagatgtttagaatgagccatgatatttttatggcacttcatgaaatcgactcataatgttacatcaattgagtcactgcaatgtttctatcgattgttggagggccacagtctttttcccgagttgaaaaccgttttgtacggttcacatggacaattcacatgaagttcaaggaagtattgaagtgtttgcttaagttaggaaaagaaaacgtgaaaccaaaggatccaacatttagttatgaacatgagaagttgaaagaagatcgtttctggtaatattttaaaggtaccattggagcaataaatggatcatatgttaaggtagttgtgttggctgatgaggttattaactacacttgtcgccatggatatacatcgtagaatgtacttgcgatatgtgactttgacatgaggtttacatttgtggttgttggatgcggggttctgcacatgacacacggatccttaatcatgtgtttggcaaacttttcttattttcctgtccctcctaaagataaatactaccttgtggactccaaatatccaaatcgagctggataccttgcacctttcaagggtactacgtaccatatatcggaatttcgtcatcatcgtggatgtccaccgtaagggaaacatgagatatttaacttcttgcactcctcgctccgctatgtcattgagcgagcatttggggtcctcaagaaaaaatggcgcatattgaaagacatgtcgagattctcaattcaacgatagaaggagatcattatatcttgttttgcattacataatttcattcatgatagtaagttgcttgataaggagtttgagaggtgtgacgcagatgatgagtacatgcctggagcatcaaatgttgtggatcaatatcaagatggtggtcctgaggtaggggagagaacgaagttactatgaacaccatttatgataggatagctacttcactagctaatgcaaggagtgatttaagctagttatatagatgacaagtcttttcatatgaatgttgcacttatttacaaatgtagcaatttattttatatgtagagatcatatcattatgattattttacgtacaaacaacatagcaaggccttaggggcattatagataatttatatcaaatccaccgttttacaacaggtt

SEQ ID NO: 65150 - DNA, 655 bp, Zea Mays
cagggaaagagctcccattagggttccccatcacctgctcatagcagcgcatcctctgctcatcgcgacagccgtcatcctagctagcaacgctccgtgtggcggcgctcacagcgcctgacggcattgacccttgctcctagcgtaggtggcaatcgcatcgcccttccgtgggctcgcagtagtggcattatctagcatcggttctctgcagcgccccaagccgacggtctcctagctgtgacgaccatccccatcagcgacaaccctctcgatgctctatgcacgataatatggaagacttagcaaaaaagcgtcatgaatctcttcacttactgaattatcacagcatgctgcaattcttggaaatttaggcactctttacaataaacggtatttccacaaaggtgaatatagagaaacagaagctctagagtctggttatcaatgggtcatgagatgtttggatcgttcaagatatttttataagatgtttagaatgagccatgatatttttatggcacttcatgaaatcgactcataatgttacatcaattgagtcactgcaatgtttctatcgattgttggagggccacagtctttttcccgagttgaaaaccgttttgtacggttcacatggacaattcacatgaag

SEQ ID NO: 65151 - DNA, 607 bp, Zea Mays
cccgggctttaaggaacaaagccgggtgcatctcatacatgcgccaaagaagacaacatatataatcacagagtgtatagagataaatgtcacaatcatcagagtacttattacatagcggaagtcttacaaaataaaagataaatatagcaggatctaaaatatccttggcgccagaaagtcaattgggagatgctacctagatcgaatcgaactcctcgatgtgcggtcccacttgaaccacctgttcttctcctgtgggggggggtgtgagacagcaagagtgagctcacacatgttcatcgctcatcaagttgtggggaataatgtggcatgaactcaccaaaggtgggagttcataaagtgtaaggcttatcaaagaaaatggttaaagctgagcattgcttttaatgttggtcaaacttttattagcaattactagatgtaagtagataccaaaccataataaataatagaacaaaattaataaataatcccatgcaaatgcatatgacaaattgaatttaggttccataaattaatcatgtgagggtccgagccgctcatgaccgtgagcacggctagtatactagttttacactctgca

SEQ ID NO: 65152 - DNA, 2728 bp, Zea Mays
caaagttccactagcttcagaaatcccgctacagtttataggaagctccagtgcaggaatccctcgtctgaccgccatcgcagcaaagtcaacccaaggacctccctacactgaccactcccctactgcccttgcccctttcgggtaaggaagacctccactagctttcctagttaatcagccaagggcgtcccattaaacccttgtggtagcactgttttctcgggtggtcgctccatgttccaattaacataatgatcttatcatgaacataaataacataacaaaataattggaacatggatgtaataaaatattaatcccaaaaccatagataaagcaatagcttaactacccaagtgaatcaggggtaaacaaggtaaaaggataaacagtctagggtgacctattgggtcccatcaaaattaaacctatgcattgaatagtgataataatgaacattattgggtaacaaatgtgatcaagggcacaacttgcctgacacttgagattccaattaccaggatgattcttcggatcctcgtgaccgcacagctagtcatagcaatacaagcaaacatagtatagataaaattaacatcacaccatacataagtacaaactgaataataataatctgcgcgttgctacgagatcgcgggatcgagaactactgagatcgaagttacgattaaggagttatgattttatagaagatctgtgtgattaaaatattaaactatattataaatcggttaggacaaatcatacgagatgttattttataaataattacctcaactttaatctgagttataaattaatcatagatcatattccagtagttataagcagtttaaccagactaacccacattagttaactacagatataattataaactaatgaggcatggtataataaaggttgttattgcatattaaatatttatacaagactaacacaacttgaacggatcaattcggagtttaaatggggaagttatgaatttccaatgattttatgtatttgatatgagattaattaggagatcaattttatttttgttttcatgacaaaacagaggcaataggtgataaacaacattattacaaattatagaaattggaacgaactaatttggacttaatatgaattttctagggatttaacatgtttctgcaattaattttatactgaaaatcattttctaaatactttttctctgatttcctacttcctggactgagcgtactaatacagagaagtatggggttaatcatgcaaaattacccagacccagattcaacccgcggggacggcgggttgattctatattagtccaggggctctttatcaaataggcacggcgaaggggtatctgggtatctgggccatcccaatcgaaaacggaccgcccagatcatattatcctcataatgaaccaccgccatctacaggtcgttggatcaggatccgagggcccaaaacaatcgcgaagcggtacgcacaggtggccactagatcatagatcgacggccaaccactaatgtacctgtgatcaaatcttagccgcacacagtgatatccacggtccacacgcccccactgaaacgttacccctaacccccatccccaccgttgatccaaagatcaatggttactgctcatctccctcaacccggcacacggccacggcggcgctccgcccagggaggtggcgccctcaccggagcaaccctgctccatgctccggccaccaaatgtattaaacgaggtttgctacgcgcctaatagaggatcacgaagcacggggaagcattcataccgtggttttgggtgtcagtgatactccccgcggcgagcagcggatcggcggcaccaaccccactccgatgatgaattgcgcacaccccgagctaccccacgcccaatcgaaacgcgcaccggctaccacgagagctggcgactgtggcggaaccgcccgaattattccagcttaagtgcccaagtcgcacccttaagggcagcaacacacttaaacaggaataacccgttagtccctcggatctagtccgataaagccacttaccaggatcgaataccactagctcactcgaaggtgaggcacagagaaatacaataaaacataataccacaaatttaataagtatcattagtgattacattatcggagtttcagaaataataaccataaattttaatgcagcggaaataactagcggagaagaaccgagtgacatggcgaagcctggccacgctactcctcctggtcctctcctgcggaagcagtaacccactcgaccatctatcccggtggcagggtggtcggccaagttatcccagcaaccatctcctccagagaacctgtaaaaattatgccacaagcaaggctgagtatactaatactcagctagacttacccggtgtgaggagtctactcctctacctctagacatgcagctgtttggctgtggggtttgtttgccaaaagcactagctgagtttctaaatcaagattttaacttagtcaaagttaagtgtgactctcttaaggctaaaaatgtactatctattcatacaaagtagcaaacattttagcaatcaacatcttatatcatctccgcatcattccacttgttactcaatgtagcagcatggatcaagcagtctcattagctgcgagaagcagacgattcgaatcgag

SEQ ID NO: 65153 - DNA, 1302 bp, Zea Mays
gtaaaattcataactcttaaaccgtcaggcctatagttatgaaattttaacacaagcaagataagaaaagcacctacaactttcttataatgaccatgaacagattgtaacattaacttaagcaaacagtgcagtttctgaaatctgtacagaatttggacagattcagttactgaatttgtaaaaagcataactcctaatctgtcatacctatggctgtcaaattttaacaccagcaagataataaagttctctaccacttttctatagcacatatctacagaaaacatcatttagtttatcaaacatacagcacacagaaaatagtatgtgcagcccaaaacagcaactaattaatttcagctactatacaattcaagaattgtcgtgttttaagtacttgaattattctaacactttacccttcgttagagttgaattaattaaatgaggactaacaaatagacatataaattttcatccaagttatttcgcgcgctagaactaacatacacattcaatcaacgcattcaccacaatcattaatttcggcatatgtgtatatcaaagcgcttttcacccactagttcgcattttagttgagacacctcatgagcactacagatttttacccgcgatcataaccatgcgcatttagactacaacaagtaattcatcataactacgagcttaaccaaagccacctaacaagttgattaactagtataaaacttagcaaagtattttagacttcgcaactcaaaaacataggtgggagcaggttaattagtttttcttaaccattttctcaacttaaactggacaacacacaagtcacttaaaacgccatattttaggagacctcacatgtcgagcatcaatttataacctaagtgactcaacctctatcacgcttgacaactaccacatcacccgatttatctatttggaacaccgcctgcctagcgtactactagtactccgcattttgactcgacttataaacatggagtaagcgatgactacttcggcatgtcaccacctctctaaatcaagtaaggacaaattccacctacaacgaccgaacattcccatcgagcacaccttatattttcctgtttagcatacaaccatggggcggcatgcactcgagacatttccgtttaatttaacgccaccactattaccacgcatctcagcacacacaattatccacagactcgcccttcgtataaacttgacaaacatttttaattcttgtcgacacctcagacaaacacaactcgacgaccctcaaatttt

SEQ ID NO: 65154 - DNA, 1854 bp, Zea Mays
gaacaaataaaaatatataattaatttagtgcacacggagtggggaaacgaaaaggaaagctctctcattgccaaattgcccccgactcaagccccccgcgccgccggcgttggtggaatcgatcgacccggcctcgccggacaatccaccagcgttggtttcacctcaggtgggaatcgtatccctggacgacgaggggcttggggctagctaccacaacgttctgagatggtcttgtcgtacaccagctgtttgctgaattttctctgggctcatggtgttcccttttcttttgagacgacttttgcccctttgtccccagccatgagaacatcgtctgaaaaaactcggttgaatgtgggacttcactgtccatgctacctctgtgacgccactcaacttcatttggataggttttgcaacctaatttgctcaagcagggcagatagcatgactggtatcgtaagagtcttagcaagtgaaactcaggacaaggataagcccgtcgcaggaggatatcatggcatgcccatgtcttcgaatggttaggtttttgtgcatggaagatgacaatgaggtcactggagagtcacctgtggctgatgaatgggatatgttgtccctgacttcatcaatatatgctagcccattattccgaagaggatttgatccaattaatttgcctggatatgggaatgtgattaatattcaggaaggcacacaaactggattagtcatgtcagatggcttcgtgttccctccaagtgagcatgaaaatttgccaatagaaccagagcatgaggatttgccaatagaaccagggcatgatgaatcaaatacaaacagcgttgaaaaggaaagtagttgtgctggaaataacgatgatgactggtgtcatgtttcacctgaagaaatcgatgacgtaagtaatgaaaatctagctgacaacagtgacttgcctactgccagtgaagctacggtaccagattcccagcctacagaaataaatgctaagcgagagaaagatcataggacatgcaaggctgatcatacttgtgaaagatggtggaaaaagaaaaccacgtatctatttcatcatataaaaggagtgactacactctgctcagttgtggcagctggtgctgttgttggttttgttgtaatgggtcagaggtggcagcaggaccattggcaccttcatcaatttaagttcagtgtcagcggtgagagcatgaatcgagtcattggagcattcagtcgtttgaaggatgggcttcctgggagtgagcaactaagatctatgctgccgactcgcgtactcccacaacagccgctgagcgcttgagtacatgcaccaaattttggtgggctgcttctagtgtcaatttttgttgcttatatgatcttgagaaagttcattctttttcttgtgctacttgattttatgttactgtaaattagtggtcgagacttctcacggtgctgttctttaaaacatagcaaccgtgaagggacatggtggaaacacagagggcactataacaatatgtatccatatcacctgttttactttctatctcaatgacatgtgcttgtagtttggcttgttcgtgctcttacgcttgtgaagctgtgtccagtggtgacgattttgaaatcaatagttctaaatttcaagccaaagttgtcttttttatttaatgccctggagggttgtacatcttttgtattagagaggaaaggagtgaaagggccccataggcacttcaacgtgtgtcatctatattttagcagtgtcctttatagtcatttgtaacaatatgtatccatatccgcaagttgataatttcgag

SEQ ID NO: 65155 - DNA, 1469 bp, Zea Mays
gaacaaataaaaatatataattaatttagtgcacacggagtggggaaacgaaaaggaaagctctctcattgccaaattgcccccgactcaagccccccgcgccgccggcgttggtggaatcgatcgacccggcctcgccggacaatccaccagcgttggtttcacctcaggtttttgtgcatggaagatgacaatgaggtcactggagagtcacctgtggctgatgaatgggatatgttgtccctgacttcatcaatatatgctagcccattattccgaagaggatttgatccaattaatttgcctggatatgggaatgtgattaatattcaggaaggcacacaaactggattagtcatgtcagatggcttcgtgttccctccaagtgagcatgaaaatttgccaatagaaccagagcatgaggatttgccaatagaaccagggcatgatgaatcaaatacaaacagcgttgaaaaggaaagtagttgtgctggaaataacgatgatgactggtgtcatgtttcacctgaagaaatcgatgacgtaagtaatgaaaatctagctgacaacagtgacttgcctactgccagtgaagctacggtaccagattcccagcctacagaaataaatgctaagcgagagaaagatcataggacatgcaaggctgatcatacttgtgaaagatggtggaaaaagaaaaccacgtatctatttcatcatataaaaggagtgactacactctgctcagttgtggcagctggtgctgttgttggttttgttgtaatgggtcagaggtggcagcaggaccattggcaccttcatcaatttaagttcagtgtcagcgagcatgaatcgagtcattggagcattcagtcgtttgaaggatgggcttcctgggagtgagcaactaagatctatgctgccgactcgcgtactcccacaacagccgctgagcgcttgagtacatgcaccaaattttggtgggctgcttctagtgtcaatttttgttgcttatatgatcttgagaaagttcattctttttcttgtgctacttgattttatgttactgtaaattagtggtcgagacttctcacggtgctgttctttaaaacatagcaaccgtgaagggacatggtggaaacacagagggcactataacaatatgtatccatatcacctgttttactttctatctcaatgacatgtgcttgtagtttggcttgttcgtgctcttacgcttgtgaagctgtgtccagtggtgacgattttgaaatcaatagttctaaatttcaagccaaagttgtcttttttatttaatgccctggagggttgtacatcttttgtattagagaggaaaggagtgaaagggccccataggcacttcaacgtgtgtcatctatattttagcagtgtcctttatagtcatttgtaacaatatgtatccatatccgcaagttgataatttcgag

SEQ ID NO: 65156 - DNA, 1341 bp, Zea Mays
attaagtacatgatggctttaaagccacagactaaaggtttttgtgcatggaagatgacaatgaggtcactggagagtcacctgtggctgatgaatgggatatgttgtccctgacttcatcaatatatgctagcccattattccgaagaggatttgatccaattaatttgcctggatatgggaatgtgattaatattcaggaaggcacacaaactggattagtcatgtcagatggcttcgtgttccctccaagtgagcatgaaaatttgccaatagaaccagagcatgaggatttgccaatagaaccagggcatgatgaatcaaatacaaacagcgttgaaaaggaaagtagttgtgctggaaataacgatgatgactggtgtcatgtttcacctgaagaaatcgatgacgtaagtaatgaaaatctagctgacaacagtgacttgcctactgccagtgaagctacggtaccagattcccagcctacagaaataaatgctaagcgagagaaagatcataggacatgcaaggctgatcatacttgtgaaagatggtggaaaaagaaaaccacgtatctatttcatcatataaaaggagtgactacactctgctcagttgtggcagctggtgctgttgttggttttgttgtaatgggtcagaggtggcagcaggaccattggcaccttcatcaatttaagttcagtgtcagcggtgagagcatgaatcgagtcattggagcattcagtcgtttgaaggatgggcttcctgggagtgagcaactaagatctatgctgccgactcgcgtactcccacaacagccgctgagcgcttgagtacatgcaccaaattttggtgggctgcttctagtgtcaatttttgttgcttatatgatcttgagaaagttcattctttttcttgtgctacttgattttatgttactgtaaattagtggtcgagacttctcacggtgctgttctttaaaacatagcaaccgtgaagggacatggtggaaacacagagggcactataacaatatgtatccatatcacctgttttactttctatctcaatgacatgtgcttgtagtttggcttgttcgtgctcttacgcttgtgaagctgtgtccagtggtgacgattttgaaatcaatagttctaaatttcaagccaaagttgtcttttttatttaatgccctggagggttgtacatcttttgtattagagaggaaaggagtgaaagggccccataggcacttcaacgtgtgtcatctatattttagcagtgtcctttatagtcatttgtaacaatatgtatccatatccgcaagttgataatttcgag

SEQ ID NO: 65157 - DNA, 242 bp, Zea Mays
aaagaaatgcagagacaccacaaatgacatttatgataaataatgtagttctttttgcatctaggatagattgtttagacagattaaatacattaaataaaaacataaccttaacatatatttacaaagatagcatgaatggattaaccaataaagctctacacgtagaactgatattgcttccatcagtagtggcttctgtgcgtgtaccgcagccgctgccgcctgcttggcaccactga

SEQ ID NO: 65158 - DNA, 2018 bp, Zea Mays
aaatagggcaagaaatcctgtcccattccatatgcagagcagtgtgtggtgtgactgtagatctgttacttttcttacttgtcatcttgaaaccaactgtgttgaattcacttaacagttagaattgttgaaaaaataagttgttgtttcaagttaagaagttaagcagtttaagcaaaaaaaaaaatctgaaaacacatttttctgtactcatcagaacagatttttttttcttctatataaacacaaaagcaagtgccaagaccaagaaagaagataagtcaataataagtatcaaagttccactgaagtttattaaattaatattaagatcatttaagggacaattttggttcccaacagatattttagtttcaaagagggcattctggttcaaaggaaaggatctcctgccttcaaaacatacttctaaaaaggtagtaggacataaacattcagataagtaccgccgcccaatgaaagttgcagagaaattgcacattctatataacaaatacaataataaaacaaatcgagaattactggccataaatggcaatatatattgtcctaaaagacatagtggcaacattaaataagactatcctatacaaggtaaatatagtgcttgtacccaaggaaatgtcattccgtgaaagttcacattagcttcccaatggcatggaaaaaaatgataaagtaggtttactgtaaaaaatggcctaactgagcacatcctatataacaaaaaaaaggaaatgacagatcaagaaaaaaacagagacctgaagcacataattaatatgttcatttgacatttacacaaaaggttggtactaacctacagaatgtactgaacacttcaagtggatcaagatttgggatcatatgccacagttatccctgaaatcattagtagagtactatatgtcagcagaagctagaacacgaaaaatcagatagcatgaattttgcttcaatcaattctaagacctactatataactgacaggataacatgaaccacaaaagtcataggagagtccactacaaaaatgcattactcgtttcacgaaacaggaaatcacatttcaacatataaagggttttaatgtgtctacaattgacccataattctcaatgtgaaccttacatgtacagtacaggattaagagtagttttggtcataagaacagtaaaccatctaagcagtccataaccttttgcttcaagtagggaggaggaacaagtatatgattttgagtttttgactattgagcccctcataaaattttgtttctaggatcgaacacagatattgacacgcatttcatctaacttgcagacaaaattaagcagttgacagttaggtaaatcttagaaaaagcatggggcattcgtaggctggaaaaggatttttccttacgcccccaatcaaaatgaaacacaggttaattagcatattgtcgatggaaattgcatcccatttaacaccaagctctgctctggatatactaaacaggaagctagtgcgaagatgcctatccaatgaacatcaattaaagtacatgcatttcgcttgatcctaacagattccagattcgcggcccgacgatgaacaatcaccagcatcccgacagttttgtcctaccgcgacggtcagccgtcaggaccaacgactagcaatcccccaactaccgcgtcaaggatcacgaaccaaccggatcggcagcgcctccccgaattgaaatcctacgcacccaaatcgacgagaagggacaggttatgataaacaaccccgatcgcagcggacatagcacttaccaccacggccatcccacgcaaccgatctaccgacacggaagccacggcggaatcgagcgaagacaagagagacgcctaaatcgacggacgtcaagctaaacgcagagggaggaatttttacgggagtttgacgcgcgggctgcaccggatcggacaaggctccccgcttcccctctctcacggtctcggttgccc

SEQ ID NO: 65159 - DNA, 3217 bp, Zea Mays
gtataatctataagccctgtattatatataattcggaaggaagggccttcttccccttccctctcacccactcgtggactcggtcctcgctcttcacctgcccgcgcctcggtaggcgctagtcgccttcctccctggaaggaaaaacaaacaaacacgaaacgcaggtccgaatccaaatctagcggcacgcttaacgtcgcgatcccgcggactccacccacgcccgcggcggcagcgcggatcccgcctagggctcgcgtgtcggtcgctccggcgctaactagtaactaccccctcgcggcgacgggaggtcggtagcggcgatcgcgctagcggagccgcttcttcgccctcgacgccgccggcctcgatcaggccccgccgacggaatggcatccaaagtccgctttacagtgggttctcaagtttgggttgaggatgctgaggtggcttggattgatgggttggtggaggaggtacaaggagatgaattaattataaactgcacttctgggaagaaggttactgcaaatgtctcaagtgtgtatcctaaggatgcagaagcgaagcgctgtggcgttgaggatatgacgaggctagcttatcttaatgaaccaggagttttacagaacttaaagtctagatatggaatgaatgaaatatatacttatactggcaacattttaatagctgttaatccatttcaaagacttccccacctttataacaatcacatgatgggaatctataaaggcgcagaatttggcgagctgagcccccatcctttcgctattgcagatcatgcatataggcttatgatgaattgtggaaaaagtcaagccatattagtgagtggcgaaagtggagctggtaagacagaaagcactaaaagccttatgcagtatcttgcatttatgggtggtaaagctcaatctgggggaaggtcagtgcaacaacaagtactggagtcaaatcctgttcttgaggcatttggaaatgcaaaaacagtcaggaataataattcaagtcgttttggaaaatttgttgagattcagtttgacaagaatgggaagatctcaggagctgccataaggacttacctcttagaaaggtctcgtgtctgccaaatatctgatccagaaaggaactatcactgcttttacatgctatgtaatgcaccagctgaggaccgtgagagatataaactgggagatgccgcatcatttcactatcttaaccagtctagttgtattaagcttgatgcgatggatgatgcttcagaatatatcataactaggagggcaatggacattgtgggcatcagttctgatgaacaggatgcaatatttagagttgttgctgctattcttcatttgggcaatgtggaattttcagaagggagtgaagcagattcttctgtacccaaagatgacaagtcccagttccatcttaggacagctgcggagcttttcatgtgtgatgagaaggctcttgaggaatctttgtgtaagcgtgttatggtaacacgtggtgaaagtattgttaaaaatttagatgcacgagcagcagctctcagtagagatgcactagccagaattgtttactctcgtttgtttgattggcttgtaactaagataaatacttcaataggacaagatctaagctcgaagcttttgattggtgtactggatatatatggttttgagagtttcaagacaaacagtttcgagcagttttgcatcaacttaactaacgagaagctgcagcaacactttaatcagcatgtgtttaagatggaacaagaagaatatacaaaggaagaaattgattggagttatatccagtttgtagacaaccaagagattcttgatcttattgagaagaaacctgggggtataattgctctactggatgaaacttgcatgctgcgaaattcaacccatgaaatatttgctgaaaagctgtatcaaaaatttaaggggaacttgcacttcagtaggccaaagttctcacggtctgatttcactattcatcactacgctggaaatgttacgtaccaaacagatctgttcttggataagaacattgattatgctgtgaatgagcatcaagttttgttacatgcttcgagatgttcgttcgtttccagtctttttccacatgaagtatcagctaaatctacgaaatttacatcaataggttcaagctttaagcaacaattacaagctttgctggaaactttgagcgcaacagagccacattacatccgctgcataaagcccaataatgttctcaagccagcgattttcgagaacagtaatgttctccagcagcttcgatgtgggggagtattagaggcaataagaataagctgccttggatatccaacaaggaggagatttgatgaatttgttgaccgttttggtgttttactacctgaagttcttggtgaaagttatgatgaagttactgctacaaacatgcttcttgacaaagtcaatctcacaggatatcagatagggaaaactaaagtgtttctgcgtgctggtcaaatggctgaattagatgctatgagaactgaggtcttgggatgttctgctagtaaaatccagagaaaagtacggtcatacttagctcgaaaaaaattcattcagttgcgaatatctgctactcatctccaggctatttgcagagggcaaattgcaaggcattattacgatgatctccgcagggaggctgcttcattgaccatacaaacctgctaccgtatgtactttgcaaggaagaactacataaatctctgtactgcatcaactactatccaatctggtctacgtggtatggctgctcgcaagaaactccagttccgtcaacatacaaaagctgcggtgaccattcagagtttctggcgtagttatgtagcacgctctcgattcatgagtttgaagaaggcagccattgctactcaatgtgcttggagaggaagagtggccagaaaagagcttcgaaaacttaaaatggctgctaaagaaactggtgctctccaagctgctaagaataaattagagaaacaagttgaggagctcacgtggcggctgcaactagagaaacgcatgagggagtacaatatgttgatctctaccgatgaccaggaggtgatctgggagatcaggtacataagccaaccagagaatcacgtaaacagggaaataag

SEQ ID NO: 65160 - DNA, 3219 bp, Zea Mays
ataagccctgtattatatataattcggaaggaagggccttcttccccttccctctcacccactcgtggactcggtcctcgctcttcacctgcccgcgcctcggtaggcgctagtcgccttcctccctggaaggaaaaacaaacaaacacgaaacgcaggtccgaatccaaatctagcggcacgcttaacgtcgcgatcccgcggactccacccacgcccgcggcggcagcgcggatcccgcctagggctcgcgtgtcggtcgctccggcgctaactagtaactaccccctcgcggcgacgggaggtcggtagcggcgatcgcgctagcggagccgcttcttcgccctcgacgccgccggcctcgatcaggccccgccgacggaatggcatccaaagtccgctttacagtgggttctcaagtttgggttgaggatgctgaggtggcttggattgatgggttggtggaggaggtacaaggagatgaattaattataaactgcacttctgggaagaaggttactgcaaatgtctcaagtgtgtatcctaaggatgcagaagcgaagcgctgtggcgttgaggatatgacgaggctagcttatcttaatgaaccaggagttttacagaacttaaagtctagatatggaatgaatgaaatatatacttatactggcaacattttaatagctgttaatccatttcaaagacttccccacctttataacaatcacatgatgggaatctataaaggcgcagaatttggcgagctgagcccccatcctttcgctattgcagatcatgcatataggcttatgatgaattgtggaaaaagtcaagccatattagtgagtggcgaaagtggagctggtaagacagaaagcactaaaagccttatgcagtatcttgcatttatgggtggtaaagctcaatctgggggaaggtcagtgcaacaacaagtactggagtcaaatcctgttcttgaggcatttggaaatgcaaaaacagtcaggaataataattcaagtcgttttggaaaatttgttgagattcagtttgacaagaatgggaagatctcaggagctgccataaggacttacctcttagaaaggtctcgtgtctgccaaatatctgatccagaaaggaactatcactgcttttacatgctatgtaatgcaccagctgaggaccgtgagagatataaactgggagatgccgcatcatttcactatcttaaccagtctagttgtattaagcttgatgcgatggatgatgcttcagaatatatcataactaggagggcaatggacattgtgggcatcagttctgatgaacaggatgcaatatttagagttgttgctgctattcttcatttgggcaatgtggaattttcagaagggagtgaagcagattcttctgtacccaaagatgacaagtcccagttccatcttaggacagctgcggagcttttcatgtgtgatgagaaggctcttgaggaatctttgtgtaagcgtgttatggtaacacgtggtgaaagtattgttaaaaatttagatgcacgagcagcagctctcagtagagatgcactagccagaattgtttactctcgtttgtttgattggcttgtaactaagataaatacttcaataggacaagatctaagctcgaagcttttgattggtgtactggatatatatggttttgagagtttcaagacaaacaggtgcttaactgtttcgagcagttttgcatcaacttaactaacgagaagctgcagcaacactttaatcagcatgtgtttaagatggaacaagaagaatatacaaaggaagaaattgattggagttatatccagtttgtagacaaccaagagattcttgatcttattgagaagaaacctgggggtataattgctctactggatgaaacttgcatgctgcgaaattcaacccatgaaatatttgctgaaaagctgtatcaaaaatttaaggggaacttgcacttcagtaggccaaagttctcacggtctgatttcactattcatcactacgctggaaatgttacgtaccaaacagatctgttcttggataagaacattgattatgctgtgaatgagcatcaagttttgttacatgcttcgagatgttcgttcgtttccagtctttttccacatgaagtatcagctaaatctacgaaatttacatcaataggttcaagctttaagcaacaattacaagctttgctggaaactttgagcgcaacagagccacattacatccgctgcataaagcccaataatgttctcaagccagcgattttcgagaacagtaatgttctccagcagcttcgatgtgggggagtattagaggcaataagaataagctgccttggatatccaacaaggaggagatttgatgaatttgttgaccgttttggtgttttactacctgaagttcttggtgaaagttatgatgaagttactgctacaaacatgcttcttgacaaagtcaatctcacaggatatcagatagggaaaactaaagtgtttctgcgtgctggtcaaatggctgaattagatgctatgagaactgaggtcttgggatgttctgctagtaaaatccagagaaaagtacggtcatacttagctcgaaaaaaattcattcagttgcgaatatctgctactcatctccaggctatttgcagagggcaaattgcaaggcattattacgatgatctccgcagggaggctgcttcattgaccatacaaacctgctaccgtatgtactttgcaaggaagaactacataaatctctgtactgcatcaactactatccaatctggtctacgtggtatggctgctcgcaagaaactccagttccgtcaacatacaaaagctgcggtgaccattcagagtttctggcgtagttatgtagcacgctctcgattcatgagtttgaagaaggcagccattgctactcaatgtgcttggagaggaagagtggccagaaaagagcttcgaaaacttaaaatggctgctaaagaaactggtgctctccaagctgctaagaataaattagagaaacaagttgaggagctcacgtggcggctgcaactagagaaacgcatgagggagtacaatatgttgatctctaccgatgaccaggaggtgatctgggagatcaggtacataagccaaccagagaatcacgtaaacagggaaataag

SEQ ID NO: 65161 - DNA, 2069 bp, Zea Mays
cgtggactcggtcctcgctcttcacctgcccgcgcctcggtaggcgctagtcgccttcctccctggaaggaaaaacaaacaaacacgaaacgcaggtccgaatccaaatctagcggcacgcttaacgtcgcgatcccgcggactccacccacgcccgcggcggcagcgcggatcccgcctagggctcgcgtgtcggtcgctccggcgctaactagtaactaccccctcgcggcgacgggaggtcggtagcggcgatcgcgctagcggagccgcttcttcgccctcgacgccgccggcctcgatcaggccccgccgacggaatggcatccaaagtccgctttacagtgggttctcaagtttgggttgaggatgctgaggtggcttggattgatgggttggtggaggaggtacaaggagatgaattaattataaactgcacttctgggaagaaggttactgcaaatgtctcaagtgtgtatcctaaggatgcagaagcgaagcgctgtggcgttgaggatatgacgaggctagcttatcttaatgaaccaggagttttacagaacttaaagtctagatatggaatgaatgaaatatatacttatactggcaacattttaatagctgttaatccatttcaaagacttccccacctttataacaatcacatgatgggaatctataaaggcgcagaatttggcgagctgagcccccatcctttcgctattgcagatcatgcatataggcttatgatgaattgtggaaaaagtcaagccatattagtgagtggcgaaagtggagctggtaagacagaaagcactaaaagccttatgcagtatcttgcatttatgggtggtaaagctcaatctgggggaaggtcagtgcaacaacaagtactggagtcaaatcctgttcttgaggcatttggaaatgcaaaaacagtcaggaataataattcaagtcgttttggaaaatttgttgagattcagtttgacaagaatgggaagatctcaggagctgccataaggacttacctcttagaaaggtctcgtgtctgccaaatatctgatccagaaaggaactatcactgcttttacatgctatgtaatgcaccagctgaggaccgtgagagatataaactgggagatgccgcatcatttcactatcttaaccagtctagttgtattaagcttgatgcgatggatgatgcttcagaatatatcataactaggagggcaatggacattgtgggcatcagttctgatgaacaggatgcaatatttagagttgttgctgctattcttcatttgggcaatgtggaattttcagaagggagtgaagcagattcttctgtacccaaagatgacaagtcccagttccatcttaggacagctgcggagcttttcatgtgtgatgagaaggctcttgaggaatctttgtgtaagcgtgttatggtaacacgtggtgaaagtattgttaaaaatttagatgcacgagcagcagctctcagtagagatgcactagccagaattgtttactctcgtttgtttgattggcttgtaactaagataaatacttcaataggacaagatctaagctcgaagcttttgattggtgtactggatatatatggttttgagagtttcaagacaaacagtttcgagcagttttgcatcaacttaactaacgagaagctgcagcaacactttaatcagcatgtgtttaagatggaacaagaagaatatacaaaggaagaaattgattggagttatatccagtttgtagacaaccaagagattcttgatcttattgagaagaaacctgggggtataattgctctactggatgaaacttgcatgctgcgaaattcaacccatgaaatatttgctgaaaagctgtatcaaaaatttaaggggaacttgcacttcagtaggccaaagttctcacggtctgatttcactattcatcactacgctggaaatgattgcagatcctaccgggggtgctacgaaggttgtatggatgagaggtgggaggacgggaacgactacgacacagagatccgtggctga

SEQ ID NO: 65162 - DNA, 2328 bp, Zea Mays
cgtggactcggtcctcgctcttcacctgcccgcgcctcggtaggcgctagtcgccttcctccctggaaggaaaaacaaacaaacacgaaacgcaggtccgaatccaaatctagcggcacgcttaacgtcgcgatcccgcggactccacccacgcccgcggcggcagcgcggatcccgcctagggctcgcgtgtcggtcgctccggcgctaactagtaactaccccctcgcggcgacgggaggtcggtagcggcgatcgcgctagcggagccgcttcttcgccctcgacgccgccggcctcgatcaggccccgccgacggaatggcatccaaagtccgctttacagtgggttctcaagtttgggttgaggatgctgaggtggcttggattgatgggttggtggaggaggtacaaggagatgaattaattataaactgcacttctgggaagaaggttactgcaaatgtctcaagtgtgtatcctaaggatgcagaagcgaagcgctgtggcgttgaggatatgacgaggctagcttatcttaatgaaccaggagttttacagaacttaaagtctagatatggaatgaatgaaatatatacttatactggcaacattttaatagctgttaatccatttcaaagacttccccacctttataacaatcacatgatgggaatctataaaggcgcagaatttggcgagctgagcccccatcctttcgctattgcagatcatgcatataggcttatgatgaattgtggaaaaagtcaagccatattagtgagtggcgaaagtggagctggtaagacagaaagcactaaaagccttatgcagtatcttgcatttatgggtggtaaagctcaatctgggggaaggtcagtgcaacaacaagtactggagtcaaatcctgttcttgaggcatttggaaatgcaaaaacagtcaggaataataattcaagtcgttttggaaaatttgttgagattcagtttgacaagaatgggaagatctcaggagctgccataaggacttacctcttagaaaggtctcgtgtctgccaaatatctgatccagaaaggaactatcactgcttttacatgctatgtaatgcaccagctgaggaccgtgagagatataaactgggagatgccgcatcatttcactatcttaaccagtctagttgtattaagcttgatgcgatggatgatgcttcagaatatatcataactaggagggcaatggacattgtgggcatcagttctgatgaacaggatgcaatatttagagttgttgctgctattcttcatttgggcaatgtggaattttcagaagggagtgaagcagattcttctgtacccaaagatgacaagtcccagttccatcttaggacagctgcggagcttttcatgtgtgatgagaaggctcttgaggaatctttgtgtaagcgtgttatggtaacacgtggtgaaagtattgttaaaaatttagatgcacgagcagcagctctcagtagagatgcactagccagaattgtttactctcgtttgtttgattggcttgtaactaagataaatacttcaataggacaagatctaagctcgaagcttttgattggtgtactggatatatatggttttgagagtttcaagacaaacagtttcgagcagttttgcatcaacttaactaacgagaagctgcagcaacactttaatcagcatgtgtttaagatggaacaagaagaatatacaaaggaagaaattgattggagttatatccagtttgtagacaaccaagagattcttgatcttattgagaagaaacctgggggtataattgctctactggatgaaacttgcatgctgcgaaattcaacccatgaaatatttgctgaaaagctgtatcaaaaatttaaggggaacttgcacttcagtaggccaaagttctcacggtctgatttcactattcatcactacgctggaaatgttacgtaccaaacagatctgttcttggataagaacattgattatgctgtgaatgagcatcaagttttgttacatgcttcgagatgttcgttcgtttccagtctttttccacatgaagtatcagctaaatctacgaaatttacatcaataggttcaagctttaagcaacaattacaagctttgctggaaactttgagcgcaacagagccacattacatccgctgcataaagcccaataatgttctcaagccagcgattttcgagaacagtaatgttctccagcagcttcgatgtggggtaatactataaaaatgcattccatgatgaatctaaggacacttatgtcaac

SEQ ID NO: 65163 - DNA, 3095 bp, Zea Mays
cctcgctcttcacctgcccgcgcctcggtaggcgctagtcgccttcctccctggaaggaaaaacaaacaaacacgaaacgcaggtccgaatccaaatctagcggcacgcttaacgtcgcgatcccgcggactccacccacgcccgcggcggcagcgcggatcccgcctagggctcgcgtgtcggtcgctccggcgctaactagtaactaccccctcgcggcgacgggaggtcggtagcggcgatcgcgctagcggagccgcttcttcgccctcgacgccgccggcctcgatcaggccccgccgacggaatggcatccaaagtccgctttacagtgggttctcaagtttgggttgaggatgctgaggtggcttggattgatgggttggtggaggaggtacaaggagatgaattaattataaactgcacttctgggaagaaggttactgcaaatgtctcaagtgtgtatcctaaggatgcagaagcgaagcgctgtggcgttgaggatatgacgaggctagcttatcttaatgaaccaggagttttacagaacttaaagtctagatatggaatgaatgaaatatatacttatactggcaacattttaatagctgttaatccatttcaaagacttccccacctttataacaatcacatgatgggaatctataaaggcgcagaatttggcgagctgagcccccatcctttcgctattgcagatcatgcatataggcttatgatgaattgtggaaaaagtcaagccatattagtgagtggcgaaagtggagctggtaagacagaaagcactaaaagccttatgcagtatcttgcatttatgggtggtaaagctcaatctgggggaaggtcagtgcaacaacaagtactggagtcaaatcctgttcttgaggcatttggaaatgcaaaaacagtcaggaataataattcaagtcgttttggaaaatttgttgagattcagtttgacaagaatgggaagatctcaggagctgccataaggacttacctcttagaaaggtctcgtgtctgccaaatatctgatccagaaaggaactatcactgcttttacatgctatgtaatgcaccagctgaggaccgtgagagatataaactgggagatgccgcatcatttcactatcttaaccagtctagttgtattaagcttgatgcgatggatgatgcttcagaatatatcataactaggagggcaatggacattgtgggcatcagttctgatgaacaggatgcaatatttagagttgttgctgctattcttcatttgggcaatgtggaattttcagaagggagtgaagcagattcttctgtacccaaagatgacaagtcccagttccatcttaggacagctgcggagcttttcatgtgtgatgagaaggctcttgaggaatctttgtgtaagcgtgttatggtaacacgtggtgaaagtattgttaaaaatttagatgcacgagcagcagctctcagtagagatgcactagccagaattgtttactctcgtttgtttgattggcttgtaactaagataaatacttcaataggacaagatctaagctcgaagcttttgattggtgtactggatatatatggttttgagagtttcaagacaaacaggtgcttaactgtttcgagcagttttgcatcaacttaactaacgagaagctgcagcaacactttaatcagcatgtgtttaagatggaacaagaagaatatacaaaggaagaaattgattggagttatatccagtttgtagacaaccaagagattcttgatcttattgagaagaaacctgggggtataattgctctactggatgaaacttgcatgctgcgaaattcaacccatgaaatatttgctgaaaagctgtatcaaaaatttaaggggaacttgcacttcagtaggccaaagttctcacggtctgatttcactattcatcactacgctggaaatgttacgtaccaaacagatctgttcttggataagaacattgattatgctgtgaatgagcatcaagttttgttacatgcttcgagatgttcgttcgtttccagtctttttccacatgaagtatcagctaaatctacgaaatttacatcaataggttcaagctttaagcaacaattacaagctttgctggaaactttgagcgcaacagagccacattacatccgctgcataaagcccaataatgttctcaagccagcgattttcgagaacagtaatgttctccagcagcttcgatgtgggggagtattagaggcaataagaataagctgccttggatatccaacaaggaggagatttgatgaatttgttgaccgttttggtgttttactacctgaagttcttggtgaaagttatgatgaagttactgctacaaacatgcttcttgacaaagtcaatctcacaggatatcagatgctatgagaactgaggtcttgggatgttctgctagtaaaatccagagaaaagtacggtcatacttagctcgaaaaaaattcattcagttgcgaatatctgctactcatctccaggctatttgcagagggcaaattgcaaggcattattacgatgatctccgcagggaggctgcttcattgaccatacaaacctgctaccgtatgtactttgcaaggaagaactacataaatctctgtactgcatcaactactatccaatctggtctacgtggtatggctgctcgcaagaaactccagttccgtcaacatacaaaagctgcggtgaccattcagagtttctggcgtagttatgtagcacgctctcgattcatgagtttgaagaaggcagccattgctactcaatgtgcttggagaggaagagtggccagaaaagagcttcgaaaacttaaaatggctgctaaagaaactggtgctctccaagctgctaagaataaattagagaaacaagttgaggagctcacgtggcggctgcaactagagaaacgcatgagggagtacaatatgttgatctctaccgatgaccaggaggtgatctgggagatcaggtacataagccaaccagagaatcacgtaaacagggaaataag

SEQ ID NO: 65164 - DNA, 3157 bp, Zea Mays
ctcgctcttcacctgcccgcgcctcggtaggcgctagtcgccttcctccctggaaggaaaaacaaacaaacacgaaacgcaggtccgaatccaaatctagcggcacgcttaacgtcgcgatcccgcggactccacccacgcccgcggcggcagcgcggatcccgcctagggctcgcgtgtcggtcgctccggcgctaactagtaactaccccctcgcggcgacgggaggtcggtagcggcgatcgcgctagcggagccgcttcttcgccctcgacgccgccggcctcgatcaggccccgccgacggaatggcatccaaagtccgctttacagtgggttctcaagtttgggttgaggatgctgaggtggcttggattgatgggttggtggaggaggtacaaggagatgaattaattataaactgcacttctgggaagaaggttactgcaaatgtctcaagtgtgtatcctaaggatgcagaagcgaagcgctgtggcgttgaggatatgacgaggctagcttatcttaatgaaccaggagttttacagaacttaaagtctagatatggaatgaatgaaatatatacttatactggcaacattttaatagctgttaatccatttcaaagacttccccacctttataacaatcacatgatgggaatctataaaggcgcagaatttggcgagctgagcccccatcctttcgctattgcagatcatgcatataggcttatgatgaattgtggaaaaagtcaagccatattagtgagtggcgaaagtggagctggtaagacagaaagcactaaaagccttatgcagtatcttgcatttatgggtggtaaagctcaatctgggggaaggtcagtgcaacaacaagtactggagtcaaatcctgttcttgaggcatttggaaatgcaaaaacagtcaggaataataattcaagtcgttttggaaaatttgttgagattcagtttgacaagaatgggaagatctcaggagctgccataaggacttacctcttagaaaggtctcgtgtctgccaaatatctgatccagaaaggaactatcactgcttttacatgctatgtaatgcaccagctgaggaccgtgagagatataaactgggagatgccgcatcatttcactatcttaaccagtctagttgtattaagcttgatgcgatggatgatgcttcagaatatatcataactaggagggcaatggacattgtgggcatcagttctgatgaacaggatgcaatatttagagttgttgctgctattcttcatttgggcaatgtggaattttcagaagggagtgaagcagattcttctgtacccaaagatgacaagtcccagttccatcttaggacagctgcggagcttttcatgtgtgatgagaaggctcttgaggaatctttgtgtaagcgtgttatggtaacacgtggtgaaagtattgttaaaaatttagatgcacgagcagcagctctcagtagagatgcactagccagaattgtttactctcgtttgtttgattggcttgtaactaagataaatacttcaataggacaagatctaagctcgaagcttttgattggtgtactggatatatatggttttgagagtttcaagacaaacaggtgcttaactgtttcgagcagttttgcatcaacttaactaacgagaagctgcagcaacactttaatcagcatgtgtttaagatggaacaagaagaatatacaaaggaagaaattgattggagttatatccagtttgtagacaaccaagagattcttgatcttattgagaaggtgaacaacataagaaacctgggggtataattgctctactggatgaaacttgcatgctgcgaaattcaacccatgaaatatttgctgaaaagctgtatcaaaaatttaaggggaacttgcacttcagtaggccaaagttctcacggtctgatttcactattcatcactacgctggaaatgttacgtaccaaacagatctgttcttggataagaacattgattatgctgtgaatgagcatcaagttttgttacatgcttcgagatgttcgttcgtttccagtctttttccacatgaagtatcagctaaatctacgaaatttacatcaataggttcaagctttaagcaacaattacaagctttgctggaaactttgagcgcaacagagccacattacatccgctgcataaagcccaataatgttctcaagccagcgattttcgagaacagtaatgttctccagcagcttcgatgtgggggagtattagaggcaataagaataagctgccttggatatccaacaaggaggagatttgatgaatttgttgaccgttttggtgttttactacctgaagttcttggtgaaagttatgatgaagttactgctacaaacatgcttcttgacaaagtcaatctcacaggatatcagatagggaaaactaaagtgtttctgcgtgctggtcaaatggctgaattagatgctatgagaactgaggtcttgggatgttctgctagtaaaatccagagaaaagtacggtcatacttagctcgaaaaaaattcattcagttgcgaatatctgctactcatctccaggctatttgcagagggcaaattgcaaggcattattacgatgatctccgcagggaggctgcttcattgaccatacaaacctgctaccgtatgtactttgcaaggaagaactacataaatctctgtactgcatcaactactatccaatctggtctacgtggtatggctgctcgcaagaaactccagttccgtcaacatacaaaagctgcggtgaccattcagagtttctggcgtagttatgtagcacgctctcgattcatgagtttgaagaaggcagccattgctactcaatgtgcttggagaggaagagtggccagaaaagagcttcgaaaacttaaaatggctgctaaagaaactggtgctctccaagctgctaagaataaattagagaaacaagttgaggagctcacgtggcggctgcaactagagaaacgcatgagggagtacaatatgttgatctctaccgatgaccaggaggtgatctgggagatcaggtacataagccaaccagagaatcacgtaaacagggaaataag

SEQ ID NO: 65165 - DNA, 3144 bp, Zea Mays
cgctcttcacctgcccgcgcctcggtaggcgctagtcgccttcctccctggaaggaaaaacaaacaaacacgaaacgcaggtccgaatccaaatctagcggcacgcttaacgtcgcgatcccgcggactccacccacgcccgcggcggcagcgcggatcccgcctagggctcgcgtgtcggtcgctccggcgctaactagtaactaccccctcgcggcgacgggaggtcggtagcggcgatcgcgctagcggagccgcttcttcgccctcgacgccgccggcctcgatcaggccccgccgacggaatggcatccaaagtccgctttacagtgggttctcaagtttgggttgaggatgctgaggtggcttggattgatgggttggtggaggaggtacaaggagatgaattaattataaactgcacttctgggaagaaggttactgcaaatgtctcaagtgtgtatcctaaggatgcagaagcgaagcgctgtggcgttgaggatatgacgaggctagcttatcttaatgaaccaggagttttacagaacttaaagtctagatatggaatgaatgaaatatatacttatactggcaacattttaatagctgttaatccatttcaaagacttccccacctttataacaatcacatgatgggaatctataaaggcgcagaatttggcgagctgagcccccatcctttcgctattgcagatcatgcatataggcttatgatgaattgtggaaaaagtcaagccatattagtgagtggcgaaagtggagctggtaagacagaaagcactaaaagccttatgcagtatcttgcatttatgggtggtaaagctcaatctgggggaaggtcagtgcaacaacaagtactggagtcaaatcctgttcttgaggcatttggaaatgcaaaaacagtcaggaataataattcaagtcgttttggaaaatttgttgagattcagtttgacaagaatgggaagatctcaggagctgccataaggacttacctcttagaaaggtctcgtgtctgccaaatatctgatccagaaaggaactatcactgcttttacatgctatgtaatgcaccagctgaggaccgtgagagatataaactgggagatgccgcatcatttcactatcttaaccagtctagttgtattaagcttgatgcgatggatgatgcttcagaatatatcataactaggagggcaatggacattgtgggcatcagttctgatgaacaggatgcaatatttagagttgttgctgctattcttcatttgggcaatgtggaattttcagaagggagtgaagcagattcttctgtacccaaagatgacaagtcccagttccatcttaggacagctgcggagcttttcatgtgtgatgagaaggctcttgaggaatctttgtgtaagcgtgttatggtaacacgtggtgaaagtattgttaaaaatttagatgcacgagcagcagctctcagtagagatgcactagccagaattgtttactctcgtttgtttgattggcttgtaactaagataaatacttcaataggacaagatctaagctcgaagcttttgattggtgtactggatatatatggttttgagagtttcaagacaaacagtttcgagcagttttgcatcaacttaactaacgagaagctgcagcaacactttaatcagcatgtgtttaagatggaacaagaagaatatacaaaggaagaaattgattggagttatatccagtttgtagacaaccaagagattcttgatcttattgagaaggtgaacaacataagaaacctgggggtataattgctctactggatgaaacttgcatgctgcgaaattcaacccatgaaatatttgctgaaaagctgtatcaaaaatttaaggggaacttgcacttcagtaggccaaagttctcacggtctgatttcactattcatcactacgctggaaatgttacgtaccaaacagatctgttcttggataagaacattgattatgctgtgaatgagcatcaagttttgttacatgcttcgagatgttcgttcgtttccagtctttttccacatgaagtatcagctaaatctacgaaatttacatcaataggttcaagctttaagcaacaattacaagctttgctggaaactttgagcgcaacagagccacattacatccgctgcataaagcccaataatgttctcaagccagcgattttcgagaacagtaatgttctccagcagcttcgatgtgggggagtattagaggcaataagaataagctgccttggatatccaacaaggaggagatttgatgaatttgttgaccgttttggtgttttactacctgaagttcttggtgaaagttatgatgaagttactgctacaaacatgcttcttgacaaagtcaatctcacaggatatcagatagggaaaactaaagtgtttctgcgtgctggtcaaatggctgaattagatgctatgagaactgaggtcttgggatgttctgctagtaaaatccagagaaaagtacggtcatacttagctcgaaaaaaattcattcagttgcgaatatctgctactcatctccaggctatttgcagagggcaaattgcaaggcattattacgatgatctccgcagggaggctgcttcattgaccatacaaacctgctaccgtatgtactttgcaaggaagaactacataaatctctgtactgcatcaactactatccaatctggtctacgtggtatggctgctcgcaagaaactccagttccgtcaacatacaaaagctgcggtgaccattcagagtttctggcgtagttatgtagcacgctctcgattcatgagtttgaagaaggcagccattgctactcaatgtgcttggagaggaagagtggccagaaaagagcttcgaaaacttaaaatggctgctaaagaaactggtgctctccaagctgctaagaataaattagagaaacaagttgaggagctcacgtggcggctgcaactagagaaacgcatgagggagtacaatatgttgatctctaccgatgaccaggaggtgatctgggagatcaggtacataagccaaccagagaatcacgtaaacagggaaataag

SEQ ID NO: 65166 - DNA, 2003 bp, Zea Mays
aacaaacacgaaacgcaggtccgaatccaaatctagcggcacgcttaacgtcgcgatcccgcggactccacccacgcccgcggcggcagcgcggatcccgcctagggctcgcgtgtcggtcgctccggcgctaactagtaactaccccctcgcggcgacgggaggtcggtagcggcgatcgcgctagcggagccgcttcttcgccctcgacgccgccggcctcgatcaggccccgccgacggaatggcatccaaagtccgctttacagtgggttctcaagtttgggttgaggatgctgaggtggcttggattgatgggttggtggaggaggtacaaggagatgaattaattataaactgcacttctgggaagaaggttactgcaaatgtctcaagtgtgtatcctaaggatgcagaagcgaagcgctgtggcgttgaggatatgacgaggctagcttatcttaatgaaccaggagttttacagaacttaaagtctagatatggaatgaatgaaatatatacttatactggcaacattttaatagctgttaatccatttcaaagacttccccacctttataacaatcacatgatgggaatctataaaggcgcagaatttggcgagctgagcccccatcctttcgctattgcagatcatgcatataggcttatgatgaattgtggaaaaagtcaagccatattagtgagtggcgaaagtggagctggtaagacagaaagcactaaaagccttatgcagtatcttgcatttatgggtggtaaagctcaatctgggggaaggtcagtgcaacaacaagtactggagtcaaatcctgttcttgaggcatttggaaatgcaaaaacagtcaggaataataattcaagtcgttttggaaaatttgttgagattcagtttgacaagaatgggaagatctcaggagctgccataaggacttacctcttagaaaggtctcgtgtctgccaaatatctgatccagaaaggaactatcactgcttttacatgctatgtaatgcaccagctgaggaccgtgagagatataaactgggagatgccgcatcatttcactatcttaaccagtctagttgtattaagcttgatgcgatggatgatgcttcagaatatatcataactaggagggcaatggacattgtgggcatcagttctgatgaacaggatgcaatatttagagttgttgctgctattcttcatttgggcaatgtggaattttcagaagggagtgaagcagattcttctgtacccaaagatgacaagtcccagttccatcttaggacagctgcggagcttttcatgtgtgatgagaaggctcttgaggaatctttgtgtaagcgtgttatggtaacacgtggtgaaagtattgttaaaaatttagatgcacgagcagcagctctcagtagagatgcactagccagaattgtttactctcgtttgtttgattggcttgtaactaagataaatacttcaataggacaagatctaagctcgaagcttttgattggtgtactggatatatatggttttgagagtttcaagacaaacaggtgcttaactgtttcgagcagttttgcatcaacttaactaacgagaagctgcagcaacactttaatcagcatgtgtttaagatggaacaagaagaatatacaaaggaagaaattgattggagttatatccagtttgtagacaaccaagagattcttgatcttattgagaagaaacctgggggtataattgctctactggatgaaacttgcatgctgcgaaattcaacccatgaaatatttgctgaaaagctgtatcaaaaatttaaggggaacttgcacttcagtaggccaaagttctcacggtctgatttcactattcatcactacgctggaaatgattgcagatcctaccgggggtgctacgaaggttgtatggatgagaggtgggaggacgggaacgactacgacacagagatccgtggctga

SEQ ID NO: 65167 - DNA, 1187 bp, Zea Mays
ctggtttcgagcagttttgcatcaacttaactaacgagaagctgcagcaacactttaatcagcatgtgtttaagatggaacaagaagaatatacaaaggaagaaattgattggagttatatccagtttgtagacaaccaagagattcttgatcttattgagaagaaacctgggggtataattgctctactggatgaaacttgcatgctgcgaaattcaacccatgaaatatttgctgaaaagctgtatcaaaaatttaaggggaacttgcacttcagtaggccaaagttctcacggtctgatttcactattcatcactacgctggaaatgttacgtaccaaacagatctgttcttggataagaacattgattatgctgtgaatgagcatcaagttttgttacatgcttcgagatgttcgttcgtttccagtctttttccacatgaagtatcagctaaatctacgaaatttacatcaataggttcaagctttaagcaacaattacaagctttgctggaaactttgagcgcaacagagccacattacatccgctgcataaagcccaataatgttctcaagccagcgattttcgagaacagtaatgttctccagcagcttcgatgtgggggagtattagaggcaataagaataagctgccttggatatccaacaaggaggagatttgatgaatttgttgaccgttttggtgttttactacctgaagttcttggtgaaagttatgatgaagttactgctacaaacatgcttcttgacaaagtcaatctcacaggatatcagatagggaaaactaaagtgtttctgcgtgctggtcaaatggctgaattagatgctatgagaactgaggtcttgggatgttctgctagtaaaatccagagaaaagtacggtcatacttagctcgaaaaaaattcattcagttgcgaatatctgctactcatctccaggctatttgcagagggcaaattgcaaggcattattacgatgatctccgcagggaggctgcttcattgaccatacaaacctgctaccgtatgtactttgcaaggaagaactacataaatctctgtactgcatcaactactatccaatctggtctacgtggtatggctgctcgcaagaaactccagttccgtcaacatacaaaagctgcggtgaccattcaggtatga

SEQ ID NO: 65168 - DNA, 875 bp, Zea Mays
atggcgggagtattagaggcaataagaataagctgccttggatatccaacaaggaggagatttgatgaatttgttgaccgttttggtgttttactacctgaagttcttggtgaaagttatgatgaagttactgctacaaacatgcttcttgacaaagtcaatctcacaggatatcagatagggaaaactaaagtgtttctgcgtgctggtcaaatggctgaattagatgctatgagaactgaggtcttgggatgttctgctagtaaaatccagagaaaagtacggtcatacttagctcgaaaaaaattcattcagttgcgaatatctgctactcatctccaggctatttgcagagggcaaattgcaaggcattattacgatgatctccgcagggaggctgcttcattgaccatacaaacctgctaccgtatgtactttgcaaggaagaactacataaatctctgtactgcatcaactactatccaatctggtctacgtggtatggctgctcgcaagaaactccagttccgtcaacatacaaaagctgcggtgaccattcagagtttctggcgtagttatgtagcacgctctcgattcatgagtttgaagaaggcagccattgctactcaatgtgcttggagaggaagagtggccagaaaagagcttcgaaaacttaaaatggctgctaaagaaactggtgctctccaagctgctaagaataaattagagaaacaagttgaggagctcacgtggcggctgcaactagagaaacgcatgagggagtacaatatgttgatctctaccgatgaccaggaggtgatctgggagatcaggtacataagccaaccagagaatcacgtaaacagggaaataag

SEQ ID NO: 65169 - DNA, 2299 bp, Zea Mays
atctatcttagttctttcactgaagcttgtgatatcatctggctctataaattcatttcatttcccttcatttacctctttcctatcattcctttgtattactacaaaagatggctttaatgggttctcttgagaccaaaattgatgaaacagaacagaagtttgaagaaatgaagagagcaagggaagagtggctgaagaaagctacagatgcagagtcaaagataaatgaactgaccaacacagtgctaagttttcaagaaaaggtaactaatatggaagcagaaaatcaactacttcggcagcaggcactgttgcgtactcctgttagaacaatacctgaaaacacatctccaaaatctaatttgactaatggcagtccgcgcattgatgaacaaaagacacctcatggaactcctgctcccaaagattatgggagctttggacagcctagagcatccttttttgagaggcagcatgagagtgttgatgcacttataaactgtgttagtgaaaatattggctttagtgaaggaaagccggttgctgcaataaccatatataagtgtcttgttcattggaagatctttgaaacagagaaaacaagtgtttttgatcggcttattcaaatttttggttctgcgatgcagaaacacgatagcaatgaggatcttgcatactggctgtcaaattcatcaactttattgatcatgcttcaaaagagcctaaaagctgctggctcaacaggaatcagtccacagaaaaggccacagactcaatcatcatttcttgggaggatggtattccgctcttcaaacatcacggttgatatggaccttgtgcgccaaatcgaggcgaagtatcctgcttttctttttaagcagcaacttacagcatttgtggaaggcttatatggtatgatacgagacaatgtgaagaaagatctgtcttcattgttggcatatgctattcaggtcccaagaactgtgaaagctagtatggtgagaggccgttcttttgggtcatcaagtttgccaaggggacgttcattttcgactcaaggtagttattggcaagcaatagtcgacaatttgagtgaactcctgaaaattttgcaagacaactgtgtcccatctatttttatccagaagatatttacccagtaatggagaatatgtgaaacaagggttggcacaactagaggtgtggtgtggagaagtgaagccagagtatgcaggatctgcgttggatgaactcaagcatatcaggcaagctgtcggtttcttggtcatattcaaaaagttcaggatttcatatgatgagattgtcaatgatctctgcccagtactaagtgtgcagcagctttacaaaatatgcactcagtactgggatgataaatataacacagagagtgtgtcagaagaggtccttgaggagatgcgaacattgatgaccaaggaatcaagcgatgaaactctggggaacacctttctactggatgatgaaattagcttgcccatatcacttgaggagatagcagattctatggatgccaaagaatttcagaatattgccccaccacaagagcttactgcaattcctgcctttcaattcttgaagagctaagccctggaaggcctaggcctacgttgctgcacgggcatacgcaaatacatctagattcttccatcagatgttatagggtttcgattctccttgtgctgtgtaattatgttgtccttgtagattggttttgttgtgttaagtttcagttggctcggttggcattagataagttgttagttgaggttgggataggttttttttttgttctgcctcctgatatgcgtttgtgcagtacacttagactaaaatcttcatgtttttgttatatatgacggtggaagctagggatccgttggaaatcattcttttatccagatttgattgggtttggttatgcagagaaatgtcaataacttgtaatggctggggcagctagatcgtgagttgttgcctccatgggggcagttgtagacttgtagtggcgtgagtttgtggcagtcactgccctgggctgtttatatttgcccactttacattttatctctcttatgcagctctaatgcgtattcaagaaaaaaaaactattatatggaatgtgttgtagaattatctgttctgttttctaaatgtatggagcttgattgctacattaacattcaaacgcctcgtttgtgtatatatttgttggtcacttgttctcaaatgctgtgattgagcaacaatgcaatacaat

SEQ ID NO: 65170 - DNA, 2224 bp, Zea Mays
atggctttaatgggttctcttgagaccaaaattgatgaaacagaacagaagtttgaagaaatgaagagagcaagggaagagtggctgaagaaagctacagatgcagagtcaaagataaatgaactgaccaacacagtgctaagttttcaagaaaaggtaactaatatggaagcagaaaatcaactacttcggcagcaggcactgttgcgtactcctgttagaacaatacctgaaaacacatctccaaaatctaatttgactaatggcagtccgcgcattgatgaacaaaagacacctcatggaactcctgctcccaaagattatgggagctttggacagcctagagcatccttttttgagaggcagcatgagagtgttgatgcacttataaactgtgttagtgaaaatattggctttagtgaaggaaagccggttgctgcaataaccatatataagtgtcttgttcattggaagatctttgaaacagagaaaacaagtgtttttgatcggcttattcaaatttttggttctgcgatgcagaaacacgatagcaatgaggatcttgcatactggctgtcaaattcatcaactttattgatcatgcttcaaaagagcctaaaagctgctggctcaacaggaatcagtccacagaaaaggccacagactcaatcatcatttcttgggaggatggtattccgctcttcaaacatcacggttgatatggaccttgtgcgccaaatcgaggcgaagtatcctgcttttctttttaagcagcaacttacagcatttgtggaaggcttatatggtatgatacgagacaatgtgaagaaagatctgtcttcattgttggcatatgctattcaggtcccaagaactgtgaaagctagtatggtgagaggccgttcttttgggtcatcaagtttgccaaggggacgttcattttcgactcaaggtagttattggcaagcaatagtcgacaatttgagtgaactcctgaaaattttgcaagacaactgtgtcccatctatttttatccagaagatatttacccaggttttctcatttatcaatgcacaacttttcaatagtaatggagaatatgtgaaacaagggttggcacaactagaggtgtggtgtggagaagtgaagccagagtatgcaggatctgcgttggatgaactcaagcatatcaggcaagctgtcggtttcttggtcatattcaaaaagttcaggatttcatatgatgagattgtcaatgatctctgcccagtactaagtgtgcagcagctttacaaaatatgcactcagtactgggatgataaatataacacagagagtgtgtcagaagaggtccttgaggagatgcgaacattgatgaccaaggaatcaagcgatgaaactctggggaacacctttctactggatgatgaaattagcttgcccatatcacttgaggagatagcagattctatggatgccaaagaatttcagaatattgccccaccacaagagcttactgcaattcctgcctttcaattcttgaagagctaagccctggaaggcctaggcctacgttgctgcacgggcatacgcaaatacatctagattcttccatcagatgttatagggtttcgattctccttgtgctgtgtaattatgttgtccttgtagattggttttgttgtgttaagtttcagttggctcggttggcattagataagttgttagttgaggttgggataggttttttttttgttctgcctcctgatatgcgtttgtgcagtacacttagactaaaatcttcatgtttttgttatatatgacggtggaagctagggatccgttggaaatcattcttttatccagatttgattgggtttggttatgcagagaaatgtcaataacttgtaatggctggggcagctagatcgtgagttgttgcctccatgggggcagttgtagacttgtagtggcgtgagtttgtggcagtcactgccctgggctgtttatatttgcccactttacattttatctctcttatgcagctctaatgcgtattcaagaaaaaaaaactattatatggaatgtgttgtagaattatctgttctgttttctaaatgtatggagcttgattgctacattaacattcaaacgcctcgtttgtgtatatatttgttggtcacttgttctcaaatgctgtgattgagcaacaatgcaatacaat

SEQ ID NO: 65171 - DNA, 2200 bp, Zea Mays
atggctttaatgggttctcttgagaccaaaattgatgaaacagaacagaagtttgaagaaatgaagagagcaagggaagagtggctgaagaaagctacagatgcagagtcaaagataaatgaactgaccaacacagtgctaagttttcaagaaaaggtaactaatatggaagcagaaaatcaactacttcggcagcaggcactgttgcgtactcctgttagaacaatacctgaaaacacatctccaaaatctaatttgactaatggcagtccgcgcattgatgaacaaaagacacctcatggaactcctgctcccaaagattatgggagctttggacagcctagagcatccttttttgagaggcagcatgagagtgttgatgcacttataaactgtgttagtgaaaatattggctttagtgaaggaaagccggttgctgcaataaccatatataagtgtcttgttcattggaagatctttgaaacagagaaaacaagtgtttttgatcggcttattcaaatttttggttctgcgatgcagaaacacgatagcaatgaggatcttgcatactggctgtcaaattcatcaactttattgatcatgcttcaaaagagcctaaaagctgctggctcaacaggaatcagtccacagaaaaggccacagactcaatcatcatttcttgggaggatggtattccgctcttcaaacatcacggttgatatggaccttgtgcgccaaatcgaggcgaagtatcctgcttttctttttaagcagcaacttacagcatttgtggaaggcttatatggtatgatacgagacaatgtgaagaaagatctgtcttcattgttggcatatgctattcaggtcccaagaactgtgaaagctagtatggtgagaggccgttcttttgggtcatcaagtttgccaaggggacgttcattttcgactcaaggtagttattggcaagcaatagtcgacaatttgagtgaactcctgaaaattttgcaagacaactgtgtcccatctatttttatccagaagatatttacccaggttttctcatttatcaatgcacaacttttcaatagccttcttgtacgtcatgagtgctgctctttcagtaatggagaatatgtgaaacaagggttggcacaactagaggtgtggtgtggagaagtgaagccagaggtcatattcaaaaagttcaggatttcatatgatgagattgtcaatgatctctgcccagtactaagtgtgcagcagctttacaaaatatgcactcagtactgggatgataaatataacacagagagtgtgtcagaagaggtccttgaggagatgcgaacattgatgaccaaggaatcaagcgatgaaactctggggaacacctttctactggatgatgaaattagcttgcccatatcacttgaggagatagcagattctatggatgccaaagaatttcagaatattgccccaccacaagagcttactgcaattcctgcctttcaattcttgaagagctaagccctggaaggcctaggcctacgttgctgcacgggcatacgcaaatacatctagattcttccatcagatgttatagggtttcgattctccttgtgctgtgtaattatgttgtccttgtagattggttttgttgtgttaagtttcagttggctcggttggcattagataagttgttagttgaggttgggataggttttttttttgttctgcctcctgatatgcgtttgtgcagtacacttagactaaaatcttcatgtttttgttatatatgacggtggaagctagggatccgttggaaatcattcttttatccagatttgattgggtttggttatgcagagaaatgtcaataacttgtaatggctggggcagctagatcgtgagttgttgcctccatgggggcagttgtagacttgtagtggcgtgagtttgtggcagtcactgccctgggctgtttatatttgcccactttacattttatctctcttatgcagctctaatgcgtattcaagaaaaaaaaactattatatggaatgtgttgtagaattatctgttctgttttctaaatgtatggagcttgattgctacattaacattcaaacgcctcgtttgtgtatatatttgttggtcacttgttctcaaatgctgtgattgagcaacaatgcaatacaat

SEQ ID NO: 65172 - DNA, 1701 bp, Zea Mays
cttccgcccgggacatctttctatggtactggagaagcgagtggcacacttgaacggactgggaaacgagttttcacatggaacacagatgcatggggttacgggccaggaaccacttcattgtatcagtcacacccttgggttttggctatcctccctgatggaaaagcattgggtgtccttgctgataccactcgacgttgtgaaattgatttgaggcaaaaatcgactataaagttctctgccccatctgcctaccctgtcatcacgtttggaccatttaatgctccagctgatgttatgacatctttatcgcatgcaatcggtactgtgtccatgccgccaaagtggtcggttggttatcatcaatgtcgttacagttatgattcttctgagaaagtactcaaggttgttagaacatttagggagaaaggaattccttgtgatgttgtctggatggatattgactatatggatggttttaggtgcttcacgtttgatagtatccgattcccagatccaaaatcactggtggacgatcttcattccattggttgcaaagcagtctggatgcttgatccaggcatcaagaaggagaagggtttcttcgtttttgatagtggctcaaaaaatgatgtttgggttcaaaaggcagatggcagcccgttcgttggggaggtgtggcctggtgattgtgttttccctgattttacatctgaaaaggcacgagcttggtgggctagtttggtaaaggacttcatctccaatggtgttgatggaatatggaatgatatgaatgaacctgctgtttctaaaactgtcacaaagacaatgcctgaaagcaatatccataggggagatgctgatattggtggtgttcaaaatcattcatactatcacaatgtctatggaatgctaatgacaagatctacttataaaggaatggaaatggccaatgcagctaaaaggccatttgttcttacacgagctggttttataggaagccagcgttatgctgcaacatggactggtgataatctttcaacttgggaacatctacacatgagtctaccaatgattcttcagttgggtctcagtggtcaaccattgtcaggtcctgatattggtggttttggtggaaatgctactccaaaactttttggaagatggatgggtttgggtgcattgtttccattttcacgcggccatacagaaactggaagcatcgaccatgagccatggtcctttggtgaagagtgtgaggaagtctgtcgccttgcactactaagacggtaccggctactaccacatatctacactcttttttaccactcacatacaaagggtattccagttgctgctccagttttctttgctgatccacaagaccctgaactgaggaaagttgagacttcctttctcctcggaccactcttagtctgtgcaagcactttacctaataaaggagctcatgaatgtgcacataagttaccaaagggcatatggttgccttttgattttgctgattcacatcctgatctgccactgctgtatctacaaggtggagcaattcttcctgtaggtcttcctattaagcatgtcggtgaagcaagtttggaagatgatctgtcactaattatcgcattgaatgaaaatgccttggtaacagtaacagtaactcgtgacagcaaagcagagtag

SEQ ID NO: 65173 - DNA, 2739 bp, Zea Mays
atggttgttagaacatttagggagaaaggaattccttgtgatgttgtctggatggatattgactatatggatggttttaggtgcttcacgtttgatagtatccgattcccagatccaaaatcactggtggacgatcttcattccattggttgcaaagcagtctggatgcttgatccaggcatcaagaaggagaagggtttcttcgtttttgatagtggctcaaaaaatgatgtttgggttcaaaaggcagatggcagcccgttcgttggaggatatgtctcatacagtttacattcaggggaggtgtggcctggtgattgtgttttccctgattttacatctgaaaaggcacgagcttggtgggctagtttggtaaaggacttcatctccaatggtgttgatggaatatggaatgatatgaatgaacctgctgtttctaaaactgtcacaaagacaatgcctgaaagcaatatccataggggagatgctgatattggtggtgttcaaaatcattcatactatcacaatgtctatggaatgctaatgacaagatctacttataaaggaatggaaatggccaatgcagctaaaaggccatttgttcttacacgagctggttttataggaagccagcgttatgctgcaacatggactggtgataatctttcaacttgggaacatctacacatgagtctaccaatgattcttcagttgggtctcagtggtcaaccattgtcaggtcctgatattggtggttttggtggaaatgctactccaaaactttttggaagatggatgggtttgggtgcattgtttccattttcacgcggccatacagaaactggaagcatcgaccatgagccatggtcctttggtgaagagtgtgaggaagtctgtcgccttgcactactaagacggtaccggctactaccacatatctacactcttttttaccactcacatacaaagggtattccagttgctgctccagttttctttgctgatccacaagaccctgaactgaggaaagttgagacttcctttctcctcggaccactcttagtctgtgcaagcactttacctaataaaggagctcatgaatgtgcacataagttaccaaagggcatatggttgccttttgattttgctgattcacatcctgatctgccactgctgtatctacaaggtggagcaattcttcctgtaggtcttcctattaagcatgtcggtgaagcaagtttggaagatgatctgtcactaattatcgcattgaatgaaaatggtaaagctgaaggtgtcctctttgaagatgctggagatggatatgcattcacacaaggagactatcttttgacatattatattgctgaactccactcgtcggtggttactgtcaaagtcttcaaatctgaagggtcatggaagagaccaaaacgaaatcttaaaataaatatattgcttggtggaggtgctatgataagtacaaatggcattgatggcgaagaaatacaccttacaatgccttctgaatctgaagtgtcaaacttagtcgcaactagcgaatttgagcacaagaaacgaatggagatgattcatcctatacctgatatagaggagtcactgaggcaggaacgtgctgagctatcaaaaatacctgttgatatgaaaagtggagactggttccttaagattgttccatggattggaggccgtattatctcgatgacccatcttccttctgattcccagtggcttcacagcaggattgagatacatggttatgaagaatacagtgggactgaatatagatctgctggttgcactgaacagtacaaagtcatcaggtgtgttgaacaatctggagaggaggaatctatttgtatggaaggagacattggtggtggtcttgttctccagcgccagatatctattctgaaggacaacccaaagattgttcagatcgactccagtattcaggcaagaagtgtaggagcaggttctggtgggttttcaaggttggtctgtttacgagttcatcctacattcaccctgctgcacccaactgaggtagtggttgccttcacggccatcaatggttcaaagcaagagatctccccggaggcaggagaaataacattcgagggagaccttaggcccaatggggaatggatgctagtggacaagtgtgtcgggctgagcttggtgaatcggtttaatccccgggaggttagcaaatgttttgtgcactggggaactgctaatgtgaagatggagctctggtcagaggaaagaccagtgtctaacgacacgccgttgaggatttgccaccagtacgaggtgtggcaaacaagctaaacactgccccgacagcagaaataaaaagatcaatttggaggaggacgcttcagttcaggcttgcacttgttttacggtctttgtattgatggtcgtccaccaaaacacctttcattgtattttggacatgtgtcgttagttattaccctatggcaggacgtttggtctgctaaaaacatggttgctctgcaatctctgctactgttcctggaataaataaagctgattgctgcaatctccatcatatctttcagttacccagtttctgtttgaaaatcatggttcctaggtggtttatcagaatttggttctacatattttaccagcaattgcatgctgtttataggataaccagagtttgaggtcctacaccaaatataaatg

SEQ ID NO: 65174 - DNA, 6694 bp, Zea Mays
caccaatccacccttatcaatcccctgctcgctatcattctcgctccctccctcccttccttggccttgccacttcctccgcctctgccctgctctgctcagcttctcacctcccagctgggctccccacccctctcgctccctgttctatcctctcgttccctctgcaaccttctctctctctagcttatcccgataatggctgcctcgagcagcaccacctagctagccgtgcccgctccacgcaacacgtacgtacgtccgctgctcggcgtcggttccgcctcgtacaacaaccacactttgcattgagccaggtcgtccagcttctgaggaggagcggcagcacgcacctgggcgccggcccactgctgcagctgggctgctagcttgagctgagcttgccgttgggcgcgcgcgtgcatggcgcccaagagcaggcgtgggaaggccaagggcgagaagaagaagaaagatgagaaagttctccctgtggccattgacatcactgtcaacctcccggaccagtctcatgtcattctgaagggtatttcaacggacaggatcatcgatgtgaggcggctgctctgcgtcaacaccgccacgtgtgccatcacaaattattctctcacacatgagatgcgtgatggtgcgttgaaggatgccgctgacattgctacactaaaaccctgcactctcacattggtcgaagaggagtacagcgaggagagcgcggtcgagcatgtccggcgtctgctggacatcgtcgcttgcaccacctgcttcggcccagcgccgccacctcctcctccgccgtcccccaaggacgccgatgccgctaaggagacatccagctccagctccacatccaaggccgtcgcatccgcctcctcgggtgggcgccgcacggcctcaccgccgccggcctcgccgtcctccgctgccgcgaaggagtcgtcagccgcaaaggaggcagcagccaaggagtccgcggctgcggtagagctggaggccgagatgagcggcgcgtgccctcgcctcggcgccttctacgagttcttctcactagccaacctcacgccgccactccaatttgtaaggcgagtgttgcagcctcgacaggaggaacagccttcggatgaccatctgttctttcttgaggcaaagctatgtagtgggaagttccttgttgttgaagctcggcgaaagggattcttcagtctaggaaagcagcgagtcttgtgccacaacctagtcgatcttctgaggcatcttagtagagcatttgacaatgcttatgaagatcttatgaaggcatttttggaacgaaacaagtttggaaattttccttatgggtttcgtgcaaatacatggcttgttcctccaattgctgcgcagtcaccatcaacgtttcctcctcttcctgctgaggatgaaacatggggaggcagtggaggtggttggggaagggatggaaagagcgacatggtgccatgggcagatgaatttctctatctcacatccatgccttgcaaaactgctgaggagagggaactccgtgacaggagagcattcctacttcacagcctctttgtagatgttgccatctttcgggctattgcagcagtaaggcatgtaatggagggtacagagttatcggcatcaaccaatatagatgaagtcttgtattctgagacagtgggacattttagcatcactgtcacaagagattcttcagatgcaagctgcaagatggacactaagatagatggaaacagagccacaggaatggactctaaggatcttgcggaaagaaaccttttgaaaggaataactgcagatgaaaacacagctgctcatgatgtcgacagtttgggcattatcaaccttagatattgtggatatgttgcagtagcaaaggtggacaacatcgacaaaaccaaagtaaatgcttctatcaagcctatgaatatcgcagatcaacctgaagggggtgcacatgcattgaacattaacagtttgaggatgctccttaatgaagccacctctaccggggagaaaaagatatcaaacctttcacaaaatcataggcaggaagaactaattgcggcacaaacttttgttgagaagttattgaaggaaagtcttcaaaagcttgaggaagaggaaaatgtaaaacattcatttatgagatgggaacttggtgcctgctgggttcagcatttgcaggatcagaaaaattctgataaggataaaaagcaaggtggtgagaaggataagaaaaaaacactggacaaatctaaagaaccaaagattgaagggctagggaagcctctcaaagctcttaagaatgcaaaaaatgttgattctgctgacctgggttcctcagcgggacccaaaagctctgcagaaagccagaaagataagccatcagatgttaaattgcctcaaggagagtccagtgcttctgagaatgaaaatctgctgaaggatttattaccagaatctgcttttaccaggttgaaagaatctgaaactgggctccaccagaagtcaccacctgagttgattgagatggctctgaagtactatgatgaagttgcacttcctaagctggttgctgattttggttctctggaactttcacctgttgacggtaggactttgactgatttcatgcataccagaggcttacagatgcgttctctaggacgagttgtcaagctttcagagaagctttcacatgttcagtccctatgtgtgcatgagatgatagtgcgtgctttcaagcatatcgtccgttctgtgattgctgctatttcagacattcgacaattagcactaacaatagctgcagcgttgaacttattgcttggtgtccctgaatctgatgtctctggaagttctcctaatgtgcatcccctagtatggagatggctggtgatcttcttgaaaaagagatatgaatttgagctcacggagaaacattaccatgatgtgaggaaatatgctgtccttagaggactgtgccataaggtgggcattgattttgcaccccgagatttcattatggattgctctttcccattccataagcaggacattattagcctggtacctgtacataagcaagttgcatgctcatctgcagatggtaggcaactgctagaatcctctaaaactgcccttgacaagggtaaacttgaagatgctgtcaattatgggaccaaggctctttccaagctcataactgtatgtggtccctaccaccgaatgacagctggagcttatagtctgctagctgttgttttgtaccatactggtgattttaatcaggctactatttatcagcaaaaggccctagacatcaatgagagagaacttggacttgaccaccctgatactatgaagagttatggagaccttgctgtgttctactaccgtctgcaacatacagaattggccctaaagtatgtcaagcgtgcgctatatcttctgcatcttacgtgcgggccatctcatccaaatacagctgctacatatatcaatgtagctatgatggaagaaggattgggcaatgtgcatgtagctctaagatacttgcacaaagctttaaaatgcaaccagaaattactagggcctgatcatatacagactgctgccagctaccatgctatagccatagctctctcgttgatggaagcatattccttgagtgtccagcatgagcaaacaaccttgcaaatccttcgtgcaaagcttggaccagatgatctaagaactcaggatgctgctgcttggcttgaatactttgagtcaaaggtaattgagcaacaagaagctgcacggaatggaactcggaagcctgacgcatcaatagctagtaaaggacacctaagtgtatctgatctgcttgattacataaatcctgaccaagagagcaagggaagagattctgaatttggaaaaaggagatactcaagcataaagttcaaatggagcaagccctgagatatctccaagagattcaaatcccattatagatgaggaacagcaagttaaagagccatcaaaagatgacagcactaaaagtatttctgaagctgaagttaaacagactcctgaatcatttgagcatccagcaccttctgagccacaactagagatagttgaggcgaacattaatgcacctaaggaagttattgaagttgaaaattcagaacctgaagatggttggcagcctgttcaaagacctaaatcagctgggggttcaggaaaacagatgaaacattatcgcccaaccaccagaaaggtgtatgaccctgatagtcatgatccaacatatacttcacaatacaaggcaaggaattcctattcaaataaccggtattatttcttaaggaagagaacagttgtacctacaacgtacacagatcctcaacagcatgtgaaagttcagacatttggtgccaggtttggtcgcaagatttacaaggctgtgacctatcgggttaagccagcgactgcaacaacagaggtgctagatacttttaagagtacagagcagatgagtggtaaagcagaatcacaggtagcaaactcacaagcacacaatcctacctcaacagatcacaaaggaagtgagtcacatggaactttagttgcaagtagtggaaatgctccatcatacaaagatgttgcactagcacggcctggaacaattgccaagactcaaatacagaaacctagagacgatgtaccacagaaccaaccatcacttggtcagattattgcacaagaaatgaaagattctttggttgattcactccaagtggaacagggacctgtctctgcaaataccaataattctaaagaagaaaccaatgtgctaggaaaactccagaaattagaagaaacaaaattctctgaaggggaactggagattgagaatctgtgcaaagacagggtacaagatttgccaataccaaaggctgaggaatctggaattggaagtgagcctgtaaatagtaaaaaagatgccaatgtgttaagtaacacaagtcaagaactatcaagtagtagcaatgatggtgcagccattgagttttcggagtcaactggatctgtaaaaactgaacagactgagaagtctgatacggatttttttgaagctctaccccgcagtatagaaaatatttcagtttcagcatctactacaaacacagggagtcttggaggtgatggaagtgagaagtccaagcctaacttagtgctaagtaatattgatttgagagagatgcctaataagaagctatctgcttctgcaccaccgtttaatccatctccaccatctgtacttagcccactttctggcaatgttggtctcccgccaccaggtgccattccaggagtagcaccttggcctgtgaatgtatccctgcatcctgggcattcaactatggtgccaagtggtcctcctttgtgcacttcccctcatcatttataccctcctgctccccgatctcctaatctcatgcatcctgtgccatttatttatccaccatatagtcaaccacaggtggttccaaacaccacatttcccatgaacactaatatttttcggcctaaccattatggatggcaaccttatatgggcccagcgccatcagaatttgtgccaatgtcagcatggtcaagtagccatacaattgacttcattcccacaccacatgttgttgatcctatttctcaatctttagcagataagcatattcaatctgatgcagctgttgttagtataggcccttcactggacagtagcgctgtagtggccaaagaggagatggagactcctgcagtggcagtaagtggcaatttgataagcaacaaacatgatgatcaagataaacaattaaaggatgccactagaattgaactgagtcctgaaatgcaagaagacaacaagcatgatgaaggtagtttcaggatatatgtaaaggggaaaagccgtcggaaacaaactctgagaatcccaataagtttgcttaacaagacatatgggtcacgctcatttaagcttgtctataacaaagtagtcagagagaatgacatcttcaggccttcaagtgtgtcctttgctgaagttgtttcatctggcaactaggttatgcaaattctaaagcatctaattatgacattagtacccaaaagaaaattgtcatggatctccaattcaaatgtactgaaatgaagttattatttggaaggcagcattattctcataccatattccagatatgaaatcccaccactcgaaactattcaaaaaggataaatattttttcatttcaaatacggtaccgacaatcctgtgtagagtccagaaaagatgcaaggaattttgtgagatccagaactaataggagatggaagtattacgaataataatactagactgtctagacaggctgaattttcttcaattttgatagattaagagaaaggaatcctcttcaatttttggagctcacttttgggcttttgaagccgagcctttagattttgttcttttgttacgctgcggcacctaataaatgacttgccttctatgttttcgagaaacttacattattcttttttatataacaataatactgtctattcagtaaagctgcttgtttgtggatgcgatttg

SEQ ID NO: 65175 - DNA, 6728 bp, Zea Mays
caccaatccacccttatcaatcccctgctcgctatcattctcgctccctccctcccttccttggccttgccacttcctccgcctctgccctgctctgctcagcttctcacctcccagctgggctccccacccctctcgctccctgttctatcctctcgttccctctgcaaccttctctctctctagcttatcccgataatggctgcctcgagcagcaccacctagctagccgtgcccgctccacgcaacacgtacgtacgtccgctgctcggcgtcggttccgcctcgtacaacaaccacactttgcattgagccaggtcgtccagcttctgaggaggagcggcagcacgcacctgggcgccggcccactgctgcagctgggctgctagcttgagctgagcttgccgttgggcgcgcgcgtgcatggcgcccaagagcaggcgtgggaaggccaagggcgagaagaagaagaaagatgagaaagttctccctgtggccattgacatcactgtcaacctcccggaccagtctcatgtcattctgaagggtatttcaacggacaggatcatcgatgtgaggcggctgctctgcgtcaacaccgccacgtgtgccatcacaaattattctctcacacatgagatgcgtgatggtgcgttgaaggatgccgctgacattgctacactaaaaccctgcactctcacattggtcgaagaggagtacagcgaggagagcgcggtcgagcatgtccggcgtctgctggacatcgtcgcttgcaccacctgcttcggcccagcgccgccacctcctcctccgccgtcccccaaggacgccgatgccgctaaggagacatccagctccagctccacatccaaggccgtcgcatccgcctcctcgggtgggcgccgcacggcctcaccgccgccggcctcgccgtcctccgctgccgcgaaggagtcgtcagccgcaaaggaggcagcagccaaggagtccgcggctgcggtagagctggaggccgagatgagcggcgcgtgccctcgcctcggcgccttctacgagttcttctcactagccaacctcacgccgccactccaatttgtaaggcgagtgttgcagcctcgacaggaggaacagccttcggatgaccatctgttctttcttgaggcaaagctatgtagtgggaagttccttgttgttgaagctcggcgaaagggattcttcagtctaggaaagcagcgagtcttgtgccacaacctagtcgatcttctgaggcatcttagtagagcatttgacaatgcttatgaagatcttatgaaggcatttttggaacgaaacaagtttggaaattttccttatgggtttcgtgcaaatacatggcttgttcctccaattgctgcgcagtcaccatcaacgtttcctcctcttcctgctgaggatgaaacatggggaggcagtggaggtggttggggaagggatggaaagagcgacatggtgccatgggcagatgaatttctctatctcacatccatgccttgcaaaactgctgaggagagggaactccgtgacaggagagcattcctacttcacagcctctttgtagatgttgccatctttcgggctattgcagcagtaaggcatgtaatggagggtacagagttatcggcatcaaccaatatagatgaagtcttgtattctgagacagtgggacattttagcatcactgtcacaagagattcttcagatgcaagctgcaagatggacactaagatagatggaaacagagccacaggaatggactctaaggatcttgcggaaagaaaccttttgaaaggaataactgcagatgaaaacacagctgctcatgatgtcgacagtttgggcattatcaaccttagatattgtggatatgttgcagtagcaaaggtggacaacatcgacaaaaccaaagtaaatgcttctatcaagcctatgaatatcgcagatcaacctgaagggggtgcacatgcattgaacattaacagtttgaggatgctccttaatgaagccacctctaccggggagaaaaagatatcaaacctttcacaaaatcataggcaggaagaactaattgcggcacaaacttttgttgagaagttattgaaggaaagtcttcaaaagcttgaggaagaggaaaatgtaaaacattcatttatgagatgggaacttggtgcctgctgggttcagcatttgcaggatcagaaaaattctgataaggataaaaagcaaggtggtgagaaggataagaaaaaaacactggacaaatctaaagaaccaaagattgaagggctagggaagcctctcaaagctcttaagaatgcaaaaaatgttgattctgctgacctgggttcctcagcgggacccaaaagctctgcagaaagccagaaagataagccatcagatgttaaattgcctcaaggagagtccagtgcttctgagaatgaaaatctgctgaaggatttattaccagaatctgcttttaccaggttgaaagaatctgaaactgggctccaccagaagtcaccacctgagttgattgagatggctctgaagtactatgatgaagttgcacttcctaagctggttgctgattttggttctctggaactttcacctgttgacggtaggactttgactgatttcatgcataccagaggcttacagatgcgttctctaggacgagttgtcaagctttcagagaagctttcacatgttcagtccctatgtgtgcatgagatgatagtgcgtgctttcaagcatatcgtccgttctgtgattgctgctatttcagacattcgacaattagcactaacaatagctgcagcgttgaacttattgcttggtgtccctgaatctgatgtctctggaagttctcctaatgtgcatcccctagtatggagatggctggtgatcttcttgaaaaagagatatgaatttgagctcacggagaaacattaccatgatgtgaggaaatatgctgtccttagaggactgtgccataaggtgggcattgattttgcaccccgagatttcattatggattgctctttcccattccataagcaggacattattagcctggtacctgtacataagcaagttgcatgctcatctgcagatggtaggcaactgctagaatcctctaaaactgcccttgacaagggtaaacttgaagatgctgtcaattatgggaccaaggctctttccaagctcataactgtatgtggtccctaccaccgaatgacagctggagcttatagtctgctagctgttgttttgtaccatactggtgattttaatcagaaatactgcaggctactatttatcagcaaaaggccctagacatcaatgagagagaacttggacttgaccaccctgatactatgaagagttatggagaccttgctgtgttctactaccgtctgcaacatacagaattggccctaaagtatgtcaagcgtgcgctatatcttctgcatcttacgtgcgggccatctcatccaaatacagctgctacatatatcaatgtagctatgatggaagaaggattgggcaatgtgcatgtagctctaagatacttgcacaaagctttaaaatgcaaccagaaattactagggcctgatcatatacagactgctgccagctaccatgctatagccatagctctctcgttgatggaagcatattccttgagtgtccagcatgagcaaacaaccttgcaaatccttcgtgcaaagcttggaccagatgatctaagaactcaggatgctgctgcttggcttgaatactttgagtcaaaggtaattgagcaacaagaagctgcacggaatggaactcggaagcctgacgcatcaatagctagtaaaggacacctaagtgtatctgatctgcttgattacataaatcctgaccaagagagcaagggaagagattctgaatttggaaaaaggagatactcaagcataaaggttttatctcattcaaatgaaagttcaaatggagcaagccctgagatatctccaagagattcaaatcccattatagatgaggaacagcaagttaaagagccatcaaaagatgacagcactaaaagtatttctgaagctgaagttaaacagactcctgaatcatttgagcatccagcaccttctgagccacaactagagatagttgaggcgaacattaatgcacctaaggaagttattgaagttgaaaattcagaacctgaagatggttggcagcctgttcaaagacctaaatcagctgggggttcaggaaaacagatgaaacattatcgcccaaccaccagaaaggtgtatgaccctgatagtcatgatccaacatatacttcacaatacaaggcaaggaattcctattcaaataaccggtattatttcttaaggaagagaacagttgtacctacaacgtacacagatcctcaacagcatgtgaaagttcagacatttggtgccaggtttggtcgcaagatttacaaggctgtgacctatcgggttaagccagcgactgcaacaacagaggtgctagatacttttaagagtacagagcagatgagtggtaaagcagaatcacaggtagcaaactcacaagcacacaatcctacctcaacagatcacaaaggaagtgagtcacatggaactttagttgcaagtagtggaaatgctccatcatacaaagatgttgcactagcacggcctggaacaattgccaagactcaaatacagaaacctagagacgatgtaccacagaaccaaccatcacttggtcagattattgcacaagaaatgaaagattctttggttgattcactccaagtggaacagggacctgtctctgcaaataccaataattctaaagaagaaaccaatgtgctaggaaaactccagaaattagaagaaacaaaattctctgaaggggaactggagattgagaatctgtgcaaagacagggtacaagatttgccaataccaaaggctgaggaatctggaattggaagtgagcctgtaaatagtaaaaaagatgccaatgtgttaagtaacacaagtcaagaactatcaagtagtagcaatgatggtgcagccattgagttttcggagtcaactggatctgtaaaaactgaacagactgagaagtctgatacggatttttttgaagctctaccccgcagtatagaaaatatttcagtttcagcatctactacaaacacagggagtcttggaggtgatggaagtgagaagtccaagcctaacttagtgctaagtaatattgatttgagagagatgcctaataagaagctatctgcttctgcaccaccgtttaatccatctccaccatctgtacttagcccactttctggcaatgttggtctcccgccaccaggtgccattccaggagtagcaccttggcctgtgaatgtatccctgcatcctgggcattcaactatggtgccaagtggtcctcctttgtgcacttcccctcatcatttataccctcctgctccccgatctcctaatctcatgcatcctgtgccatttatttatccaccatatagtcaaccacaggtggttccaaacaccacatttcccatgaacactaatatttttcggcctaaccattatggatggcaaccttatatgggcccagcgccatcagaatttgtgccaatgtcagcatggtcaagtagccatacaattgacttcattcccacaccacatgttgttgatcctatttctcaatctttagcagataagcatattcaatctgatgcagctgttgttagtataggcccttcactggacagtagcgctgtagtggccaaagaggagatggagactcctgcagtggcagtaagtggcaatttgataagcaacaaacatgatgatcaagataaacaattaaaggatgccactagaattgaactgagtcctgaaatgcaagaagacaacaagcatgatgaaggtagtttcaggatatatgtaaaggggaaaagccgtcggaaacaaactctgagaatcccaataagtttgcttaacaagacatatgggtcacgctcatttaagcttgtctataacaaagtagtcagagagaatgacatcttcaggccttcaagtgtgtcctttgctgaagttgtttcatctggcaactaggttatgcaaattctaaagcatctaattatgacattagtacccaaaagaaaattgtcatggatctccaattcaaatgtactgaaatgaagttattatttggaaggcagcattattctcataccatattccagatatgaaatcccaccactcgaaactattcaaaaaggataaatattttttcatttcaaatacggtaccgacaatcctgtgtagagtccagaaaagatgcaaggaattttgtgagatccagaactaataggagatggaagtattacgaataataatactagactgtctagacaggctgaattttcttcaattttgatagattaagagaaaggaatcctcttcaatttttggagctcacttttgggcttttgaagccgagcctttagattttgttcttttgttacgctgcggcacctaataaatgacttgccttctatgttttcgagaaacttacattattcttttttatataacaataatactgtctattcagtaaagctgcttgtttgtggatgcgatttg

SEQ ID NO: 65176 - DNA, 6677 bp, Zea Mays
caccaatccacccttatcaatcccctgctcgctatcattctcgctccctccctcccttccttggccttgccacttcctccgcctctgccctgctctgctcagcttctcacctcccagctgggctccccacccctctcgctccctgttctatcctctcgttccctctgcaaccttctctctctctagcttatcccgataatggctgcctcgagcagcaccacctagctagccgtgcccgctccacgcaacacgtacgtacgtccgctgctcggcgtcggttccgcctcgtacaacaaccacactttgcattgagccaggtcgtccagcttctgaggaggagcggcagcacgcacctgggcgccggcccactgctgcagctgggctgctagcttgagctgagcttgccgttgggcgcgcgcgtgcatggcgcccaagagcaggcgtgggaaggccaagggcgagaagaagaagaaagatgagaaagttctccctgtggccattgacatcactgtcaacctcccggaccagtctcatgtcattctgaagggtatttcaacggacaggatcatcgatgtgaggcggctgctctgcgtcaacaccgccacgtgtgccatcacaaattattctctcacacatgagatgcgtgatggtgcgttgaaggatgccgctgacattgctacactaaaaccctgcactctcacattggtcgaagaggagtacagcgaggagagcgcggtcgagcatgtccggcgtctgctggacatcgtcgcttgcaccacctgcttcggcccagcgccgccacctcctcctccgccgtcccccaaggacgccgatgccgctaaggagacatccagctccagctccacatccaaggccgtcgcatccgcctcctcgggtgggcgccgcacggcctcaccgccgccggcctcgccgtcctccgctgccgcgaaggagtcgtcagccgcaaaggaggcagcagccaaggagtccgcggctgcggtagagctggaggccgagatgagcggcgcgtgccctcgcctcggcgccttctacgagttcttctcactagccaacctcacgccgccactccaatttgtaaggcgagtgttgcagcctcgacaggaggaacagccttcggatgaccatctgttctttcttgaggcaaagctatgtagtgggaagttccttgttgttgaagctcggcgaaagggattcttcagtctaggaaagcagcgagtcttgtgccacaacctagtcgatcttctgaggcatcttagtagagcatttgacaatgcttatgaagatcttatgaaggcatttttggaacgaaacaagtttggaaattttccttatgggtttcgtgcaaatacatggcttgttcctccaattgctgcgcagtcaccatcaacgtttcctcctcttcctgctgaggatgaaacatggggaggcagtggaggtggttggggaagggatggaaagagcgacatggtgccatgggcagatgaatttctctatctcacatccatgccttgcaaaactgctgaggagagggaactccgtgacaggagagcattcctacttcacagcctctttgtagatgttgccatctttcgggctattgcagcagtaaggcatgtaatggagggtacagagttatcggcatcaaccaatatagatgaagtcttgtattctgagacagtgggacattttagcatcactgtcacaagagattcttcagatgcaagctgcaagatggacactaagatagatggaaacagagccacaggaatggactctaaggatcttgcggaaagaaaccttttgaaaggaataactgcagatgaaaacacagctgctcatgatgtcgacagtttgggcattatcaaccttagatattgtggatatgttgcagtagcaaaggtggacaacatcgacaaaaccaaagtaaatgcttctatcaagcctatgaatatcgcagatcaacctgaagggggtgcacatgcattgaacattaacagtttgaggatgctccttaatgaagccacctctaccggggagaaaaagatatcaaacctttcacaaaatcataggcaggaagaactaattgcggcacaaacttttgttgagaagttattgaaggaaagtcttcaaaagcttgaggaagaggaaaatgtaaaacattcatttatgagatgggaacttggtgcctgctgggttcagcatttgcaggatcagaaaaattctgataaggataaaaagcaaggtggtgagaaggataagaaaaaaacactggacaaatctaaagaaccaaagattgaagggctagggaagcctctcaaagctcttaagaatgcaaaaaatgttgattctgctgacctgggttcctcagcgggacccaaaagctctgcagaaagccagaaagataagccatcagatgttaaattgcctcaaggagagtccagtgcttctgagaatgaaaatctgctgaaggatttattaccagaatctgcttttaccaggttgaaagaatctgaaactgggctccaccagaagtcaccacctgagttgattgagatggctctgaagtactatgatgaagttgcacttcctaagctggactttgactgatttcatgcataccagaggcttacagatgcgttctctaggacgagttgtcaagctttcagagaagctttcacatgttcagtccctatgtgtgcatgagatgatagtgcgtgctttcaagcatatcgtccgttctgtgattgctgctatttcagacattcgacaattagcactaacaatagctgcagcgttgaacttattgcttggtgtccctgaatctgatgtctctggaagttctcctaatgtgcatcccctagtatggagatggctggtgatcttcttgaaaaagagatatgaatttgagctcacggagaaacattaccatgatgtgaggaaatatgctgtccttagaggactgtgccataaggtgggcattgattttgcaccccgagatttcattatggattgctctttcccattccataagcaggacattattagcctggtacctgtacataagcaagttgcatgctcatctgcagatggtaggcaactgctagaatcctctaaaactgcccttgacaagggtaaacttgaagatgctgtcaattatgggaccaaggctctttccaagctcataactgtatgtggtccctaccaccgaatgacagctggagcttatagtctgctagctgttgttttgtaccatactggtgattttaatcaggctactatttatcagcaaaaggccctagacatcaatgagagagaacttggacttgaccaccctgatactatgaagagttatggagaccttgctgtgttctactaccgtctgcaacatacagaattggccctaaagtatgtcaagcgtgcgctatatcttctgcatcttacgtgcgggccatctcatccaaatacagctgctacatatatcaatgtagctatgatggaagaaggattgggcaatgtgcatgtagctctaagatacttgcacaaagctttaaaatgcaaccagaaattactagggcctgatcatatacagactgctgccagctaccatgctatagccatagctctctcgttgatggaagcatattccttgagtgtccagcatgagcaaacaaccttgcaaatccttcgtgcaaagcttggaccagatgatctaagaactcaggatgctgctgcttggcttgaatactttgagtcaaaggtaattgagcaacaagaagctgcacggaatggaactcggaagcctgacgcatcaatagctagtaaaggacacctaaggtgatgtatctgatctgcttgattacataaatcctgaccaagagagcaagggaagagattctgaatttggaaaaaggagatactcaagcataaaggttttatctcattcaaatgaaagttcaaatggagcaagccctgagatatctccaagagattcaaatcccattatagatgaggaacagcaagttaaagagccatcaaaagatgacagcactaaaagtatttctgaagctgaagttaaacagactcctgaatcatttgagcatccagcaccttctgagccacaactagagatagttgaggcgaacattaatgcacctaaggaagttattgaagttgaaaattcagaacctgaagatggttggcagcctgttcaaagacctaaatcagctgggggttcaggaaaacagatgaaacattatcgcccaaccaccagaaaggtgtatgaccctgatagtcatgatccaacatatacttcacaatacaaggcaaggaattcctattcaaataaccggtattatttcttaaggaagagaacagttgtacctacaacgtacacagatcctcaacagcatgtgaaagttcagacatttggtgccaggtttggtcgcaagatttacaaggctgtgacctatcgggttaagccagcgactgcaacaacagaggtgctagatacttttaagagtacagagcagatgagtggtaaagcagaatcacaggtagcaaactcacaagcacacaatcctacctcaacagatcacaaaggaagtgagtcacatggaactttagttgcaagtagtggaaatgctccatcatacaaagatgttgcactagcacggcctggaacaattgccaagactcaaatacagaaacctagagacgatgtaccacagaaccaaccatcacttggtcagattattgcacaagaaatgaaagattctttggttgattcactccaagtggaacagggacctgtctctgcaaataccaataattctaaagaagaaaccaatgtgctaggaaaactccagaaattagaagaaacaaaattctctgaaggggaactggagattgagaatctgtgcaaagacagggtacaagatttgccaataccaaaggctgaggaatctggaattggaagtgagcctgtaaatagtaaaaaagatgccaatgtgttaagtaacacaagtcaagaactatcaagtagtagcaatgatggtgcagccattgagttttcggagtcaactggatctgtaaaaactgaacagactgagaagtctgatacggatttttttgaagctctaccccgcagtatagaaaatatttcagtttcagcatctactacaaacacagggagtcttggaggtgatggaagtgagaagtccaagcctaacttagtgctaagtaatattgatttgagagagatgcctaataagaagctatctgcttctgcaccaccgtttaatccatctccaccatctgtacttagcccactttctggcaatgttggtctcccgccaccaggtgccattccaggagtagcaccttggcctgtgaatgtatccctgcatcctgggcattcaactatggtgccaagtggtcctcctttgtgcacttcccctcatcatttataccctcctgctccccgatctcctaatctcatgcatcctgtgccatttatttatccaccatatagtcaaccacaggtggttccaaacaccacatttcccatgaacactaatatttttcggcctaaccattatggatggcaaccttatatgggcccagcgccatcagaatttgtgccaatgtcagcatggtcaagtagccatacaattgacttcattcccacaccacatgttgttgatcctatttctcaatctttagcagataagcatattcaatctgatgcagctgttgttagtataggcccttcactggacagtagcgctgtagtggccaaagaggagatggagactcctgcagtggcagtaagtggcaatttgataagcaacaaacatgatgatcaagataaacaattaaaggatgccactagaattgaactgagtcctgaaatgcaagaagacaacaagcatgatgaaggtagtttcaggatatatgtaaaggggaaaagccgtcggaaacaaactctgagaatcccaataagtttgcttaacaagacatatgggtcacgctcatttaagcttgtctataacaaagtagtcagagagaatgacatcttcaggccttcaagtgtgtcctttgctgaagttgtttcatctggcaactaggttatgcaaattctaaagcatctaattatgacattagtacccaaaagaaaattgtcatggatctccaattcaaatgtactgaaatgaagttattatttggaaggcagcattattctcataccatattccagatatgaaatcccaccactcgaaactattcaaaaaggataaatattttttcatttcaaatacggtaccgacaatcctgtgtagagtccagaaaagatgcaaggaattttgtgagatccagaactaataggagatggaagtattacgaataataatactagactgtctagacaggctgaattttcttcaattttgatagattaagagaaaggaatcctcttcaatttttggagctcacttttgggcttttgaagccgagcctttagattttgttcttttgttacgctgcggcacctaataaatgacttgccttctatgttttcgagaaacttacattattcttttttatataacaataatactgtctattcagtaaagctgcttgtttgtggatgcgatttg

SEQ ID NO: 65177 - DNA, 6717 bp, Zea Mays
caccaatccacccttatcaatcccctgctcgctatcattctcgctccctccctcccttccttggccttgccacttcctccgcctctgccctgctctgctcagcttctcacctcccagctgggctccccacccctctcgctccctgttctatcctctcgttccctctgcaaccttctctctctctagcttatcccgataatggctgcctcgagcagcaccacctagctagccgtgcccgctccacgcaacacgtacgtacgtccgctgctcggcgtcggttccgcctcgtacaacaaccacactttgcattgagccaggtcgtccagcttctgaggaggagcggcagcacgcacctgggcgccggcccactgctgcagctgggctgctagcttgagctgagcttgccgttgggcgcgcgcgtgcatggcgcccaagagcaggcgtgggaaggccaagggcgagaagaagaagaaagatgagaaagttctccctgtggccattgacatcactgtcaacctcccggaccagtctcatgtcattctgaagggtatttcaacggacaggatcatcgatgtgaggcggctgctctgcgtcaacaccgccacgtgtgccatcacaaattattctctcacacatgagatgcgtgatggtgcgttgaaggatgccgctgacattgctacactaaaaccctgcactctcacattggtcgaagaggagtacagcgaggagagcgcggtcgagcatgtccggcgtctgctggacatcgtcgcttgcaccacctgcttcggcccagcgccgccacctcctcctccgccgtcccccaaggacgccgatgccgctaaggagacatccagctccagctccacatccaaggccgtcgcatccgcctcctcgggtgggcgccgcacggcctcaccgccgccggcctcgccgtcctccgctgccgcgaaggagtcgtcagccgcaaaggaggcagcagccaaggagtccgcggctgcggtagagctggaggccgagatgagcggcgcgtgccctcgcctcggcgccttctacgagttcttctcactagccaacctcacgccgccactccaatttgtaaggcgagtgttgcagcctcgacaggaggaacagccttcggatgaccatctgttctttcttgaggcaaagctatgtagtgggaagttccttgttgttgaagctcggcgaaagggattcttcagtctaggaaagcagcgagtcttgtgccacaacctagtcgatcttctgaggcatcttagtagagcatttgacaatgcttatgaagatcttatgaaggcatttttggaacgaaacaagtttggaaattttccttatgggtttcgtgcaaatacatggcttgttcctccaattgctgcgcagtcaccatcaacgtttcctcctcttcctgctgaggatgaaacatggggaggcagtggaggtggttggggaagggatggaaagagcgacatggtgccatgggcagatgaatttctctatctcacatccatgccttgcaaaactgctgaggagagggaactccgtgacaggagagcattcctacttcacagcctctttgtagatgttgccatctttcgggctattgcagcagtaaggcatgtaatggagggtacagagttatcggcatcaaccaatatagatgaagtcttgtattctgagacagtgggacattttagcatcactgtcacaagagattcttcagatgcaagctgcaagatggacactaagatagatggaaacagagccacaggaatggactctaaggatcttgcggaaagaaaccttttgaaaggaataactgcagatgaaaacacagctgctcatgatgtcgacagtttgggcattatcaaccttagatattgtggatatgttgcagtagcaaaggtggacaacatcgacaaaaccaaagtaaatgcttctatcaagcctatgaatatcgcagatcaacctgaagggggtgcacatgcattgaacattaacagtttgaggatgctccttaatgaagccacctctaccggggagaaaaagatatcaaacctttcacaaaatcataggcaggaagaactaattgcggcacaaacttttgttgagaagttattgaaggaaagtcttcaaaagcttgaggaagaggaaaatgtaaaacattcatttatgagatgggaacttggtgcctgctgggttcagcatttgcaggatcagaaaaattctgataaggataaaaagcaaggtggtgagaaggataagaaaaaaacactggacaaatctaaagaaccaaagattgaagggctagggaagcctctcaaagctcttaagaatgcaaaaaatgttgattctgctgacctgggttcctcagcgggacccaaaagctctgcagaaagccagaaagataagccatcagatgttaaattgcctcaaggagagtccagtgcttctgagaatgaaaatctgctgaaggatttattaccagaatctgcttttaccaggttgaaagaatctgaaactgggctccaccagaagtcaccacctgagttgattgagatggctctgaagtactatgatgaagttgcacttcctaagctggttgctgattttggttctctggaactttcacctgttgacggtaggactttgactgatttcatgcataccagaggcttacagatgcgttctctaggacgagttgtcaagctttcagagaagctttcacatgttcagtccctatgtgtgcatgagatgatagtgcgtgctttcaagcatatcgtccgttctgtgattgctgctatttcagacattcgacaattagcactaacaatagctgcagcgttgaacttattgcttggtgtccctgaatctgatgtctctggaagttctcctaatgtgcatcccctagtatggagatggctggtgatcttcttgaaaaagagatatgaatttgagctcacggagaaacattaccatgatgtgaggaaatatgctgtccttagaggactgtgccataaggtgggcattgattttgcaccccgagatttcattatggattgctctttcccattccataagcaggacattattagcctggtacctgtacataagcaagttgcatgctcatctgcagatggtaggcaactgctagaatcctctaaaactgcccttgacaagggtaaacttgaagatgctgtcaattatgggaccaaggctctttccaagctcataactgtatgtggtccctaccaccgaatgacagctggagcttatagtctgctagctgttgttttgtaccatactggtgattttaatcaggctactatttatcagcaaaaggccctagacatcaatgagagagaacttggacttgaccaccctgatactatgaagagttatggagaccttgctgtgttctactaccgtctgcaacatacagaattggccctaaagtatgtcaagcgtgcgctatatcttctgcatcttacgtgcgggccatctcatccaaatacagctgctacatatatcaatgtagctatgatggaagaaggattgggcaatgtgcatgtagctctaagatacttgcacaaagctttaaaatgcaaccagaaattactagggcctgatcatatacagactgctgccagctaccatgctatagccatagctctctcgttgatggaagcatattccttgagtgtccagcatgagcaaacaaccttgcaaatccttcgtgcaaagcttggaccagatgatctaagaactcaggatgctgctgcttggcttgaatactttgagtcaaaggtaattgagcaacaagaagctgcacggaatggaactcggaagcctgacgcatcaatagctagtaaaggacacctaagtgtatctgatctgcttgattacataaatcctgaccaagagagcaagggaagagattctgaatttggaaaaaggagatactcaagcataaaggttttatctcattcaaatgaaagttcaaatggagcaagccctgagatatctccaagagattcaaatcccattatagatgaggaacagcaagttaaagagccatcaaaagatgacagcactaaaagtatttctgaagctgaagttaaacagactcctgaatcatttgagcatccagcaccttctgagccacaactagagatagttgaggcgaacattaatgcacctaaggaagttattgaagttgaaaattcagaacctgaagatggttggcagcctgttcaaagacctaaatcagctgggggttcaggaaaacagatgaaacattatcgcccaaccaccagaaaggtgtatgaccctgatagtcatgatccaacatatacttcacaatacaaggcaaggaattcctattcaaataaccggtattatttcttaaggaagagaacagttgtacctacaacgtacacagatcctcaacagcatgtgaaagttcagacatttggtgccaggtttggtcgcaagatttacaaggctgtgacctatcgggttaagccagcgactgcaacaacagaggtgctagatacttttaagagtacagagcagatgagtggtaaagcagaatcacaggtagcaaactcacaagcacacaatcctacctcaacagatcacaaaggaagtgagtcacatggaactttagttgcaagtagtggaaatgctccatcatacaaagatgttgcactagcacggcctggaacaattgccaagactcaaatacagaaacctagagacgatgtaccacagaaccaaccatcacttggtcagattattgcacaagaaatgaaagattctttggttgattcactccaagtggaacagggacctgtctctgcaaataccaataattctaaagaagaaaccaatgtgctaggaaaactccagaaattagaagaaacaaaattctctgaaggggaactggagattgagaatctgtgcaaagacagggtacaagatttgccaataccaaaggctgaggaatctggaattggaagtgagcctgtaaatagtaaaaaagatgccaatgtgttaagtaacacaagtcaagaactatcaagtagtagcaatgatggtgcagccattgagttttcggagtcaactggatctgtaaaaactgaacagactgagaagtctgatacggatttttttgaagctctaccccgcagtatagaaaatatttcagtttcagcatctactacaaacacagggagtcttggaggtgatggaagtgagaagtccaagcctaacttagtgctaagtaatattgatttgagagagatgcctaataagaagctatctgcttctgcaccaccgtttaatccatctccaccatctgtacttagcccactttctggcaatgttggtctcccgccaccaggtgccattccaggagtagcaccttggcctgtgaatgtatccctgcatcctgggcattcaactatggtgccaagtggtcctcctttgtgcacttcccctcatcatttataccctcctgctccccgatctcctaatctcatgcatcctgtgccatttatttatccaccatatagtcaaccacaggtggttccaaacaccacatttcccatgaacactaatatttttcggcctaaccattatggatggcaaccttatatgggcccagcgccatcagaatttgtgccaatgtcagcatggtcaagtagccatacaattgacttcattcccacaccacatgttgttgatcctatttctcaatctttagcagataagcatattcaatctgatgcagctgttgttagtataggcccttcactggacagtagcgctgtagtggccaaagaggagatggagactcctgcagtggcagtaagtggcaatttgataagcaacaaacatgatgatcaagataaacaattaaaggatgccactagaattgaactgagtcctgaaatgcaagaagacaacaagcatgatgaaggtagtttcaggatatatgtaaaggggaaaagccgtcggaaacaaactctgagaatcccaataagtttgcttaacaagacatatgggtcacgctcatttaagcttgtctataacaaagtagtcagagagaatgacatcttcaggccttcaagtgtgtcctttgctgaagttgtttcatctggcaactaggttatgcaaattctaaagcatctaattatgacattagtacccaaaagaaaattgtcatggatctccaattcaaatgtactgaaatgaagttattatttggaaggcagcattattctcataccatattccagatatgaaatcccaccactcgaaactattcaaaaaggataaatattttttcatttcaaatacggtaccgacaatcctgtgtagagtccagaaaagatgcaaggaattttgtgagatccagaactaataggagatggaagtattacgaataataatactagactgtctagacaggctgaattttcttcaattttgatagattaagagaaaggaatcctcttcaatttttggagctcacttttgggcttttgaagccgagcctttagattttgttcttttgttacgctgcggcacctaataaatgacttgccttctatgttttcgagaaacttacattattcttttttatataacaataatactgtctattcagtaaagctgcttgtttgtggatgcgatttg

SEQ ID NO: 65178 - DNA, 6693 bp, Zea Mays
ctcgctatcattctcgctccctccctcccttccttggccttgccacttcctccgcctctgccctgctctgctcagcttctcacctcccagctgggctccccacccctctcgctccctgttctatcctctcgttccctctgcaaccttctctctctctagcttatcccgataatggctgcctcgagcagcaccacctagctagccgtgcccgctccacgcaacacgtacgtacgtccgctgctcggcgtcggttccgcctcgtacaacaaccacactttgcattgagccaggtcgtccagcttctgaggaggagcggcagcacgcacctgggcgccggcccactgctgcagctgggctgctagcttgagctgagcttgccgttgggcgcgcgcgtgcatggcgcccaagagcaggcgtgggaaggccaagggcgagaagaagaagaaagatgagaaagttctccctgtggccattgacatcactgtcaacctcccggaccagtctcatgtcattctgaagggtatttcaacggacaggatcatcgatgtgaggcggctgctctgcgtcaacaccgccacgtgtgccatcacaaattattctctcacacatgagatgcgtgatggtgcgttgaaggatgccgctgacattgctacactaaaaccctgcactctcacattggtcgaagaggagtacagcgaggagagcgcggtcgagcatgtccggcgtctgctggacatcgtcgcttgcaccacctgcttcggcccagcgccgccacctcctcctccgccgtcccccaaggacgccgatgccgctaaggagacatccagctccagctccacatccaaggccgtcgcatccgcctcctcgggtgggcgccgcacggcctcaccgccgccggcctcgccgtcctccgctgccgcgaaggagtcgtcagccgcaaaggaggcagcagccaaggagtccgcggctgcggtagagctggaggccgagatgagcggcgcgtgccctcgcctcggcgccttctacgagttcttctcactagccaacctcacgccgccactccaatttgtaaggcgagtgttgcagcctcgacaggaggaacagccttcggatgaccatctgttctttcttgaggcaaagctatgtagtgggaagttccttgttgttgaagctcggcgaaagggattcttcagtctaggaaagcagcgagtcttgtgccacaacctagtcgatcttctgaggcatcttagtagagcatttgacaatggcttatgaagatcttatgaaggcatttttggaacgaaacaagtttggaaattttccttatgggtttcgtgcaaatacatggcttgttcctccaattgctgcgcagtcaccatcaacgtttcctcctcttcctgctgaggatgaaacatggggaggcagtggaggtggttggggaagggatggaaagagcgacatggtgccatgggcagatgaatttctctatctcacatccatgccttgcaaaactgctgaggagagggaactccgtgacaggagagcattcctacttcacagcctctttgtagatgttgccatctttcgggctattgcagcagtaaggcatgtaatggagggtacagagttatcggcatcaaccaatatagatgaagtcttgtattctgagacagtgggacattttagcatcactgtcacaagagattcttcagatgcaagctgcaagatggacactaagatagatggaaacagagccacaggaatggactctaaggatcttgcggaaagaaaccttttgaaaggaataactgcagatgaaaacacagctgctcatgatgtcgacagtttgggcattatcaaccttagatattgtggatatgttgcagtagcaaaggtggacaacatcgacaaaaccaaagtaaatgcttctatcaagcctatgaatatcgcagatcaacctgaagggggtgcacatgcattgaacattaacagtttgaggatgctccttaatgaagccacctctaccggggagaaaaagatatcaaacctttcacaaaatcataggcaggaagaactaattgcggcacaaacttttgttgagaagttattgaaggaaagtcttcaaaagcttgaggaagaggaaaatgtaaaacattcatttatgagatgggaacttggtgcctgctgggttcagcatttgcaggatcagaaaaattctgataaggataaaaagcaaggtggtgagaaggataagaaaaaaacactggacaaatctaaagaaccaaagattgaagggctagggaagcctctcaaagctcttaagaatgcaaaaaatgttgattctgctgacctgggttcctcagcgggacccaaaagctctgcagaaagccagaaagataagccatcagatgttaaattgcctcaaggagagtccagtgcttctgagaatgaaaatctgctgaaggatttattaccagaatctgcttttaccaggttgaaagaatctgaaactgggctccaccagaagtcaccacctgagttgattgagatggctctgaagtactatgatgaagttgcacttcctaagctggttgctgattttggttctctggaactttcacctgttgacggtaggactttgactgatttcatgcataccagaggcttacagatgcgttctctaggacgagttgtcaagctttcagagaagctttcacatgttcagtccctatgtgtgcatgagatgatagtgcgtgctttcaagcatatcgtccgttctgtgattgctgctatttcagacattcgacaattagcactaacaatagctgcagcgttgaacttattgcttggtgtccctgaatctgatgtctctggaagttctcctaatgtgcatcccctagtatggagatggctggtgatcttcttgaaaaagagatatgaatttgagctcacggagaaacattaccatgatgtgaggaaatatgctgtccttagaggactgtgccataaggtgggcattgattttgcaccccgagatttcattatggattgctctttcccattccataagcaggacattattagcctggtacctgtacataagcaagttgcatgctcatctgcagatggtaggcaactgctagaatcctctaaaactgcccttgacaagggtaaacttgaagatgctgtcaattatgggaccaagaggctctttccaagctcataactgtatgtggtccctaccaccgaatgacagctggagcttatagtctgctagctgttgttttgtaccatactggtgattttaatcaggctactatttatcagcaaaaggccctagacatcaatgagagagaacttggacttgaccaccctgatactatgaagagttatggagaccttgctgtgttctactaccgtctgcaacatacagaattggccctaaagtatgtcaagcgtgcgctatatcttctgcatcttacgtgcgggccatctcatccaaatacagctgctacatatatcaatgtagctatgatggaagaaggattgggcaatgtgcatgtagctctaagatacttgcacaaagctttaaaatgcaaccagaaattactagggcctgatcatatacagactgctgccagctaccatgctatagccatagctctctcgttgatggaagcatattccttgagtgtccagcatgagcaaacaaccttgcaaatccttcgtgcaaagcttggaccagatgatctaagaactcaggatgctgctgcttggcttgaatactttgagtcaaaggtaattgagcaacaagaagctgcacggaatggaactcggaagcctgacgcatcaatagctagtaaaggacacctaagtgtatctgatctgcttgattacataaatcctgaccaagagagcaagggaagagattctgaatttggaaaaaggagatactcaagcataaaggttttatctcattcaaatgaaagttcaaatggagcaagccctgagatatctccaagagattcaaatcccattatagatgaggaacagcaagttaaagagccatcaaaagatgacagcactaaaagtatttctgaagctgaagttaaacagactcctgaatcatttgagcatccagcaccttctgagccacaactagagatagttgaggcgaacattaatgcacctaaggaagttattgaagttgaaaattcagaacctgaagatggttggcagcctgttcaaagacctaaatcagctgggggttcaggaaaacagatgaaacattatcgcccaaccaccagaaaggtgtatgaccctgatagtcatgatccaacatatacttcacaatacaaggcaaggaattcctattcaaataaccggtattatttcttaaggaagagaacagttgtacctacaacgtacacagatcctcaacagcatgtgaaagttcagacatttggtgccaggtttggtcgcaagatttacaaggctgtgacctatcgggttaagccagcgactgcaacaacagaggtgctagatacttttaagagtacagagcagatgagtggtaaagcagaatcacaggtagcaaactcacaagcacacaatcctacctcaacagatcacaaaggaagtgagtcacatggaactttagttgcaagtagtggaaatgctccatcatacaaagatgttgcactagcacggcctggaacaattgccaagactcaaatacagaaacctagagacgatgtaccacagaaccaaccatcacttggtcagattattgcacaagaaatgaaagattctttggttgattcactccaagtggaacagggacctgtctctgcaaataccaataattctaaagaagaaaccaatgtgctaggaaaactccagaaattagaagaaacaaaattctctgaaggggaactggagattgagaatctgtgcaaagacagggtacaagatttgccaataccaaaggctgaggaatctggaattggaagtgagcctgtaaatagtaaaaaagatgccaatgtgttaagtaacacaagtcaagaactatcaagtagtagcaatgatggtgcagccattgagttttcggagtcaactggatctgtaaaaactgaacagactgagaagtctgatacggatttttttgaagctctaccccgcagtatagaaaatatttcagtttcagcatctactacaaacacagggagtcttggaggtgatggaagtgagaagtccaagcctaacttagtgctaagtaatattgatttgagagagatgcctaataagaagctatctgcttctgcaccaccgtttaatccatctccaccatctgtacttagcccactttctggcaatgttggtctcccgccaccaggtgccattccaggagtagcaccttggcctgtgaatgtatccctgcatcctgggcattcaactatggtgccaagtggtcctcctttgtgcacttcccctcatcatttataccctcctgctccccgatctcctaatctcatgcatcctgtgccatttatttatccaccatatagtcaaccacaggtggttccaaacaccacatttcccatgaacactaatatttttcggcctaaccattatggatggcaaccttatatgggcccagcgccatcagaatttgtgccaatgtcagcatggtcaagtagccatacaattgacttcattcccacaccacatgttgttgatcctatttctcaatctttagcagataagcatattcaatctgatgcagctgttgttagtataggcccttcactggacagtagcgctgtagtggccaaagaggagatggagactcctgcagtggcagtaagtggcaatttgataagcaacaaacatgatgatcaagataaacaattaaaggatgccactagaattgaactgagtcctgaaatgcaagaagacaacaagcatgatgaaggtagtttcaggatatatgtaaaggggaaaagccgtcggaaacaaactctgagaatcccaataagtttgcttaacaagacatatgggtcacgctcatttaagcttgtctataacaaagtagtcagagagaatgacatcttcaggccttcaagtgtgtcctttgctgaagttgtttcatctggcaactaggttatgcaaattctaaagcatctaattatgacattagtacccaaaagaaaattgtcatggatctccaattcaaatgtactgaaatgaagttattatttggaaggcagcattattctcataccatattccagatatgaaatcccaccactcgaaactattcaaaaaggataaatattttttcatttcaaatacggtaccgacaatcctgtgtagagtccagaaaagatgcaaggaattttgtgagatccagaactaataggagatggaagtattacgaataataatactagactgtctagacaggctgaattttcttcaattttgatagattaagagaaaggaatcctcttcaatttttggagctcacttttgggcttttgaagccgagcctttagattttgttcttttgttacgctgcggcacctaataaatgacttgccttctatgttttcgagaaacttacattattcttttttatataacaataatactgtctattcagtaaagctgcttgtttgtggatgcgatttg

SEQ ID NO: 65179 - DNA, 1208 bp, Zea Mays
ttcggcctcacgctagctcctcccccctgcgtcggcaggcaacggatagatacgcatcgaggcagagggcttggccgagatctccccactaccccgcagcgtctttaaaaccaggacctgcttgtttgattgtttcatcgatcgtcaatgcaagtttgtccattcgcattggtctgaatactgtagctactagcgcgagtgccactgtgccgcagctgcctgctcgccattactgcaagctgtgttcaatcaaagcttaattaggctccctctacatctgatccagctaagtagctagccagcactacagaagggcgtggcaagaatcaggagagagatagcaggggggctagctagctgagctcgtgcgacgaagaatggccggaattggcaggaacatggtggcgccgctcctggtgctcaacctcatcatgtacatcatcgtcatcggcttcgcgagctggaacctgaaccacttcatcaacgggcagaccaactaccccggcgtggccggcaacggcgcgacgttctacttcctggtgttcgccagcctggccaccaacgccgcgtcgtcgctcatcgcctgggccatcacggcgctcgccttcgggctggcctgcaaggagatccacatcggcggacaccgcggctggcgcctgcgcgtgctggaggccttcgtcatcatcctcgccttcacgcagctcctctacgtgctcatgctccacacgggcccaagggggtcaccagggtctgaggattctgatcgatgcagctcgtacatgtgtcatcatatcaggcgctgctggagtgtgatgacgtaataagtagtacccatatatatatatatggtgtgtgttgacgtaccacgtatactacgtacgtgtgtacctagtagctagctagtcagtccatcgtctgctcatctcgtcaggtcatcagatctctcggttctggtttgtacatcagtacgtgcatgcatgtatcccgtgtcaaatgtatttcgtcacccgtcagtttcagccggtcagtgaccaagtttatttcgtcacccctcagttcagtgacattggtgacatgaggtcgtggtgtcaacttttggctcaatgtattatgtacctgatcttttttacaggatttctatcggctcgtcacacttgatcgtacgtacaaatattcagttagtaacaccactgtttttaggatcgagc

SEQ ID NO: 65180 - DNA, 1134 bp, Zea Mays
ggcctcacgctagctcctcccccctgcgtcggcaggcaacggatagatacgcatcgaggcagagggcttggccgagatctccccactaccccgcagcgtctttaaaaccaggacctgcttgtttgattgtttcatcgatcgtcaatgcaagtttgtccattcgcattggtctgaatactgtagctactagcgcgagtgccactgtgccgcagctgcctgctcgccattactgcaagctgtgttcaatcaaagcttaattaggctccctctacatctgatccagctaagtagctagccagcactacagaagggcgtggcaagaatcaggagagagatagcaggggggctagctagctgagctcgtgcgacgaagaatggccggaattggcaggaacatggtggcgccgctcctggtgctcaacctcatcatgtacatcatcgtcatcggcttcgcgagctggaacctgaaccacttcatcaacgggcagaccaactaccccggcgtggccggcaacggcgcgacgttctacttcctggtgttcgccatcctggccggcgtggtgggcgcggcgtccaagctggcgggcgtgcaccacgtgcgcgcctggcgccacgacagcctggccaccaacgccgcgtcgtcgctcatcgcctggcccaagggggtcaccagggtctgaggattctgatcgatgcagctcgtacatgtgtcatcatatcaggcgctgctggagtgtgatgacgtaataagtagtacccatatatatatatatggtgtgtgttgacgtaccacgtatactacgtacgtgtgtacctagtagctagctagtcagtccatcgtctgctcatctcgtcaggtcatcagatctctcggttctggtttgtacatcagtacgtgcatgcatgtatcccgtgtcaaatgtatttcgtcacccgtcagtttcagccggtcagtgaccaagtttatttcgtcacccctcagttcagtgacattggtgacatgaggtcgtggtgtcaacttttggctcaatgtattatgtacctgatcttttttacaggatttctatcggctcgtcacacttgatcgtacgtacaaatattcagttagtaacaccactgtttttaggatcgagc

SEQ ID NO: 65181 - DNA, 1460 bp, Zea Mays
aaaaatcataaatgggaggccttgtggcgaaggagagcagtttggtgctgatgtgcctttggcaccttcgttcgaggatagtgacaacattggcattgaagaggatagcactaccatacgtcctacgaagccaagccatatggacttcagcaaatctaagatcaaaggaggacatattgaggtacttaactgctttggctatattgacaatgttgattggtgtggctaggaggtgatggtttagtgtcgaagccaagagaggatgaagttgttgcgtttcgaagttttctgaaggtcgggcttacatttcctttgcataagacggtagttgcaattttgaacgggtttaacatataccttcatcaactcaccccaaacgctatagtgcatctaggaattttcatttgggctgtatggagtcaaggggttggacttgatgtcgaagctttctgcaaagccttcagtcaaatgttagtaaaaactaaaaccaagttaggatgagaagatagatggagagagaactcttctcttgattgctactttaagatgtgtattaaacttaggagcaatattgcaagagaatggagaacccaagaagatagtatcgcataagtaaatggacaagtgacacaaccatttttaccgtggttcgaccaacgcctactccaggttgtggtgacctcctttggtcaagggttgcactcaacccctctcaagtgatccaaagattaaacttgagtgccacatatatcttccttatatcaaaatcatgttgtgaggaatctttataaattggagtctatcacgtcttacacaattgattacaaacaaaatcagagaatggtgtggacaagcgacagagttagagctcaagaacgcgctcaaatatttctctagcaaaacaatggtgtggtcgcaaggatccggagttatagtgtgcttaaagagtgtgtctaaagagctaaatgtaaaataaaactcaagacatgtattttgataaagacgctgtgtcttggctttattttcgagacatgagactagttgattggtcaatttaatttattgaatactcttatctatataatggatatagtaagacacagggtttagacacctacattgtattatattagccgtgtgttacactggagtaccgtgcgacagcgtcaccagcggaaagaagcgtaaagcgtcggtcggtcggtcagtgagtcatgtaaccaccacgcaacccagctgcacacgcgaacatggacgccgatgccgaggacgaggaggagcggacgccaagacaagagaaagaaaggctagaagcagctcactcccactactatagagactgtggtggttagttacccggaataattggcgacgtatccaccgcgctgatggatgtcctcacgacacgagcgtagctgagagtcggcaggtagaggcgtgtatgatgcattgatgatgac

SEQ ID NO: 65182 - DNA, 1970 bp, Zea Mays
gccgttctcgtcttccagaagtctctccgtatctccctccccgaagccccgccggaccaccttaacctccccaccacaagcccgcacacaccatcccgctccgctcaagtcgcctccgcattcctgccccctctacccgcccgccgccgcgcggacgacgggagacgccggcaccatgctctgcctctcgctgtgcgcaccgcaccttcacctccacctcccccgcagcccgaccgcacgacccgccgccgccacgtgcaggaacgcgcgctgcatcggcgtcacgctatgcctccggatgccgacgacaccggaggaacggcggcagaagcgcgggctggcccagttcctggacttatcggccgcgccgacactcacgccacccgcgcccacgcccgtgcatctcacgcccgcggccaaacggcgcggggcgctgcgggagatgcgccgggtgtggtgggtgtgcggggtcgggtactgggtgcaggggttccgctgcttcccgtggctggcactcaacttccacctcacgcgcggcatggggctcagccccgccggcctgcaactcctgcagaacgctgggagcctcccgctcgtcgccaagccgctcttcggggtcctctccgatgccgtctacatcggccgcgcccaccgcataccctacatctcccttggagctcattgcttggggagtacttgcaaccattccagttacaggggatgcgtttccaactctaatggcatgcattctcattggaaatctaggagcatctgtcacagaagtcgatccttgctggggaacttgtctggtggttacattctgcttaaaacacaggaaccaaagatcatgttcacagcattctcagtccttcttggcttccagctagcactgtccctaagtacaaaagagacattgccaagctctcgaggaaactccagaaatcgtcttgtcaaaagctctttggcagctaacttccgcaagcaattctcaaacttgatgacagcgatcagagaggaaaggatcttataccctcttgcatggatcatgacatcctttgctgttgtgcctgttctttctggaaccatgttctgctttcaaacacagtatttgaatctcgatccatcggttattggtctatcgaaagttgtgggacaggtcatggtcttatcactaactgtactctacaatcgatatcttaaaaggataccactgaggtgccttaccacaggacttcagatactatatgctctggcagttttgtcagatttgatccttgtgaaacaagtaaaccttgtgctagggataccgaacgagattcatgttctttgcttctcagctctagctgaagctctagctcagttcaaggtattgccattctcggttttgttgtcaagtctctgcccaccaggctgtgaaggttctttgttcgccttcttcacatctggactggtgctttcagcaatacttagtggagtattcggagttggattgtccaccctgatcggtgtgtcttctgtggactactccagcttgcctttgggtattttgctgcaaagtttggctgcattgctaccgttgggatggatatcctttgtgcctgagaaatggactgccgatgacacggttgtaataaaaagatgaagtgttttcaccatacaaatttccaggcaagatcctgttaggcaatgacacaatgtagataaatgtagcccacccagtcaacactggtgaggttacatgtataggtatccagattctcttcaattagaatagttcttattattactgtactatatgcaatacaggatagcccttatgctcctgctgaatatagcacacaaattgcattgaattagttgtctcgtgaaacgagattggactataaaatttgcttcacatgcatttgttcccataccattagatcctaaactgacgctcagatacatcttctccataaagataaaaaaaa

SEQ ID NO: 65183 - DNA, 646 bp, Zea Mays
ctgcgggtgaccccaatacccccgcacctgccgcgcgagaacctcgctgaccgaaccaacacagcgattcttctagaaaaggaattgacttgggcaatctctataagacccggggagttcatgcgccgtgaactgtgcgaccagtggccatcctccctgtccgccataagaatcatgagggagagagagagcttccgtgaacagtcggggttgcgccgagggagaaaggggagggtgctggaaccgtggtgctctggcgcgggctactggacttcaccagccaatccttggagcacatcggtgaccaacgtcgtcaaccaccgcgtcccgaggagctcgctgatctcatgaaaccagcttcgcgcggcgttggagtcttggctacatagtccggtgagcaagccatagaggatctaggtgttcagcaggtggagagtgttgagcaggagctcgttgaagcaagttgtgcccttgatcacttctatttacctaataatgttcttattagtcattatgatctgcataggttaattttgatgggacccaataggttaccctagtctggctatccttataccttgtttaccactgaacttttggatagtacctgctattgctttatgtggttttggttattgagatacac

SEQ ID NO: 65184 - DNA, 1546 bp, Zea Mays
gcagccggccagtggggggcatggaccgcgtggcgccctgcgcaccaggctggggataatccgcgcaatgcaatttgaggccattacgcccttggctcgtacgtacttactcactctccccccacccgcgccaggccagacagactaactgagcacccgctgcaaggagtccgcgcccatggcgagcaccaacatggcgtcggccacctcgcggttcatgctggccgcgggcgtgcccaccggcagcagcggcggccgcgtcaacttcgcctcggcgcccaaccggcttggcaggaggctcgtggcccgggccgacaacgaggccgccgcagctgaggcggcggaaggggagggtgccgtggccaccaagcccaaggccgagaagccgccgccgatcgggcccaagaggggcgccaaggtgaagatccttaggagggagtcctactggtacaacgggatcggcaacgtcgtcaccgtcgatcaggtgaactacgccggcgtgtccaccaacaactacgccttggacgaggtctcagaggtgaaatgagtggggccggccggctcaagggctccgcgctagctaccgtgtgattgatttgtagtagttgtgaaatgaggctgtgaagctgcatgctgtgctggctagcgtcacaacatcgatcctatgtgtaatagcataatccacataatcatatcatgtaattgcttgctttattcaccgtgtactcaataatctctcttgctctctaaaattgttgtattgttatatgtggttttgtacatgcacataaatcgctctctgccaccactgtttgcgctgtgccaaggactcaacctagttgagctaaagaaaatggtgttttcctaataagaaatagaactattctatcctaacagactattactgtaccattccgtgttctgtcattcccattccgtcctcactgcaaagcccattcccagctgcatgtctttctcattccccctccctgcaaagcccattcacatttccattcccggctatcacatgtctttctcattccccctcccacaaagcctattcccattcccacgtgcatcccatgcctagctaaaattaaattaaaaaaacaggctccaaggagattcgaacccgcaacctctcaaataaatgtgtttgtagctaccactacaccacatgtgtgtttttgtttacatctattatagtaaaaacatataatacatctctcccgaagcccacctgctacccttgcacaatgtgtagtagtagataagtatcactgagattattaaattatatttttggattgagggagtagtatttaaaaaagagccttgcatgcaatttcttttgtttgaataatgttttcaacttaaatacttttttttgcatgtgtaacatttattcccatagtatttttccatggatctaacttataaatcattttcataaaccaatgccaaagatgaatccatgtttcttacttggaaaccccgaacaaacaccactagcatgaggcgctcgcgttggcgtcgctcaccgacg

SEQ ID NO: 65185 - DNA, 2837 bp, Zea Mays
ccaagttgtcagtaactgtggagagcacgagaaagtggggcatctactttttttagactactgctctcggcctcctctccgctccattttcgcaattccttcgagctccgctccgaccacgtcagccttcaccttgccgtctccgttacgcgccgcgagcccgcgagcgtttggggagttttggagcggaggaggcaagggaggacggacagggaagtttggttgtggaaatggatgtggtggaatcctcgccgtcgtcgtcgccgatatcgtctccggccgggtcttcggagtccatagacctcaacttcctgccgttcctcaagagggagcccaagtcggagcccgcgtcaccagagctcgggcccctgccgctgcctgcgcccccaacccagacgccccagcagcagcatgcagcggctccggctcctgaggccacggcgcctctgtcgccagcgactcctgacctctcgtccgctccggtgatggcgccgctgcagtcgctgccgcctaacctggacgaggacgcgctccttcgggagtactaccgcctcgcgggcctctacctctcgtctgcgaggtccggggcgatcatcccagcgctagctccggaggcggccgcaccggcggtggtgcagtcggggtccgggtctgtcgtgaagaagcgccggccgcgttcgtcggacctcgtgcgggtctcctcgctcggcgtgcaggaccagatctacttccgcgacctcgtgcgcagggcgcgcatcactttcgaatgcctccgcgggcttctactcagggacgacgagcgcgccgagtccctcggccttgcggccgtcgccgggttcggcgttgccagggaccggcgccgcgtccgcgcggacctgcgtgccgcagcgctcatgggggaccacgacctctggctcaatcgcgaccgccgcatcgtcgggccgatgcccgggatctcggtgggtgacgctttcttcttccgcatggagctttgcgtgcttggactccatggccaggtgcaggccggaattgattatgtcagtgcagggaggtctgcatctggggagcctatagccacatctataattgtatctggtgggtatgaggatgatgatgatcacggcgatgtacttgtgtacactgggcatggcggccgtgatcccaacctccacaagcattgcgtcgatcagaagctggagggcggcaatcttgccctcgagcgcagcatggcttatggtattgagattcgtgtaatccgtgctgtcaagtcaagacgaagccctgttggtaaggtttacttctacgatggcctctacaaggttgttgactactggctcgaccgtgggaaatctgggtttggtgtttataagtatagactgctgcggattgagggccaagaacccatgggtagtgtgaattatcgagtagctgaacagcttaaggtggatgtgtttgctataaggccaacagggtatttgagctttgatatctccatgggccgtgataccttgtcagttgcactcttcaatgatgttgatgatgatcaggacccactcttattcgaatatctggcacgtccaatatttcctacctctgctgtccaggggaagtttgctgaaggtggtggtggtggttgtgattgtgctgagatttgctcaattggatgtaactgtgcagggaggaatggtggcgagtttgcatatgataggactggaaccctgctacgaggcaagccactggtatatgagtgtgggccatactgcagatgcccacctagttgccccaacagggttagtcagaaggggcttcaacataggcttgaggtattccggtcaagggagactgggtggggagttcggtctttggatctcattaaggctggcacattcatttgtgagttcagcgggattatccttactcaccagcagtcagaggttgtggcagcaaacggcgattgcttggtgcgtccaagtaggtttcctccaaggtggttggattggggtgatatatctgatgtctaccctgattatgtggcgccagaccatccttctattcctgagttaaaatttgcaattgatgtgtcaagggcaaggaatgtggcatgctatttcagccacagttgcagtccaaacgtgtttgtccagtttgtgctgtttgatcattacaatgtgtcttacccccacctcatgatctttgccatggaaaacattccaccgttgagggagctaagcattgactatgggatggttgacgaatggattggacagttaactatgtagctggagtatctatttagaaggcagtaatctccttcttttacctttatttttgaagttttcattatgcttcactttgggatcatcaagccaactgctggctaaaattcctcagctgcagtggaggtttccaactagcataatgttcctctggcgttgaaagaggcttgcataaggtgaccaagctatcatcaacagaacatcagccgttcattgtatatgttgcctgataacctaggtgccttagccaattttctagatgatctcgcttttgaagtataatgtgtgctgctgtaggaagcttgtttggcgtggctggcgctgagtttcagccttaaccttcgtgttatgagttgtcgctgttggaactcattttctgtacatatatctgtaaattatctagctggaaatgtgcccgcttctgttgggaaatgttggtccatatgtggcaaagttatttggataccttgtggaattgaagattccgcggagccaggtttgtccgtaggtcattgcattaatgattttgtgaaattatttgtggtgaaggcttgccttgtt

SEQ ID NO: 65186 - DNA, 1255 bp, Zea Mays
gtcagtaactgtggagagcacgagaaagtggggcatctactttttttagactactgctctcggcctcctctccgctccattttcgcaattccttcgagctccgctccgaccacgtcagccttcaccttgccgtctccgttacgcgccgcgagcccgcgagcgtttggggagttttggagcggaggaggcaagggaggacggacagggaagtttggttgtggaaatggatgtggtggaatcctcgccgtcgtcgtcgccgatatcgtctccggccgggtcttcggatctcattaaggctggcacattcatttgtgagttcagcgggattatccttactcaccagcagtcagaggttgtggcagcaaacggcgattgcttggtgcgtccaagtaggtttcctccaaggtggttggattggggtgatatatctgatgtctaccctgattatgtggcgccagaccatccttctattcctgagttaaaatttgcaattgatgtgtcaagggcaaggaatgtggcatgctatttcagccacagttgcagtccaaacgtgtttgtccagtttgtgctgtttgatcattacaatgtgtcttacccccacctcatgatctttgccatggaaaacattccaccgttgagggagctaagcattgactatgggatggttgacgaatggattggacagttaactatgtagctggagtatctatttagaaggcagtaatctccttcttttacctttatttttgaagttttcattatgcttcactttgggatcatcaagccaactgctggctaaaattcctcagctgcagtggaggtttccaactagcataatgttcctctggcgttgaaagaggcttgcataaggtgaccaagctatcatcaacagaacatcagccgttcattgtatatgttgcctgataacctaggtgccttagccaattttctagatgatctcgcttttgaagtataatgtgtgctgctgtaggaagcttgtttggcgtggctggcgctgagtttcagccttaaccttcgtgttatgagttgtcgctgttggaactcattttctgtacatatatctgtaaattatctagctggaaatgtgcccgcttctgttgggaaatgttggtccatatgtggcaaagttatttggataccttgtggaattgaagattccgcggagccaggtttgtccgtaggtcattgcattaatgattttgtgaaattatttgtggtgaaggcttgccttgtt

SEQ ID NO: 65187 - DNA, 2714 bp, Zea Mays
gtcagtaactgtggagagcacgagaaagtggggcatctactttttttagactactgctctcggcctcctctccgctccattttcgcaattccttcgagctccgctccgaccacgtcagccttcaccttgccgtctccgttacgcgccgcgagcccgcgagcgtttggggagttttggagcggaggaggcaagggaggacggacagggaagtttggttgtggaaatggatgtggtggaatcctcgccgtcgtcgtcgccgatatcgtctccggccgggtcttcggagtccatagacctcaacttcctgccgttcctcaagagggagcccaagtcggagcccgcgtcaccagagctcgggcccctgccgctgcctgcgcccccaacccagacgccccagcagcagcatgcagcggctccggctcctgaggccacggcgcctctgtcgccagcgactcctgacctctcgtccgctccggtgatggcgccgctgcagtcgctgccgcctaacctggacgaggacgcgctccttcgggagtactaccgcctcgcgggcctctacctctcgtctgcgaggtccggggcgatcatcccagcgctagctccggaggcggccgcaccggcggtggtgcagtcggggtccgggtctgtcgtgaagaagcgccggccgcgttcgtcggacctcgtgcgggtctcctcgctcggcgtgcaggaccagatctacttccgcgacctcgtgcgcagggcgcgcatcactttcgaatgcctccgcgggcttctactcagggacgacgagcgcgccgagtccctcggccttgcggccgtcgccgggttcggcgttgccagggaccggcgccgcgtccgcgcggacctgcgtgccgcagcgctcatgggggaccacgacctctggctcaatcgcgaccgccgcatcgtcgggccgatgcccgggatctcggtgggtgacgctttcttcttccgcatggagctttgcgtgcttggactccatggccaggtgcaggccggaattgattatgtcagtgcagggaggtctgcatctggggagcctatagccacatctataattgtatctggtgggtatgaggatgatgatgatcacggcgatgtacttgtgtacactgggcatggcggccgtgatcccaacctccacaagcattgcgtcgatcagaagctggagggcggcaatcttgccctcgagcgcagcatggcttatggtattgagattcgtgtaatccgtgctgtcaagtcaagacgaagccctgttggtaaggtttacttctacgatggcctctacaaggttgttgactactggctcgaccgtgggaaatctgggtttggtgtttataagtatagactgctgcggattgagggccaagaacccatgggtagtgtgaattatcgagtagctgaacagcttaaggtggatgtgtttgctataaggccaacagggtatttgagctttgatatctccatgggccgtgataccttgtcagttgcactcttcaatgatgttgatgatgatcaggacccactcttattcgaatatctggcacgtccaatatttcctacctctgctgtccaggggaagtttgctgaaggtggtggtggtggttgtgattgtgctgagatttgctcaattggatgtaactgtgcagggaggaatggtggcgagtttgcatatgataggactggaaccctgctacgaggcaagccactggtatatgagtgtgggccatactgcagatgcccacctagttgccccaacagggttagtcagaaggggcttcaacataggcttgaggtattccggtcaagggagactgggtggggagttcggtctttggatctcattaaggctggcacattcatttgtgagttcagcgggattatccttactcaccagcagtcagaggttgtggcagcaaacggcgattgcttggtgcgtccaagtaggtttcctccaaggtggttggattggggtgatatatctgatgtctaccctgattatgtggcgccagaccatccttctattcctgagttaaaatttgcaattgatgtgtcaagggcaaggaatgtggcatgctatttcagccacagttgcagtccaaacgtgtttgtccagtttgtgctgtttgatcattacaatgtgtcttacccccacctcatgatctttgccatggaaaacattccaccgttgagggagctaagcattgactatgggatggttgacgaatggattggacagttaactatgtagctggagtatctatttagaaggcagtaatctccttcttttacctttatttttgaagttttcattatgcttcactttgggatcatcaagccaactgctggctaaaattcctcagctgtccagcagtggaggtttccaactagcataatgttcctctggcgttgaaagaggcttgcataaggaagcttgtttggcgtggctggcgctgagtttcagccttaaccttcgtgttatgagttgtcgctgttggaactcattttctgtacatatatctgtaaattatctagctggaaatgtgcccgcttctgttgggaaatgttggtccatatgtggcaaagttatttggataccttgtggaattgaagattccgcggagccaggtttgtccgtaggtcattgcattaatgattttgtgaaattatttgtggtgaaggcttgccttgtt

SEQ ID NO: 65188 - DNA, 1569 bp, Zea Mays
cgtgcccacgtcagatgcgaccgagatccatcttcacgaacggcgataaaatatgagctcatttggcgtcatagtgtgctcatctggtgccatataagtgccaaattatctgccctcgcctcgctccttcgctttcattcctcggcctccgcagctagcgcaacgcaaaggcagttccggcgggggcggactgggaacacatgggaatgagatgagatcattgctcggtcgtgctggcctgggccgtcggcgcgcgttgatcttgcatgtgttctcaggtcgcccccggagggccttccttgctgctgtgttccgctagacctggagtatctcgacgacggtggcaggcacacgcagtgacggcaccactacgtctgttccgccacgagagcctatgtaacggcatgtctataaagaaaaagatctacgtggtacggtctgggcactgatgattagttgctcttgttcaggccaactgataaccaagtaaatgaacatcactagcaaggctcgcgatgtcggcatcgagggcagaccagcgggggactcatggtgggaggcgcaacaagccggtgggggagtctgacgacactgacggaggccagcatgctggagggcaggccagtgggggaatgacgacgggaggcaggcgggggattaacgtcggagggtaggccagcagggtcccttgtcccatcaagccggcagtggcgccgtgcctctgtgctagtctcgagtgtataaggcatggatgacgggagggtggagaggaagtgggtcgaaatggttcgtttgtttttaaggaatccctagaacccacattttcaagaagtattttgacccagaaccaacctaacccacgagcattttgaaccaaacgtgggttgttgtgggttgaactcgttccaacctgcatcaacccactaaccaaacacaaactccgagtgtatgttgtatttggttgagtagagtgggagaatagagttgctccattccatttttggatgtttggtttctaacaaaatgagagcggagtggctcctagatcttcatatgaaaatttattataaatagttggaacgctctttctccacaaaaacgaccgaatgtgagcgctctcccggacacgggcgctctcccctctccactcctctacactcatacgactctccaaccaaacaacgattggagcggctccgttgtattctactcttcaaccaaacaaaaaatggagcagctatgttctttttgccaaatgcagaatagaacggctccattctcaaatactgaaatgaaaccactccattctatttgactctcctctccaaccaaacacacccttaatttgtcgagacagtacacgactctatttaggtcatgtttgtttccatactaaattatatcaatgaagattataactatcactttaggaccacaaataagctgaaattaagttagcattgagtagcttatttcaacttatttgtgattctaaagtaatattttactctcctacccttccaccataatccaacttatataatctaggagagaaacaaacatatcctt

SEQ ID NO: 65189 - DNA, 1540 bp, Zea Mays
cgtgcccacgtcagatgcgaccgagatccatcttcacgaacggcgataaaatatgagctcatttggcgtcatagtgtgctcatctggtgccatataagtgccaaattatctgccctcgcctcgctccttcgctttcattcctcggcctccgcagctagcgcaacgcaaaggcagttccggcgggggcggactgggaacacatgggaatgagatgagatcattgctcggtcgtgctggcctgggccgtcggcgcgcgttgatcttgcatgtgttctcaggtcgcccccggagggccttccttgctgctgtgttccgctagacctggagtatctcgacgacggtggcaggcacacgcagtgacggcaccactacgtctgttccgccacgagagcctatgtaacgatttgtgtgcattgcgggtggaacgcgcatctgcacatcggcatgcgcaaaagttgaatgattgcagcactagcaaggctcgcgatgtcggcatcgagggcagaccagcgggggactcatggtgggaggcgcaacaagccggtgggggagtctgacgacactgacggaggccagcatgctggagggcaggccagtgggggaatgacgacgggaggcaggcgggggattaacgtcggagggtaggccagcagggtcccttgtcccatcaagccggcagtggcgccgtgcctctgtgctagtctcgagtgtataaggcatggatgacgggagggtggagaggaagtgggtcgaaatggttcgtttgtttttaaggaatccctagaacccacattttcaagaagtattttgacccagaaccaacctaacccacgagcattttgaaccaaacgtgggttgttgtgggttgaactcgttccaacctgcatcaacccactaaccaaacacaaactccgagtgtatgttgtatttggttgagtagagtgggagaatagagttgctccattccatttttggatgtttggtttctaacaaaatgagagcggagtggctcctagatcttcatatgaaaatttattataaatagttggaacgctctttctccacaaaaacgaccgaatgtgagcgctctcccggacacgggcgctctcccctctccactcctctacactcatacgactctccaaccaaacaacgattggagcggctccgttgtattctactcttcaaccaaacaaaaaatggagcagctatgttctttttgccaaatgcagaatagaacggctccattctcaaatactgaaatgaaaccactccattctatttgactctcctctccaaccaaacacacccttaatttgtcgagacagtacacgactctatttaggtcatgtttgtttccatactaaattatatcaatgaagattataactatcactttaggaccacaaataagctgaaattaagttagcattgagtagcttatttcaacttatttgtgattctaaagtaatattttactctcctacccttccaccataatccaacttatataatctaggagagaaacaaacatatcctt

SEQ ID NO: 65190 - DNA, 1964 bp, Zea Mays
cgtgcccacgtcagatgcgaccgagatccatcttcacgaacggcgataaaatatgagctcatttggcgtcatagtgtgctcatctggtgccatataagtgccaaattatctgccctcgcctcgctccttcgctttcattcctcggcctccgcagctagcgcaacgcaaaggcagttccggcgggggcggactgggaacacatgggaatgagatgagatcattgctcggtcgtgctggcctgggccgtcggcgcgcgttgatcttgcatgtgttctcaggtcgcccccggagggccttccttgctgctgtgttccgctagacctggagtatctcgacgacggtggcaggcacacgcagtgacggcaccactacgtctgttccgccacgagagcctatgtaacggcatgtctataaagaaaaagatctacgtggtacggtctgggcactgatgattagttgctcttgttcaggccaactgataaccaagtaaatgaacatgtaagagtactactccatagattactctgctccgtttttttattactcgctccgtttttttatttgctacgttctagtttaaaaataaattaatatgcgataaatattcgagaacgagagtattgctttatagatctgttaaaatttggtttaggcgggaccagccaatttttctccttctttctgtttttatctccgatctaattaaaaattgtgacgtcgtcacagcgacaacaccttcacctggtaagttgcaacgagctttagatagtatgcattgacggcggttgtttaatcatttacatccgcaattgtttaatcaatgcagatttgtgtgcattgcgggtggaacgcgcatctgcacatcggcatgcgcaaaagttgaatgattgcagcactagcaaggctcgcgatgtcggcatcgagggcagaccagcgggggactcatggtgggaggcgcaacaagccggtgggggagtctgacgacactgacggaggccagcatgctggagggcaggccagtgggggaatgacgacgggaggcaggcgggggattaacgtcggagggtaggccagcagggtcccttgtcccatcaagccggcagtggcgccgtgcctctgtgctagtctcgagtgtataaggcatggatgacgggagggtggagaggaagtgggtcgaaatggttcgtttgtttttaaggaatccctagaacccacattttcaagaagtattttgacccagaaccaacctaacccacgagcattttgaaccaaacgtgggttgttgtgggttgaactcgttccaacctgcatcaacccactaaccaaacacaaactccgagtgtatgttgtatttggttgagtagagtgggagaatagagttgctccattccatttttggatgtttggtttctaacaaaatgagagcggagtggctcctagatcttcatatgaaaatttattataaatagttggaacgctctttctccacaaaaacgaccgaatgtgagcgctctcccggacacgggcgctctcccctctccactcctctacactcatacgactctccaaccaaacaacgattggagcggctccgttgtattctactcttcaaccaaacaaaaaatggagcagctatgttctttttgccaaatgcagaatagaacggctccattctcaaatactgaaatgaaaccactccattctatttgactctcctctccaaccaaacacacccttaatttgtcgagacagtacacgactctatttaggtcatgtttgtttccatactaaattatatcaatgaagattataactatcactttaggaccacaaataagctgaaattaagttagcattgagtagcttatttcaacttatttgtgattctaaagtaatattttactctcctacccttccaccataatccaacttatataatctaggagagaaacaaacatatcctt

SEQ ID NO: 65191 - DNA, 2553 bp, Zea Mays
cgtgcccacgtcagatgcgaccgagatccatcttcacgaacggcgataaaatatgagctcatttggcgtcatagtgtgctcatctggtgccatataagtgccaaattatctgccctcgcctcgctccttcgctttcattcctcggcctccgcagctagcgcaacgcaaaggcagttccggcgggggcggactgggaacacatgggaatgagatgagatcattgctcggtcgtgctggcctgggccgtcggcgcgcgttgatcttgcatgtgttctcaggtcgcccccggagggccttccttgctgctgtgttccgctagacctggagtatctcgacgacggtggcaggcacacgcagtgacggcaccactacgtctgttccgccacgagagcctatgtaacggtatgtttattttgctgctgcagcactcttcgtcctagctcatgtcaactgccccgacaataagaaaccagtgcaggcatgtctataaagaaaaagatctacgtggtacggtctgggcactgatgattagttgctcttgttcaggccaactgataaccaagtaaatgaacatgtaagagtactactccatagattactctgctccgtttttttattactcgctccgtttttttatttgctacgttctagtttaaaaataaattaatatgcgataaatattcgagaacgagagtattgctttatagatctgttaaaatttggtttaggcgggaccagccaatttttctccttctttctgtttttatctccgatctaattaaaaattgtgacgtcgtcacagcgacaacaccttcacctggtaagttgcaacgagctttagatagtatgcattgacggcggttgtttaatcatttacatccgcaattgtttaatcaatgcagatttgtgtgcattgcgggtggaacgcgcatctgcacatcggcatgcgcaaaagttgaatgattgcaggtttatttaacatgtgtttggtttcggaatgacttggatcggatccgagccaacctatttttctaggttgggtcagactcgttccttgttttgtttcaatgacagattaaacctaatttcttgtatgattacagggtttaaagtgggttagatctacaccatctcttatttgttttgtgatgagagatgaacttaatatgatcaactttctagtcatattaccaaactaaggatgatatattaattcagtaagatgacaacattcaaaataaatgaaactgacactattttaataattgagaaatccataagcacaagatatacataaattaaagtcattattaaccaagtcataattttttagtgacgaggtctcactgttacatttcagtcataattaaaggaacatcccaacaacatcaagatgcatttcagtgaatttgtaacatttgtcatgactagcagacttgtctaggcgatgatgagcactgacctttacctgttcgatgacagcactagcaaggctcgcgatgtcggcatcgagggcagaccagcgggggactcatggtgggaggcgcaacaagccggtgggggagtctgacgacactgacggaggccagcatgctggagggcaggccagtgggggaatgacgacgggaggcaggcgggggattaacgtcggagggtaggccagcagggtcccttgtcccatcaagccggcagtggcgccgtgcctctgtgctagtctcgagtgtataaggcatggatgacgggagggtggagaggaagtgggtcgaaatggttcgtttgtttttaaggaatccctagaacccacattttcaagaagtattttgacccagaaccaacctaacccacgagcattttgaaccaaacgtgggttgttgtgggttgaactcgttccaacctgcatcaacccactaaccaaacacaaactccgagtgtatgttgtatttggttgagtagagtgggagaatagagttgctccattccatttttggatgtttggtttctaacaaaatgagagcggagtggctcctagatcttcatatgaaaatttattataaatagttggaacgctctttctccacaaaaacgaccgaatgtgagcgctctcccggacacgggcgctctcccctctccactcctctacactcatacgactctccaaccaaacaacgattggagcggctccgttgtattctactcttcaaccaaacaaaaaatggagcagctatgttctttttgccaaatgcagaatagaacggctccattctcaaatactgaaatgaaaccactccattctatttgactctcctctccaaccaaacacacccttaatttgtcgagacagtacacgactctatttaggtcatgtttgtttccatactaaattatatcaatgaagattataactatcactttaggaccacaaataagctgaaattaagttagcattgagtagcttatttcaacttatttgtgattctaaagtaatattttactctcctacccttccaccataatccaacttatataatctaggagagaaacaaacatatcctt

SEQ ID NO: 65192 - DNA, 1956 bp, Zea Mays
ctccaaccaaacgctaccttagcttagctcaacacaactgcatcgtacggcccgggccgtctgcggcctgccgtttacagcttacaccatgcgcccgcttccggcgtccgtggcgtcccgactggcggccgtgcttgcggatccggtcggcgtcccgctgcccgtcttcaactccctcctctctgcgcttgccgcctccgtggacccttcccacgggcacctcccgctctacctcttccgccgccgcctactcccgttccgccgccccgatgccttcactctctccgtcctcacctcggccctcccctccgctgccgtcaccctccacgccctcgcgctccgcctgggcctcctccacgcggaccccgtcctcgccaactctctgctccgtctgtacatatgcccaccggtcccctgtcagggcctcgcgcgccgcctgttcgaggaaatgcccgcgcgcaccgcgtcctcctacaacacccttatctcgcactcgcacgacgacgtgtggggccttgtgcggcggatggtcgccgacgggtgcgcgccagaccggttcactatgtcagccgtgctgccggtgtgcacgtctgcgcgctggggcagggagcttcattgctatgccgtcagagattggatgtgtggggacgatgatttccatgtgagcagcggcctggtgtccatgtactgcagggttggccacccggactctgcaagaactgttttcaataggatggcacgaaggaacgttgtttgctggacagccatggtgggagggtacatagagaatggcatgtttgatgatgccgtggattgtttccgggcaatgtggcttattgatgccattccaccgaacaggattacgttgatcactgtgctctcggccattgaggccctctcgagcttagcagaggggaaacaggtgcatggttttgcagtaagaatgatgatgcacgcagagatgtcgctgaacaatgctttgattgatacatacgcaaagtgtggggccttgcattatgcaaggcggatctttgatgataccagttggtgcaaagatgtgatctcatggggtgcaatgattttgggttatggcattcatggtatgggtgtggaagcagttgctttgttcgatcagatgctttcatctggggttaaacctgacagcattattggacttggtgttctttcagcttgttgccatgcaggtttggtgttgaagggccttaatacatacagctccatggtaaatgatcacggggttcatccaactgaggagatgtgtgcctgtatggttgatttactgggccgatctgggaatgtttaccatgccttggattttgtgaagtcaatgagtgtggagccaggctctagtgtctggggagcacttctggatgcctctgttaagtacgacaacaaagaaatccaagatctggcttccaggtctcttcttagattggaacaagggaaaccatctaatcttgttgcagtatcaaacctaaatgcctcttcagaaaggtggaatattgttaaacaagtaagggatacaatcaaccagggatcattgaagaaaaaaactggttgtagttgggtaaatccaatataggttaacaatgcttcttcgagtgacttacagataggcttttgatgcttctgatctcaagtgtaccattcaatgcctatgcctgggagcaatcacattagatcgcacaaattcctggaaggtgtactgaagctacaacaacaaatctgcatgtacttgtatgttgttagatgagaagattatgacacatctactgttggagtctttaagcaacaaaagtgccttatacgatgatgtcaaggttttctgcaatctcctcttttccagagagaaacaagtaataccgtggtggcttgggagttgcggtgtaaaatttctccacctccacaggattatagttttcgtcgtcaccgttg

SEQ ID NO: 65193 - DNA, 2554 bp, Zea Mays
ctccaaccaaacgctaccttagcttagctcaacacaactgcatcgtacggcccgggccgtctgcggcctgccgtttacagcttacaccatgcgcccgcttccggcgtccgtggcgtcccgactggcggccgtgcttgcggatccggtcggcgtcccgctgcccgtcttcaactccctcctctctgcgcttgccgcctccgtggacccttcccacgggcacctcccgctctacctcttccgccgccgcctactcccgttccgccgccccgatgccttcactctctccgtcctcacctcggccctcccctccgctgccgtcaccctccacgccctcgcgctccgcctgggcctcctccacgcggaccccgtcctcgccaactctctgctccgtctgtacatatgcccaccggtcccctgtcagggcctcgcgcgccgcctgttcgaggaaatgcccgcgcgcaccgcgtcctcctacaacacccttatctcgcactcgcacgacgacgtgtggggccttgtgcggcggatggtcgccgacgggtgcgcgccagaccggttcactatgtcagccgtgctgccggtgtgcacgtctgcgcgctggggcagggagcttcattgctatgccgtcagagattggatgtgtggggacgatgatttccatgtgagcagcggcctggtgtccatgtactgcagggttggccacccggactctgcaagaactgttttcaataggatggcacgaaggaacgttgtttgctggacagccatggtgggagggtacatagagaatggcatgtttgatgatgccgtggattgtttccgggcaatgtggcttattgatgccattccaccgaacaggattacgttgatcactgtgctctcggccattgaggccctctcgagcttagcagaggggaaacaggtgcatggttttgcagtaagaatgatgatgcacgcagagatgtcgctgaacaatgctttgattgatacatacgcaaagtgtggggccttgcattatgcaaggcggatctttgatgataccagttggtgcaaagatgtgatctcatggggtgcaatgattttgggttatggcattcatggtatgggtgtggaagcagttgctttgttcgatcagatgctttcatctggggttaaacctgacagcattattggacttggtgttctttcagcttgttgccatgcaggtttggtgttgaagggccttaatacatacagctccatggtaaatgatcacggggttcatccaactgaggagatgtgtgcctgtatggttgatttactgggccgatctgggaatgtttaccatgccttggattttgtgaagtcaatgagtgtggagccaggctctagtgtctggggagcacttctggatgcctctgttaagtacgacaacaaagaaatccaagatctggcttccaggtctcttcttagattggaacaagggaaaccatctaatcttgttgcagtatcaaacctaaatgcctcttcagaaaggtggaatattgttaaacaagtaagggatacaatcaaccagggatcattgaagaaaaaaactggttgtagttgggtaaatccaatataggttaacaatgcttcttcgagtgacttacagataggcttttgatgcttctgatctcaagtgtaccattcaatgcctatgcctgggagcaatcacattagatcgcacaaattcctggaaggtgtactgaagctacaacaacaaatctgcatgtacttgtatgttgttagatgagaagattatgacacatctactgttggagtctttaagcaacaaaagtgccttatacgatgatgtcaaggttttctgcaatctcctcttttccagggagattcaatgggcagacagatgacggaagtggaaacaacaagtcagatcaccatgttagtggaaacaacaagtcagatcaccatgttatgtttggagggaatttattccagtcggtatcttgctctggttctggccatgaacagcctcgccacgccatctggttccatcagccctttccttattggatgagcaggctcgttcgctttcagaggtgacagcaggtttgctcctgtgaccctttccagaatatcatgactcgcggattgagatctcgtgatggttcatggttgcgagtactgcgcgcccggccggctcccatgttgttggttcggtcctcgcgatcacaggcgtgcagaagagtgtcatctcagatttaagcaagctcctgactggaacggcttgaggcgatctgctagcctttcgtcggggatcattgtttggtggtaactcttgagcagcgggcaagatgggtctcctgtgttacatgcgcatcactgcatcatcaggtacgcggtttgctgtttaaatttgcgatgggtctctcatttcttttctttttcctacaacctgttggtagtagttgtcaatgaagaatctcatgttttacactgtaccgtcagctacaggtagtacagtacatctgctgctggtgcttacattacagttcggtccatcctgccatgt

SEQ ID NO: 65194 - DNA, 3465 bp, Zea Mays
ctccaaccaaacgctaccttagcttagctcaacacaactgcatcgtacggcccgggccgtctgcggcctgccgtttacagcttacaccatgcgcccgcttccggcgtccgtggcgtcccgactggcggccgtgcttgcggatccggtcggcgtcccgctgcccgtcttcaactccctcctctctgcgcttgccgcctccgtggacccttcccacgggcacctcccgctctacctcttccgccgccgcctactcccgttccgccgccccgatgccttcactctctccgtcctcacctcggccctcccctccgctgccgtcaccctccacgccctcgcgctccgcctgggcctcctccacgcggaccccgtcctcgccaactctctgctccgtctgtacatatgcccaccggtcccctgtcagggcctcgcgcgccgcctgttcgaggaaatgcccgcgcgcaccgcgtcctcctacaacacccttatctcgcactcgcacgacgacgtgtggggccttgtgcggcggatggtcgccgacgggtgcgcgccagaccggttcactatgtcagccgtgctgccggtgtgcacgtctgcgcgctggggcagggagcttcattgctatgccgtcagagattggatgtgtggggacgatgatttccatgtgagcagcggcctggtgtccatgtactgcagggttggccacccggactctgcaagaactgttttcaataggatggcacgaaggaacgttgtttgctggacagccatggtgggagggtacatagagaatggcatgtttgatgatgccgtggattgtttccgggcaatgtggcttattgatgccattccaccgaacaggattacgttgatcactgtgctctcggccattgaggccctctcgagcttagcagaggggaaacaggtgcatggttttgcagtaagaatgatgatgcacgcagagatgtcgctgaacaatgctttgattgatacatacgcaaagtgtggggccttgcattatgcaaggcggatctttgatgataccagttggtgcaaagatgtgatctcatggggtgcaatgattttgggttatggcattcatggtatgggtgtggaagcagttgctttgttcgatcagatgctttcatctggggttaaacctgacagcattattggacttggtgttctttcagcttgttgccatgcaggtttggtgttgaagggccttaatacatacagctccatggtaaatgatcacggggttcatccaactgaggagatgtgtgcctgtatggttgatttactgggccgatctgggaatgtttaccatgccttggattttgtgaagtcaatgagtgtggagccaggctctagtgtctggggagcacttctggatgcctctgttaagtacgacaacaaagaaatccaagatctggcttccaggtctcttcttagattggaacaagggaaaccatctaatcttgttgcagtatcaaacctaaatgcctcttcagaaaggtggaatattgttaaacaaataggcttttgatgcttctgatctcaagtgtaccattcaatgcctatgcctgggagcaatcacattagatcgcacaaattcctggaaggtgtactgaagctacaacaacaaatctgcatgtacttgtatgttgttagatgagaagattatgacacatctactgttggagtctttaagcaacaaaagtgccttatacgatgatgtcaaggttttctgcaatctcctcttttccagggagattcaatgggcagacagatgacggaagtggaaacaacaagtcagatcaccatgttagtggaaacaacaagtcagatcaccatgttatgtttggagggaatttattccagtcggtatcttgctctggttctggccatgaacagcctcgccacgccatctggttccatcagccctttccttattggatgagcaggctcgttcgctttcagaggtgacagcaggtttgctcctgtgaccctttccagaatatcatgactcgcggattgagatctcgtgatggttcatggttgcgagtactgcgcgcccggccggctcccatgttgttggttcggtcctcgcgatcacaggcgtgcagaagagtgtcatctcagatttaagcaagctcctgactggaacggcttgaggcgatctgctagcctttcgtcggggatcattgtttggtggtatgtcataattgctccccggacttagcatgctttgtgtagtgtagggtctgctagatctcctttgtaggctgttccctcgatttaaaaggtggcggcaggcatgttaatggcaggatgattagccattcaatatatgattggaaaggcccaaccgcaccgcgcataactgtacatccaggacgcacagtgtcattcgctgctgcgttgtgcattccggcttcagttctggcaaagatcgcgcttaacgtcgactgctgcggaatctgctcgtcttgaacaggtaactcttgagcagcgggcaagatgggtctcctgtgttacatgcgcatcactgcatcatcagctacaggtagtacagtacatctgctgctggtgcttacattacagttcggtccatcctgccatgtggtgggcactgataaccagccaatcatggagacttgttgtacctcgcgccattaagcggctcccccttcgcgcccatgaagatctcacgtggatgggatccactgtcactgttggatgcgaaggtacgctccctcacagccaatcaagcatccggacgtccggatggacgcacggcccgtgcccgtgcctgtggcgctgtgctgccggcctcgtcgtccggacgaccgacgaccaccggtggagcgcacatatgcatgttttctcttctcttgcgagcgctggctggtcctgggttggctggctggcggcgcgcgcttgtccttcctccggcgctctctcgtcagaaggggtgaagaggggaaggctgatgtggcacgcgcagtgtgagctggcgcgggcgggcgtcggcgccgtcgctctcccgacctggtgctgagcgcgacgcggggcgccggggccaggacgattcgtatttgtgattcccccgccgtgacccgcgcgactggacggatcgggttttctggcggtcgctgtcgccgccagcaagatgggtcgctgggctctcgggggtgggacggatggcagcgagggagctccgttcttccgcccctcatcattgcccgtcctgccagctgctgtccgtacgcgtgtggcagcacgcacacgcccgtatgggttcttgttatatgtttgtactgtactaggcgcgccaagacgatgaggctggatctggtgcctgttaccgtaggacagatccattatcgattactcatcgtaattcttatgtaccgtactattacattcacagtcactttaacgttatatcaaccttttcttttg

SEQ ID NO: 65195 - DNA, 3367 bp, Zea Mays
ctccaaccaaacgctaccttagcttagctcaacacaactgcatcgtacggcccgggccgtctgcggcctgccgtttacagcttacaccatgcgcccgcttccggcgtccgtggcgtcccgactggcggccgtgcttgcggatccggtcggcgtcccgctgcccgtcttcaactccctcctctctgcgcttgccgcctccgtggacccttcccacgggcacctcccgctctacctcttccgccgccgcctactcccgttccgccgccccgatgccttcactctctccgtcctcacctcggccctcccctccgctgccgtcaccctccacgccctcgcgctccgcctgggcctcctccacgcggaccccgtcctcgccaactctctgctccgtctgtacatatgcccaccggtcccctgtcagggcctcgcgcgccgcctgttcgaggaaatgcccgcgcgcaccgcgtcctcctacaacacccttatctcgcactcgcacgacgacgtgtggggccttgtgcggcggatggtcgccgacgggtgcgcgccagaccggttcactatgtcagccgtgctgccggtgtgcacgtctgcgcgctggggcagggagcttcattgctatgccgtcagagattggatgtgtggggacgatgatttccatgtgagcagcggcctggtgtccatgtactgcagggttggccacccggactctgcaagaactgttttcaataggatggcacgaaggaacgttgtttgctggacagccatggtgggagggtacatagagaatggcatgtttgatgatgccgtggattgtttccgggcaatgtggcttattgatgccattccaccgaacaggattacgttgatcactgtgctctcggccattgaggccctctcgagcttagcagaggggaaacaggtgcatggttttgcagtaagaatgatgatgcacgcagagatgtcgctgaacaatgctttgattgatacatacgcaaagtgtggggccttgcattatgcaaggcggatctttgatgataccagttggtgcaaagatgtgatctcatggggtgcaatgattttgggttatggcattcatgcttgttgccatgcaggtttggtgttgaagggccttaatacatacagctccatggtaaatgatcacggggttcatccaactgaggagatgtgtgcctgtatggttgatttactgggccgatctgggaatgtttaccatgccttggattttgtgaagtcaatgagtgtggagccaggctctagtgtctggggagcacttctggatgcctctgttaagtacgacaacaaagaaatccaagatctggcttccaggtctcttcttagattggaacaagggaaaccatctaatcttgttgcagtatcaaacctaaatgcctcttcagaaaggtggaatattgttaaacaagtaagggatacaatcaaccagggatcattgaagaaaaaaactggttgtagttgggtaaatccaatataggttaacaatgcttcttcgagtgacttacagataggcttttgatgcttctgatctcaagtgtaccattcaatgcctatgcctgggagcaatcacattagatcgcacaaattcctggaaggtgtactgaagctacaacaacaaatctgcatgtacttgtatgttgttagatgagaagattatgacacatctactgttggagtctttaagcaacaaaagtgccttatacgatgatgtcaaggttttctgcaatctcctcttttccagggagattcaatgggcagacagatgacggaagtggaaacaacaagtcagatcaccatgttagtggaaacaacaagtcagatcaccatgttatgtttggagggaatttattccagtcggtatcttgctctggttctggccatgaacagcctcgccacgccatctggttccatcagccctttccttattggatgagcaggctcgttcgctttcagaggtgacagcaggtttgctcctgtgaccctttccagaatatcatgactcgcggattgagatctcgtgatggttcatggttgcgagtactgcgcgcccggccggctcccatgttgttggttcggtcctcgcgatcacaggcgtgcagaagagtgtcatctcagatttaagcaagctcctgactggaacggcttgaggcgatctgctagcctttcgtcggggatcattgtttggtggcatgttaatggcaggatgattagccattcaatatatgattggaaaggcccaaccgcaccgcgcataactgtacatccaggacgcacagtgtcattcgctgctgcgttgtgcattccggcttcagttctggcaaagatcgcgcttaacgtcgactgctgcggaatctgctcgtcttgaacaggtaactcttgagcagcgggcaagatgggtctcctgtgttacatgcgcatcactgcatcatcaggtagtacagtacatctgctgctggtgcttacattacagttcggtccatcctgccatgtggtgggcactgataaccagccaatcatggagacttgttgtacctcgcgccattaagcggctcccccttcgcgcccatgaagatctcacgtggatgggatccactgtcactgttggatgcgaaggtacgctccctcacagccaatcaagcatccggacgtccggatggacgcacggcccgtgcccgtgcctgtggcgctgtgctgccggcctcgtcgtccggacgaccgacgaccaccggtggagcgcacatatgcatgttttctcttctcttgcgagcgctggctggtcctgggttggctggctggcggcgcgcgcttgtccttcctccggcgctctctcgtcagaaggggtgaagaggggaaggctgatgtggcacgcgcagtgtgagctggcgcgggcgggcgtcggcgccgtcgctctcccgacctggtgctgagcgcgacgcggggcgccggggccaggacgattcgtatttgtgattcccccgccgtgacccgcgcgactggacggatcgggttttctggcggtcgctgtcgccgccagcaagatgggtcgctgggctctcgggggtgggacggatggcagcgagggagctccgttcttccgcccctcatcattgcccgtcctgccagctgctgtccgtacgcgtgtggcagcacgcacacgcccgtatgggttcttgttatatgtttgtactgtactaggcgcgccaagacgatgaggctggatctggtgcctgttaccgtaggacagatccattatcgattactcatcgtaattcttatgtaccgtactattacattcacagtcactttaacgttatatcaaccttttcttttg

SEQ ID NO: 65196 - DNA, 3513 bp, Zea Mays
cttagcttagctcaacacaactgcatcgtacggcccgggccgtctgcggcctgccgtttacagcttacaccatgcgcccgcttccggcgtccgtggcgtcccgactggcggccgtgcttgcggatccggtcggcgtcccgctgcccgtcttcaactccctcctctctgcgcttgccgcctccgtggacccttcccacgggcacctcccgctctacctcttccgccgccgcctactcccgttccgccgccccgatgccttcactctctccgtcctcacctcggccctcccctccgctgccgtcaccctccacgccctcgcgctccgcctgggcctcctccacgcggaccccgtcctcgccaactctctgctccgtctgtacatatgcccaccggtcccctgtcagggcctcgcgcgccgcctgttcgaggaaatgcccgcgcgcaccgcgtcctcctacaacacccttatctcgcactcgcacgacgacgtgtggggccttgtgcggcggatggtcgccgacgggtgcgcgccagaccggttcactatgtcagccgtgctgccggtgtgcacgtctgcgcgctggggcagggagcttcattgctatgccgtcagagattggatgtgtggggacgatgatttccatgtgagcagcggcctggtgtccatgtactgcagggttggccacccggactctgcaagaactgttttcaataggatggcacgaaggaacgttgtttgctggacagccatggtgggagggtacatagagaatggcatgtttgatgatgccgtggattgtttccgggcaatgtggcttattgatgccattccaccgaacaggattacgttgatcactgtgctctcggccattgaggccctctcgagcttagcagaggggaaacaggtgcatggttttgcagtaagaatgatgatgcacgcagagatgtcgctgaacaatgctttgattgatacatacgcaaagtgtggggccttgcattatgcaaggcggatctttgatgataccagttggtgcaaagatgtgatctcatggggtgcaatgattttgggttatggcattcatggtatgggtgtggaagcagttgctttgttcgatcagatgctttcatctggggttaaacctgacagcattattggacttggtgttctttcagcttgttgccatgcaggtttggtgttgaagggccttaatacatacagctccatggtaaatgatcacggggttcatccaactgaggagatgtgtgcctgtatggttgatttactgggccgatctgggaatgtttaccatgccttggattttgtgaagtcaatgagtgtggagccaggctctagtgtctggggagcacttctggatgcctctgttaagtacgacaacaaagaaatccaagatctggcttccaggtctcttcttagattggaacaagggaaaccatctaatcttgttgcagtatcaaacctaaatgcctcttcagaaaggtggaatattgttaaacaagtaagggatacaatcaaccagggatcattgaagaaaaaaactggttgtagttgggtaaatccaatataggttaacaatgcttcttcgagtgacttacagataggcttttgatgcttctgatctcaagtgtaccattcaatgcctatgcctgggagcaatcacattagatcgcacaaattcctggaaggtgtactgaagctacaacaacaaatctgcatgtacttgtatgttgttagatgagaagattatgacacatctactgttggagtctttaagcaacaaaagtgccttatacgatgatgtcaaggttttctgcaatctcctcttttccaggttttaactctggcctatcctaatttgtttgagaccaaaagactattgttgttgttgttgtatagagggagattcaatgggcagacagatgacggaagtggaaacaacaagtcagatcaccatgttagtggaaacaacaagtcagatcaccatgttatgtttggagggaatttattccagtcggtatcttgctctggttctggccatgaacagcctcgccacgccatctggttccatcagccctttccttattggatgagcaggctcgttcgctttcagaggtgacagcaggtttgctcctgtgaccctttccagaatatcatgactcgcggattgagatctcgtgatggttcatggttgcgagtactgcgcgcccggccggctcccatgttgttggttcggtcctcgcgatcacaggcgtgcagaagagtgtcatctcagatttaagcaagctcctgactggaacggcttgaggcgatctgctagcctttcgtcggggatcattgtttggtggcatgttaatggcaggatgattagccattcaatatatgattggaaaggcccaaccgcaccgcgcataactgtacatccaggacgcacagtgtcattcgctgctgcgttgtgcattccggcttcagttctggcaaagatcgcgcttaacgtcgactgctgcggaatctgctcgtcttgaacaggtaactcttgagcagcgggcaagatgggtctcctgtgttacatgcgcatcactgcatcatcagctacaggtagtacagtacatctgctgctggtgcttacattacagttcggtccatcctgccatgtggtgggcactgataaccagccaatcatggagacttgttgtacctcgcgccattaagcggctcccccttcgcgcccatgaagatctcacgtggatgggatccactgtcactgttggatgcgaaggtacgctccctcacagccaatcaagcatccggacgtccggatggacgcacggcccgtgcccgtgcctgtggcgctgtgctgccggcctcgtcgtccggacgaccgacgaccaccggtggagcgcacatatgcatgttttctcttctcttgcgagcgctggctggtcctgggttggctggctggcggcgcgcgcttgtccttcctccggcgctctctcgtcagaaggggtgaagaggggaaggctgatgtggcacgcgcagtgtgagctggcgcgggcgggcgtcggcgccgtcgctctcccgacctggtgctgagcgcgacgcggggcgccggggccaggacgattcgtatttgtgattcccccgccgtgacccgcgcgactggacggatcgggttttctggcggtcgctgtcgccgccagcaagatgggtcgctgggctctcgggggtgggacggatggcagcgagggagctccgttcttccgcccctcatcattgcccgtcctgccagctgctgtccgtacgcgtgtggcagcacgcacacgcccgtatgggttcttgttatatgtttgtactgtactaggcgcgccaagacgatgaggctggatctggtgcctgttaccgtaggacagatccattatcgattactcatcgtaattcttatgtaccgtactattacattcacagtcactttaacgttatatcaaccttttcttttg

SEQ ID NO: 65197 - DNA, 2016 bp, Zea Mays
ctttcttatggcatccggtcaattacacaacatcgagtctctgatctattcgagtcagtatagatcggtggtgactctatcatcttctaatcaagcctacgtgaaattaaaacgactattttatttaaaaagtagaaacaatcatgcaaactttaaaaagaagaggtaagtctggaattacgatcgagcgcaatatataatcagagaaaggtccgttattgtaggatggattccaccgaccaccgtgctgaccgcccttgacgtgtcccacggaccacagcgacccacccacccagcgggggcggcgtcaggcgtgtgccatcaaccaagcttgaaacttcttcccttctctttcccttctcctcccgccgccctcgcgctctcgcttcctctccacgaccgtcacaaccaccgccaccgccacctcctcgcgcgggggcaactgtgaggtgagggcgaggcggggcgatgctggcgtggaaggagaaggtggcggaccgtctcgcccgcctgctcgccgactcccctgtctctccctcccctgctcaggccgccgtcgagccatcgcaggctaaatcttttccaccagaacattttactccccccaagacatcatcattatcttcgtatgtattttcccttctaccaacctcaaacacagggcatgagcagaattcaccttgttcagagactttgagaccattacctcctgaatcacttcctaaaaaatggagatggagtgatgtaacttggaaagatcctcccgtggaattgagtgaggagtctgggtctgaaagtgatagagatgaaaggaatgggaattttggtaacgacccagtccttcagtcatataggcccataaataactcaaatggcaatgaggaaacatcgacttcagattgtgtgggcactcttcgttatctaactgaaaagtctatgtttgtgtctccaaaactatttgcattctttcaatcttctctccctgggactttgaaggggtgccactgggtattgctatatagcacctggaagcatgggatatctctgagaacacttcttcgtagaagtgagaatattcagggtccatgcctattgattgttggagatatgcaaggggctgtgtttggtggcttattgaacagtcctctgcggcccacagagaaaaggaaatatcagggaacaaaccagacgtttgtgttcacaacaatacatggtgaacctagacttttcagaccaactggtgcaaacagattctactatttgtgcttgaataatgctttagcatttggaggtggtggaagcttcgcattgtgtgttgatgaagatctgttacatggaagcagtggatcatgtgagacatttggaaactcatgtttggcatatagtccagagtttgaactaaagaatgtggagttatggggattcacacattcatggagccgatcgacataaccgatgctagttgtcttcatttgtgacctggcaacagatggaaaggggcatgaaaatgctaggtggaactgttaggggaattcactatttgtactcccagttctcttgtttggcttgtggattgaattaaatattgagagctggacaaggaattcatatccttctgtttggtgagtgggatttggagtggtgccgtaagtcatgatgcgcacacatcttccacttaatgcccaatcaccacctatctctgtctaaacttctcatcacgtcaatattttcaaacccattaaacccttgtctcgaatctttccatttcctcccaccaattacctctaaccacacacaacgtggttaatccactgtacatgatcattgtaatgtctagtattcattcacttgattaacacatttcatatttgtacatgcctctctgttcagtgtaattactttgaatcaacttgccttcttggagccgtgtgcctgaagtgcattcttcagcatggaaaaaaactgtgatgatagatattaaaacgaagtattgtgtgttattcagtgaattcatgc

SEQ ID NO: 65198 - DNA, 1826 bp, Zea Mays
tgaccgcccttgacgtgtcccacggaccacagcgacccacccacccagcgggggcggcgtcaggcgtgtgccatcaaccaagcttgaaacttcttcccttctctttcccttctcctcccgccgccctcgcgctctcgcttcctctccacgaccgtcacaaccaccgccaccgccacctcctcgcgcgggggcaactgtgaggtgagggcgaggcggggcgatgctggcgtggaaggagaaggtggcggaccgtctcgcccgcctgctcgccgactcccctgtctctccctcccctgctcaggccgccgtcgagccatcgcaggctaaatcttttccaccagaacattttactccccccaagacatcatcattatcttcgtatgtattttcccttctaccaacctcaaacacagggcatgagcagaattcaccttgttcagagactttgagaccattacctcctgaatcacttcctaaaaaatggagatggagtgatgtaacttggaaagatcctcccgtggaattgagtgaggagtctgggtctgaaagtgatagagatgaaaggaatgggaattttggtaacgacccagtccttcagtcatataggcccataaataactcaaatggcaatgaggaaacatcgacttcagattgtgtgggcactcttcgttatctaactgaaaagtctatgtttgtgtctccaaaactatttgcattctttcaatcttctctccctgggactttgaaggggtgccactgggtattgctatatagcacagcacctggaagcatgggatatctctgagaacacttcttcgtagaagtgagaatattcagggtccatgcctattgattgttggagatatgcaaggggctgtgtttggtggcttattgaacagtcctctgcggcccacagagaaaaggaaatatcagggaacaaaccagacgtttgtgttcacaacaatacatggtgaacctagacttttcagaccaactgattctactatttgtgcttgaataatgctttagcatttggaggtggtggaagcttcgcattgtgtgttgatgaagatctgttacatggaagcagtggatcatgtgagacatttggaaactcatgtttggcatatagtccagagtttgaactaaagaatgtggagttatggggattcacacattcatggagccgatcgacataaccgatgctagttgtcttcatttgtgacctggcaacagatggaaaggggcatgaaaatgctaggtggaactgttaggggaattcactgtcacttggggctggtttggtttcaagggaattggaggggattcaccaaaccagccctcggagatttgtactcccagttctcttgtttggcttgtggattgaattaaatattgagagctggacaaggaattcatatccttctgtttggtgagtgggatttggagtggtgccgtaagtcatgatgcgcacacatcttccacttaatgcccaatcaccacctatctctgtctaaacttctcatcacgtcaatattttcaaacccattaaacccttgtctcgaatctttccatttcctcccaccaattacctctaaccacacacaacgtggttaatccactgtacatgatcattgtaatgtctagtattcattcacttgattaacacatttcatatttgtacatgcctctctgttcagtgtaattactttgaatcaacttgccttcttggagccgtgtgcctgaagtgcattcttcagcatggaaaaaaactgtgatgatagatattaaaacgaagtattgtgtgttattcagtgaattcatgc

SEQ ID NO: 65199 - DNA, 1414 bp, Zea Mays
ctctgctctcttatcttctttccagcgcgcgtaggcttcctctgggattttttgcttgccgacttaatcttccagctgagcgtagagcttcttcctcctcagccatcgcccaagtcttcttcttctacgcgcacagggttctcctctgcgcatcctctgcctctcccagcgccgtggcttctctgagttcgtcgctggacacgcaccgtcctctgctcgttcggtgcccctctctccaagcttccatggcggcgttcccatggcgccttggagccccagctcagccgacggccgggaggacgcgctgggtctccctctgctcggtcgtctccctcctcccgctccagctcccctgtgtgccgtggatctcgcgcccctgcccaagtccggctgcctggttctgtccagttcgcgtcctgctcgcctttacgtcgcggttgtagcgttccgttgtttctgcgcgtgcggccgcgaagctccctgttcagttcgcctccgtcgccttgtcgtgcgcgcgaaattgctcgcagtccatatcaagtccgtgatgtgcgcgctggacacgatgaaatgctgcgtgtcgtgcgtcgtccatcctaggtcctcatcgtcgcgtcgttcgccttcgcactatgtgcgacagcaccgtcgttttccctgtcttgtactcgcatggtttcctgctcgccggtgcgccctctcggctcgcttggccttaattctcatcgtgtcgtcgattccgccggttagcgtcgttcgtcattgcgtcgcgtgtgtagctctatatacgtcaccctcctgtgtcgccgtcgttccgcgcgtcagcaagaaatctcaagaggcgggtgaagacggagccagcagtgtggtattcaccaagtgcgcgacaaaaatctcggacatcctgcgcgactcaagttcgactcgtcagaattattcagtcgagaaaaagatcttcagcaattgattaccgaagaaaagaaggcccctgggtgacgtctaccggaactcgtagccgtgcttgcgactattgcgtcgaattagtcaagggtacgttaattaatcgcgtgatgcggaagaagagccaagtcgaccccaagcgcgggctaatccacaggatgaagctgatggacaatggagcgagtatcgaaataaaggctgatcgtcaagtggacgtcatctaacaacactaacctagtgttactcaggcaagccccggtgcatgcaacccctttccttgtgtttttaaatacttttcgcacactttaagtctagtgaaatatgcattaggttcataggagttgcttggaaccctttgatgcattgctttccttgatatccatacctttatagatacttctgtgaagtatcaaaattatgatttacaaaaatgcttagccttgcttagaccttg

SEQ ID NO: 65200 - DNA, 1413 bp, Zea Mays
ctctgctctcttatcttctttccagcgcgcgtaggcttcctctgggattttttgcttgccgacttaatcttccagctgagcgtagagcttcttcctcctcagccatcgcccaagtcttcttcttctacgcgcacagggttctcctctgcgcatcctctgcctctcccagcgccgtggcttctctgagttcgtcgctggacacgcaccgtcctctgctcgttcggtgcccctctctccaagcttccatggcggcgttcccatggcgccttggagccccagctcagccgacggccgggaggacgcgctgggtctccctctgctcggtcgtctccctcctcccgctccagctcccctgtgtgccgtggatctcgcgcccctgcccaagtccggctgcctggttctgtccagttcgcgtcctgctcgcctttacgtcgcggttgtagcgttccgttgtttctgcgcgtgcggccgcgaagctccctgttcagttcgcctccgtcgccttgtcgtgcgcgcgaaattgctcgcagtccatatcaagtccgtgatgtgcgcgctggacacgatgaaatgctgcgtgtcgtgcgtcgtccatcctaggtcctcatcgtcgcgtcgttcgccttcgcactatgtgcgacagcaccgtcgttttccctgtcttgtactcgcatggtttcctgctcgccggtgcgccctctcggctcgcttggccttaattctcatcgtgtcgtcgattccgccggttagcgtcgttcgtcattgcgtcgcgtgtgtagctctatatacgtcaccctcctgtgtcgccgtcgttccgcgcgtcagcaagaaatctcaagaggcgggtgaagacggagccagcagtgtggtattcaccaagtgcgcgacaaaaatctcggacatcctgcgcgactcaagttcgactcgtcagaattattcagtcgagaaaaagatcttcagcaattgattaccgaagaaaagaaggcccctgggtgacgtctaccggaactcgtagccgtgcttgcgactattgcgtcgaattagtcaaggtacgttaattaatcgcgtgatgcggaagaagagccaagtcgaccccaagcgcgggctaatccacaggatgaagctgatggacaatggagcgagtatcgaaataaaggctgatcgtcaagtggacgtcatctaacaacactaacctagtgttactcaggcaagccccggtgcatgcaacccctttccttgtgtttttaaatacttttcgcacactttaagtctagtgaaatatgcattaggttcataggagttgcttggaaccctttgatgcattgctttccttgatatccatacctttatagatacttctgtgaagtatcaaaattatgatttacaaaaatgcttagccttgcttagaccttg

SEQ ID NO: 65201 - DNA, 1951 bp, Zea Mays
gtccgctcgaggtggccccacgtgtcggtgaggctcgactctcgcgtgcagagtgagcgcagcggtccaccacgcgaaaggccgactccagttctccccctcgcctcacatctcattcctctcctctctcctccccccctctcgctcgagctctgttggaggcaggagggcaggccagggcgccaggccaggcgaggtggttcggttgacgagttcttcctcttcctcgacatcgccgatcccgccacgcgctgcccgcagcggagacacaataatcttagatggagaggttaagcaccaaccagctctacagttctggtgttcctgtaaccgtaccaacatctctgccttgtataccagtctctctggatgagagcttcccgaggcttcccgatgcacagagtgttttgatggagagagaattgaggagcactccactaccacctcaccagacaactgttgctcctatccgtggtctgtttcactccaatactggatctgttggtcctttgtgctcacctccgtctgtaaggttctcttcgcattcaaatcctgagcaataccccaaccacaattcatacaattctcaagtaccaagcactgcaagttcctcaacgctgaattatgggtcacaatatggaggctttgaaccatccataaccgatttcccaagagacattgaaccaacttggtgccccgatccagttgagagcattcttggatactctggtgatgtccctgctgggaataatttgactgggaccacttctattggagcttcagatgatcttactaagcaaactgaatggtggacagagtttatgaatgaggattggaaggacatggttgataacccgacttccacagaaactcaaccggttgggcaacctgtgcaatcatccaactcagttcaccaatcagctacccaacaaacagtttcatctcaatctgttgaaccgttggcagttgtggcaccctcacccactgctggctccaatactggcaaggcacgcatgagatggactcctgagcttcacgagcgctttgtggatgctgtcaatatacttggtggcagtgaaaggtgtcctgaagctaatgaaggcagacaatttgaccatttatcatgtaaaaagtcatcttcagaaatacagaacagctagatacagaccagagttatctgaaggctcttctgaaaagaaagtggcatcaaaagaagatataccatctattgacttgaaagggagttttgatctcactgaagcacttaggctccagttggaacttcaaaagcggcttcatgaacagcttgagatacaaagaagtttgcagctaagaatcgaggaacaagggaagtgtcttcagatgatgctagagcagcagtgcatacccggggcagaaaaggcgcaggatgcttcaaccgctgcagatgaattgaggtcaccttctgagattccagaatcttctaccgtcaaggaagttccagaaaacagtcaaaatggatcaaccaagcaaacaagcttaaatcaagttgtttttgtccttccgtgggaacagatgaacgctatagttaacttccttgcaaagcctggctaggtgcatgtaactaggagttagttgtatattacctaccctcacggtatcactgaatcccagtgttatgcggatgatgtagtcttcagaagacagcgcaagcacattgtcaggggtttgacttgttttgccccccattacttaggtatcaagtagcgtctcctaggcatttgattatgggctaattcaagtgtttacaataatgtttagcacctgttgtttaaaacatgtcatggtaccaaatatgacgaagatgtattgcatttatatgagagaatgagagatttgaactgctttagtttggtctccgaccataacatcttctctcttagtagaaatttttattatacctttatgaaac

SEQ ID NO: 65202 - DNA, 1965 bp, Zea Mays
gtccgctcgaggtggccccacgtgtcggtgaggctcgactctcgcgtgcagagtgagcgcagcggtccaccacgcgaaaggccgactccagttctccccctcgcctcacatctcattcctctcctctctcctccccccctctcgctcgagctctgttggaggcaggagggcaggccagggcgccaggccaggcgaggtggttcggttgacgagttcttcctcttcctcgacatcgccgatcccgccacgcgctgcccgcagcggagacacaataatcttagatggagaggttaagcaccaaccagctctacagttctggtgttcctgtaaccgtaccaacatctctgccttgtataccagtctctctggatgagagcttcccgaggcttcccgatgcacagagtgttttgatggagagagaattgaggagcactccactaccacctcaccagacaactgttgctcctatccgtggtctgtttcactccaatactggatctgttggtcctttgtgctcacctccgtctgtaaggttctcttcgcattcaaatcctgagcaataccccaaccacaattcatacaattctcaagtaccaagcactgcaagttcctcaacgctgaattatgggtcacaatatggaggctttgaaccatccataaccgatttcccaagagacattgaaccaacttggtgccccgatccagttgagagcattcttggatactctggtgatgtccctgctgggaataatttgactgggaccacttctattggagcttcagatgatcttactaagcaaactgaatggtggacagagtttatgaatgaggattggaaggacatggttgataacccgacttccacagaaactcaaccggttgggcaacctgtgcaatcatccaactcagttcaccaatcagctacccaacaaacagtttcatctcaatctgttgaaccgttggcagttgtggcaccctcacccactgctggctccaatactggcaaggcacgcatgagatggactcctgagcttcacgagcgctttgtggatgctgtcaatatacttggtggcagtgaaaaagcaactcctaagggtgtcctgaagctaatgaaggcagacaatttgaccatttatcatgtaaaaagtcatcttcagaaatacagaacagctagatacagaccagagttatctgaaggctcttctgaaaagaaagtggcatcaaaagaagatataccatctattgacttgaaagggagttttgatctcactgaagcacttaggctccagttggaacttcaaaagcggcttcatgaacagcttgagatacaaagaagtttgcagctaagaatcgaggaacaagggaagtgtcttcagatgatgctagagcagcagtgcatacccggggcagaaaaggcgcaggatgcttcaaccgctgcagatgaattgaggtcaccttctgagattccagaatcttctaccgtcaaggaagttccagaaaacagtcaaaatggatcaaccaagcaaacaagcttaaatcaagttgtttttgtccttccgtgggaacagatgaacgctatagttaacttccttgcaaagcctggctaggtgcatgtaactaggagttagttgtatattacctaccctcacggtatcactgaatcccagtgttatgcggatgatgtagtcttcagaagacagcgcaagcacattgtcaggggtttgacttgttttgccccccattacttaggtatcaagtagcgtctcctaggcatttgattatgggctaattcaagtgtttacaataatgtttagcacctgttgtttaaaacatgtcatggtaccaaatatgacgaagatgtattgcatttatatgagagaatgagagatttgaactgctttagtttggtctccgaccataacatcttctctcttagtagaaatttttattatacctttatgaaac

SEQ ID NO: 65203 - DNA, 1079 bp, Zea Mays
ctcgactctcgcgtgcagagtgagcgcagcggtccaccacgcgaaaggccgactccagttctccccctcgcctcacatctcattcctctcctctctcctccccccctctcgctcgagctctgttggaggcaggagggcaggccagggcgccaggccaggcgaggtggttcggttgacgagttcttcctcttcctcgacatcgccgatcccgccacgcgctgcccgcagcggagacacaataatcttaggtgaggagcatagttcaaaagtcaagatagaaagggcattggacactggaggaacgttgtgttggtggtaactgagtctctctggatgagagcttcccgaggcttcccgatgcacagagtgttttgatggagagagaattgaggagcactccactaccacctcaccagacaactgttgctcctatccgtggtctgtttcactccaatactggatctgttggtcctttgtgctcacctccgtctgtaaggttctcttcgcattcaaatcctgagcaataccccaaccacaattcatacaattctcaagtaccaagcactgcaagttcctcaacgctgaattatgggtcacaatatggaggctttgaaccatccataaccgatttcccaagagacattgaaccaacttggtgccccgatccagttgagagcattcttggatactctggtgatgtccctgctgggaataatttgactgggaccacttctattggagcttcagatgatcttactaagcaaactgaatggtggacagagtttatgaatgaggattggaaggacatggttgataacccgacttccacagaaactcaaccggtacgctagttaattatgccatttttggtgggtggactttttgtactcccgtttgtgcttagtatttcctagctgtacgttgatgccaaatccacaaatctgtaatcatattgttgttgtcctacaggctacacgtcctgttttttcccaaaacaaatgctttgtaatcttattttcattatatcttgtttgtattgatatgatataacaaatctacacttggaaatcttaaaaaga

SEQ ID NO: 65204 - DNA, 1146 bp, Zea Mays
caccgtcctcccccaccacatggccagtccagcgcacagatatagcagcaatcacttaatgctagctcctctcccccgtgagccgtagcttcactctgcatgcactccggccatgggcccatggctatataagccgctgagctgcgatgccacagcaccgcgcggcctcaagcagctcctttcttcagcagcacagctagctagccatggggagcaagggggtggcgctcgcgctgctgctctgccttagcggcgcggccgtgggcgcgtgggctcgcccggtcgccaccaaggacgctgctgccgacgagaagttcctgtggctcaagaagcactttggcaagggtggtggcggcttgggaggcggcggcggaggtggcggcgggctgggtggtggtgttggccacggcttcggaaaaggtggcggccttggcggtggcatcggccatggtcttggtggtggctatggtaaaggtggagggattgaccatggcatcagcggtggctatggaaaaggcggtggccttggtggtggatatggcaaaggtggcggactcggaggcgacattggccatggcatgggtggaggccatggcaaaggtggtggaattgggcatggcatgggtggtggattcggcaaaggcggtggtggtcttggcggcggtagtggctacggtgctggtggcggcgggggccttggtggtggaagtggacatggcatgggtgccggattcagcaagggtggtggtcttggcggcggcgatggccttggcggtggaagtgggcatggcatgggtgccggattcggcaagggtggtggtcttggtggcggcggcggcggaggtggtggcggtgggtttggcaaaggatttggctttgggtttggcaaaggcagcgggttcggtggtggtggcggcggtgggggcggcggcggcatcggtgatcaccattgatacgtcagcatgcagcatacgtctcctctcgttctatcacttacttttgtattcgttcatgcttcgtaccttgtcatgactatgggtgatggtgatatccttcacagtagtattatgtgtgtactccatgtaatgctcgctccctaaaagattcgagaaatataaatgaagttaatgcttcgtttgaatttga

SEQ ID NO: 65205 - DNA, 1379 bp, Zea Mays
cgtaatttgagccttggaaaatccgcgccttcaggtggctgaaagagattcatcagaaagcagttagaaacaaaagagtttattagcatgaccacataatgaaaggcttaggagttcctaatatgactactgaaaaaacatggacaagtgaagcgactgcagactgaaaagcaacaaatgacccacaagtttgtttttttttcaaaaagatccactgtgagatgagaagtgggtttgtaactaccaagcagccacttctttatcgggtcattatcctagaatccttgggaaatctttgtttttcagtgctacaacttacaacccctctgtcgactggtggcgtaagagtggcttaattgtaaaggtcattactgaaccatttctgccttctctttaatataagatactcgctctcatgcgtgttccaaaaaaaacagctacttgtggtgcacaaagttagcatgtcacataagattgaaactttgacaaagatgctcatggatgagaacagcagcagatttagtatgatttagtatttgtagtgaactaaacaccacgaaagatggacaatcctaagtcacgccaaagttgtaaacaatgagcccacaccacctagtgcttaaaaggaacactagaggatagactacatttgacaaggtaacatgcttttcagcaaacatttcttatgaaatgagttcagctaacattaccataacaacaatcaaacccacgcttaatgtcttaaaacagtgattaattgactagcaagaatacattcgtagatcatcaccacaacgatgattgtttcaacaaaacctgcacggaagaagagtgcgttggaatatttgctatcaatctaagaaaatatttatctaacttcactgctgaactacactaacacagtccaaatgttctgaaatggttgtctgagttagagcccaagagcttgttcattccaactttctagttctaacttgcaaatagtggttatttttctattattctctttgtttttattgcactgaacttttgctgataaaactgaagtagaatactcccctgcactcatagctaggtacccattgcccagacaacagaaagaagaaaaatatcagacatcatgttgcagttctctgacttgttaggaaactttgaccaagtctgtgttccccgtctctcgatttaggaacttacagatctactagaggttagcacaaatgtaaactaccctgtttgcatacctttcgaagacgtcggaagcgaagcgggagccattgaagcagacgaaccagagcaggatcagcaccaattgaataggcaccgctcccaccaatcgagcatgtagaggcccatggtgacgttgtagaggtggatcttct

SEQ ID NO: 65206 - DNA, 1401 bp, Zea Mays
ctcccaggctcccagcacgaggatcctgcctgcgggaccctccactttgttggcatcgcagcaagcagcggcgcggtacggtcgcgtacggggacgggaatacgggatgcgatccaatcggagtgttccagtccagcgagcgcacggccgcgcgacaagccttgctcggcgcggaggaggcaggtgccaactgtgcgtgaatgaggcacgatctgacagccgctggacgtgagatttccggacaggagaaccgcgctgccacacccccccgcacggcccctgcggcgcgatgcgctatccatccatggccacgatccgtccgtgccatgccgatcccgcctgcggctcagcagcgactccacgggccacggccgcgggggggattcaccgcatcgcgatctccgatccgatccgatcccgcccgatcctcgcgccatcttttctttttttttcttcttctatagtgtgtagatagtgtgcatataaatatacccacactgttcctccggtgattgcatcgttggcagcgccattcatccatttgtctttttgatttgttttgacctgagggcaaggcagggcagaacagagagcattcgtctcgatcaaccagatctcgatcaatggaggtggcgggggcttgctgccacgccggcgaggagaggaaggtggctgtgcctatcggcaacgatgcggaggtggagccatgcgtcatcgccgtggacgacagctccgtcgaccgcgccatcgtcaccgcgctcctccggcgctccaagtacagagtcactgcggttgacagcgggaagagggcgctggagatactgggctcggagccgaatgtgagcatgatcatcacagactactggatgccagagatgaccggctacgacctgctcaaaaaggagtcttcgaagctgaagcggatcccagtggtgatcatgtcctcagagaacgtgcccaccagaatcaccagatgccttgaggaaggcgcggaggacttcctgctgaagccggtcaggccgtccgacatctcccgcataacaaccaggatgctgctacactgaacttctttcaccagtggccacccaagccaggcgtagtgttttcaattcaagtcacagtagaggtataggaacggagtcaatttagggtagcaattagccgcaggaagtttgatgtaatgtggcctttcattcattagtgcttcgagctttctttggcgtcttactcgatcaagaacaggcagggattagttgtagggttccagttccagaagtagcgactttgttgtcttaagtataacgaatcgtgaaagtgtaaatcactgcacgaatcattctgttaaagaggaacattacaatttacattggcttagccgttttctttttcaactaattccat

SEQ ID NO: 65207 - DNA, 3931 bp, Zea Mays
ctctaatccaaatggaatgagatgaaaaacgaacaagcccaaagttaacaaatttacccaaaaaaatgccactgcatataaacactccctccatcagaagtccgtttcacccgtctacgcatcacgttggtcgttgggctcggtctcgtccgctcctgctcttttctccgcacccagcgccgccgcgggcgattctagggtttcgtcgccggcggcaacaacctgcctgtagcgattcgacacccacgacgacggcctgcagatccagtccacctccgacgacctcgacctatctgcaacttgtggacagcctgcagaaacagctcgtattggaggctacacagaaaaacctgcacccaaaagttgtaaagctcaccaagaaccttgcaggataacacaagtgctgaattttggaaatggatcatgggcgttatgctccacaacatggatgggagaacaacagtgcaccaaatgggtatggtgtaattaatgagccagattttaggtctggtggatcctacaatgctaggagatctgtggatgaaggctttcctagagattcatatggaaggggtgcattctatcatgatacacatgatagaaatatgtatgcatcaccaccctctgccggtggaatgtggtctcagcctcgaaggaatcatgatgaggactatgcaactgcaagagaccatagaagtcaccgtgattttggtgctgataggagcaaaaggattggaagcagagaacgggcggagtttcatggtgagtttgaagaccggtaccgcagttctcaccaaagcagggaggacagctatgagagagatcatgaatatggtcgttatggttatgattcggattatgaaagaggcaagagagatagtagctggagaagacgtgattcatgtgacagcgaacgtgaaaggagtggattaagtcgtgaaagagaggaaagcccgtacacgcgccatagccgttctcgatcacatgggcgcgatgaccgatcaagatcacggtctagatcaagatctcctcgtccgagaagtcatggtcggaaccaaagagatggcctgtattatgataatcgatttgacagaagaagggaatatgattgggatgatagggggcatggtgattcagtggctccatctgccactgttgttgtcaagggactgtccctgaagactaatgatgatgacctatataagattcttgctcagtggggacctctacgcagtgtgcgtgtgatcagggaacggaattctggcatgtctcgtggatttgcttttattgacttccccactgtggaagcagcccgtagaatgatggaagctacaggagagaatggtctcgaaattgatggcaggaatgtgttctttcagtacagtagtaaaccaaccggggggatgggtgggccttctcttggacaagaaaattttacgaggcctacttatgggcacaggactgctgctgcaccgtgtgactggatttgtactatatgcggatgtatgaattttgcccgcaggacctcctgctttcagtgcaatgaacctcgtactgaggatgctcttccagctgatgcgacaggttccgcttcacactttgggagaaggggatctgaactaggtccaactcatgttttagttgttcgtggcttggatgaaaatgctgatgaggaaatgcttcggtacgaatttgctaagcacgcaccaataaaggacatccgccttgttcgggataagtttactcatgtgtctagaggttttgccttcgttcatttccattcggtggaagatgctacgaaagctctggaagctacaaacgggattacacttgagaaaaacggtcaggttttgcgtgtagcatatgctaaaagtacacatggacctgcatcagggggttctcagtcaaacagccttgctgcagctgccattgaggctgcatcatttgctcagcagtatgatgccataggttgggctccaaaagagtacaatcctgatgacaaacagaacaacaactctgaatctcaaaaagatggcagcacagcacagtcgggatttgtttgggatgaaaaatctggttactactatgattctgcatctggattctattatgatggaactactggcctttactatgacagcaactctggagtttggtattcatatgatcaacagactcaacaatatgtcccttgtaatgaccagagcaacactaaggcagccggggaggcggccagcgaaaacacgaaaacctcagatagtaatagtggcaaaaaggttgtgatctctgcgcctgctgccacaattaaacaaagtgagaaaacttcacttcctgacgctgttcaagctgctgcaaatgctgcactggctgcagaaaagagagaaaaggagaaggcaaaagagattaaattggcctcaaaaaatagtctcatagctaataagaagatgagcaatgtcctagctatgtggaagcaaaggaatcaagaagggcaggccgcacgaattgtccttgatgacaaagaaccagcaaattctgatgataaatttagtcattcacgtagtggaactggattctctttgaaaagcaagccaaattctgaccttgaaaatgctatgggcaattctcttggccaaggaatgacatcgactcaaacattggattctgttgtaaagcctagacctgtcagtaacagcttagggactacagttatgggtgtcataagaggttctgctagaggagtgatcaagtcagatactacgtttcacgcattatctgatgctggtagcactgattcccgcaccactataaccacaagagcaagtgggttaatgacaagttctgaggcacttataactcctgcacccttcaaaactgatgtgtctgccttagtctctaatactccatcgggagtttctgggagtggtaaacgtcggttttctgaggcaccgggacaatcccagtacagggatcgagctgcagaaagacgaaatctgtatggatcatctcatggcactgatactgttggattggattcaactggtgactatccgtcccgaaagggttcaagtgagatagggtcgatgccgtttcctcctggtgtgggtgaacgttccagtggtgaaattggcaacagcgaaaactatgaagttattaccgctgatagagcaatcgatgaaagcaatgtgggcaaccgcattctacgcaacatggggtggcaggagggactgggtctcggaaaggatgccagcggtatcaaggaaccagtcctggcaaaatccgtcgacgccagggctggactgggaagtcagcagcggaagcctgatccatcccttgaagcccaagccggggacagctacaaaaccatcatccagaagaaggccatggcaagattcaaggagatgtcttagctacactgttttatctattttattgctgcattttgtagtccgtttttaacagcatgcatttttttgtttgctcgtgtgttttttaaataaactgagccgctgaattgtgatttattatcctgaaaggggcactacatagttcgagacctggatgctttggttcccttgtgtgttagttttcatttgcacgacctatgtgcccgggtgttcataagttgatttgccacaatgtggtcgtagagtctcaacatcaggtcatatcacatatcgtttttttaaacggtgagcatgttttctccattattactggatgaagagaaaggttcttcttggtttgagggaagggtgatttaagggattaagattctttttagaaaaatacattaagggccttttcgtttgtctcaattcatatggattggaagagttgagtgtgtttaaatctctagcaaatcaaaatctcttctaatcaatgctatctctctaatctcgatgggggatgagaataattgaacaagaacaag

SEQ ID NO: 65208 - DNA, 3867 bp, Zea Mays
caagcccaaagttaacaaatttacccaaaaaaatgccactgcatataaacactccctccatcagaagtccgtttcacccgtctacgcatcacgttggtcgttgggctcggtctcgtccgctcctgctcttttctccgcacccagcgccgccgcgggcgattctagggtttcgtcgccggcggcaacaacctgcctgtagcgattcgacacccacgacgacggcctgcagatccagtccacctccgacgacctcgacctatctgcaacttgtggacagcctgcagaaacagctcgtattggaggctacacagaaaaacctgcacccaaaagttgtaaagctcaccaagaaccttgcaggataacacaagtgctgaattttggaaatggatcatgggcgttatgctccacaacatggatgggagaacaacagtgcaccaaatgggtatggtgtaattaatgagccagattttaggtctggtggatcctacaatgctaggagatctgtggatgaaggctttcctagagattcatatggaaggggtgcattctatcatgatacacatgatagaaatatgtatgcatcaccaccctctgccggtggaatgtggtctcagcctcgaaggaatcatgatgaggactatgcaactgcaagagaccatagaagtcaccgtgattttggtgctgataggagcaaaaggattggaagcagagaacgggcggagtttcatggtgagtttgaagaccggtaccgcagttctcaccaaagcagggaggacagctatgagagagatcatgaatatggtcgttatggttatgattcggattatgaaagaggcaagagagatagtagctggagaagacgtgattcatgtgacagcgaacgtgaaaggagtggattaagtcgtgaaagagaggaaagcccgtacacgcgccatagccgttctcgatcacatgggcgcgatgaccgatcaagatcacggtctagatcaagatctcctcgtccgagaagtcatggtcggaaccaaagagatggcctgtattatgataatcgatttgacagaagaagggaatatgattgggatgatagggggcatggtgattcagtggctccatctgccactgttgttgtcaagggactgtccctgaagactaatgatgatgacctatataagattcttgctcagtggggacctctacgcagtgtgcgtgtgatcagggaacggaattctggcatgtctcgtggatttgcttttattgacttccccactgtggaagcagcccgtagaatgatggaagctacaggagagaatggtctcgaaattgatggcaggaatgtgttctttcagtacagtagtaaaccaaccggggggatgggtgggccttctcttggacaagaaaattttacgaggcctacttatgggcacaggactgctgctgcaccgtgtgactggatttgtactatatgcggatgtatgaattttgcccgcaggacctcctgctttcagtgcaatgaacctcgtactgaggatgctcttccagctgatgcgacaggttccgcttcacactttgggagaaggggatctgaactaggtccaactcatgttttagttgttcgtggcttggatgaaaatgctgatgaggaaatgcttcggtacgaatttgctaagcacgcaccaataaaggacatccgccttgttcgggataagtttactcatgtgtctagaggttttgccttcgttcatttccattcggtggaagatgctacgaaagctctggaagctacaaacgggattacacttgagaaaaacggtcaggttttgcgtgtagcatatgctaaaagtacacatggacctgcatcagggggttctcagtcaaacagccttgctgcagctgccattgaggctgcatcatttgctcagcagtatgatgccataggttgggctccaaaagagtacaatcctgatgacaaacagaacaacaactctgaatctcaaaaagatggcagcacagcacagtcgggatttgtttgggatgaaaaatctggttactactatgattctgcatctggattctattatgatggaactactggcctttactatgacagcaactctggagtttggtattcatatgatcaacagactcaacaatatgtcccttgtaatgaccagagcaacactaaggcagccggggaggcggccagcgaaaacacgaaaacctcagatagtaatagtggcaaaaaggttgtgatctctgcgcctgctgccacaattaaacaaagtgagaaaacttcacttcctgacgctgttcaagctgctgcaaatgctgcactggctgcagaaaagagagaaaaggagaaggcaaaagagattaaattggcctcaaaaaatagtctcatagctaataagaagatgagcaatgtcctagctatgtggaagcaaaggaatcaagaagggcaggccgcacgaattgtccttgatgacaaagaaccagcaaattctgatgataaatttagtcattcacgtagtggaactggattctctttgaaaagcaagccaaattctgaccttgaaaatgctatgggcaattctcttggccaaggaatgacatcgactcaaacattggattctgttgtaaagcctagacctgtcagtaacagcttagggactacagttatgggtgtcataagaggttctgctagaggagtgatcaagtcagatactacgtttcacgcattatctgatgctggtagcactgattcccgcaccactataaccacaagagcaagtgggttaatgacaagttctgaggcacttataactcctgcacccttcaaaactgatgtgtctgccttagtctctaatactccatcgggagtttctgggagtggtaaacgtcggttttctgaggcaccgggacaatcccagtacagggatcgagctgcagaaagacgaaatctgtatggatcatctcatggcactgatactgttggattggattcaatgagatagggtcgatgccgtttcctcctggtgtgggtgaacgttccagtggtgaaattggcaacagcgaaaactatgaagttattaccgctgatagagcaatcgatgaaagcaatgtgggcaaccgcattctacgcaacatggggtggcaggagggactgggtctcggaaaggatgccagcggtatcaaggaaccagtcctggcaaaatccgtcgacgccagggctggactgggaagtcagcagcggaagcctgatccatcccttgaagcccaagccggggacagctacaaaaccatcatccagaagaaggccatggcaagattcaaggagatgtcttagctacactgttttatctattttattgctgcattttgtagtccgtttttaacagcatgcatttttttgtttgctcgtgtgttttttaaataaactgagccgctgaattgtgatttattatcctgaaaggggcactacatagttcgagacctggatgctttggttcccttgtgtgttagttttcatttgcacgacctatgtgcccgggtgttcataagttgatttgccacaatgtggtcgtagagtctcaacatcaggtcatatcacatatcgtttttttaaacggtgagcatgttttctccattattactggatgaagagaaaggttcttcttggtttgagggaagggtgatttaagggattaagattctttttagaaaaatacattaagggccttttcgtttgtctcaattcatatggattggaagagttgagtgtgtttaaatctctagcaaatcaaaatctcttctaatcaatgctatctctctaatctcgatgggggatgagaataattgaacaagaacaag

SEQ ID NO: 65209 - DNA, 3960 bp, Zea Mays
caagcccaaagttaacaaatttacccaaaaaaatgccactgcatataaacactccctccatcagaagtccgtttcacccgtctacgcatcacgttggtcgttgggctcggtctcgtccgctcctgctcttttctccgcacccagcgccgccgcgggcgattctagggtttcgtcgccggcggcaacaacctgcctgtagcgattcgacgtaggcatccctgttcctctcctccggaggcctgtctcctcgccatctcgtcggtgtagcctgagtgtgggtccacgccctgcagacccacgacgacggcctgcagatccagtccacctccgacgacctcgacctatctgcaacttgtggacagcctgcagaaacagctcgtattggaggctacacagaaaaacctgcacccaaaagttgtaaagctcaccaagaaccttgcaggataacacaagtgctgaattttggaaatggatcatgggcgttatgctccacaacatggatgggagaacaacagtgcaccaaatgggtatggtgtaattaatgagccagattttaggtctggtggatcctacaatgctaggagatctgtggatgaaggctttcctagagattcatatggaaggggtgcattctatcatgatacacatgatagaaatatgtatgcatcaccaccctctgccggtggaatgtggtctcagcctcgaaggaatcatgatgaggactatgcaactgcaagagaccatagaagtcaccgtgattttggtgctgataggagcaaaaggattggaagcagagaacgggcggagtttcatggtgagtttgaagaccggtaccgcagttctcaccaaagcagggaggacagctatgagagagatcatgaatatggtcgttatggttatgattcggattatgaaagaggcaagagagatagtagctggagaagacgtgattcatgtgacagcgaacgtgaaaggagtggattaagtcgtgaaagagaggaaagcccgtacacgcgccatagccgttctcgatcacatgggcgcgatgaccgatcaagatcacggtctagatcaagatctcctcgtccgagaagtcatggtcggaaccaaagagatggcctgtattatgataatcgatttgacagaagaagggaatatgattgggatgatagggggcatggtgattcagtggctccatctgccactgttgttgtcaagggactgtccctgaagactaatgatgatgacctatataagattcttgctcagtggggacctctacgcagtgtgcgtgtgatcagggaacggaattctggcatgtctcgtggatttgcttttattgacttccccactgtggaagcagcccgtagaatgatggaagctacaggagagaatggtctcgaaattgatggcaggaatgtgttctttcagtacagtagtaaaccaaccggggggatgggtgggccttctcttggacaagaaaattttacgaggcctacttatgggcacaggactgctgctgcaccgtgtgactggatttgtactatatgcggatgtatgaattttgcccgcaggacctcctgctttcagtgcaatgaacctcgtactgaggatgctcttccagctgatgcgacaggttccgcttcacactttgggagaaggggatctgaactaggtccaactcatgttttagttgttcgtggcttggatgaaaatgctgatgaggaaatgcttcggtacgaatttgctaagcacgcaccaataaaggacatccgccttgttcgggataagtttactcatgtgtctagaggttttgccttcgttcatttccattcggtggaagatgctacgaaagctctggaagctacaaacgggattacacttgagaaaaacggtcaggttttgcgtgtagcatatgctaaaagtacacatggacctgcatcagggggttctcagtcaaacagccttgctgcagctgccattgaggctgcatcatttgctcagcagtatgatgccataggttgggctccaaaagagtacaatcctgatgacaaacagaacaacaactctgaatctcaaaaagatggcagcacagcacagtcgggatttgtttgggatgaaaaatctggttactactatgattctgcatctggattctattatgatggaactactggcctttactatgacagcaactctggagtttggtattcatatgatcaacagactcaacaatatgtcccttgtaatgaccagagcaacactaaggcagccggggaggcggccagcgaaaacacgaaaacctcagatagtaatagtggcaaaaaggttgtgatctctgcgcctgctgccacaattaaacaaagtgagaaaacttcacttcctgacgctgttcaagctgctgcaaatgctgcactggctgcagaaaagagagaaaaggagaaggcaaaagagattaaattggcctcaaaaaatagtctcatagctaataagaagatgagcaatgtcctagctatgtggaagcaaaggaatcaagaagggcaggccgcacgaattgtccttgatgacaaagaaccagcaaattctgatgataaatttagtcattcacgtagtggaactggattctctttgaaaagcaagccaaattctgaccttgaaaatgctatgggcaattctcttggccaaggaatgacatcgactcaaacattggattctgttgtaaagcctagacctgtcagtaacagcttagggactacagttatgggtgtcataagaggttctgctagaggagtgatcaagtcagatactacgtttcacgcattatctgatgctggtagcactgattcccgcaccactataaccacaagagcaagtgggttaatgacaagttctgaggcacttataactcctgcacccttcaaaactgatgtgtctgccttagtctctaatactccatcgggagtttctgggagtggtaaacgtcggttttctgaggcaccgggacaatcccagtacagggatcgagctgcagaaagacgaaatctgtatggatcatctcatggcactgatactgttggattggattcaaggttcaagtgagatagggtcgatgccgtttcctcctggtgtgggtgaacgttccagtggtgaaattggcaacagcgaaaactatgaagttattaccgctgatagagcaatcgatgaaagcaatgtgggcaaccgcattctacgcaacatggggtggcaggagggactgggtctcggaaaggatgccagcggtatcaaggaaccagtcctggcaaaatccgtcgacgccagggctggactgggaagtcagcagcggaagcctgatccatcccttgaagcccaagccggggacagctacaaaaccatcatccagaagaaggccatggcaagattcaaggagatgtcttagctacactgttttatctattttattgctgcattttgtagtccgtttttaacagcatgcatttttttgtttgctcgtgtgttttttaaataaactgagccgctgaattgtgatttattatcctgaaaggggcactacatagttcgagacctggatgctttggttcccttgtgtgttagttttcatttgcacgacctatgtgcccgggtgttcataagttgatttgccacaatgtggtcgtagagtctcaacatcaggtcatatcacatatcgtttttttaaacggtgagcatgttttctccattattactggatgaagagaaaggttcttcttggtttgagggaagggtgatttaagggattaagattctttttagaaaaatacattaagggccttttcgtttgtctcaattcatatggattggaagagttgagtgtgtttaaatctctagcaaatcaaaatctcttctaatcaatgctatctctctaatctcgatgggggatgagaataattgaacaagaacaag

SEQ ID NO: 65210 - DNA, 3203 bp, Zea Mays
gtccgtttcacccgtctacgcatcacgttggtcgttgggctcggtctcgtccgctcctgctcttttctccgcacccagcgccgccgcgggcgattctagggtttcgtcgccggcggcaacaacctgcctgtagcgattcgacgtaggcatccctgttcctctcctccggaggcctgtctcctcgccatctcgtcggtgtagcctgagtgtgggtccacgccctgcagacccacgacgacggcctgcagatccagtccacctccgacgacctcgacctatctgcaacttgtggacagcctgcagaaacagctcgtattggaggctacacagaaaaacctgcacccaaaagttgtaaagctcaccaagaaccttgcaggataacacaagtgctgaattttggaaatggatcatgggcgttatgctccacaacatggatgggagaacaacagtgcaccaaatgggtatggtgtaattaatgagccagattttaggtctggtggatcctacaatgctaggagatctgtggatgaaggctttcctagagattcatatggaaggggtgcattctatcatgatacacatgatagaaatatgtatgcatcaccaccctctgccggtggaatgtggtctcagcctcgaaggaatcatgatgaggactatgcaactgcaagagaccatagaaggcatgacactgattatcgcaatgatggaaagcatcatgagtttgattcatacagaggagttgatagactccatgataattatcgtgctactgacaactattatgaatctggcagtcaccgtgattttggtgctgataggagcaaaaggattggaagcagagaacgggcggagtttcatggtgagtttgaagaccggtaccgcagttctcaccaaagcagggaggacagctatgagagagatcatgaatatggtcgttatggttatgattcggattatgaaagaggcaagagagatagtagctggagaagacgtgattcatgtgacagcgaacgtgaaaggagtggattaagtcgtgaaagagaggaaagcccgtacacgcgccatagccgttctcgatcacatgggcgcgatgaccgatcaagatcacggtctagatcaagatctcctcgtccgagaagtcatggtcggaaccaaagagatggcctgtattatgataatcgatttgacagaagaagggaatatgattgggatgatagggggcatggtgattcagtggctccatctgccactgttgttgtcaagggactgtccctgaagactaatgatgatgacctatataagattcttgctcagtggggacctctacgcagtgtgcgtgtgatcagggaacggaattctggcatgtctcgtggatttgcttttattgacttccccactgtggaagcagcccgtagaatgatggaagctacaggagagaatggtctcgaaattgatggcaggaatgtgttctttcagtacagtagtaaaccaaccggggggatgggtgggccttctcttggacaagaaaattttacgaggcctacttatgggcacaggactgctgctgcaccgtgtgactggatttgtactatatgcggatgtatgaattttgcccgcaggacctcctgctttcagtgcaatgaacctcgtactgaggatgctcttccagctgatgcgacaggttccgcttcacactttgggagaaggggatctgaactaggtccaactcatgttttagttgttcgtggcttggatgaaaatgctgatgaggaaatgcttcggtacgaatttgctaagcacgcaccaataaaggacatccgccttgttcgggataagtttactcatgtgtctagaggttttgccttcgttcatttccattcggtggaagatgctacgaaagctctggaagctacaaacgggattacacttgagaaaaacggtcaggttttgcgtgtagcatatgctaaaagtacacatggacctgcatcagggggttctcagtcaaacagccttgctgcagctgccattgaggctgcatcatttgctcagcagtatgatgccataggttgggctccaaaagagtacaatcctgatgacaaacagaacaacaactctgaatctcaaaaagatggcagcacagcacagtcgggatttgtttgggatgaaaaatctggttactactatgattctgcatctggattctattatgatggaactactggcctttactatgacagcaactctggagtttggtattcatatgatcaacagactcaacaatatgtcccttgtaatgaccagagcaacactaaggcagccggggaggcggccagcgaaaacacgaaaacctcagatagtaatagtggcaaaaaggttgtgatctctgcgcctgctgccacaattaaacaaagtgagaaaacttcacttcctgacgctgttcaagctgctgcaaatgctgcactggctgcagaaaagagagaaaaggagaaggcaaaagagattaaattggcctcaaaaaatagtctcatagctaataagaagatgagcaatgtcctagctatgtggaagcaaaggaatcaagaagggcaggccgcacgaattgtccttgatgacaaagaaccagcaaattctgatgataaatttagtcattcacgtagtggaactggattctctttgaaaagcaagccaaattctgaccttgaaaatgctatgggcaattctcttggccaaggaatgacatcgactcaaacattggattctgttgtaaagcctagacctgtcagtaacagcttagggactacagttatgggtgtcataagaggttctgctagaggagtgatcaagtcagatactacgtttcacgcattatctgatgctggtagcactgattcccgcaccactataaccacaagagcaagtgggttaatgacaagttctgaggcacttataactcctgcacccttcaaaactgatgtgtctgccttagtctctaatactccatcgggagtttctgggagtggtaaacgtcggttttctgaggcaccgggacaatcccagtacagggatcgagctgcagaaagacgaaatctgtatggatcatctcatggcactgatactgttggattggattcaaggatttttttgttaccattggaatgtatccttgacccaacatacagtttagggatgatgttttcggt

SEQ ID NO: 65211 - DNA, 4834 bp, Zea Mays
gtccgtttcacccgtctacgcatcacgttggtcgttgggctcggtctcgtccgctcctgctcttttctccgcacccagcgccgccgcgggcgattctagggtttcgtcgccggcggcaacaacctgcctgtagcgattcgacgtaggcatccctgttcctctcctccggaggcctgtctcctcgccatctcgtcggtgtagcctgagtgtgggtccacgccctgcagacccacgacgacggcctgcagatccagtccacctccgacgacctcgacctatctgcaacttgtggacagcctgcagaaacagctcgtattggaggctacacagaaaaacctgcacccaaaagttgtaaagctcaccaagaaccttgcaggataacacaagtgctgaattttggaaatggatcatgggcgttatgctccacaacatggatgggagaacaacagtgcaccaaatgggtatggtgtaattaatgagccagattttaggtctggtggatcctacaatgctaggagatctgtggatgaaggctttcctagagattcatatggaaggggtgcattctatcatgatacacatgatagaaatatgtatgcatcaccaccctctgccggtggaatgtggtctcagcctcgaaggaatcatgatgaggactatgcaactgcaagagaccatagaagtcaccgtgattttggtgctgataggagcaaaaggattggaagcagagaacgggcggagtttcatggtgagtttgaagaccggtaccgcagttctcaccaaagcagggaggacagctatgagagagatcatgaatatggtcgttatggttatgattcggattatgaaagaggcaagagagatagtagctggagaagacgtgattcatgtgacagcgaacgtgaaaggagtggattaagtcgtgaaagagaggaaagcccgtacacgcgccatagccgttctcgatcacatgggcgcgatgaccgatcaagatcacggtctagatcaagatctcctcgtccgagaagtcatggtcggaaccaaagagatggcctgtattatgataatcgatttgacagaagaagggaatatgattgggatgatagggggcatggtgattcagtggctccatctgccactgttgttgtcaagggactgtccctgaagactaatgatgatgacctatataagattcttgctcagtggggacctctacgcagtgtgcgtgtgatcagggaacggaattctggcatgtctcgtggatttgcttttattgacttccccactgtggaagcagcccgtagaatgatggaagctacaggagagaatggtctcgaaattgatggcaggaatgtgttctttcagtacagtagtaaaccaaccggggggatgggtgggccttctcttggacaagaaaattttacgaggcctacttatgggcacaggactgctgctgcaccgtgtgactggatttgtactatatgcggatgtatgaattttgcccgcaggacctcctgctttcagtgcaatgaacctcgtactgaggatgctcttccagctgatgcgacaggttccgcttcacactttgggagaaggggatctgaactaggtccaactcatgttttagttgttcgtggcttggatgaaaatgctgatgaggaaatgcttcggtacgaatttgctaagcacgcaccaataaaggacatccgccttgttcgggataagtttactcatgtgtctagaggttttgccttcgttcatttccattcggtggaagatgctacgaaagctctggaagctacaaacgggattacacttgagaaaaacggtcaggttttgcgtgtagcatatgctaaaagtacacatggacctgcatcagggggttctcagtcaaacagccttgctgcagctgccattgaggctgcatcatttgctcagcagtatgatgccataggttgggctccaaaagagtacaatcctgatgacaaacagaacaacaactctgaatctcaaaaagatggcagcacagcacagtcgggatttgtttgggatgaaaaatctggttactactatgattctgcatctggattctattatgatggaactactggcctttactatgacagcaactctggagtttggtattcatatgatcaacagactcaacaatatgtcccttgtaatgaccagagcaacactaaggcagccggggaggcggccagcgaaaacacgaaaacctcagatagtaatagtggcaaaaaggttgtgatctctgcgcctgctgccacaattaaacaaagtgagaaaacttcacttcctgacgctgttcaagctgctgcaaatgctgcactggctgcagaaaagagagaaaaggagaaggcaaaagagattaaattggcctcaaaaaatagtctcatagctaataagaagatgagcaatgtcctagctatgtggaagcaaaggaatcaagaagggcaggccgcacgaattgtccttgatgacaaagaaccagcaaattctgatgataaatttagtcattcacgtagtggaactggattctctttgaaaagcaagccaaattctgaccttgaaaatgctatgggcaattctcttggccaaggaatgacatcgactcaaacattggattctgttgtaaagcctagacctgtcagtaacagcttagggactacagttatgggtgtcataagaggttctgctagaggagtgatcaagtcagatactacgtttcacgcattatctgatgctggtagcactgattcccgcaccactataaccacaagagcaagtgggttaatgacaagttctgaggcacttataactcctgcacccttcaaaactgatgtgtctgccttagtctctaatactccatcgggagtttctgggagtggtaaacgtcggttttctgaggcaccgggacaatcccagtacagggatcgagctgcagaaagacgaaatctgtatggatcatctcatggcactgatactgttggattggattcaactggtgactatccgtcccgaaagggttcaagtgagatagggtcgatgccgtttcctcctggtgtgggtgaacgttccagtggtgaaattggcaacagcgaaaactatgaagttattaccgctgatagagcaatcgatgaaagcaatgtgggcaaccgcattctacgcaacatggggtggcaggagggactggtaaggtcatctcccacgtatttctcaatttcattgagatgctcaggcttgatagcattttctttacagtatatcatgcatctgatcacgagtgtttatgctctcttatttctcgtgctactgcaaatgcttcggcgaaagggcctgcgtaatggttaaaacttccgagtagcacctccaggtccaggtttgatccccctctggggtgaatttcgggcttggttaaaaaaaatccctcgctgtgccccgcctgctcccggattacgtcctgcacgccaccatatggttgggctgttgcagagtgggcagtgacgacccgctagtaatgggagccaggttcggggattttttctcggccgggaccatgttttggtctcttaatataataccgggagggtgttctttccctccccggctgagtttttttagtgcaaatgctttagactttggaatacggtttatgtatttttttttgaaaaaaggtaaatatgcctatttgtagtatggtagaagtgtgaaatatttttttaatgcaactctggttttagttcaagttgtgtggagcttgttaaggagttagtatcggctagcaaatcttaagcttgtcttgttgatctctttccacaaataactaatgaactgtacctgtgtcttgaatagttgattctgagtcatggctcttcctttgtgtctagactactgtgtaagaatcaagagtcactgagtctttcgcctgagcgagaagatgtttagtgggaatgaatagtttgttggacacaaaaagtgactgaatgcaggggaatcactgtgcccatatttcctacattgtggaaagtgcgaaaatagtgttgtattccttctgatgtgagtgcatttgtattgtttctgtttcttgcaactactacgcaaatatccagggtctcggaaaggatgccagcggtatcaaggaaccagtcctggcaaaatccgtcgacgccagggctggactgggaagtcagcagcggaagcctgatccatcccttgaagcccaagccggggacagctacaaaaccatcatccagaagaaggccatggcaagattcaaggagatgtcttagctacactgttttatctattttattgctgcattttgtagtccgtttttaacagcatgcatttttttgtttgctcgtgtgttttttaaataaactgagccgctgaattgtgatttattatcctgaaaggggcactacatagttcgagacctggatgctttggttcccttgtgtgttagttttcatttgcacgacctatgtgcccgggtgttcataagttgatttgccacaatgtggtcgtagagtctcaacatcaggtcatatcacatatcgtttttttaaacggtgagcatgttttctccattattactggatgaagagaaaggttcttcttggtttgagggaagggtgatttaagggattaagattctttttagaaaaatacattaagggccttttcgtttgtctcaattcatatggattggaagagttgagtgtgtttaaatctctagcaaatcaaaatctcttctaatcaatgctatctctctaatctcgatgggggatgagaataattgaacaagaacaag

SEQ ID NO: 65212 - DNA, 1746 bp, Zea Mays
gcatcacgttggtcgttgggctcggtctcgtccgctcctgctcttttctccgcacccagcgccgccgcgggcgattctagggtttcgtcgccggcggcaacaacctgcctgtagcgattcgacgtaggcatccctgttcctctcctccggaggcctgtctcctcgccatctcgtcggtgtagcctgagtgtgggtccacgccctgcagacccacgacgacggcctgcagatccagtccacctccgacgacctcgacctatctgcaacttgtggacagcctgcagaaacagctcgtattggaggctacacagaaaaacctgcacccaaaagttgtaaagctcaccaagaaccttgcaggataacacaagtgctgaattttggaaatggatcatgggcgttatgctccacaacatggatgggagaacaacagtgtaattgcagttttttcctttactaactactgaagatgatgaatagcagaattttggccttgcggttggcctgtgtatccagcgttagttgtaaaggagttcaagaagaggctgttgcttaaatggattggatttacctgcctgttctgtagaatttgttgctgactcgacttattctgttgaatctacaggcaccaaatgggtatggtgtaattaatgagccagattttaggtctggtggatcctacaatgctaggagatctgtggatgaaggctttcctagagattcatatggaaggggtgcattctatcatgatacacatgatagaaatatgtatgcatcaccaccctctgccggtggaatgtggtctcagcctcgaaggaatcatgatgaggactatgcaactgcaagagaccatagaaggcatgacactgattatcgcaatgatggaaagcatcatgagtttgattcatacagaggagttgatagactccatgataattatcgtgctactgacaactattatgaatctggcagtcaccgtgattttggtgctgataggagcaaaaggattggaagcagagaacgggcggagtttcatggtgagtttgaagaccggtaccgcagttctcaccaaagcagggaggacagctatgagagagatcatgaatatggtcgttatggttatgattcggattatgaaagaggcaagagagatagtagctggagaagacgtgattcatgtgacagcgaacgtgaaaggagtggattaagtcgtgaaagagaggaaagcccgtacacgcgccatagccgttctcgatcacatgggcgcgatgaccgatcaagatcacggtctagatcaagatctcctcgtccgagaagtcatggtcggaaccaaagagatggcctgtattatgataatcgatttgacagaagaagggaatatgattgggatgatagggggcatggtgattcagtggctccatctgccactgttgttgtcaagggactgtccctgaagactaatgatgatgacctatataagattcttgtacaagttcctcttcatcacttgttgcaccggttgaaggtgtattttctggttcaatttaatcattttgtctgttctcttgtaggctcagtggggacctctacgcagtgtgcgtgtgatcagggaacggaattctggcatgtctcgtggatttgcttttattgacttccccactgtggaagcagcccgtagaatgatggaagctacaggagagaatggtctcgaaattgatggcaggaatgtgttctttcagtacagtcttt

SEQ ID NO: 65213 - DNA, 1710 bp, Zea Mays
gacgatctcaacactaaggcagccggggaggcggccagcgaaaacacgaaaacctcagatagtaatagtggcaaaaaggttgtgatctctgcgcctgctgccacaattaaacaaagtgagaaaacttcacttcctgacgctgttcaagctgctgcaaatgctgcactggctgcagaaaagagagaaaaggagaaggcaaaagagattaaattggcctcaaaaaatagtctcatagctaataagaagatgagcaatgtcctagctatgtggaagcaaaggaatcaagaagggcaggccgcacgaattgtccttgatgacaaagaaccagcaaattctgatgataaatttagtcattcacgtagtggaactggattctctttgaaaagcaagccaaattctgaccttgaaaatgctatgggcaattctcttggccaaggaatgacatcgactcaaacattggattctgttgtaaagcctagacctgtcagtaacagcttagggactacagttatgggtgtcataagaggttctgctagaggagtgatcaagtcagatactacgtttcacgcattatctgatgctggtagcactgattcccgcaccactataaccacaagagcaagtgggttaatgacaagttctgaggcacttataactcctgcacccttcaaaactgatgtgtctgccttagtctctaatactccatcgggagtttctgggagtggtaaacgtcggttttctgaggcaccgggacaatcccagtacagggatcgagctgcagaaagacgaaatctgtatggatcatctcatggcactgatactgttggattggattcaaggttcaagtgagatagggtcgatgccgtttcctcctggtgtgggtgaacgttccagtggtgaaattggcaacagcgaaaactatgaagttattaccgctgatagagcaatcgatgaaagcaatgtgggcaaccgcattctacgcaacatggggtggcaggagggactgggtctcggaaaggatgccagcggtatcaaggaaccagtcctggcaaaatccgtcgacgccagggctggactgggaagtcagcagcggaagcctgatccatcccttgaagcccaagccggggacagctacaaaaccatcatccagaagaaggccatggcaagattcaaggagatgtcttagctacactgttttatctattttattgctgcattttgtagtccgtttttaacagcatgcatttttttgtttgctcgtgtgttttttaaataaactgagccgctgaattgtgatttattatcctgaaaggggcactacatagttcgagacctggatgctttggttcccttgtgtgttagttttcatttgcacgacctatgtgcccgggtgttcataagttgatttgccacaatgtggtcgtagagtctcaacatcaggtcatatcacatatcgtttttttaaacggtgagcatgttttctccattattactggatgaagagaaaggttcttcttggtttgagggaagggtgatttaagggattaagattctttttagaaaaatacattaagggccttttcgtttgtctcaattcatatggattggaagagttgagtgtgtttaaatctctagcaaatcaaaatctcttctaatcaatgctatctctctaatctcgatgggggatgagaataattgaacaagaacaag

SEQ ID NO: 65214 - DNA, 752 bp, Zea Mays
ggctgagtgataaaaggctgtaaatctacatgacaggccaaatattggaccaaggaacaggcccatgaactcgctaaagcgcaggaggcccggctctgttctgatatatcgctccgccgctagggttttcagggatcccgcctcacaccgccgcaaggactcgcgacggacggagcaacggaggaagcaactacgcggcagccatggtgaacgttccgaaaaccaagaagacctactgtaagaacaaggaatgcaggaagcacaccctgcacaaggttacccagtacaagaaaggtaaggatagcctttcagctcaagggaagcgacgttatgaccgcaaacagtctggatatggtggtcagacaaagcctgttttccacaagaagaggtgcaagcactttgagatcggtggtgacaagaaaggcaagggaacctctctgttctaagcgtatcataaacttgctcagggtctcaagtatctgtcagaatttaccattacaaacaccctgtgcttagcttctgcatatgttcttttgtcacatctttttggtacgttgtagtttgtatgagaccaagctattgtttcgtgttattattatatttcatgaaattgtcaacatgaccgtttgcttgactgtaaacatagttctgagctttgggcaaacaaaataaaaaaaaatcttattatgggtgattgaattccaaattcatatacatacaagttgaaaattttaagttcatattttgaggca

SEQ ID NO: 65215 - DNA, 572 bp, Zea Mays
gccagctcgggatggagagcagtaatgtgaacgttccgaaaaccaagaagacctactgtaagaacaaggaatgcaggaagcacaccctgcacaaggttacccagtacaagaaaggtaaggatagcctttcagctcaagggaagcgacgttatgaccgcaaacagtctggatatggtggtcagacaaagcctgttttccacaagaagaggtgcaagcactttgagatcggtggtgacaagaaaggcaagggaacctctctgttctaagcgtatcataaacttgctcagggtctcaagtatctgtcagaatttaccattacaaacaccctgtgcttagcttctgcatatgttcttttgtcacatctttttggtacgttgtagtttgtatgagaccaagctattgtttcgtgttattattatatttcatgaaattgtcaacatgaccgtttgcttgactgtaaacatagttctgagctttgggcaaacaaaataaaaaaaaatcttattatgggtgattgaattccaaattcatatacatacaagttgaaaattttaagttcatattttgaggca

SEQ ID NO: 65216 - DNA, 2268 bp, Zea Mays
gtgagaggctccaacttgtggagattactcagaaacgggaaacatctctaaagaagaaaaacgtgatattcaagtggatcattggatcacttgaaagggttgagtgcaacccttgtccattaggacgccacaacgtggaagtaggcaagtgatatatttgaccgaaccatgggataaaaatcgccgtgtctcttgttgctttcttgtacgattgtcttttcacttgatagttgctctaagttcaatactcactttgtgaagagcaattaagtgaagaagtcacttctctcttgtcattacatcttggtttgaattcactaacatttcataaaccaagtttatgctatttagtgttaaattttacaggatcatctattcacccccctctaggtgctcacagcaacactattcttcgtttcttggactttgcttgatacttgttgatcttcacttgtgatcttcataatgtcttcttttgaggtgttgctttcctcaatgtcttagtccaattaactttagcatcctgtgaactacaaacataaacactagcaaacacattagtccagaggttgtgttgatcatcaaacaccaaaacctattgagccaaatggcccggggaccattttccttacacttttcttctggcacactaaatcctttgctaatagcagattgaagcacccctgcgtctgatgccgtcccttcccatccacatgagacaaatttgaaattgagattaaagtcacatactaccattacattatgtgaaagagttccttttctatttctatatggaggggccctgtcttctgcgatagtgatgggtacatgtgtgccgtcaatggcactaaggcaattttgcattaaaggaagaaatatggaaatatgttgaggacatgtggcaattagcaaaggataattgtgtgtttacagttgtagctcacctggaaaaagggcttgaaccaagaatctgttgcaatcctagcatgagtataagtgagctaggaagcttcataaatcgttgagtaatatgggaactatctcaaaaacttcagatatttttcgatggatagtctccccactatgttgaaaagcctttttgtaacatttggttactggcgttgtgggagatcatatacatgaacatcccaagctgctcctcaatgctaaatcctcttgtgtcatgtagtaaatccccccttctaagaaaatttgatgtggctttgaatatttcgttctccattctaaactcagatttgcaccagctctcatgcccttcaagaatttatttaacctttttagcactggtgagggaggatgtgtggatgggccttttctcttccgagaggtatgggattatagcagggagaacaacaaaaaatagttcatcgtcatcttcctcctcctccaacaaaaattgcctaacatgctcctcccaagaacccattatctagaaatataaaatttaatcatgcacttatatagttgtgctacctctcattagtacgtgataatctactaatctgaacaaaacaataagcaagtaatattgaaagcaataagcaagtaattcaccaaactttagcattaagcaaagcattttcttatccacaaaaaactaacagcaaataccatgaaagaggaggacattttaagtttcaatgttgtgtttcgtgcaaatatactaaatagtaatatataatcttaacgctatatacaaaatccatacagccacagatccaccatcccaaacagctaggcactatatatatatattattctattaaattatccacctcgaagaaccctccatatctttctatagacaatattagtatttgaatttgctacaacttgataagttgttactggtaacaatgatcatttccacttaatagcactttgctcaatcaaaactacatgggaaagaacttcaaactagctagtacaacacaactacaggagacaacaaaaaatgtgaatccatgacaatgcagactgacgcatataccgcatccaagcttagatatgaacacatttatgaatttaaatggctgccgcccacaaagaaacaagaagcaaatttggtattcatgtgtacaccgcattgggcaatctgatgggaattgaagtcgctacttttgaacagacaagcacaaatcagcacacaagacgttatacttggaggcatacctcactagcgctggggtttggatcttggaggagagacggctgtgtaaggaacgaagaagagcacacacggagttg

SEQ ID NO: 65217 - DNA, 852 bp, Zea Mays
agtgcagccttgctgatttgaccgagctacgcgtagcagcgccgagcaccaatgcccagccacgcgcgtgcccaagccatgccactgccacgccagaatgcagtagcccgaaaccaccgccactcagtcattcgtccatcgtaatgtctaccattaatggagctccatggcatgcgtttctctggatttatggtgcagctatggccacgggaccgcgtgaagtctgcagccccgactcctctgcttcccctctcctctcctataaaaggcagcatccccttctgcactccctcacagcgttcctccaaccttcttgttaatctctattcatccccaccgttgcgttgcagtcgacgccgtcatataacaccgatcggagctgccgacgcggtttgccgccgacgaggacgccccgaagccgacacagtgcttccgtcaaccttcctccgtgccgtcctctgttcatcgccgtcgttcgagagctccgaagctaattgtgtggtagaggattcgaatttgattgaggacaacccacaggacatgcttgagcaaggcaagtggattctccctcttcatattctatttgtaccaatcaatgcatataataatgtttaatttttgatatactgcataatttgattggttttacctaattaaggatttcctagatttaccaactgtattccttgtttaccctgggaaattataaagctttgcaatttgtgctaccgctcaacttattaattttgaagtcactcattaattgatattaatgttccaaaattgaaattggcaattatgacattaacccgatggttaaaacaacattattttaaattaattagaacatgg

SEQ ID NO: 65218 - DNA, 2263 bp, Zea Mays
cgccgtacagcttcggcgtgctggtcctggaggcgctgactggcaaggcgcctacacagcacccgcagcccgacgcgcgcaagaagggcgcggcggcgacgagcctgagcctccccggcgcccggcgctctgcctccagcccccatggcggccgcggtctccagctggcttcccgctactactacctctcccaggtcgccagccaagtctctactccagccgcggggcagggcgcgaacagcccctatgctcggttccctgtcctccccttcgctgcgtcccttgcacgtgcaccctcctcttcgctacgtcctccgtcggcaccctcccacgtgccgccctcctcatcgcgctagccacctcctaattgctcgcgctgacgccccagcagcgcctcccacttcaagcttctcccgtcgccggtgccgtcaacaccctttgccaggtccgacgcagacccctgcccggctggacacgccccgccgcccacccccttcttcgccttcgctggatccgtcgctgccgcggccttcccggccggatccacgttgctgcgtccttctcggctcgatccgccatccctttggccggatcgccgtcttcatggctggattcgtcgctgccgtggccttcccggccggatccaccgataccccttctactctgcagcgggcgcggacaccctgaccggcgcagtcgcgtgcgctgccgtcggcctccctggcggggctccttgatgcctggacgatcaacgaagcaggaaggtcggcctgctggtgcccttttgctgtgtcgccctgtcgatcgttgacgctcgaacgtcgacccctcccgaagatcagactatatggcaatggcaatcaatttccctcaatgggccatagaagcaattgataaaataagaaaaggtttcctctggcgaggtagaaaggaggtgaaagggggacattgcttggtggcatggggaaaagtgtgccgacctttgcagcttggaggtctgggggtattgctagccttcctgagctctgttgggccctccgcatgcgatggctttggttgcaaaaaagtgacccaagacgtccttggtctagtctgtccattcaagtccctagcaaagctcgatccttcttctccaaggtgctgatttctgaggtggggaatgggatcaacaccatgttttggacagataaatggatcccagatattgctcccagattatttagcattgtcccaaaaagaattactaacagaaggactgtgcagcaggctctattgaacagacgatggattgcagacatcaaaggggctcttacagttgaagccattgtagattatctacacctttggaatatcctcgcatattttgtgctgcaacctaacaggctaacactgaggatagacacatttcagcttatcatcgaatggcagctactctgcaaagtcagcttatactgggtttttcttagggtctaccacctttgggcactataaaagggtttggagatcttggattcttgggctcctccgaagtgctgttttttcatttggctggtggcccataatagatgttggacagctgatcgcttggcaaaagggggattgaatcaccctaccagatgtcctttatgtgcaggggggcggagctatagggtatgttgggtatgccccggcataccctgtgttccggcaagcgagcatgtatatatgtattttcaaaagaaaaaaccttaccttaatacttgagaatggagagccgaacgtgcaatagaatctgaaccagcatcagccccacgcggcatgatgtactagtccattttgagaatgttccttcacacaaatgattggaccaaaatacattttgtgctcagtgcatttgagacctttgaatttgttttgtttgcatacttaatgtatattgttcttggatagacaaacgacatctgagtgtttgcaaaggagtactataatacaagtgaattgccaaactctccatcagtttagcttttgattaaactaattgcatgcaactcaatagagatcgatatgaatttattgtcttgtatgtcgatcttcaatccttctaattcatttgcttcttttgaggcacataagctgaacaaactagctgagttctaatcaaagaagtctttggtactcctttatgcctatatttcaattatcgacatgacttttgaactatttatatatttagtggatggtttcaacttaatccatgaatttagattttatcgtgttacttaac

SEQ ID NO: 65219 - DNA, 2570 bp, Zea Mays
gagacagtaaatggtctggtcaggaaaggtcttgactccctcgttattttaggatcctggatgatttggaagcatcgcaatagagccatctttgatggagggtctccgagccttcctctggttttggagcaagcagataaggaaagaagaagctgggaaattgctggagccaatgggctctcctttttggctgccccctgcataggttgccgtagggagtgtgtgtgtgtgtgttatggttcctttcatgtccgggtgttactggcctccataaggagtgcgttgttttttgggtcactttagacccttgtttctctccttaatatatatctgaaacacagtcctcttgcgtttttcaagaaaaaaaactccaagaacatcaaggagggaagaccattggtgaagatatcggcaaactgcaagctcgctaggacgtgatggacgcggacgtccccaacgacaacatgctcatgaacgaagtgaagatcgatctcgacatgcttcgtgcttttgatgttctggggtagtgttcataaggatagtgttctggggtcatagtctatagatggattctttttaatatgcctgtttttggcccccgtaaggggatcgttgtatctgggctagtctattttggaccttttttcctatcttaatataatgagacgcggttctcctgagcgttcgagggaaaaaagatttataataaatgtactatccagtaatcataacgttacaatcataaacaatatgatataaaataaataaatgatcaaaatataatttaggaggttgttcggctgttccatattagggtatgccttagagcaactcttgtgggagtcctcaaatcagggtctctacttttgattttttttatcgaacgcgcaggagaactgcgcatcttatatattaagaaaaaggagatagaggtctaaaatagacccagtacaagctgccaaaaaattagatcaagacagatccgcatgcacacgggtaagagggcctcctctcctctcttggctcgcgctccagtgttattaaaactaagtttaaacgtcaaaactctaattagaggttgaaaccacgttttagcgttttggcgttctaaactgtaaacgcagtgttttatgcattttagaccattagctacttttgggcccagtctattagttacttttggggttcaatccagctcatgggtgaagttttggtaagccactaacctatctgttttggtatttaacttcatattattgtctgaaattatgatgtattggtatttttcctatgttgtttaaaactacgtttaaactttgtttaaacgtttaaaagacaaaacttcacccatgagcgtttcaacgttttatcgttttaataaccttgtcgcgctctggttgaggaggcagagacggtgcccaatgcgaatgcgggtgcactaggggggagggccatgctggtcacgaccagagcaaggtacgttggcagccatgcggtgctgcagctcctcctcaggggtttccacgccatcatcgtcgacaacattcacaactccaagcttgttggcccacgccagggaaggaatcgggggaagaggacaacacgttggcggatctgttgggcaaaaagccacacgggggaggtggatccttcggggcaagaaagtcgtgccaagggaggtggagccgccgagatgggagccgggcaaccatgccaactgggagggtggagcttcgggtgtccgcatgatgagaaggcattggacgagcacccttctatacgaaaccgaaaagataatttgccgaaactgtaaagtagaggctacctctagaacctcaagaatgagggtcgagggggagatttgaagggtatacccagtgtcggaggctcccacatgagtggtatatgaggaatggagaaacctagacaaaacttccccccgcaaatgcggaaatactatttcgaacatgtgacctggtgactcaatgagaaagctctcaccacttcccttcaaatttgaaggggccctcaaatttgaaagctacagtagaagccctgctgacagctggagttcgtttttttggcttcggccctcgaatttgattttgagggctcaagtaagcgatggaattgctcttgtaaattggactgggggagtatatgaactcgcagccccagcccctccctgttactagtttaactaatgtcataaagtccactctaaccatcccataccactgtgcagaaaatacaaaaaatgaacctttgtcaaaacacttgagcaactaagtaacacttacatggtatctaaaatgcaacattcaaccctaatttttctaatattatatttataaagtaaaatgagattatatcactgtaaataaattagattatcaaaggaactacatacctgccattttgaagcttcagaaactcaactttctcagatgaacacacaacagtgccaccttgagcagctgcaatgaagttactgtaagcaatatctcacacttggacatgcatgcatattaaatatactaaacctaaaataagcacccaagctgtgatct

SEQ ID NO: 65220 - DNA, 1724 bp, Zea Mays
catggaaacctgttctttgtccatcatgtgtatctcctatcacatgaaaaagttggaggaaaagtaatacaccgccaagggggtgtcatatttctttttcgtggtagaaactacaattacaggacccgcccatgttttccgcttatgctctggaaacccgttgcacctgtgtacccgcgccttgtcacgaaggtcccaggtggcttaactccagatgaggccacagaaatgcgcacgagaggacatcagttaccaccaatttgtaaacttggaaaaaatggtgtttatgccaaccttgtgaaccaagtcagagaagcatttgaagcatgtgatcttgtccgtgttgattgctcaggtcttaacaaaagtgattgcagaaaaattggagctaaactaaagttccttgtatcttactgtcttttgagtttgagcatatactgatgtggagaggaagtgattggaaatcatctcttcctccattagaaaatagttatgaagtgacgaaggtgcaagaaagttttagtggcaaagaatctaatgaaaaggttacacattcaggaaatgttctggcccagattgagttggtcagtgctgcaacatctcacaagaactggaacttggatgaaggtcaagaaaaatttaaagattccactgacagtgatatggtactgaattctgcaaaggatgttcctgcattgttccattctactggtatatctagaactgaaccctcagcagacattccattggaatattccccattaaatccagtatgtgatattatggatccatccctgaactgccgaagtatcccaacaaacaactgtgaaagtagagctctggtagagaagtcagaacattgtccggatgattataatttggaaatgaagaggaaaagaaacgatggtacaaaaggtacagttgttctaaatagcggttctaaagtagagggattgttatgtcttttggaacaggccattcacagtggcagggcacttgttctgagtgaagatgagcttgctgattcagatctggtctatgaaaagtctgttgcttttacaaagtcaattccgcgaagactggtttttgagaatactcgaaggaagtccagtgccaggagaaatgtgccagacaatcatgcaagaactaaaacacatcttgtagaaaataaaatgttgagcagtcctgttgaaaataaatttatcgttaatggaggatctgcaatgcagacaattgaccatggacaagagtttctttctgatgttgttcatcaaggtaccttaagagtagatgaactagcaaagttactagcttgagaggtgattgctcttttattaaccacacagaccagtatcaacatcctttgaacacatatgcaagatttgcatgaactctgaatttggttaaaacaggtctcaggtctgttgcgtcgtggcgagtcctttttaaccttgaaatactgaactatggtgctgtttggttcaaaaaatgtaacgcaaatggtaatggtaatggtttcggctcgattactggcggtaacaaatttgaataggctggtatcaaattttagtgtggtatctgattacggttggactaaaacaaacatgatttaacgttatccgttacccattacgttacaaatatatgaaccaaacggcacctataatcctgtgcgatgtacaaacaaccttcagaatacatattctctgatttgtctgttgtca

SEQ ID NO: 65221 - DNA, 1731 bp, Zea Mays
catggaaacctgttctttgtccatcatgtgtatctcctatcacatgaaaaagttggaggaaaagtaatacaccgccaagggggtgtcatatttctttttcgtggtagaaactacaattacaggacccgcccatgttttccgcttatgctctggaaacccgttgcacctgtgtacccgcgccttgtcacgaaggtcccaggtggcttaactccagatgaggccacagaaatgcgcacgagaggacatcagttaccaccaatttgtaaacttggaaaaaatggtgtttatgccaaccttgtgaaccaagtcagagaagcatttgaagcatgtgatcttgtccgtgttgattgctcaggtcttaacaaaagtgattgcagaaaaattggagctaaactaaaggatctagttccttgtatcttactgtcttttgagtttgagcatatactgatgtggagaggaagtgattggaaatcatctcttcctccattagaaaatagttatgaagtgacgaaggtgcaagaaagttttagtggcaaagaatctaatgaaaaggttacacattcaggaaatgttctggcccagattgagttggtcagtgctgcaacatctcacaagaactggaacttggatgaaggtcaagaaaaatttaaagattccactgacagtgatatggtactgaattctgcaaaggatgttcctgcattgttccattctactggtatatctagaactgaaccctcagcagacattccattggaatattccccattaaatccagtatgtgatattatggatccatccctgaactgccgaagtatcccaacaaacaactgtgaaagtagagctctggtagagaagtcagaacattgtccggatgattataatttggaaatgaagaggaaaagaaacgatggtacaaaaggtacagttgttctaaatagcggttctaaagtagagggattgttatgtcttttggaacaggccattcacagtggcagggcacttgttctgagtgaagatgagcttgctgattcagatctggtctatgaaaagtctgttgcttttacaaagtcaattccgcgaagactggtttttgagaatactcgaaggaagtccagtgccaggagaaatgtgccagacaatcatgcaagaactaaaacacatcttgtagaaaataaaatgttgagcagtcctgttgaaaataaatttatcgttaatggaggatctgcaatgcagacaattgaccatggacaagagtttctttctgatgttgttcatcaaggtaccttaagagtagatgaactagcaaagttactagcttgagaggtgattgctcttttattaaccacacagaccagtatcaacatcctttgaacacatatgcaagatttgcatgaactctgaatttggttaaaacaggtctcaggtctgttgcgtcgtggcgagtcctttttaaccttgaaatactgaactatggtgctgtttggttcaaaaaatgtaacgcaaatggtaatggtaatggtttcggctcgattactggcggtaacaaatttgaataggctggtatcaaattttagtgtggtatctgattacggttggactaaaacaaacatgatttaacgttatccgttacccattacgttacaaatatatgaaccaaacggcacctataatcctgtgcgatgtacaaacaaccttcagaatacatattctctgatttgtctgttgtca

SEQ ID NO: 65222 - DNA, 374 bp, Zea Mays
ccgcggtggtttaagtagtacggttcccggccacggtagcccactggttcgcgacagcataacaccggagcaatggttggcgagttggagcacgggagcaggccgggttagcgtggttggccgctgggcagggacgagcacagacatggccagatggaagatggatgcaggatctgcccatggaggtgcagaggcacggctccatggccaggagatggatttataccgcccagaccttgactccgagcggccagccggcacgagaaagatttttttatgcgagctattttgttgctgcatgcggccaggcgggggagttcgcggagcagttggcaactaacgcggcgagaaagatagacctgggaacgagtttg

SEQ ID NO: 65223 - DNA, 432 bp, Zea Mays
cagctactagtcacatgggaggcccatctagaaaacgcaggccggatcgtacagccaggcccagctcctcgggttttattgtccgagaccctctcgggatctcactgcgctacgagcctacgactacgagagtcggtcgcggctccgtccgtaccctcccgtcggcgaagtcacgcccatcccgtcccaacggtagcagtaacttcaggatttgtggccgggacaagaggacaaggctccgacccagcgggcagagtggtctggcgactcaggttgcccaggatggaggagaaaggcgaggtccggtttgtggccagcgaacaaggttatgtggaaaattatacaagacaatttctactcagctaagcctccaagcttgttttaagtgctgagagaatgtagccatacagcttcagcgatggcattaaaaat

SEQ ID NO: 65224 - DNA, 1745 bp, Zea Mays
cttccccgcgcgctcctcctcctttctccgaaacgagcgtctctcccatggcttccctacgcgctagccgctgcgcgcccgggtcctgctcctccctcttctctggcctccgcgccctagcccctctgctcgctcggcgcccatctcctacggcgcctggccgaagctccctgctcagttcctcctgcgccgcgcccagctccctcctctcaagctctgtgtgcgcgcgcccatatcccctgctcctgcgcgtcgcaacttcccttccgtcgagccctgcatctccatggcacggacgtctgcgtcctccatctcctccttccccagcaggtgcccatcgtccccgacctcgcgtggttgggccgctccagcgccggtcgtcgcttaccgagccatggagtttgtacttgtgctcgaccaccacttcgccccagccgctgtggggtttggtcatcagcagggtgctgctgtgggcacatgcctccctcctcgagcaccaatcggagttcgggtcgtcagccgctgtgctgctcagcttcctgctgcacatgttcggcccatcaatgtctacttattcggtggtcgcatctcgcgctagtacttgcccaagtcaccgccgtcgcccagcttggcctctgctctgtccctgcggcgctccagctcgtcggcgcttggtttccagctcggccttgccatcccccgcgcgcgccccatttttcatggcactcggcagcgcagagtcttcatcagccatggcgagttcctcgctgccacggctgtccggtgtttggcccgcgccgtccctgctcctctcggcgactcggccagctgcttgcgtgtgctgcgcgacctcgcgtccgagatgggcgcgtgaatgacgtgaggaagacgctgcatatgcttgtgtccgagctcgtccggccacaacctcgtcgaaccgcgaagctccctcgtcgtgcgctctgacatcggctgccgccgattctgccattgagttcacgagtgctccttgctctgttcgtttcgccatgggcaatttctccacgctttaaatccatgctgctcgccccgcatgcgctcgctccgatgttcgcgtttgtcgtcgagtcgtcgaacccgtcatcccctgctcgactcccaagcaaaccccctgatccgcgtcctgctcgccgtcgactctcggcaccacaagctcattttcccttgttcacatcccccacagaccctgtctcatcacgcatgtgcgttatcgatctcgtcgtcgtttcgtacatcctcaagaaatacaaagagtcgggtgaagacgaagctagcagcgtgatattcaccaagtgctcgacaaaaagctcgaacaagtcgtcgatcgtcatcctcgtctacgccaaagatccgagaagattaggcgcagaaggaaataaattagtacgcggccggagaattctcgatgtggatgaagatgaagcgcgattcgacgcagcactcgccctattttcggtgaaatactgagctgaaaggtggcgtcaatttcgtgatttcaagtcggatttaattgatggtaagttgattcgttattccagtcaactaggtatataaatagattaaatagaattgttggtcgcgataattattattaatttatcataagtatattgtgacgttcgatctagatgaatcgataaatcaagttaattaagatactgttgggcctatgcttcgtcgtcgaaggtcttataggaagaagcggt

SEQ ID NO: 65225 - DNA, 2156 bp, Zea Mays
attctttctctcttgttgtaactaaaagcatccacttactaatgtatatatatgttaaatcatcaatggaatactgatagagattcattttctacattcgctatcaatcattttgccttaaaaaactatatagcaaaagtacccatgcacaaattaccatctctgtcagacccggccgccacgtctgctttgcttccgagtggcgcgaacatattgatcctttgtcgaatctagaatctcccaccgtcccgcgcctctttcccttgttccagccttccaggtatccagctggcagttgtgctgcttgtacagagagaggctggcgacgtccgggcctggtcgggcccacgtgatcttccgccgttctggaggcgccggtggccgccgcctcaggttgcttcgccagcgcgccgtgccagcgggggagatggcagattcgcgcaccttatcgccgcccgccaaagaaacctcctgcgcgtcgcccggacccgccgacccgcctgcccgcctggtgctcgacctaatgccgcggcgccccccggcatccaatctttatatgaaggctagtttttatatgaaggagcaccgtacatcaatccaagccgagttccacctcgagtgtattggcacctcgttcaagtacaaagcaaaaaactcatcacaaagatgagtttcagatccatcgaacaattacttaggaggaacagcaaaaccaaaatttctcgcaatatcgttgaccgcaaccatgaccagaaggaagagcagttagtacaatccttgagggagttacttcttgcaagcaaacagctcccagataagtttgatgactactatgtccttctacgctttcttaaaatgagaggcttcaacatcttaaaagcaaaagagatgttcttaaatatgttaaaatggcgtgaagattgttccgttgatgccattgcgaacgattttaaatttgaggagtatgatgctgtgaaaagatgctatcctcatggatttcatggagttgacagatttggtaggcctctctatattgaacgagttggctcagtggatctcagtaagctcatgcaagtgactactattgatcgatatgtaaaatatcatatatcagaacaagagaaaactatatctttgagatatcctgtttgctcacttgtggctaaaaagcacatagcatcgacaacagccatatttgatgtgaaaggactggggttgaataacttttcaaaatctgcaagagagatgtttgcagaaatccaaaagatcgatagcaattactatccagagacattaaatcaactttatataattaatgctggaactggatttagagcactgtggaaggtattgaaaacattcatggaggcaagaacattagcaaagattcaggttctggggaccaattaccttaacacagtattagaagctgttgacccaagcaatttaccagaatttttaggcggaacttgcacttgtccaacaggaggatgcttactccaagataaaggaccctggactgacccagaaatgattcgtgcttctaaggaagcattcggtaaaggtcagaagtctttcaatgaattggctgccacaattgcctgtgaaagctttacaggttgtcaggttggatttgatacaggtgaaaatattctacggaaacaagtcgatgaacagatcttggagaagatccgagaacttgaacactgcgctgctaagagtggggagaccctgcagatattaatatgcaagcaacaagaactcactggccacatcgaacagctgaggaaaatccttcagtgagaatgtgatggcgtgggttcagatatgaaagccgacatataaaactcgaaggtagtgcttgccaaaggtgaagaaaatcaaaagggacaagaagcgaagccatcgatgtaatgtaataaagaaatatgcaccctagttttctgtgatgaatctttaacccctatgagctgctaaaacactcacttgtgaatgtcaatatgtcatagtattattgtacgccatgattatactcgcaacgctgtctacggctacgtactcagaagttctgtaccaatgttaaataaatggtacacatgtaatttaccgtcatccagcagttttaggtatttctatgcaccgagactagattcaag

SEQ ID NO: 65226 - DNA, 2078 bp, Zea Mays
atctctgtcagacccggccgccacgtctgctttgcttccgagtggcgcgaacatattgatcctttgtcgaatctagaatctcccaccgtcccgcgcctctttcccttgttccagccttccaggtatccagctggcagttgtgctgcttgtacagagagaggctggcgacgtccgggcctggtcgggcccacgtgatcttccgccgttctggaggcgccggtggccgccgcctcaggttgcttcgccagcgcgccgtgccagcgggggagatggcagattcgcgcaccttatcgccgcccgccaaagaaacctcctgcgcgtcgcccggacccgccgacccgcctgcccgcctggtgctcgacctaatgccgcggcgccccccggcatccaatctttatatgaaggctagtttttatatgaaggagcaccgtacatcaatccaagccgagttccacctcgagtgtattggcacctcgttcaagtacaaagcaaaaaactcatcacaaagatgagtttcagatccatcgaacaattacttaggaggaacagcaaaaccaaaatttctcgcaatatcgttgaccgcaaccatgaccagaaggaagagcagttagtacaatccttgagggagttacttcttgcaagcaaacagctcccagataagtttgatgactactatgtccttctacgctttcttaaaatgagaggcttcaacatcttaaaagcaaaagagatgttcttaaatatgttaaaatggcgtgaagattgttccgttgatgccattgcgaacgattttaaatttgaggagtatgatgctgtgaaaagatgctatcctcatggatttcatggagttgacagatttggtaggcctctctatattgaacgagttggctcagtggatctcagtaagctcatgcaagtgactactattgatcgatatgtaaaatatcatatatcagaacaagagaaaactatatctttgagatatcctgtttgctcacttgtggctaaaaagcacatagcatcgacaacagccatatttgatgtgaaaggactggggttgaataacttttcaaaatctgcaagagagatgtttgcagaaatccaaaagatcgatagcaattactatccagagacattaaatcaactttatataattaatgctggaactggatttagagcactgtggaaggtattgaaaacattcatggaggcaagaacattagcaaagattcaggttctggggaccaattaccttaacacagtattagaagctgttgacccaagcaatttaccagaatttttaggcggaacttgcacttgtccaacaggaggatgcttactccaagataaaggaccctggactgacccagaaatgattcgtgcttctaaggtaaggaagcattcggtaaaggtcagaagtctttcaatgaattggctgccacaattgcctgtgaaagctttacaggttgtcaggagccttccgcaaaacaagtagattccacttctcgtaagagaagaactcttggcatgttgttcaaagatgatcaggttggatttgatacaggtgaaaatattctacggaaacaagtcgatgaacagatcttggagaagatccgagaacttgaacactgcgctgctaagagtggggagaccctgcagatattaatatgcaagcaacaagaactcactggccacatcgaacagctgaggaaaatccttcagtgagaatgtgatggcgtgggttcagatatgaaagccgacatataaaactcgaaggtagtgcttgccaaaggtgaagaaaatcaaaagggacaagaagcgaagccatcgatgtaatgtaataaagaaatatgcaccctagttttctgtgatgaatctttaacccctatgagctgctaaaacactcacttgtgaatgtcaatatgtcatagtattattgtacgccatgattatactcgcaacgctgtctacggctacgtactcagaagttctgtaccaatgttaaataaatggtacacatgtaatttaccgtcatccagcagttttaggtatttctatgcaccgagactagattcaag

SEQ ID NO: 65227 - DNA, 1970 bp, Zea Mays
ccttgttccagccttccaggtatccagctggcagttgtgctgcttgtacagagagaggctggcgacgtccgggcctggtcgggcccacgtgatcttccgccgttctggaggcgccggtggccgccgcctcaggttgcttcgccagcgcgccgtgccagcgggggagatggcagattcgcgcaccttatcgccgcccgccaaagaaacctcctgcgcgtcgcccggacccgccgacccgcctgcccgcctggtgctcgacctaatgccgcggcgccccccggcatccaatctttatatgaaggctagtttttatatgaaggagcaccgtacatcaatccaagccgagttccacctcgagtgtattggcacctcgttcaagtacaaagcaaaaaactcatcacaaagatgagtttcagatccatcgaacaattacttaggaggaacagcaaaaccaaaatttctcgcaatatcgttgaccgcaaccatgaccagaaggaagagcagttagtacaatccttgagggagttacttcttgcaagcaaacagctcccagataagtttgatgactactatgtccttctacgctttcttaaaatgagaggcttcaacatcttaaaagcaaaagagatgttcttaaatatgttaaaatggcgtgaagattgttccgttgatgccattgcgaacgattttaaatttgaggagtatgatgctgtgaaaagatgctatcctcatggatttcatggagttgacagatttggtaggcctctctatattgaacgagttggctcagtggatctcagtaagctcatgcaagtgactactattgatcgatatgtaaaatatcatatatcagaacaagagaaaactatatctttgagatatcctgtttgctcacttgtggctaaaaagcacatagcatcgacaacagccatatttgatgtgaaaggactggggttgaataacttttcaaaatctgcaagagagatgtttgcagaaatccaaaagatcgatagcaattactatccagagacattaaatcaactttatataattaatgctggaactggatttagagcactgtggaaggtattgaaaacattcatggaggcaagaacattagcaaagattcaggttctggggaccaattaccttaacacagtattagaagctgttgacccaagcaatttaccagaatttttaggcggaacttgcacttgtccaacaggaggatgcttactccaagataaaggaccctggactgacccagaaatgattcgtgcttctaaggaagcattcggtaaaggtcagaagtctttcaatgaattggctgccacaattgcctgtgaaagctttacaggttgtcaggagccttccgcaaaacaagtagattccacttctcgtaagagaagaactcttggcatgttgttcaaagatgatcaggttggatttgatacaggtgaaaatattctacggaaacaagtcgatgaacagatcttggagaagatccgagaacttgaacactgcgctgctaagagtggggagaccctgcagatattaatatgcaagcaacaagaactcactggccacatcgaacagctgaggaaaatccttcagtgagaatgtgatggcgtgggttcagatatgaaagccgacatataaaactcgaaggtagtgcttgccaaaggtgaagaaaatcaaaagggacaagaagcgaagccatcgatgtaatgtaataaagaaatatgcaccctagttttctgtgatgaatctttaacccctatgagctgctaaaacactcacttgtgaatgtcaatatgtcatagtattattgtacgccatgattatactcgcaacgctgtctacggctacgtactcagaagttctgtaccaatgttaaataaatggtacacatgtaatttaccgtcatccagcagttttaggtatttctatgcaccgagactagattcaag

SEQ ID NO: 65228 - DNA, 1872 bp, Zea Mays
tggcagttgtgctgcttgtacagagagaggctggcgacgtccgggcctggtcgggcccacgtgatcttccgccgttctggaggcgccggtggccgccgcctcaggttgcttcgccagcgcgccgtgccagcgggggagatggcagattcgcgcaccttatcgccgcccgccaaagaaacctcctgcgcgtcgcccggacccgccgacccgcctgcccgcctggtgctcgacctaatgccgcggcgccccccggcatccaatctttatatgaaggctagtttttatatgaaggagcaccgtacatcaatccaagccgagttccacctcgagtgtattggcacctcgttcaagtacaaagcaaaaaactcatcacaaagatgagtttcagatccatcgaacaattacttaggaggaacagcaaaaccaaaatttctcgcaatatcgttgaccgcaaccatgaccagaaggaagagcagttagtacaatccttgagggagttacttcttgcaagcaaacagctcccagataagtttgatgactactatgtccttctacgctttcttaaaatgagaggcttcaacatcttaaaagcaaaagagatgttcttaaatatgttaaaatggcgtgaagattgttccgttgatgccattgcgaacgattttaaatttgaggagtatgatgctgtgaaaagatgctatcctcatggatttcatggagttgacagatttggtaggcctctctatattgaacgagttggctcagtggatctcagtaagctcatgcaagtgactactattgatcgatatgtaaaatatcatatatcagaacaagagaaaactatatctttgagatatcctgtttgctcacttgtggctaaaaagcacatagcatcgacaacagccatatttgatgtgaaaggactggggttgaataacttttcaaaatctgcaagagagatgtttgcagaaatccaaaagatcgatagcaattactatccagagacattaaatcaactttatataattaatgctggaactggatttagagcactgtggaaggtattgaaaacattcatggaggcaagaacattagcaaagattcaggttctggggaccaattaccttaacacagtattagaagctgttgacccaagcaatttaccagaatttttaggcggaacttgcacttgtccaacaggaggatgcttactccaagataaaggaccctggactgacccagaaatgattcgtgcttctaaggtaaggaagcattcggtaaaggtcagaagtctttcaatgaattggctgccacaattgcctgtgaaagctttacaggttgtcaggttggatttgatacaggtgaaaatattctacggaaacaagtcgatgaacagatcttggagaagatccgagaacttgaacactgcgctgctaagagtggggagaccctgcagatattaatatgcaagcaacaagaactcactggccacatcgaacagctgaggaaaatccttcagtgagaatgtgatggcgtgggttcagatatgaaagccgacatataaaactcgaaggtagtgcttgccaaaggtgaagaaaatcaaaagggacaagaagcgaagccatcgatgtaatgtaataaagaaatatgcaccctagttttctgtgatgaatctttaacccctatgagctgctaaaacactcacttgtgaatgtcaatatgtcatagtattattgtacgccatgattatactcgcaacgctgtctacggctacgtactcagaagttctgtaccaatgttaaataaatggtacacatgtaatttaccgtcatccagcagttttaggtatttctatgcaccgagactagattcaag

SEQ ID NO: 65229 - DNA, 1083 bp, Zea Mays
cttgtacagagagaggctggcgacgtccgggcctggtcgggcccacgtgatcttccgccgttctggaggcgccggtggccgccgcctcaggttgcttcgccagcgcgccgtgccagcgggggagatggcagattcgcgcaccttatcgccgcccgccaaagaaacctcctgcgcgtcgcccggacccgccgacccgcctgcccgcctggtgctcgacctaatgccgcggcgccccccggcatccaatctttatatgaaggctagtttttatatgaaggagcaccgtacatcaatccaagccgagttccacctcgagctttcttaaaatgagaggcttcaacatcttaaaagcaaaagagatgttcttaaatatgttaaaatggcgtgaagattgttccgttgatgccattgcgaacgattttaaatttgaggagtatgatgctgtgaaaagatgctatcctcatggatttcatggagttgacagatttggtaggcctctctatattgaacgagttggctcagtggatctcagtaagctcatgcaagtgactactattgatcgatatgtaaaatatcatatatcagaacaagagaaaactatatctttgagatatcctgtttgctcacttgtggctaaaaagcacatagcatcgacaacagccatatttgatgtgaaaggactggggttgaataacttttcaaaatctgcaagagagatgtttgcagaaatccaaaagatcgatagcaattactatccagagacattaaatcaactttatataattaatgctggaactggatttagagcactgtggaaggtattgaaaacattcatggaggcaagaacattagcaaagattcaggttctggggaccaattaccttaacacagtattagaagctgttgacccaagaatttttaggcggaacttgcacttgtccaacaggaggatgcttactccaagataaaggaccctggactgacccagaaatgattcgtgcttctaaggaagcattcggtaaaggtcagaagtctttcaatgaattggctgccacaattgcctgtgaaagctttacaggttgt

SEQ ID NO: 65230 - DNA, 1355 bp, Zea Mays
cttgtacagagagaggctggcgacgtccgggcctggtcgggcccacgtgatcttccgccgttctggaggcgccggtggccgccgcctcaggttgcttcgccagcgcgccgtgccagcgggggagatggcagattcgcgcaccttatcgccgcccgccaaagaaacctcctgcgcgtcgcccggacccgccgacccgcctgcccgcctggtgctcgacctaatgccgcggcgccccccggcatccaatctttatatgaaggctagtttttatatgaaggagcaccgtacatcaatccaagccgagttccacctcgagtgtattggcacctcgttcaagtacaaagcaaaaaactcatcacaaagatgagtttcagatccatcgaacaattacttaggaggaacagcaaaaccaaaatttctcgcaatatcgttgaccgcaaccatgaccagaaggaagagcagttagtacaatccttgagggagttacttcttgcaagcaaacagctcccagataagtttgatgactactatgtccttctacgctttcttaaaatgagaggcttcaacatcttaaaagcaaaagagatgttcttaaatatgttaaaatggcgtgaagattgttccgttgatgccattgcgaacgattttaaatttgaggagtatgatgctgtgaaaagatgctatcctcatggatttcatggagttgacagatttggtaggcctctctatattgaacgagttggctcagtggatctcagtaagctcatgcaagtgactactattgatcgatatgtaaaatatcatatatcagaacaagagaaaactatatctttgagatatcctgtttgctcacttgtggctaaaaagcacatagcatcgacaacagccatatttgatgtgaaaggactggggttgaataacttttcaaaatctgcaagagagatgtttgcagaaatccaaaagatcgatagcaattactatccagagacattaaatcaactttatataattaatgctggaactggatttagagcactgtggaaggtattgaaaacattcatggaggcaagaacattagcaaagattcaggttctggggaccaattaccttaacacagtattagaagctgttgacccaagcaatttaccagaatttttaggcggaacttgcacttgtccaacaggaggatgcttactccaagataaaggaccctggactgacccagaaatgattcgtgcttctaaggtaaggaagcattcggtaaaggtcagaagtctttcaatgaattggctgccacaattgcctgtgaaagctttacaggttgtcagactttcactgtcacacccggatttcgg

SEQ ID NO: 65231 - DNA, 2116 bp, Zea Mays
cttgtacagagagaggctggcgacgtccgggcctggtcgggcccacgtgatcttccgccgttctggaggcgccggtggccgccgcctcaggttgcttcgccagcgcgccgtgccagcgggggagatggcagattcgcgcaccttatcgccgcccgccaaagaaacctcctgcgcgtcgcccggacccgccgacccgcctgcccgcctggtgctcgacctaatgccgcggcgccccccggcatccaatctttatatgaaggctagtttttatatgaaggagcaccgtacatcaatccaagccgagttccacctcgaggtaatcatgagcctctcttccattcttgttctcacttcattggtgccactgaattgcctgggagcacatggcatcccagccgtcactgatggttctcggaatcgggtcgcgcaaataagcttcttgcctcgaggcttaatatgcagcttctttattggggggaactgtacatgcttctcaggattggtagccactacatttttcttcttcttgttctatcgcagtgcccccttaagctgtagagcaagaccgaattgcaaattgcatactaaattcatcggctgaggttttctagttttttctgcggaccagagaagagcttagcatatctgaagaatcatcataagaaaataaaatgagggcatcagtatctagtgcttatcttttcttgcctttgttgtttaaagatgcattttttcttgcataggtatgttaattattacgacactgttgtggtattgatgacaactgtaggtttcatacttcctccatgtaggaacctaatatattttatgttgctcaggagtataataactgtttggaccattattctagttgcaggaggtagtagtaaactgaatacctcattttgttggtatatatttttattaatactactagaatttttgacccaatatcgggatatatagaattatatataaacagccttaaatgacttttttaaacttttagatattatgtttgaaatttaacttgggcaaaatgaccatatgctgcacaatttacctaaaggtgcacccgtatcctgtttctgtgttctgtatgagattcccatcctaagtaattgtatatgtttaaaccaaataatagaatgctaagaaaaccacaatgtactcaagaagaccaacactgtttctggcaatacaagcaatattttctgttcctttattgagggctttgatatcaaattcaaagctttagaattaatttattgagttcctatttgaagtgtattggcacctcgttcaagtacaaagcaaaaaactcatcacaaagatgagtttcagatccatcgaacaattacttaggaggaacagcaaaaccaaaatttctcgcaatatcgttgaccgcaaccatgaccagaaggaagagcagttagtacaatccttgagggagttacttcttgcaagcaaacagctcccagataagtttgatgactactatgtccttctacgctttcttaaaatgagaggcttcaacatcttaaaagcaaaagagatgttcttaaatatgttaaaatggcgtgaagattgttccgttgatgccattgcgaacgattttaaatttgaggagtatgatgctgtgaaaagatgctatcctcatggatttcatggagttgacagatttggggttgaataacttttcaaaatctgcaagagagatgtttgcagaaatccaaaagatcgatagcaattactatccagagacattaaatcaactttatataattaatgctggaactggatttagagcactgtggaaggtattgaaaacattcatggaggcaagaacattagcaaagattcaggttctggggaccaattaccttaacacagtattagaagctgttgacccaagcaatttaccagaatttttaggcggaacttgcacttgtccaacaggaggatgcttactccaagataaaggaccctggactgacccagaaatgattcgtgcttctaaggtaaggaagcattcggtaaaggtcagaagtctttcaatgaattggctgccacaattgcctgtgaaagctttacaggttgtcaggttggatttgat

SEQ ID NO: 65232 - DNA, 2898 bp, Zea Mays
cttgtacagagagaggctggcgacgtccgggcctggtcgggcccacgtgatcttccgccgttctggaggcgccggtggccgccgcctcaggttgcttcgccagcgcgccgtgccagcgggggagatggcagattcgcgcaccttatcgccgcccgccaaagaaacctcctgcgcgtcgcccggacccgccgacccgcctgcccgcctggtgctcgacctaatgccgcggcgccccccggcatccaatctttatatgaaggctagtttttatatgaaggagcaccgtacatcaatccaagccgagttccacctcgaggtaatcatgagcctctcttccattcttgttctcacttcattggtgccactgaattgcctgggagcacatggcatcccagccgtcactgatggttctcggaatcgggtcgcgcaaataagcttcttgcctcgaggcttaatatgcagcttctttattggggggaactgtacatgcttctcaggattggtagccactacatttttcttcttcttgttctatcgcagtgcccccttaagctgtagagcaagaccgaattgcaaattgcatactaaattcatcggctgaggttttctagttttttctgcggaccagagaagagcttagcatatctgaagaatcatcataagaaaataaaatgagggcatcagtatctagtgcttatcttttcttgcctttgttgtttaaagatgcattttttcttgcataggtatgttaattattacgacactgttgtggtattgatgacaactgtaggtttcatacttcctccatgtaggaacctaatatattttatgttgctcaggagtataataactgtttggaccattattctagttgcaggaggtagtagtaaactgaatacctcattttgttggtatatatttttattaatactactagaatttttgacccaatatcgggatatatagaattatatataaacagccttaaatgacttttttaaacttttagatattatgtttgaaatttaacttgggcaaaatgaccatatgctgcacaatttacctaaaggtgcacccgtatcctgtttctgtgttctgtatgagattcccatcctaagtaattgtatatgtttaaaccaaataatagaatgctaagaaaaccacaatgtactcaagaagaccaacactgtttctggcaatacaagcaatattttctgttcctttattgagggctttgatatcaaattcaaagctttagaattaatttattgagttcctatttgaagtgtattggcacctcgttcaagtacaaagcaaaaaactcatcacaaagatgagtttcagatccatcgaacaattacttaggaggaacagcaaaaccaaaatttctcgcaatatcgttgaccgcaaccatgaccagaaggaagagcagttagtacaatccttgagggagttacttcttgcaagcaaacagctcccagataagtttgatgactactatgtccttctacgctttcttaaaatgagaggcttcaacatcttaaaagcaaaagagatgttcttaaatatgttaaaatggcgtgaagattgttccgttgatgccattgcgaacgattttaaatttgaggagtatgatgctgtgaaaagatgctatcctcatggatttcatggagttgacagatttggtaggcctctctatattgaacgagttggctcagtggatctcagtaagctcatgcaagtgactactattgatcgatatgtaaaatatcatatatcagaacaagagaaaactatatctttgagatatcctgtttgctcacttgtggctaaaaagcacatagcatcgacaacagccatatttgatgtgaaaggactggggttgaataacttttcaaaatctgcaagagagatgtttgcagaaatccaaaagatcgatagcaattactatccagagacattaaatcaactttatataattaatgctggaactggatttagagcactgtggaaggtattgaaaacattcatggaggcaagaacattagcaaagattcaggttctggggaccaattaccttaacacagtattagaagctgttgacccaagcaatttaccagaatttttaggcggaacttgcacttgtccaacaggaggatgcttactccaagataaaggaccctggactgacccagaaatgattcgtgcttctaaggaagcattcggtaaaggtcagaagtctttcaatgaattggctgccacaattgcctgtgaaagctttacaggttgtcaggagccttccgcaaaacaagtagattccacttctcgtaagagaagaactcttggcatgttgttcaaagatgatcaggttggatttgatacaggtgaaaatattctacggaaacaagtcgatgaacagatcttggagaagatccgagaacttgaacactgcgctgctaagagtggggagaccctgcagatattaatatgcaagcaacaagaactcactggccacatcgaacagctgaggaaaatccttcagtgagaatgtgatggcgtgggttcagatatgaaagccgacatataaaactcgaaggtagtgcttgccaaaggtgaagaaaatcaaaagggacaagaagcgaagccatcgatgtaatgtaataaagaaatatgcaccctagttttctgtgatgaatctttaacccctatgagctgctaaaacactcacttgtgaatgtcaatatgtcatagtattattgtacgccatgattatactcgcaacgctgtctacggctacgtactcagaagttctgtaccaatgttaaataaatggtacacatgtaatttaccgtcatccagcagttttaggtatttctatgcaccgagactagattcaag

SEQ ID NO: 65233 - DNA, 1859 bp, Zea Mays
cttgtacagagagaggctggcgacgtccgggcctggtcgggcccacgtgatcttccgccgttctggaggcgccggtggccgccgcctcaggttgcttcgccagcgcgccgtgccagcgggggagatggcagattcgcgcaccttatcgccgcccgccaaagaaacctcctgcgcgtcgcccggacccgccgacccgcctgcccgcctggtgctcgacctaatgccgcggcgccccccggcatccaatctttatatgaaggctagtttttatatgaaggagcaccgtacatcaatccaagccgagttccacctcgaggtgtattggcacctcgttcaagtacaaagcaaaaaactcatcacaaagatgagtttcagatccatcgaacaattacttaggaggaacagcaaaaccaaaatttctcgcaatatcgttgaccgcaaccatgaccagaaggaagagcagttagtacaatccttgagggagttacttcttgcaagcaaacagctcccagataagtttgatgactactatgtccttctacgctttcttaaaatgagaggcttcaacatcttaaaagcaaaagagatgttcttaaatatgttaaaatggcgtgaagattgttccgttgatgccattgcgaacgattttaaatttgaggagtatgatgctgtgaaaagatgctatcctcatggatttcatggagttgacagatttggtaggcctctctatattgaacgagttggctcagtggatctcagtaagctcatgcaagtgactactattgatcgatatgtaaaatatcatatatcagaacaagagaaaactatatctttgagatatcctgtttgctcacttgtggctaaaaagcacatagcatcgacaacagccatatttgatgtgaaaggactggggttgaataacttttcaaaatctgcaagagagatgtttgcagaaatccaaaagatcgatagcaattactatccagagacattaaatcaactttatataattaatgctggaactggatttagagcactgtggaaggtattgaaaacattcatggaggcaagaacattagcaaagattcaggttctggggaccaattaccttaacacagtattagaagctgttgacccaagcaatttaccagaatttttaggcggaacttgcacttgtccaacaggaggatgcttactccaagataaaggaccctggactgacccagaaatgattcgtgcttctaaggtaaggaagcattcggtaaaggtcagaagtctttcaatgaattggctgccacaattgcctgtgaaagctttacaggttgtcaggttggatttgatacaggtgaaaatattctacggaaacaagtcgatgaacagatcttggagaagatccgagaacttgaacactgcgctgctaagagtggggagaccctgcagatattaatatgcaagcaacaagaactcactggccacatcgaacagctgaggaaaatccttcagtgagaatgtgatggcgtgggttcagatatgaaagccgacatataaaactcgaaggtagtgcttgccaaaggtgaagaaaatcaaaagggacaagaagcgaagccatcgatgtaatgtaataaagaaatatgcaccctagttttctgtgatgaatctttaacccctatgagctgctaaaacactcacttgtgaatgtcaatatgtcatagtattattgtacgccatgattatactcgcaacgctgtctacggctacgtactcagaagttctgtaccaatgttaaataaatggtacacatgtaatttaccgtcatccagcagttttaggtatttctatgcaccgagactagattcaag

SEQ ID NO: 65234 - DNA, 1814 bp, Zea Mays
cttgtacagagagaggctggcgacgtccgggcctggtcgggcccacgtgatcttccgccgttctggaggcgccggtggccgccgcctcaggttgcttcgccagcgcgccgtgccagcgggggagatggcagattcgcgcaccttatcgccgcccgccaaagaaacctcctgcgcgtcgcccggacccgccgacccgcctgcccgcctggtgctcgacctaatgccgcggcgccccccggcatccaatctttatatgaaggctagtttttatatgaaggagcaccgtacatcaatccaagccgagttccacctcgagtgtattggcacctcgttcaagtacaaagcaaaaaactcatcacaaagatgagtttcagatccatcgaacaattacttaggaggaacagcaaaaccaaaatttctcgcaatatcgttgaccgcaaccatgaccagaaggaagagcagttagtacaatccttgagggagttacttcttgcaagcaaacagctcccagataagtttgatgactactatgtccttctacgctttcttaaaatgagaggcttcaacatcttaaaagcaaaagagatgttcttaaatatgttaaaatggcgtgaagattgttccgttgatgccattgcgaacgattttaaatttgaggagtatgatgctgtgaaaagatgctatcctcatggatttcatggagttgacagatttggtaggcctctctatattgaacgagttggctcagtggatctcagtaagctcatgcaagtgactactattgatcgatatgtaaaatatcatatatcagaacaagagaaaactatatctttgagatatcctgtttgctcacttgtggctaaaaagcacatagcatcgacaacagccatatttgatgtgaaaggactggggttgaataacttttcaaaatctgcaagagagatgtttgcagaaatccaaaagatcgatagcaattactatccagagacattaaatcaactttatataattaatgctggaactggatttagagcactgtggaaggtattgaaaacattcatggaggcaagaacattagcaaagattcaggttctggggaccaattaccttaacacagtattagaagctgttgacccaaggaggatgcttactccaagataaaggaccctggactgacccagaaatgattcgtgcttctaaggtaaggaagcattcggtaaaggtcagaagtctttcaatgaattggctgccacaattgcctgtgaaagctttacaggttgtcaggttggatttgatacaggtgaaaatattctacggaaacaagtcgatgaacagatcttggagaagatccgagaacttgaacactgcgctgctaagagtggggagaccctgcagatattaatatgcaagcaacaagaactcactggccacatcgaacagctgaggaaaatccttcagtgagaatgtgatggcgtgggttcagatatgaaagccgacatataaaactcgaaggtagtgcttgccaaaggtgaagaaaatcaaaagggacaagaagcgaagccatcgatgtaatgtaataaagaaatatgcaccctagttttctgtgatgaatctttaacccctatgagctgctaaaacactcacttgtgaatgtcaatatgtcatagtattattgtacgccatgattatactcgcaacgctgtctacggctacgtactcagaagttctgtaccaatgttaaataaatggtacacatgtaatttaccgtcatccagcagttttaggtatttctatgcaccgagactagattcaag

SEQ ID NO: 65235 - DNA, 1842 bp, Zea Mays
cttgtacagagagaggctggcgacgtccgggcctggtcgggcccacgtgatcttccgccgttctggaggcgccggtggccgccgcctcaggttgcttcgccagcgcgccgtgccagcgggggagatggcagattcgcgcaccttatcgccgcccgccaaagaaacctcctgcgcgtcgcccggacccgccgacccgcctgcccgcctggtgctcgacctaatgccgcggcgccccccggcatccaatctttatatgaaggctagtttttatatgaaggagcaccgtacatcaatccaagccgagttccacctcgagtgtattggcacctcgttcaagtacaaagcaaaaaactcatcacaaagatgagtttcagatccatcgaacaattacttaggaggaacagcaaaaccaaaatttctcgcaatatcgttgaccgcaaccatgaccagaaggaagagcagttagtacaatccttgagggagttacttcttgcaagcaaacagctcccagataagtttgatgactactatgtccttctacgctttcttaaaatgagaggcttcaacatcttaaaagcaaaagagatgttcttaaatatgttaaaatggcgtgaagattgttccgttgatgccattgcgaacgattttaaatttgaggagtatgatgctgtgaaaagatgctatcctcatggatttcatggagttgacagatttgaacaagagaaaactatatctttgagatatcctgtttgctcacttgtggctaaaaagcacatagcatcgacaacagccatatttgatgtgaaaggactggggttgaataacttttcaaaatctgcaagagagatgtttgcagaaatccaaaagatcgatagcaattactatccagagacattaaatcaactttatataattaatgctggaactggatttagagcactgtggaaggtattgaaaacattcatggaggcaagaacattagcaaagattcaggttctggggaccaattaccttaacacagtattagaagctgttgacccaagcaatttaccagaatttttaggcggaacttgcacttgtccaacaggaggatgcttactccaagataaaggaccctggactgacccagaaatgattcgtgcttctaaggtaaggaagcattcggtaaaggtcagaagtctttcaatgaattggctgccacaattgcctgtgaaagctttacaggttgtcaggagccttccgcaaaacaagtagattccacttctcgtaagagaagaactcttggcatgttgttcaaagatgatcaggttggatttgatacaggtgaaaatattctacggaaacaagtcgatgaacagatcttggagaagatccgagaacttgaacactgcgctgctaagagtggggagttcagaccctgcagatattaatatgcaagcaacaagaactcactggccacatcgaacagctgaggaaaatccttcagtgagaatgtgatggcgtgggttcagatatgaaagccgacatataaaactcgaaggtagtgcttgccaaaggtgaagaaaatcaaaagggacaagaagcgaagccatcgatgtaatgtaataaagaaatatgcaccctagttttctgtgatgaatctttaacccctatgagctgctaaaacactcacttgtgaatgtcaatatgtcatagtattattgtacgccatgattatactcgcaacgctgtctacggctacgtactcagaagttctgtaccaatgttaaataaatggtacacatgtaatttaccgtcatccagcagttttaggtatttctatgcaccgagactagattcaag

SEQ ID NO: 65236 - DNA, 1778 bp, Zea Mays
cttgtacagagagaggctggcgacgtccgggcctggtcgggcccacgtgatcttccgccgttctggaggcgccggtggccgccgcctcaggttgcttcgccagcgcgccgtgccagcgggggagatggcagattcgcgcaccttatcgccgcccgccaaagaaacctcctgcgcgtcgcccggacccgccgacccgcctgcccgcctggtgctcgacctaatgccgcggcgccccccggcatccaatctttatatgaaggctagtttttatatgaaggagcaccgtacatcaatccaagccgagttccacctcgagtgtattggcacctcgttcaagtacaaagcaaaaaactcatcacaaagatgagtttcagatccatcgaacaattacttaggaggaacagcaaaaccaaaatttctcgcaatatcgttgaccgcaaccatgaccagaaggaagagcagttagtacaatccttgagggagttacttcttgcaagcaaacagctcccagataagtttgatgactactatgtccttctacgctttcttaaaatgagaggcttcaacatcttaaaagcaaaagagatgttcttaaatatgttaaaatggcgtgaagattgttccgttgatgccattgcgaacgattttaaatttgaggagtatgatgctgtgaaaagatgctatcctcatggatttcatggagttgacagatttggtaggcctctctatattgaacgagttggctcagtggatctcagtaagctcatgcaagtgactactattgatcgatatgtaaaatatcatatatcagaacaagagaaaactatatctttgagatatcctgtttgctcacttgtggctaaaaagcacatagcatcgacaacagccatatttgatgtgaaaggactggggttgaataacttttcaaaatctgcaagagagatgtttgcagaaatccaaaagatcgatagcaattactatccagagacattaaatcaactttatataattaatgctggaactggatttagagcactgtggaaggtattgaaaacattcatggaggcaagaacattagcaaagattcaggttctggggaccaattaccttaacacagtattagaagctgttgacccaagcaatttaccagaatttttaggcggaacttgcacttgtccaacaggaggatgcttactccaagataaaggaccctggactgacccagaaatgattcgtgcttctaaggtagttggatttgatacaggtgaaaatattctacggaaacaagtcgatgaacagatcttggagaagatccgagaacttgaacactgcgctgctaagagtggggagaccctgcagatattaatatgcaagcaacaagaactcactggccacatcgaacagctgaggaaaatccttcagtgagaatgtgatggcgtgggttcagatatgaaagccgacatataaaactcgaaggtagtgcttgccaaaggtgaagaaaatcaaaagggacaagaagcgaagccatcgatgtaatgtaataaagaaatatgcaccctagttttctgtgatgaatctttaacccctatgagctgctaaaacactcacttgtgaatgtcaatatgtcatagtattattgtacgccatgattatactcgcaacgctgtctacggctacgtactcagaagttctgtaccaatgttaaataaatggtacacatgtaatttaccgtcatccagcagttttaggtatttctatgcaccgagactagattcaag

SEQ ID NO: 65237 - DNA, 2140 bp, Zea Mays
cttgtacagagagaggctggcgacgtccgggcctggtcgggcccacgtgatcttccgccgttctggaggcgccggtggccgccgcctcaggttgcttcgccagcgcgccgtgccagcgggggagatggcagattcgcgcaccttatcgccgcccgccaaagaaacctcctgcgcgtcgcccggacccgccgacccgcctgcccgcctggtgctcgacctaatgccgcggcgccccccggcatccaatctttatatgaaggctagtttttatatgaaggagcaccgtacatcaatccaagccgagttccacctcgagtgtattggcacctcgttcaagtacaaagcaaaaaactcatcacaaagatgagtttcagatccatcgaacaattacttaggaggaacagcaaaaccaaaatttctcgcaatatcgttgaccgcaaccatgaccagaaggaagagcagttagtacaatccttgagggagttacttcttgcaagcaaacagctcccagataagtttgatgactactatgtccttctacgctttcttaaaatgagaggcttcaacatcttaaaagcaaaagagatgttcttaaatatgttaaaatggcgtgaagattgttccgttgatgccattgcgaacgattttaaatttgaggagtatgatgctgtgaaaagatgctatcctcatggatttcatggagttgacagatttggtaggcctctctatattgaacgagttggctcagtggatctcagtaagctcatgcaagtgactactattgatcgatatgtaaaatatcatatatcagaacaagagaaaactatatctttgagatatcctgtttgctcacttgtggctaaaaagcacatagcatcgacaacagccatatttgatgtgaaaggactggggttgaataacttttcaaaatctgcaagagagatgtttgcagaaatccaaaagatcgatagcaattactatccagagacattaaatcaactttatataattaatgctggaactggatttagagcactgtggaaggtattgaaaacattcatggaggcaagaacattagcaaagattcaggttctggggaccaattaccttaacacagtattagaagctgttgacccaagcaatttaccagaatttttaggcggaacttgcacttgtccaacaggaggatgcttactccaagataaaggaccctggactgacccagaaatgattcgtgcttctaaggtaaggaagcattcggtaaaggtcagaagtctttcaatgaattggctgccacaattgcctgtgaaagctttacaggttgtcaggagccttccgcaaaacaagtagattccacttctcgtaagagaagaactcttggcatgttgttcaaagatgatcaggtcttatttgtgtcatcttctttattttccagtttcatttctatcctagtggactttcagttcatatcaggcaaaaacacgtccctgtaaataattttaagtttcacaaggtagcatataaagaaaaatacgcttatgccagttcagctattattccttgtgttatgcacgaaaagtcacattaatactgaattctcttcgggacaggttggatttgatacaggtgaaaatattctacggaaacaagtcgatgaacagatcttggagaagatccgagaacttgaacactgcgctgctaagagtggggagaccctgcagatattaatatgcaagcaacaagaactcactggccacatcgaacagctgaggaaaatccttcagtgagaatgtgatggcgtgggttcagatatgaaagccgacatataaaactcgaaggtagtgcttgccaaaggtgaagaaaatcaaaagggacaagaagcgaagccatcgatgtaatgtaataaagaaatatgcaccctagttttctgtgatgaatctttaacccctatgagctgctaaaacactcacttgtgaatgtcaatatgtcatagtattattgtacgccatgattatactcgcaacgctgtctacggctacgtactcagaagttctgtaccaatgttaaataaatggtacacatgtaatttaccgtcatccagcagttttaggtatttctatgcaccgagactagattcaag

SEQ ID NO: 65238 - DNA, 3832 bp, Zea Mays
caccattatagtttgatctcttcaaaatactgattagatcgtttatagtgtgaaattcaaatagaaggtaaaaagaaaaagtctaacgaagttagctgcggttagaccctcgcattgtttgcaacccttttcatgacgttgacttgttcgacatcttcttcattccctcctagcccagcaggatcctcactgccgatcgacggcgcgaatcgcagagttctctacttctcgattgtcccgccgccgtcccagctcgccgaacaccgacacgtcgcggcctctgtctctaggggccgccgatcctgcagagaggcaatagataagcacagtgcttctgaagaagttgtaatggataacattctgccaaacagtgatttttctgaaggtttacatttgtggcaatcaaatagttgtcatgcatttgtagccgttgaaggatcaggttaccattatggtgtaaggccacattcagggtcaacctatgctgttcttactcatcgcacacagagttggcaggggcttgagcaggacataacagaaaaggtcacccttggtaccgagtactttgttgctgcatatgttagagttcatggggaagttcatgagcccattggagttcaggtcactctcaaacttgaggaggacggttcttctaccaactatctttctattgcaaggattttagcctcacaagaacgctgggaaaaggtggaaggttcgtttaatctaacaactctaccgagacgtttggtgttctaccttgaaggcccccctcctggtgtggatttgctcatagattcggtcaccatctcctacaagaaaacagcttcatcagttggtggaacagagaacatcattttaaattatgatttttcgaaaggccttcatccttggaatcccatccgctgccatgcatatgtggcatcacaatggtctggtttccttgatggtattagagggaactcaggagagaactatgctgttgtttcaaagagaacagaacactggcagggtcttgaacaagatattacaaatcaagtgtctacaggcactgtttatgtcgtttctgctttcgttagagttgatgggattgttcaaggccaggttgaagtcaaagcaacccttaggttgcaaaatgcagatggatcaacacattataaccctgttggaagtgtggttgcctcaaaagaaaagtggaacaaattggaaggttccttttctttaacaaacatgccaaaaaatgttgtattttacctggaaggacctcctgctggtgtggatcttgtcattgattctgtcactgttgcttgctccagacataaacagtcaaaagaagtaaaagtaccaagtggagttgagactataattaaaaatcctcacttcgaagatgggttaaaaaattggtcaggaagaggatgcaatatctgcagacatgagttcagtgcatatgggaatgtccggcctttaaatggcagctatttcgcttcggcgactggacgggttcacaattggaatggcatccagcaagagatcacgggcagggtgcagcggaaagttctttatgagatcagttctgctgttcgaatatttgggagtgccaatgatactgaagtgcgtgctactctgtgggtacaagaatatggtcgtgagcgatatgtgggactggccaaaaaccagacttctgatcagcaatggacacatttgaaaggaaagttcctccttcatgctccctttaccaaagctgttattttcatagaagggcctcctgctggaattgacattcttgtagatggtcttgtcttatctccagcaagaaagctccaagctgcaccatgcccaaaaattgagaatgttctgtatggaactaatctattgcacaataatggcttcactcgtgggctttctgggtggagtcctatgggttcatgtcgattgagtatccagactgaagcaccccatatgttaccttctatcttgaaagaccgtgcaagccagaagcatataagtggtcattatatccttgccacgaaccgcacagatgtttggatgggtccttcgcaggtcataactgataagctaagattgcatgtcacttacagagtatctgcttgggtacgagttggttctggaggacatggacgtcaccatgtaaatgtctgtcttgctgtggataaaaaccaatgggtcaatggtgggcaagtggatgctgatggggatcaatggtatgaaataaaaggagcattcaaacttgaaaagcagccatccaaagttactgcatatgttcaaggccctcctgcaggtgttgatatcagagtcatggactttcaaatatatgccgtcgacagaaaagcacggtttgagtatctgaaggagaaaacagacaaggtaagaaagcgtgatgttgttctaaagttccaaggatcgaatgcagtgaatcttctaggttcatctttgaggatacaacagaccgagaatagctttccatttggatcttgcatcgcgagacacaacattgagaacgaggatcttgctgagttttttgtgaagaacttcaattgggctgtatttgagaatgaattgaaatggtaccatacagaagcagaacaagggagacttaattataaagattctgatgagttgcttgagttttgtgagaaacataagatacaggttcgtggccactgtttattctgggaagtggaagacgctgtccaaccttgggttcagtcattgcaaggtcaccacttaatggctgccatccaaaatcgtttgcaaagcctattgtcaaggtacaaaggtcgatttagacatcacgatgttaacaatgagatgctacatgggtctttctatgaagacagattgggaagggacattagagcttacatgttcagagaagcacataagcttgatccttctgctgtcctatttgttaatgattacaacgtcgaagatggatgtgacacaaaatctacccccgagaaattggttgagcaggtcgttgatctccaagataggggcgctccagttggtgggatcggtgtgcaaggtcatatcagccatccggtaggagaaatcatatgtgattccctggacaagctcgccatactgggtctcccgatctggattactgagttggatgtcacagcagagaacgagcacatacgagctgatgatctagaggtgttcctccgggaagcatttgcacatcctgctgtggggggaatcatcctctggggattctgggagatgtttatgtttcgagagcacgcccatctggtcgatgctgatgggacaatcaacgaggctggcaggaggtaccttgctctcaaacaagagtggctgacccgtatgaacggcagtgtcgatcaccaaggagagtttaagttcagaggataccatggttcgtacacagtggaagtgaacacgccttcaggcaaggtagctagatcgtttgttgttgacaaggatagcccggttcaggtgatcgctctgaatgtttaatgtgtgggaaatcatgcgcgtgtcctgtattttagcgatgtactgaggtgttgaacacagatagtttcatagctgatgccacgccttcagtgtacagaatattttcacgtttattctctgttctattttttgggtgattataacgcgatatttacattaccatacggggcagaatctgaacaaaaccttgcgcaagaacattaacgggacatccaacctccaattcatttgttggaaaacttcaaagtcataaatgttcaacttttcaatggcactggtaagaactaagaagtaaaaaaccatcccttggttacgattctgtgcatttttc

SEQ ID NO: 65239 - DNA, 3997 bp, Zea Mays
cttacctctggctcgcactcatctggctttagaggaaggtgttcatctttatgcctcaaagacccaggagacgagactgcgtaggataggataactgggccttcctaatccagtaatccttctcccgcggcattcttcacatccgattccttttccatcgccccggacgcaggcacgcgcgccggcatttcttggggaagacgcttcggcgccgctgtcgcattcacgggcgcatctccgtgccgtcccgaatcatgcttttccttccgtcccaaggtccaagctgtcgtgtcgacggtgccgccacctcggtagccagttagctgctgctgctgctgcggggacgggatttctgggttggatgagatgaggaggcgctgcagctggctctcgtctttgttccgccctcgccgggctgaccgctcgctcccgcaaccagatccacagggtcccgattccgagcccaaggctgagcaggcaatagataagcacagtgcttctgaagaagttgtaatggataacattctgccaaacagtgatttttctgaaggtttacatttgtggcaatcaaatagttgtcatgcatttgtagccgttgaaggatcaggttaccattatggtgtaaggccacattcagggtcaacctatgctgttcttactcatcgcacacagagttggcaggggcttgagcaggacataacagaaaaggtcacccttggtaccgagtactttgttgctgcatatgttagagttcatggggaagttcatgagcccattggagttcaggtcactctcaaacttgaggaggacggttcttctaccaactatctttctattgcaaggattttagcctcacaagaacgctgggaaaaggtggaaggttcgtttaatctaacaactctaccgagacgtttggtgttctaccttgaaggcccccctcctggtgtggatttgctcatagattcggtcaccatctcctacaagaaaacagcttcatcagttggtggaacagagaacatcattttaaattatgatttttcgaaaggccttcatccttggaatcccatccgctgccatgcatatgtggcatcacaatggtctggtttccttgatggtattagagggaactcaggagagaactatgctgttgtttcaaagagaacagaacactggcagggtcttgaacaagatattacaaatcaagtgtctacaggcactgtttatgtcgtttctgctttcgttagagttgatgggattgttcaaggccaggttgaagtcaaagcaacccttaggttgcaaaatgcagatggatcaacacattataaccctgttggaagtgtggttgcctcaaaagaaaagtggaacaaattggaaggttccttttctttaacaaacatgccaaaaaatgttgtattttacctggaaggacctcctgctggtgtggatcttgtcattgattctgtcactgttgcttgctccagacataaacagtcaaaagaagtaaaagtaccaagtggagttgagactataattaaaaatcctcacttcgaagatgggttaaaaaattggtcaggaagaggatgcaatatctgcagacatgagttcagtgcatatgggaatgtccggcctttaaatggcagctatttcgcttcggcgactggacgggttcacaattggaatggcatccagcaagagatcacgggcagggtgcagcggaaagttctttatgagatcagttctgctgttcgaatatttgggagtgccaatgatactgaagtgcgtgctactctgtgggtacaagaatatggtcgtgagcgatatgtgggactggccaaaaaccagacttctgatcagcaatggacacatttgaaaggaaagttcctccttcatgctccctttaccaaagctgttattttcatagaagggcctcctgctggaattgacattcttgtagatggtcttgtcttatctccagcaagaaagctccaagctgcaccatgcccaaaaattgagaatgttctgtatggaactaatctattgcacaataatggcttcactcgtgggctttctgggtggagtcctatgggttcatgtcgattgagtatccagactgaagcaccccatatgttaccttctatcttgaaagaccgtgcaagccagaagcatataagtggtcattatatccttgccacgaaccgcacagatgtttggatgggtccttcgcaggtcataactgataagctaagattgcatgtcacttacagagtatctgcttgggtacgagttggttctggaggacatggacgtcaccatgtaaatgtctgtcttgctgtggataaaaaccaatgggtcaatggtgggcaagtggatgctgatggggatcaatggtatgaaataaaaggagcattcaaacttgaaaagcagccatccaaagttactgcatatgttcaaggccctcctgcaggtgttgatatcagagtcatggactttcaaatatatgccgtcgacagaaaagcacggtttgagtatctgaaggagaaaacagacaaggtaagaaagcgtgatgttgttctaaagttccaaggatcgaatgcagtgaatcttctaggttcatctttgaggatacaacagaccgagaatagctttccatttggatcttgcatcgcgagacacaacattgagaacgaggatcttgctgagttttttgtgaagaacttcaattgggctgtatttgagaatgaattgaaatggtaccatacagaagcagaacaagggagacttaattataaagattctgatgagttgcttgagttttgtgagaaacataagatacaggttcgtggccactgtttattctgggaagtggaagacgctgtccaaccttgggttcagtcattgcaaggtcaccacttaatggctgccatccaaaatcgtttgcaaagcctattgtcaaggtacaaaggtcgatttagacatcacgatgttaacaatgagatgctacatgggtctttctatgaagacagattgggaagggacattagagcttacatgttcagagaagcacataagcttgatccttctgctgtcctatttgttaatgattacaacgtcgaagatggatgtgacacaaaatctacccccgagaaattggttgagcaggtcgttgatctccaagataggggcgctccagttggtgggatcggtgtgcaaggtcatatcagccatccggtaggagaaatcatatgtgattccctggacaagctcgccatactgggtctcccgatctggattactgagttggatgtcacagcagagaacgagcacatacgagctgatgatctagaggtgttcctccgggaagcatttgcacatcctgctgtggggggaatcatcctctggggattctgggagatgtttatgtttcgagagcacgcccatctggtcgatgctgatgggacaatcaacgaggctggcaggaggtaccttgctctcaaacaagagtggctgacccgtatgaacggcagtgtcgatcaccaaggagagtttaagttcagaggataccatggttcgtacacagtggaagtgaacacgccttcaggcaaggtagctagatcgtttgttgttgacaaggatagcccggttcaggtgatcgctctgaatgtttaatgtgtgggaaatcatgcgcgtgtcctgtattttagcgatgtactgaggtgttgaacacagatagtttcatagctgatgccacgccttcagtgtacagaatattttcacgtttattctctgttctattttttgggtgattataacgcgatatttacattaccatacggggcagaatctgaacaaaaccttgcgcaagaacattaacgggacatccaacctccaattcatttgttggaaaacttcaaagtcataaatgttcaacttttcaatggcactggtaagaactaagaagtaaaaaaccatcccttggttacgattctgtgcatttttc

SEQ ID NO: 65240 - DNA, 3981 bp, Zea Mays
ctggctcgcactcatctggctttagaggaaggtgttcatctttatgcctcaaagacccaggagacgagactgcgtaggataggataactgggccttcctaatccagtaatccttctcccgcggcattcttcacatccgattccttttccatcgccccggacgcaggcacgcgcgccggcatttcttggggaagacgcttcggcgccgctgtcgcattcacgggcgcatctccgtgccgtcccgaatcatgcttttccttccgtcccaaggtccaagctgtcgtgtcgacggtgccgccacctcggtagccagttagctgctgctgctgctgcggggacgggatttctgggttggatgagatgaggaggcgctgcagctggctctcgtctttgttccgccctcgccgggctgaccgctcgctcccgcaaccagatccacagggtcccgattccgagcccaaggcaatagataagcacagtgcttctgaagaagttgtaatggataacattctgccaaacagtgatttttctgaaggtttacatttgtggcaatcaaatagttgtcatgcatttgtagccgttgaaggatcaggttaccattatggtgtaaggccacattcagggtcaacctatgctgttcttactcatcgcacacagagttggcaggggcttgagcaggacataacagaaaaggtcacccttggtaccgagtactttgttgctgcatatgttagagttcatggggaagttcatgagcccattggagttcaggtcactctcaaacttgaggaggacggttcttctaccaactatctttctattgcaaggattttagcctcacaagaacgctgggaaaaggtggaaggttcgtttaatctaacaactctaccgagacgtttggtgttctaccttgaaggcccccctcctggtgtggatttgctcatagattcggtcaccatctcctacaagaaaacagcttcatcagttggtggaacagagaacatcattttaaattatgatttttcgaaaggccttcatccttggaatcccatccgctgccatgcatatgtggcatcacaatggtctggtttccttgatggtattagagggaactcaggagagaactatgctgttgtttcaaagagaacagaacactggcagggtcttgaacaagatattacaaatcaagtgtctacaggcactgtttatgtcgtttctgctttcgttagagttgatgggattgttcaaggccaggttgaagtcaaagcaacccttaggttgcaaaatgcagatggatcaacacattataaccctgttggaagtgtggttgcctcaaaagaaaagtggaacaaattggaaggttccttttctttaacaaacatgccaaaaaatgttgtattttacctggaaggacctcctgctggtgtggatcttgtcattgattctgtcactgttgcttgctccagacataaacagtcaaaagaagtaaaagtaccaagtggagttgagactataattaaaaatcctcacttcgaagatgggttaaaaaattggtcaggaagaggatgcaatatctgcagacatgagttcagtgcatatgggaatgtccggcctttaaatggcagctatttcgcttcggcgactggacgggttcacaattggaatggcatccagcaagagatcacgggcagggtgcagcggaaagttctttatgagatcagttctgctgttcgaatatttgggagtgccaatgatactgaagtgcgtgctactctgtgggtacaagaatatggtcgtgagcgatatgtgggactggccaaaaaccagacttctgatcagcaatggacacatttgaaaggaaagttcctccttcatgctccctttaccaaagctgttattttcatagaagggcctcctgctggaattgacattcttgtagatggtcttgtcttatctccagcaagaaagctccaagctgcaccatgcccaaaaattgagaatgttctgtatggaactaatctattgcacaataatggcttcactcgtgggctttctgggtggagtcctatgggttcatgtcgattgagtatccagactgaagcaccccatatgttaccttctatcttgaaagaccgtgcaagccagaagcatataagtggtcattatatccttgccacgaaccgcacagatgtttggatgggtccttcgcaggtcataactgataagctaagattgcatgtcacttacagagtatctgcttgggtacgagttggttctggaggacatggacgtcaccatgtaaatgtctgtcttgctgtggataaaaaccaatgggtcaatggtgggcaagtggatgctgatggggatcaatggtatgaaataaaaggagcattcaaacttgaaaagcagccatccaaagttactgcatatgttcaaggccctcctgcaggtgttgatatcagagtcatggactttcaaatatatgccgtcgacagaaaagcacggtttgagtatctgaaggagaaaacagacaaggtaagaaagcgtgatgttgttctaaagttccaaggatcgaatgcagtgaatcttctaggttcatctttgaggatacaacagaccgagaatagctttccatttggatcttgcatcgcgagacacaacattgagaacgaggatcttgctgagttttttgtgaagaacttcaattgggctgtatttgagaatgaattgaaatggtaccatacagaagcagaacaagggagacttaattataaagattctgatgagttgcttgagttttgtgagaaacataagatacaggttcgtggccactgtttattctgggaagtggaagacgctgtccaaccttgggttcagtcattgcaaggtcaccacttaatggctgccatccaaaatcgtttgcaaagcctattgtcaaggtacaaaggtcgatttagacatcacgatgttaacaatgagatgctacatgggtctttctatgaagacagattgggaagggacattagagcttacatgttcagagaagcacataagcttgatccttctgctgtcctatttgttaatgattacaacgtcgaagatggatgtgacacaaaatctacccccgagaaattggttgagcaggtcgttgatctccaagataggggcgctccagttggtgggatcggtgtgcaaggtcatatcagccatccggtaggagaaatcatatgtgattccctggacaagctcgccatactgggtctcccgatctggattactgagttggatgtcacagcagagaacgagcacatacgagctgatgatctagaggtgttcctccgggaagcatttgcacatcctgctgtggggggaatcatcctctggggattctgggagatgtttatgtttcgagagcacgcccatctggtcgatgctgatgggacaatcaacgaggctggcaggaggtaccttgctctcaaacaagagtggctgacccgtatgaacggcagtgtcgatcaccaaggagagtttaagttcagaggataccatggttcgtacacagtggaagtgaacacgccttcaggcaaggtagctagatcgtttgttgttgacaaggatagcccggttcaggtgatcgctctgaatgtttaatgtgtgggaaatcatgcgcgtgtcctgtattttagcgatgtactgaggtgttgaacacagatagtttcatagctgatgccacgccttcagtgtacagaatattttcacgtttattctctgttctattttttgggtgattataacgcgatatttacattaccatacggggcagaatctgaacaaaaccttgcgcaagaacattaacgggacatccaacctccaattcatttgttggaaaacttcaaagtcataaatgttcaacttttcaatggcactggtaagaactaagaagtaaaaaaccatcccttggttacgattctgtgcatttttc

SEQ ID NO: 65241 - DNA, 4052 bp, Zea Mays
tggctttagaggaaggtgttcatctttatgcctcaaagacccaggagacgagactgcgtaggataggataactgggccttcctaatccagtaatccttctcccgcggcattcttcacatccgattccttttccatcgccccggacgcaggcacgcgcgccggcatttcttggggaagacgcttcggcgccgctgtcgcattcacgggcgcatctccgtgccgtcccgaatcatgcttttccttccgtcccaaggtccaagctgtcgtgtcgacggtgccgccacctcggtagccagttagctgctgctgctgctgcggggacgggatttctgggttggatgagatgaggaggcgctgcagctggctctcgtctttgttccgccctcgccgggctgaccgctcgctcccgcaaccagatccacagggtcccgattccgagcccaaggctgagcaggcaatagataagcacagtgcttctgaagaagttgtaatggataacattctgccaaacagtgatttttctgaaggtttacatttgtggcaatcaaatagttgtcatgcatttgtagccgttgaaggatcaggttaccattatggtgtaaggccacattcagggtcaacctatgctgttcttactcatcgcacacagagttggcaggggcttgagcaggacataacagaaaaggtcacccttggtaccgagtactttgttgctgcatatgttagagttcatggggaagttcatgagcccattggagttcaggtcactctcaaacttgaggaggacggttcttctaccaactatctttctattgcaagcctcacaagaacgctgggaaaaggtggaaggttcgtttaatctaacaactctaccgagacgtttggtgttctaccttgaaggcccccctcctggtgtggatttgctcatagattcggtcaccatctcctacaagaaaacagcttcatcagttggtggaacagagaacatcattttaaattatgatttttcgaaaggccttcatccttggaatcccatccgctgccatgcatatgtggcatcacaatggtctggtttccttgatggtattagagggaactcaggagagaactatgctgttgtttcaaagagaacagaacactggcagggtcttgaacaagatattacaaatcaagtgtctacaggcactgtttatgtcgtttctgctttcgttagagttgatgggattgttcaaggccaggttgaagtcaaagcaacccttaggttgcaaaatgcagatggatcaacacattataaccctgttggaagtgtggttgcctcaaaagaaaagtggaacaaattggaaggttccttttctttaacaaacatgccaaaaaatgttgtattttacctggaaggacctcctgctggtgtggatcttgtcattgattctgtcactgttgcttgctccagacataaacagtcaaaagaagtaaaagtaccaagtggagttgagactataattaaaaatcctcacttcgaagatgggttaaaaaattggtcaggaagaggatgcaatatctgcagacatgagttcagtgcatatgggaatgtccggcctttaaatggcagctatttcgcttcggcgactggacgggttcacaattggaatggcatccagcaagagatcacgggcagggtgcagcggaaagttctttatgagatcagttctgctgttcgaatatttgggagtgccaatgatactgaagtgcgtgctactctgtgggtacaagaatatggtcgtgagcgatatgtgggactggccaagtaagttgtttttgtttcttgttctctgttgataatgctctttttcagagccaatgacattattccttttctttctataaccaaagaaaccagacttctgatcagcaatggacacatttgaaaggaaagttcctccttcatgctccctttaccaaagctgttattttcatagaagggcctcctgctggaattgacattcttgtagatggtcttgtcttatctccagcaagaaagctccaagctgcaccatgcccaaaaattgagaatgttctgtatggaactaatctattgcacaataatggcttcactcgtgggctttctgggtggagtcctatgggttcatgtcgattgagtatccagactgaagcaccccatatgttaccttctatcttgaaagaccgtgcaagccagaagcatataagtggtcattatatccttgccacgaaccgcacagatgtttggatgggtccttcgcaggtcataactgataagctaagattgcatgtcacttacagagtatctgcttgggtacgagttggttctggaggacatggacgtcaccatgtaaatgtctgtcttgctgtggataaaaaccaatgggtcaatggtgggcaagtggatgctgatggggatcaatggtatgaaataaaaggagcattcaaacttgaaaagcagccatccaaagttactgcatatgttcaaggccctcctgcaggtgttgatatcagagtcatggactttcaaatatatgccgtcgacagaaaagcacggtttgagtatctgaaggagaaaacagacaaggtaagaaagcgtgatgttgttctaaagttccaaggatcgaatgcagtgaatcttctaggttcatctttgaggatacaacagaccgagaatagctttccatttggatcttgcatcgcgagacacaacattgagaacgaggatcttgctgagttttttgtgaagaacttcaattgggctgtatttgagaatgaattgaaatggtaccatacagaagcagaacaagggagacttaattataaagattctgatgagttgcttgagttttgtgagaaacataagatacaggttcgtggccactgtttattctgggaagtggaagacgctgtccaaccttgggttcagtcattgcaaggtcaccacttaatggctgccatccaaaatcgtttgcaaagcctattgtcaaggtacaaaggtcgatttagacatcacgatgttaacaatgagatgctacatgggtctttctatgaagacagattgggaagggacattagagcttacatgttcagagaagcacataagcttgatccttctgctgtcctatttgttaatgattacaacgtcgaagatggatgtgacacaaaatctacccccgagaaattggttgagcaggtcgttgatctccaagataggggcgctccagttggtgggatcggtgtgcaaggtcatatcagccatccggtaggagaaatcatatgtgattccctggacaagctcgccatactgggtctcccgatctggattactgagttggatgtcacagcagagaacgagcacatacgagctgatgatctagaggtgttcctccgggaagcatttgcacatcctgctgtggggggaatcatcctctggggattctgggagatgtttatgtttcgagagcacgcccatctggtcgatgctgatgggacaatcaacgaggctggcaggaggtaccttgctctcaaacaagagtggctgacccgtatgaacggcagtgtcgatcaccaaggagagtttaagttcagaggataccatggttcgtacacagtggaagtgaacacgccttcaggcaaggtagctagatcgtttgttgttgacaaggatagcccggttcaggtgatcgctctgaatgtttaatgtgtgggaaatcatgcgcgtgtcctgtattttagcgatgtactgaggtgttgaacacagatagtttcatagctgatgccacgccttcagtgtacagaatattttcacgtttattctctgttctattttttgggtgattataacgcgatatttacattaccatacggggcagaatctgaacaaaaccttgcgcaagaacattaacgggacatccaacctccaattcatttgttggaaaacttcaaagtcataaatgttcaacttttcaatggcactggtaagaactaagaagtaaaaaaccatcccttggttacgattctgtgcatttttc

SEQ ID NO: 65242 - DNA, 3730 bp, Zea Mays
gtctcttgctgtggatgtttgtttgattgtttcggtaggccttgcagtatataggattttggtgatttcattagcatagccaatcagctgttgatttggtttcccactgaacaaagattcaagatctcactcagctgaagtcgtctctatcaatactggtgaagcctcctagatccaaatgtagcccattgggtttgggagattccaagacatgttgggcactcgagtgcagtagaccatgcagaacttttgagaagatcatacataactttttcgtatgttttagctgaagcatgtgccagctgtgtcgatccatcagcgattacttcaaatatcacaactatcctcctcgactagaaaggcctgctatgtgcagaaggctgagcaggcaatagataagcacagtgcttctgaagaagttgtaatggataacattctgccaaacagtgatttttctgaaggtttacatttgtggcaatcaaatagttgtcatgcatttgtagccgttgaaggatcaggttaccattatggtgtaaggccacattcagggtcaacctatgctgttcttactcatcgcacacagagttggcaggggcttgagcaggacataacagaaaaggtcacccttggtaccgagtactttgttgctgcatatgttagagttcatggggaagttcatgagcccattggagttcaggtcactctcaaacttgaggaggacggttcttctaccaactatctttctattgcaaggattttagcctcacaagaacgctgggaaaaggtggaaggttcgtttaatctaacaactctaccgagacgtttggtgttctaccttgaaggcccccctcctggtgtggatttgctcatagattcggtcaccatctcctacaagaaaacagcttcatcagttggtggaacagagaacatcattttaaattatgatttttcgaaaggccttcatccttggaatcccatccgctgccatgcatatgtggcatcacaatggtctggtttccttgatggtattagagggaactcaggagagaactatgctgttgtttcaaagagaacagaacactggcagggtcttgaacaagatattacaaatcaagtgtctacaggcactgtttatgtcgtttctgctttcgttagagttgatgggattgttcaaggccaggttgaagtcaaagcaacccttaggttgcaaaatgcagatggatcaacacattataaccctgttggaagtgtggttgcctcaaaagaaaagtggaacaaattggaaggttccttttctttaacaaacatgccaaaaaatgttgtattttacctggaaggacctcctgctggtgtggatcttgtcattgattctgtcactgttgcttgctccagacataaacagtcaaaagaagtaaaagtaccaagtggagttgagactataattaaaaatcctcacttcgaagatgggttaaaaaattggtcaggaagaggatgcaatatctgcagacatgagttcagtgcatatgggaatgtccggcctttaaatggcagctatttcgcttcggcgactggacgggttcacaattggaatggcatccagcaagagatcacgggcagggtgcagcggaaagttctttatgagatcagttctgctgttcgaatatttgggagtgccaatgatactgaagtgcgtgctactctgtgggtacaagaatatggtcgtgagcgatatgtgggactggccaaaatgttctgtatggaactaatctattgcacaataatggcttcactcgtgggctttctgggtggagtcctatgggttcatgtcgattgagtatccagactgaagcaccccatatgttaccttctatcttgaaagaccgtgcaagccagaagcatataagtggtcattatatccttgccacgaaccgcacagatgtttggatgggtccttcgcaggtcataactgataagctaagattgcatgtcacttacagagtatctgcttgggtacgagttggttctggaggacatggacgtcaccatgtaaatgtctgtcttgctgtggataaaaaccaatgggtcaatggtgggcaagtggatgctgatggggatcaatggtatgaaataaaaggagcattcaaacttgaaaagcagccatccaaagttactgcatatgttcaaggccctcctgcaggtgttgatatcagagtcatggactttcaaatatatgccgtcgacagaaaagcacggtttgagtatctgaaggagaaaacagacaaggtaagaaagcgtgatgttgttctaaagttccaaggatcgaatgcagtgaatcttctaggttcatctttgaggatacaacagaccgagaatagctttccatttggatcttgcatcgcgagacacaacattgagaacgaggatcttgctgagttttttgtgaagaacttcaattgggctgtatttgagaatgaattgaaatggtaccatacagaagcagaacaagggagacttaattataaagattctgatgagttgcttgagttttgtgagaaacataagatacaggttcgtggccactgtttattctgggaagtggaagacgctgtccaaccttgggttcagtcattgcaaggtcaccacttaatggctgccatccaaaatcgtttgcaaagcctattgtcaaggtacaaaggtcgatttagacatcacgatgttaacaatgagatgctacatgggtctttctatgaagacagattgggaagggacattagagcttacatgttcagagaagcacataagcttgatccttctgctgtcctatttgttaatgattacaacgtcgaagatggatgtgacacaaaatctacccccgagaaattggttgagcaggtcgttgatctccaagataggggcgctccagttggtgggatcggtgtgcaaggtcatatcagccatccggtaggagaaatcatatgtgattccctggacaagctcgccatactgggtctcccgatctggattactgagttggatgtcacagcagagaacgagcacatacgagctgatgatctagaggtgttcctccgggaagcatttgcacatcctgctgtggggggaatcatcctctggggattctgggagatgtttatgtttcgagagcacgcccatctggtcgatgctgatgggacaatcaacgaggctggcaggaggtaccttgctctcaaacaagagtggctgacccgtatgaacggcagtgtcgatcaccaaggagagtttaagttcagaggataccatggttcgtacacagtggaagtgaacacgccttcaggcaaggtagctagatcgtttgttgttgacaaggatagcccggttcaggtgatcgctctgaatgtttaatgtgtgggaaatcatgcgcgtgtcctgtattttagcgatgtactgaggtgttgaacacagatagtttcatagctgatgccacgccttcagtgtacagaatattttcacgtttattctctgttctattttttgggtgattataacgcgatatttacattaccatacggggcagaatctgaacaaaaccttgcgcaagaacattaacgggacatccaacctccaattcatttgttggaaaacttcaaagtcataaatgttcaacttttcaatggcactggtaagaactaagaagtaaaaaaccatcccttggttacgattctgtgcatttttc

SEQ ID NO: 65243 - DNA, 4039 bp, Zea Mays
tttcattagcatagccaatcagctgttgatttggtttcccactgaacaaagattcaaggtgcgtgtgttgcaatcggttgtacatatttcacctttgctggctgtttatttagggaaacgacggcaaccattgaagatttgtggtttcctgtttttttttgggagtagatctcactcagctgaagtcgtctctatcaatactggtgaagcctcctagatccaaatgtagcccattgggtttgggagattccaagacatgttgggcactcgagtgcagtagaccatgcagaacttttgagaagatcatacataactttttcgtatgttttagctgaagcatgtgccagctgtgtcgatccatcagcgattacttcaaatatcacaactatcctcctcgactagaaaggcctgctatgtgcagaaggctgagcaggcaatagataagcacagtgcttctgaagaagttgtaatggataacattctgccaaacagtgatttttctgaaggtttacatttgtggcaatcaaatagttgtcatgcatttgtagccgttgaaggatcaggttaccattatggtgtaaggccacattcagggtcaacctatgctgttcttactcatcgcacacagagttggcaggggcttgagcaggacataacagaaaaggtcacccttggtaccgagtactttgttgctgcatatgttagagttcatggggaagttcatgagcccattggagttcaggtcactctcaaacttgaggaggacggttcttctaccaactatctttctattgcaaggattttagcctcacaagaacgctgggaaaaggtggaaggttcgtttaatctaacaactctaccgagacgtttggtgttctaccttgaaggcccccctcctggtgtggatttgctcatagattcggtcaccatctcctacaagaaaacagcttcatcagttggtggaacagagaacatcattttaaattatgatttttcgaaaggccttcatccttggaatcccatccgctgccatgcatatgtggcatcacaatggtctggtttccttgatggtattagagggaactcaggagagaactatgctgttgtttcaaagagaacagaacactggcagggtcttgaacaagatattacaaatcaagtgtctacaggcactgtttatgtcgtttctgctttcgttagagttgatgggattgttcaaggccaggttgaagtcaaagcaacccttaggttgcaaaatgcagatggatcaacacattataaccctgttggaagtgtggttgcctcaaaagaaaagtggaacaaattggaaggttccttttctttaacaaacatgccaaaaaatgttgtattttacctggaaggacctcctgctggtgtggatcttgtcattgattctgtcactgttgcttgctccagacataaacagtcaaaagaagtaaaagtaccaagtggagttgagactataattaaaaatcctcacttcgaagatgggttaaaaaattggtcaggaagaggatgcaatatctgcagacatgagttcagtgcatatgggaatgtccggcctttaaatggcagctatttcgcttcggcgactggacgggttcacaattggaatggcatccagcaagagatcacgggcagggtgcagcggaaagttctttatgagatcagttctgctgttcgaatatttgggagtgccaatgatactgaagtgcgtgctactctgtgggtacaagaatatggtcgtgagcgatatgtgggactggccaagtaagttgtttttgtttcttgttctctgttgataatgctctttttcagagccaatgacattattccttttctttctataaccaaagaaaccagacttctgatcagcaatggacacatttgaaaggaaagttcctccttcatgctccctttaccaaagctgttattttcatagaagggcctcctgctggaattgacattcttgtagatggtcttgtcttatctccagcaagaaagctccaagctgcaccatgcccaaaaattgagaatgttctgtatggaactaatctattgcacaataatggcttcactcgtgggctttctgggtggagtcctatgggttcatgtcgattgagtatccagactgaagcaccccatatgttaccttctatcttgaaagaccgtgcaagccagaagcatataagtggtcattatatccttgccacgaaccgcacagatgtttggatgggtccttcgcaggtcataactgataagctaagattgcatgtcacttacagagtatctgcttgggtacgagttggttctggaggacatggacgtcaccatgtaaatgtctgtcttgctgtggataaaaaccaatgggtcaatggtgggcaagtggatgctgatggggatcaatggtatgaaataaaaggagcattcaaacttgaaaagcagccatccaaagttactgcatatgttcaaggccctcctgcaggtgttgatatcagagtcatggactttcaaatatatgccgtcgacagaaaagcacggtttgagtatctgaaggagaaaacagacaaggtaagaaagcgtgatgttgttctaaagttccaaggatcgaatgcagtgaatcttctaggttcatctttgaggatacaacagaccgagaatagctttccatttggatcttgcatcgcgagacacaacattgagaacgaggatcttgctgagttttttgtgaagaacttcaattgggctgtatttgagaatgaattgaaatggtaccatacagaagcagaacaagggagacttaattataaagattctgatgagttgcttgagttttgtgagaaacataagatacaggttcgtggccactgtttattctgggaagtggaagacgctgtccaaccttgggttcagtcattgcaaggtcaccacttaatggctgccatccaaaatcgtttgcaaagcctattgtcaaggtacaaaggtcgatttagacatcacgatgttaacaatgagatgctacatgggtctttctatgaagacagattgggaagggacattagagcttacatgttcagagaagcacataagcttgatccttctgctgtcctatttgttaatgattacaacgtcgaagatggatgtgacacaaaatctacccccgagaaattggttgagcaggtcgttgatctccaagataggggcgctccagttggtgggatcggtgtgcaaggtcatatcagccatccggtaggagaaatcatatgtgattccctggacaagctcgccatactgggtctcccgatctggattactgagttggatgtcacagcagagaacgagcacatacgagctgatgatctagaggtgttcctccgggaagcatttgcacatcctgctgtggggggaatcatcctctggggattctgggagatgtttatgtttcgagagcacgcccatctggtcgatgctgatgggacaatcaacgaggctggcaggaggtaccttgctctcaaacaagagtggctgacccgtatgaacggcagtgtcgatcaccaaggagagtttaagttcagaggataccatggttcgtacacagtggaagtgaacacgccttcaggcaaggtagctagatcgtttgttgttgacaaggatagcccggttcaggtgatcgctctgaatgtttaatgtgtgggaaatcatgcgcgtgtcctgtattttagcgatgtactgaggtgttgaacacagatagtttcatagctgatgccacgccttcagtgtacagaatattttcacgtttattctctgttctattttttgggtgattataacgcgatatttacattaccatacggggcagaatctgaacaaaaccttgcgcaagaacattaacgggacatccaacctccaattcatttgttggaaaacttcaaagtcataaatgttcaacttttcaatggcactggtaagaactaagaagtaaaaaaccatcccttggttacgattctgtgcatttttc

SEQ ID NO: 65244 - DNA, 3732 bp, Zea Mays
cctagatccaaatgtagcccattgggtttgggagattccaagacatgttgggcactcgagtgcagtagaccatgcagaacttttgagaagatcatacataactttttcgtatgttttagctgaagcatgtgccagctgtgtcgatccatcagcgattacttcaaatatcacaactatcctcctcgactagaaaggcctgctatgtgcagaaggcaatagataagcacagtgcttctgaagaagttgtaatggataacattctgccaaacagtgatttttctgaaggtttacatttgtggcaatcaaatagttgtcatgcatttgtagccgttgaaggatcaggttaccattatggtgtaaggccacattcagggtcaacctatgctgttcttactcatcgcacacagagttggcaggggcttgagcaggacataacagaaaaggtcacccttggtaccgagtactttgttgctgcatatgttagagttcatggggaagttcatgagcccattggagttcaggtcactctcaaacttgaggaggacggttcttctaccaactatctttctattgcaaggattttagcctcacaagaacgctgggaaaaggtggaaggttcgtttaatctaacaactctaccgagacgtttggtgttctaccttgaaggcccccctcctggtgtggatttgctcatagattcggtcaccatctcctacaagaaaacagcttcatcagttggtggaacagagaacatcattttaaattatgatttttcgaaaggccttcatccttggaatcccatccgctgccatgcatatgtggcatcacaatggtctggtttccttgatggtattagagggaactcaggagagaactatgctgttgtttcaaagagaacagaacactggcagggtcttgaacaagatattacaaatcaagtgtctacaggcactgtttatgtcgtttctgctttcgttagagttgatgggattgttcaaggccaggttgaagtcaaagcaacccttaggttgcaaaatgcagatggatcaacacattataaccctgttggaagtgtggttgcctcaaaagaaaagtggaacaaattggaaggttccttttctttaacaaacatgccaaaaaatgttgtattttacctggaaggacctcctgctggtgtggatcttgtcattgattctgtcactgttgcttgctccagacataaacagtcaaaagaagtaaaagtaccaagtggagttgagactataattaaaaatcctcacttcgaagatgggttaaaaaattggtcaggaagaggatgcaatatctgcagacatgagttcagtgcatatgggaatgtccggcctttaaatggcagctatttcgcttcggcgactggacgggttcacaattggaatggcatccagcaagagatcacgggcagggtgcagcggaaagttctttatgagatcagttctgctgttcgaatatttgggagtgccaatgatactgaagtgcgtgctactctgtgggtacaagaatatggtcgtgagcgatatgtgggactggccaaaaaccagacttctgatcagcaatggacacatttgaaaggaaagttcctccttcatgctccctttaccaaagctgttattttcatagaagggcctcctgctggaattgacattcttgtagatggtcttgtcttatctccagcaagaaagctccaagctgcaccatgcccaaaaattgagaatgttctgtatggaactaatctattgcacaataatggcttcactcgtgggctttctgggtggagtcctatgggttcatgtcgattgagtatccagactgaagcaccccatatgttaccttctatcttgaaagaccgtgcaagccagaagcatataagtggtcattatatccttgccacgaaccgcacagatgtttggatgggtccttcgcaggtcataactgataagctaagattgcatgtcacttacagagtatctgcttgggtacgagttggttctggaggacatggacgtcaccatgtaaatgtctgtcttgctgtggataaaaaccaatgggtcaatggtgggcaagtggatgctgatggggatcaatggtatgaaataaaaggagcattcaaacttgaaaagcagccatccaaagttactgcatatgttcaaggccctcctgcaggtgttgatatcagagtcatggactttcaaatatatgccgtcgacagaaaagcacggtttgagtatctgaaggagaaaacagacaaggtaagaaagcgtgatgttgttctaaagttccaaggatcgaatgcagtgaatcttctaggttcatctttgaggatacaacagaccgagaatagctttccatttggatcttgcatcgcgagacacaacattgagaacgaggatcttgctgagttttttgtgaagaacttcaattgggctgtatttgagaatgaattgaaatggtaccatacagaagcagaacaagggagacttaattataaagattctgatgagttgcttgagttttgtgagaaacataagatacaggttcgtggccactgtttattctgggaagtggaagacgctgtccaaccttgggttcagtcattgcaaggtcaccacttaatggctgccatccaaaatcgtttgcaaagcctattgtcaaggtacaaaggtcgatttagacatcacgatgttaacaatgagatgctacatgggtctttctatgaagacagattgggaagggacattagagcttacatgttcagagaagcacataagcttgatccttctgctgtcctatttgttaatgattacaacgtcgaagatggatgtgacacaaaatctacccccgagaaattggttgagcaggtcgttgatctccaagataggggcgctccagttggtgggatcggtgtgcaaggtcatatcagccatccggtaggagaaatcatatgtgattccctggacaagctcgccatactgggtctcccgatctggattactgagttggatgtcacagcagagaacgagcacatacgagctgatgatctagaggtgttcctccgggaagcatttgcacatcctgctgtggggggaatcatcctctggggattctgggagatgtttatgtttcgagagcacgcccatctggtcgatgctgatgggacaatcaacgaggctggcaggaggtaccttgctctcaaacaagagtggctgacccgtatgaacggcagtgtcgatcaccaaggagagtttaagttcagaggataccatggttcgtacacagtggaagtgaacacgccttcaggcaaggtagctagatcgtttgttgttgacaaggatagcccggttcaggtgatcgctctgaatgtttaatgtgtgggaaatcatgcgcgtgtcctgtattttagcgatgtactgaggtgttgaacacagatagtttcatagctgatgccacgccttcagtgtacagaatattttcacgtttattctctgttctattttttgggtgattataacgcgatatttacattaccatacggggcagaatctgaacaaaaccttgcgcaagaacattaacgggacatccaacctccaattcatttgttggaaaacttcaaagtcataaatgttcaacttttcaatggcactggtaagaactaagaagtaaaaaaccatcccttggttacgattctgtgcatttttc

SEQ ID NO: 65245 - DNA, 2459 bp, Zea Mays
gtttcttccccggtacaaccaaccaaacggaccgtatatagttgggagtgttaaattttctcccctactcctgtagtctgtatgagcgccgagaatcgagtttgcgctctcctttccggctttccgcccaaacagccgtcgggcgtcccacggccgccgcccctgccggagatacgcgtagccgggagttaagggatgagtcctcaaatgctgttattggaaacatcttaagttagagtaagttgctgaaactatggaagaggttcaaaactgtgtgatgaagctgcggagcaatccaaggcggcacagggataaagtgtatgttggctgtggggctggatttggtggagacaggctaatggctgcttataagttgctgcagagagtcaaggagcttaattacctagttctcgagtgtttggcagagcgaactctggcggatcgataccgaattatggtgtcaggaggcaaaggctacgatcctcgggtcaaagagtggatgtctttgcttctacccttggcttttgaacggaaagtttgcatcataactaacatgggggcaatggatcctcttggagcacagaaagaagtactgaacctggcatctgtcttgggactggagataacagttgccgtagcttatgaatcatcctttgaaactcaaggaagccctgtattgtccgatgaatcaacaggagggagagggggatgtagcacatatcttggggcagcttcaattgtacattgcttggaaaactataaaccacatgttgtcattacttcacgggttgctgatgcttcactcttcttagcacctatgatctatgaattaggttggaattggaatgacacacagttggcacaaggaacattagcaagccatcttctagagtgtggctgccaactcactggaggatatttcatgcaccctggagatgcatacagggattttccttttgaacaacttctggatttgtctctcccatttgccgaagttagttgcagaggagaagtcattgtcagtaaggttgtagatttctgtaatgtacagttccatcaaatatcaaaagacaaggtcagctgtgatggagcaaaaccttctaatgcttgttgccctgagaaactcctgcaattatctcctactgaaagtggatggaaaggctggggagagatctcatatggggggcatcaatgtttaaagcgtgcccaggcagcagaataccttgtaaggtcgtggataggtgaaaggtacccaggcattaatgaaaaaattgtctcatatgtcatgggctatgatagtttgaaagctattggaggtgatgaggatagttacttggccaagcaagtattggatgtaaggcttcggatggatggtctcttcgagcttgaagagcatgctgttcagtttgtcgaagaatttattgctctatatacaaatggtccagctggtggcggtggaatcagcactggacacaggaaggaaattattctgcaaaagatgctggttgatcgggaaaacatcttttggcgatcgcatgcaaagaaggcgagcattccctgcctgcataatcaagctacatattctgaaacaggtcaggcacgtatttcacaagcgcaacgaaacccaacatgtcgtacaatggccattcaacactttgaagcaagcacggagaccccagcatcccctgctccagctttacctgggaaaagggtcgctctctaccatgtggctcacagcagggccggtgacaaggggaatgatatgaacttctctgtcattcctcactcccctgctgacatcggccggctcaggtccgtaataactccggattgggtgaagaacgctgtgtcacctctgcttggttcgtcttcgtttcctgacgagcgagatgttcagcatcgaaacaagctgcttgagcttgtcaccgtggaaatttactacgtcccgggcataagctccctgaatgttgtggtgaggaatatcctggatggtggcgtcaactgctcgaggaggatagatcggcatggaaagaccttgtcagatgtcatattgtgccaacaagttatcctaccgccatgattgtcaatattcttatccgtattcgaattaaaatatggtaaatagtatctgtattcgaaccaaaatatggtaaatagtgacatccgaatttgtatccgtgcgtatttgatccgaatacatctctattaattgactacagtacccactataaacttatgtgtattaatattattaaggtttgttttttagagcctgtgtgaactctgggagacttgatgctaataccagagccgtgtacaggtgaagacggagcaattctgtcacccgttttacgcttacccatattatattatattatattatattatattaaatattatctcaggaattactttttttcgtttttactgtagcaaaattttggtttgacaaaaaaata

SEQ ID NO: 65246 - DNA, 2592 bp, Zea Mays
ctcccctactcctgtagtctgtatgagcgccgagaatcgagtttgcgctctcctttccggctttccgcccaaacagccgtcgggcgtcccacggccgccgcccctgccggagatacgcgtagccgggagttaagggatgagtcctcaaatgctgttattggaaacatcttaagttagagtaagttgctgaaactatggaagaggttcaaaactgtgtgatgaagctgcggagcaatccaaggcggcacagggataaagtgtatgttggctgtggggctggatttggtggagacaggctaatggctgcttataagttgctgcagagagtcaaggagcttaattacctagttctcgagtgtttggcagagcgaactctggcggatcgataccgaattatggtgtcaggaggcaaaggctacgatcctcgggtcaaagagtggatgtctttgcttctacccttggcttttgaacggaaagtttgcatcataactaacatgggggcaatggatcctcttggagcacagaaagaagtactgaacctggcatctgtcttgggactggagataacagttgccgtagcttatgaatcatcctttgaaactcaaggaagccctgtattgtccgatgaatcaacaggagggagagggggatgtagcacatatcttggggcagcttcaattgtacattgcttggaaaactataaaccacatgttgtcattacttcacgggttgctgatgcttcactcttcttagcacctatgatctatgaattaggttggaattggaatgacacacagttggcacaaggaacattagcaagccatcttctagagtgtggctgccaactcactggaggatatttcatgcaccctggagatgcatacagggattttccttttgaacaacttctggatttgtctctcccatttgccgaagttagttgcagaggagaagtcattgtcagtaaggtagatggcagtggaggccttttgagcccccatacatgtgctgaacagcttctttatgaagttggagatcctgcaaactacataactcctgatatggtgaagtcaaaaccaattacagttacaattgtggctagctccttattgaaacattgattatattttgatggagcaggttgtagatttctgtaatgtacagttccatcaaatatcaaaagacaaggtcagctgtgatggagcaaaaccttctaatgcttgttgccctgagaaactcctgcaattatctcctacttacctatttctattctttaggaaagtggatggaaaggctggggagagatctcatatggggggcatcaatgtttaaagcgtgcccaggcagcagaataccttgtaaggtcgtggataggtgaaaggtacccaggcattaatgaaaaaattgtctcatatgtcatgggctatgatagtttgaaagctattggaggtgatgaggatagttacttggccaagcaagtattggatgtaaggcttcggatggatggtctcttcgagcttgaagagcatgctgttcagtttgtcgaagaatttattgctctatatacaaatggtccagctggtggcggtggaatcagcactggacacaggaaggaaattattctgcaaaagatgctggttgatcgggaaaacatcttttggcgatcgcatgcaaagaaggcgagcattccctgcctgcataatcaagctacatattctgaaacaggtcaggcacgtatttcacaagcgcaacgaaacccaacatgtcgtacaatggccattcaacactttgaagcaagcacggagaccccagcatcccctgctccagctttacctgggaaaagggtcgctctctaccatgtggctcacagcagggccggtgacaaggggaatgatatgaacttctctgtcattcctcactcccctgctgacatcggccggctcaggtccgtaataactccggattgggtgaagaacgctgtgtcacctctgcttggttcgtcttcgtttcctgacgagcgagatgttcagcatcgaaacaagctgcttgagcttgtcaccgtggaaatttactacgtcccgggcataagctccctgaatgttgtggtgaggaatatcctggatggtggcgtcaactgctcgaggaggatagatcggcatggaaagaccttgtcagatgtcatattgtgccaacaagttatcctaccgccatgattgtcaatattcttatccgtattcgaattaaaatatggtaaatagtatctgtattcgaaccaaaatatggtaaatagtgacatccgaatttgtatccgtgcgtatttgatccgaatacatctctattaattgactacagtacccactataaacttatgtgtattaatattattaaggtttgttttttagagcctgtgtgaactctgggagacttgatgctaataccagagccgtgtacaggtgaagacggagcaattctgtcacccgttttacgcttacccatattatattatattatattatattatattaaatattatctcaggaattactttttttcgtttttactgtagcaaaattttggtttgacaaaaaaata

SEQ ID NO: 65247 - DNA, 698 bp, Zea Mays
agtctgtatgagcgccgagaatcgagtttgcgctctcctttccggctttccgcccaaacagccgtcgggcgtcccacggccgccgcccctgccggagatacgcgtagccgggagttaagggatgagtcctcaaatgctgttattggaaacatcttaagttagagtaagttgctgaaactatggaagaggttcaaaactgtgtgatgaagctgcggagcaatccaaggcggcacagggataaagtgtatgttggctgtggggctggatttggtggagacaggctaatggctgcttataagttgctgcagagagtcaaggagcttaattacctagttctcgagtgtttggcagagcgaactctggcggatcgataccgaattatggtgtcaggaggcaaaggctacgatcctcgggtcaaagagtggatgtctttgcttctacccttggcttttgaacggaaagtttgcatcataactaacatgggggcaagtaagatattgctggctatggttcaactttagtgcgtgattaccttttcacttcttttgcctgtttcttcatgttacgtcagtggatcctcttggagcacagaaagaagtactgaacctggcatctgtcttgggactggagataacagttgccgtagcttatgaatcatcctttgaaactcaagaaagtgataatgaagattggatgat

SEQ ID NO: 65248 - DNA, 3078 bp, Zea Mays
agtctgtatgagcgccgagaatcgagtttgcgctctcctttccggctttccgcccaaacagccgtcgggcgtcccacggccgccgcccctgccggagatacgcgtagccgggagttaagggatgagtcctcaaatgctgttattggaaacatcttaagttagagtaagttgctgaaactatggaagaggttcaaaactgtgtgatgaagctgcggagcaatccaaggcggcacagggataaagtgtatgttggctgtggggctggatttggtggagacaggctaatggctgcttataagttgctgcagagagtcaaggagcttaattacctagttctcgagtgtttggcagagcgaactctggcggatcgataccgaattatggtgtcaggaggcaaaggctacgatcctcgggtcaaagagtggatgtctttgcttctacccttggcttttgaacggaaagtttgcatcataactaacatgggggcaagtaagatattgctggctatggttcaactttagtgcgtgattaccttttcacttcttttgcctgtttcttcatgttacgtcagtggatcctcttggagcacagaaagaagtactgaacctggcatctgtcttgggactggagataacagttgccgtagcttatgaatcatcctttgaaactcaaggaagccctgtattgtccgatgaatcaacaggagggagagggggatgtagcacatatcttggggcagcttcaattgtacattgcttggaaaactataaaccacatgttgtcattacttcacgggttgctgatgcttcactcttcttagcacctatgatctatgaattaggttggaattggaatgacacacagttggcacaaggaacattagcaagccatcttctagagtgtggctgccaactcactggaggatatttcatgcaccctggagatgcatacagggattttccttttgaacaacttctggatttgtctctcccatttgccgaagttagttgcagaggagaagtcattgtcagtaaggtagatggcagtggaggccttttgagcccccatacatgtgctgaacagcttctttatgaagttggagatcctgcaaactacataactcctgatatggttgtagatttctgtaatgtacagttccatcaaatatcaaaagacaaggtcagctgtgatggagcaaaaccttctaatgcttgttgccctgagaaactcctgcaattatctcctactgtacgtattccttgataattaaatggtacaaactttatgtttatcttttagtccttccaacatagaacttgattgtgatctatgaccacaaagacatgcataatgaacaacatagttttaatcagggatataaaattctcccttctcaaaataccatgcccagtaagcagctgagaactaactggtatctgttgtttcctaattgaacatataggtcttctgaaaatattttctttaaaatgtctgtgctttcagtattataagactttttcaactctgcgaacagtgcagtctacagtgcaaaacagtgttcaaggtgaccatatgagtaacctgttggatacggtctaaaaggtcgggttgtagtcataaaaaactgataacactaaagtttcttcagacacatgaagtgtctcacgtattgagtaaatattgtttgtcaacagcaatgcatttttcaggttggtctagttaggtgctgatcaatttgcatagtacctatttctattctttaggaaagtggatggaaaggctggggagagatctcatatggggggcatcaatgtttaaagcgtgcccaggcagcagaataccttgtaaggtcgtggataggtgaaaggtacccaggcattaatgaaaaaattgtctcatatgtcatgggctatgatagtttgaaagctattggaggtgatgaggatagttacttggccaagcaagtattggatgtaaggcttcggatggatggtctcttcgagcttgaagagcatgctgttcagtttgtcgaagaatttattgctctatatacaaatggtccagctggtggcggtggaatcagcactggacacaggaaggaaattattctgcaaaagatgctggttgatcgggaaaacatcttttggcgatcgcatgcaaagaaggcgagcattccctgcctgcataatcaagctacatattctgaaacaggtcaggcacgtatttcacaagcgcaacgaaacccaacatgtcgtacaatggccattcaacactttgaagcaagcacggagaccccagcatcccctgctccagctttacctgggaaaagggtcgctctctaccatgtggctcacagcagggccggtgacaaggggaatgatatgaacttctctgtcattcctcactcccctgctgacatcggccggctcaggtccgtaataactccggattgggtgaagaacgctgtgtcacctctgcttggttcgtcttcgtttcctgacgagcgagatgttcagcatcgaaacaagctgcttgagcttgtcaccgtggaaatttactacgtcccgggcataagctccctgaatgttgtggtgaggaatatcctggatggtggcgtcaactgctcgaggaggatagatcggcatggaaagaccttgtcagatgtcatattgtgccaacaagttatcctaccgccatgattgtcaatattcttatccgtattcgaattaaaatatggtaaatagtatctgtattcgaaccaaaatatggtaaatagtgacatccgaatttgtatccgtgcgtatttgatccgaatacatctctattaattgactacagtacccactataaacttatgtgtattaatattattaaggtttgttttttagagcctgtgtgaactctgggagacttgatgctaataccagagccgtgtacaggtgaagacggagcaattctgtcacccgttttacgcttacccatattatattatattatattatattatattaaatattatctcaggaattactttttttcgtttttactgtagcaaaattttggtttgacaaaaaaata

SEQ ID NO: 65249 - DNA, 1874 bp, Zea Mays
aaacatcctaaaaaaatatgaaaagggatgtagcacatatcttggggcagcttcaattgtacattgcttggaaaactataaaccacatgttgtcattacttcacgggttgctgatgcttcactcttcttagcacctatgatctatgaattaggttggaattggaatgacacacagttggcacaaggaacattagcaagccatcttctagagtgtggctgccaactcactggaggatatttcatgcaccctggagatgcatacagggattttccttttgaacaacttctggatttgtctctcccatttgccgaagttagttgcagaggagaagtcattgtcagtaaggtagatggcagtggaggccttttgagcccccatacatgtgctgaacagcttctttatgaagttggagatcctgcaaactacataactcctgatatggttgtagatttctgtaatgtacagttccatcaaatatcaaaagacaaggtcagctgtgatggagcaaaaccttctaatgcttgttgccctgagaaactcctgcaattatctcctactgaaagtggatggaaaggctggggagagatctcatatggggggcatcaatgtttaaagcgtgcccaggcagcagaataccttgtaaggtcgtggataggtgaaaggtacccaggcattaatgaaaaaattgtctcatatgtcatgggctatgatagtttgaaagctattggaggtgatgaggatagttacttggccaagcaagtattggatgtaaggcttcggatggatggtctcttcgagcttgaagagcatgctgttcagtttgtcgaagaatttattgctctatatacaaatggtccagctggtggcggtggaatcagcactggacacaggaaggaaattattctgcaaaagatgctggttgatcgggaaaacatcttttggcgatcgcatgcaaagaaggcgagcattccctgcctgcataatcaagctacatattctgaaacaggtcaggcacgtatttcacaagcgcaacgaaacccaacatgtcgtacaatggccattcaacactttgaagcaagcacggagaccccagcatcccctgctccagctttacctgggaaaagggtcgctctctaccatgtggctcacagcagggccggtgacaaggggaatgatatgaacttctctgtcattcctcactcccctgctgacatcggccggctcaggtccgtaataactccggattgggtgaagaacgctgtgtcacctctgcttggttcgtcttcgtttcctgacgagcgagatgttcagcatcgaaacaagctgcttgagcttgtcaccgtggaaatttactacgtcccgggcataagctccctgaatgttgtggtgaggaatatcctggatggtggcgtcaactgctcgaggaggatagatcggcatggaaagaccttgtcagatgtcatattgtgccaacaagttatcctaccgccatgattgtcaatattcttatccgtattcgaattaaaatatggtaaatagtatctgtattcgaaccaaaatatggtaaatagtgacatccgaatttgtatccgtgcgtatttgatccgaatacatctctattaattgactacagtacccactataaacttatgtgtattaatattattaaggtttgttttttagagcctgtgtgaactctgggagacttgatgctaataccagagccgtgtacaggtgaagacggagcaattctgtcacccgttttacgcttacccatattatattatattatattatattatattaaatattatctcaggaattactttttttcgtttttactgtagcaaaattttggtttgacaaaaaaata

SEQ ID NO: 65250 - DNA, 1474 bp, Zea Mays
gaactcatgagtcctacattcctagaactcatcatacaggcatcctgatcttagttgaaatctgagaaatcttgctcgcatatatcgatgcaccagtttgtgaaggtttaataactgataaaaacaaagagggatgaagattcgaagaggttggggaaggaatttcatggaaaaattcagttgtggaggagcaaagaaagacactgaacctgaggcaaaactaacagcagccacgaaaatatctggtggcaggcctgtggaatcatcaaacaaattggttaacgcagctcctaccaggtgctcctcacagcgtgcaaggcaagaaactgcaggcagtggtaacttgagcgaggaattagacaagaagaaacaacaagagtgggataaggaaactacagaaggtcatgcagtgagccagcatgaagctggagcagaactagacatgaccatgattgtgcagtctatgaagcgcggaaagcgttcagcccggcgcaggagacagagttctgcacaactgcttgggtttaacgtcagaaacatggcgaaggcaggtcgaaatgatcaggctattggctcaaagaagatgaaaagaactcgtaggggcaccaggtcgttgtgcgtgcataataggggagctaaggaaaagaagtgtgttggaggtgaaagtgatgcaagtcaccagtctactcctgctaatttagtcaaggcccaggatagtccagcagatacagatgccgttgaacatctcagtgtgccaaaatctgacacatcattggaaccaaaggagccatgtggtatagatgcagatgaatttgcttctaatcagagtggtgtcccagtcccagcagatggcacaatcatgactaacatttggactgatttcaaagagagtgaagacgcagttgccgatggtcttatggcgacgactgatgtcatcagtctctacgaagccaaagagaatcacaccaagcttgaccctaagataattccaggcttagatctaaacgatggagccgagaagtttgatacttcgacggcgcaatctgctctggcatcgctactgcctaccgtctccgcgccagacccgtgcatcgagtttgccgttaagcttctcaaggacgaaacgccactggcagcatacgttccgcaggctgacgagatcattggcaaaatggtgtgccgtcagaagagcacagctgttgggacgtcaaagtctgctcagggcaggaaggagaagaaggactgaaagaacagatggcatccgctcgatcgacggaacctgatatgaggtgacgattttgtatctgcggatcagtgtaatcgtttgtcagtaaagcacaactggcagtcctagtgaccagtgcctcaagaaagtctttttgtgataattgcgttaactctctgtttcctatttgggttgaacaacaatttatgatggccctttctaaatcaaaaacagtcatgtttctttctg

SEQ ID NO: 65251 - DNA, 2382 bp, Zea Mays
gtgggtgggtggagatggagaaggcgttggtggatcgacgcacgggacacccttgcagcagcagcagcagcagcgcccatcactcgcgtccctctcttttcctcttctccattccgtcgcgtactcgcgtgcacagaaattccttcctctgcctccctgttcagctctccttttcccttcctcctcctgtaattctgttcgtgtgcgtgtaatttccgtgcaaatacacgcacgccgattttcgaaagcaaaaaaaaaaaaaggcgacggcaaggaatcccccgattaggaaagattctccgctccccgccttcaaatcccccaccggccaccacgacccgcctggattcgcctacgctctgtgctgccgaggtcgggattggtgctggaattcggtgcgccgagttgttccttgctcgattagacttccggttcggttcgcttcgttccaatcggggtttgctgcttccgccgccaccggtgcgctccgagctgctcaagctgggcgccggataccctctcgggctgcccgatctgattcagtccccaacaccacccccgctccgccgctgtggctgccgctcccctccccgctgactccggcgccatttcgacccgcgcggccggatccttggatggttccgatcgatccgggaccaagagacccaaggcttcgtcacctcacccgggccccggcgccggtggatccatggccggggagaaggcgccgcgcgcgttctccatcgaggagctcccgggccacctcatcggggaggtcctgacctcgggtgggctcgctgccgccgacctcgcgaggctcgaggccacctgccgcgcgctcaggccgctcgccgagtacgccgcgtccaagctctgcgccgcgcgggcggcgttcgctgccatggggccagccgcccggggtgagctgctggagaggtgcgggggaagctggaagagggtgctcaggttcctgcagtccgtagagcagtcgtcaggcaccgtcgagacctcatcgggcagcatgcaagtagccacaggaagatatcacacacttttggtccatgactcttctgtctattcttgtggatccagcttgtgtggtgtgttaggtcatggcccagatactacacaatgtgcagcattcagtcgggtttccttcccatcactttcccgtgttataaacatctctgcttcacacaaccatgctgcttttgttacggagtctggggaggttttcacctgtggtgataattcatcattatgctgtggtcatggcgaagtggggagaactatatttcgaccaatgcaagtagaagcgcttaaagggattccctgcaagcaggttgctactggtctaagttttactgtgattcttacaagggatggacaagtatatacttgtggaagcaatacacatggccaacttggtcacggtgacaccatagacagggccactccaaagcttatagaattgtttgaaggccccactcaggtggtgcagattgcagccggcgcaagctacacttttgctgtaacagatgatgggactgttcattcgtttgggtcttgcactaatttctgccttggacatggggatcagcatgacgaacttcttcctcgtgcaatccaatcatttaagaggaggaacattcatgtagtccgtgtttctgctggagatgagcatgctgtggctcttgatgcactaggacacgtatgtgcaaggaagaggaagacgtttgtcctcacggacgagggctcagttgttgcgtttggatggatgggttttgggagtctagggtttcttgaccgaggaacatcagacaaagtaatgaggccccgcgttcttgagagcctgcaggatcactacgtctcccaaataagcaccggactgtatcacactgtcgcagtgacaaataagggcattgtattcgggttcggggacaacgagcgagcacaacttgggcaggagtacattcgtgggtgcttaaaacctaccgagataatgttccaaaagagtatcgaagacataccaattgcggcgcctagtggttgacctcaaggccaagaggccaagaccaccattttggacactgttgcctgcatatatgttgtacttatattgaaattcttctcggtaagtgtattttatactttgtgatttgtgatgaacgggggaggacggaagagcaaagttggaggacagtgttgtgttgtgtagccaaagaagcatgtagtttagtaacgtgtgatgtaccgaataattcaacccaccatttttattctgtataaaatttattggtgtgtttgtattctttttcttgttcctcccacttttgctatctcggaatttattgtattactgcttaatgccctgtttgtttc

SEQ ID NO: 65252 - DNA, 2403 bp, Zea Mays
ggagaaggcgttggtggatcgacgcacgggacacccttgcagcagcagcagcagcagcgcccatcactcgcgtccctctcttttcctcttctccattccgtcgcgtactcgcgtgcacagaaattccttcctctgcctccctgttcagctctccttttcccttcctcctcctgtaattctgttcgtgtgcgtgtaatttccgtgcaaatacacgcacgccgattttcgaaagcaaaaaaaaaaaaaggcgacggcaaggaatcccccgattaggaaagattctccgctccccgccttcaaatcccccaccggccaccacgacccgcctggattcgcctacgctctgtgctgccgaggtcgggattggtgctggaattcggtgcgccgagttgttccttgctcgattagacttccggttcggttcgcttcgttccaatcggggtttgctgcttccgccgccaccggtgcgctccgagctgctcaagctgggcgccggataccctctcgggctgcccgatctgattcagtccccaacaccacccccgctccgccgctgtggctgccgctcccctccccgctgactccggcgccatttcgacccgcgcggccggatccttggatggttccgatcgatccgggaccaagagacccaaggcttcgtcacctcacccgggccccggcgccggtggatccatggccggggagaaggcgccgcgcgcgttctccatcgaggagctcccgggccacctcatcggggaggtcctgacctcgggtgggctcgctgccgccgacctcgcgaggctcgaggccacctgccgcgcgctcaggccgctcgccgagtacgccgcgtccaagctctgcgccgcgcgggcggcgttcgctgccatggggccagccgcccggggtgagctgctggagaggtgcgggggaagctggaagagggtgctcaggttcctgcagtccgtagagcagtcgtcaggcaccgtcgagacctcatcgggcagccttgtgtggtgtgttaggtcatggcccagatactacacaatgtgcagcattcagtcgggtttccttcccatcactttcccgtgttataaacatctctgcttcacacaaccatgctgcttttgttacggagtctggggaggttttcacctgtggtgataattcatcattatgctgtggtcatggcgaagtggggagaactatatttcgaccaatgcaagtagaagcgcttaaagggattccctgcaagcaggttgctactggtctaagttttactgtgattcttacaagggatggacaagtatatacttgtggaagcaatacacatggccaacttggtcacggtgacaccatagacagggccactccaaagcttatagaattgtttgaaggccccactcaggtggtgcagattgcagccggcgcaagctacacttttgctgtaacagatgatgggactgttcattcgtttgggtcttgcactaatttctgccttggacatggggatcagcatgacgaacttcttcctcgtgcaatccaatcatttaagaggaggaacattcatgtagtccgtgtttctgctggagatgagcatgctgtggctcttgatgcactaggacacgtttatacttggggcagaggatactgtggagccttaggtcatggtgatgagaacgataaaactagcccagaattgatcggcagcttgaagggccaagttgctgtgcaggtatgtgcaaggaagaggaagacgtttgtcctcacggacgagggctcagttgttgcgtttggatggatgggttttgggagtctagggtttcttgaccgaggaacatcagacaaagtaatgaggccccgcgttcttgagagcctgcaggatcactacgtctcccaaataagcaccggactgtatcacactgtcgcagtgacaaataagggcattgtattcgggttcggggacaacgagcgagcacaacttgggcaggagtacattcgtgggtgcttaaaacctaccgagataatgttccaaaagagtatcgaagacataccaattgcggcgcctagtggttgacctcaaggccaagaggccaagaccaccattttggacactgttgcctgcatatatgttgtacttatattgaaattcttctcggtaagtgtattttatactttgtgatttgtgatgaacgggggaggacggaagagcaaagttggaggacagtgttgtgttgtgtagccaaagaagcatgtagtttagtaacgtgtgatgtaccgaataattcaacccaccatttttattctgtataaaatttattggtgtgtttgtattctttttcttgttcctcccacttttgctatctcggaatttattgtattactgcttaatgccctgtttgtttc

SEQ ID NO: 65253 - DNA, 2322 bp, Zea Mays
cactcgcgtccctctcttttcctcttctccattccgtcgcgtactcgcgtgcacagaaattccttcctctgcctccctgttcagctctccttttcccttcctcctcctgtaattctgttcgtgtgcgtgtaatttccgtgcaaatacacgcacgccgattttcgaaagcaaaaaaaaaaaaaggcgacggcaaggaatcccccgattaggaaagattctccgctccccgccttcaaatcccccaccggccaccacgacccgcctggattcgcctacgctctgtgctgccgaggtcgggattggtgctggaattcggtgcgccgagttgttccttgctcgattagacttccggttcggttcgcttcgttccaatcggggtttgctgcttccgccgccaccggtgcgctccgagctgctcaagctgggcgccggataccctctcgggctgcccgatctgattcagtccccaacaccacccccgctccgccgctgtggctgccgctcccctccccgctgactccggcgccatttcgacccgcgcggccggatccttggatggttccgatcgatccgggaccaagagacccaaggcttcgtcacctcacccgggccccggcgccggtggatccatggccggggagaaggcgccgcgcgcgttctccatcgaggagctcccgggccacctcatcggggaggtcctgacctcgggtgggctcgctgccgccgacctcgcgaggctcgaggccacctgccgcgcgctcaggccgctcgccgagtacgccgcgtccaagctctgcgccgcgcgggcggcgttcgctgccatggggccagccgcccggggtgagctgctggagaggtgcgggggaagctggaagagggtgctcaggttcctgcagtccgtagagcagtcgtcaggcaccgtcgagacctcatcgggcagccttgtgtggtgtgttaggtcatggcccagatactacacaatgtgcagcattcagtcgggtttccttcccatcactttcccgtgttataaacatctctgcttcacacaaccatgctgcttttgttacggagtctggggaggttttcacctgtggtgataattcatcattatgctgtggtcatggcgaagtggggagaactatatttcgaccaatgcaagtagaagcgcttaaagggattccctgcaagcaggttgctactggtctaagttttactgtgattcttacaagggatggacaagtatatacttgtggaagcaatacacatggccaacttggtcacggtgacaccatagacagggccactccaaagcttatagaattgtttgaaggccccactcaggtggtgcagattgcagccggcgcaagctacacttttgctgtaacagatgatgggactgttcattcgtttgggtcttgcactaatttctgccttggacatggggatcagcatgacgaacttcttcctcgtgcaatccaatcatttaagaggaggaacattcatgtagtccgtgtttctgctggagatgagcatgctgtggctcttgatgcactaggacacaggatactgtggagccttaggtcatggtgatgagaacgataaaactagcccagaattgatcggcagcttgaagggccaagttgctgtgcaggtatgtgcaaggaagaggaagacgtttgtcctcacggacgagggctcagttgttgcgtttggatggatgggttttgggagtctagggtttcttgaccgaggaacatcagacaaagtaatgaggccccgcgttcttgagagcctgcaggatcactacgtctcccaaataagcaccggactgtatcacactgtcgcagtgacaaataagggcattgtattcgggttcggggacaacgagcgagcacaacttgggcaggagtacattcgtgggtgcttaaaacctaccgagataatgttccaaaagagtatcgaagacataccaattgcggcgcctagtggttgacctcaaggccaagaggccaagaccaccattttggacactgttgcctgcatatatgttgtacttatattgaaattcttctcggtaagtgtattttatactttgtgatttgtgatgaacgggggaggacggaagagcaaagttggaggacagtgttgtgttgtgtagccaaagaagcatgtagtttagtaacgtgtgatgtaccgaataattcaacccaccatttttattctgtataaaatttattggtgtgtttgtattctttttcttgttcctcccacttttgctatctcggaatttattgtattactgcttaatgccctgtttgtttc

SEQ ID NO: 65254 - DNA, 1360 bp, Zea Mays
atcaattcagaaaaaaatgtaattctcttgtatttggagacaggtttccctgatggtggatggcattgaaaccgctattttttaagtttccaaattgttttgttttcacctgtggtgataattcatcattatgctgtggtcatggcgaagtggggagaactatatttcgaccaatgcaagtagaagcgcttaaagggattccctgcaagcaggttgctactggtctaagttttactgtgattcttacaagggatggacaagtatatacttgtggaagcaatacacatggccaacttggtcacggtgacaccatagacagggccactccaaagcttatagaattgtttgaaggccccactcaggtggtgcagattgcagccggcgcaagctacacttttgctgtaacagatgatgggactgttcattcgtttgggtcttgcactaatttctgccttggacatggggatcagcatgacgaacttcttcctcgtgcaatccaatcatttaagaggaggaacattcatgtagtccgtgtttctgctggagatgagcatgctgtggctcttgatgcactaggacacgtttatacttggggcagaggatactgtggagccttaggtcatggtgatgagaacgataaaactagcccagaattgatcggcagcttgaagggccaagttgctgtgcaggtatgtgcaaggaagaggaagacgtttgtcctcacggacgagggctcagttgttgcgtttggatggatgggttttgggagtctagggtttcttgaccgaggaacatcagacaaagtaatgaggccccgcgttcttgagagcctgcaggatcactacgtctcccaaataagcaccggactgtatcacactgtcgcagtgacaaataagggcattgtattcgggttcggggacaacgagcgagcacaacttgggcaggagtacattcgtgggtgcttaaaacctaccgagataatgttccaaaagagtatcgaagacataccaattgcggcgcctagtggttgacctcaaggccaagaggccaagaccaccattttggacactgttgcctgcatatatgttgtacttatattgaaattcttctcggtaagtgtattttatactttgtgatttgtgatgaacgggggaggacggaagagcaaagttggaggacagtgttgtgttgtgtagccaaagaagcatgtagtttagtaacgtgtgatgtaccgaataattcaacccaccatttttattctgtataaaatttattggtgtgtttgtattctttttcttgttcctcccacttttgctatctcggaatttattgtattactgcttaatgccctgtttgtttc

SEQ ID NO: 65255 - DNA, 2750 bp, Zea Mays
gcatatcgtaaaaatagcttcgtgttaggagtaacctagctggttactatagtctatctctaacaaagatgtaaataaccaaggaatgtctttgtactataccttaactccaagtcctgtttggatagacgatgcaacgcttctattatttctttcacatacatataaacagcatagcatactacgaatacgtgtataccatgtccagaatccagcccaataatccaaacagtatacggcccaaccgagtaacctcatacaagaacctaaagagagaggaaaaaaccgcggatccaacaaccaattacaccgtccctactaaggtaatgttaaaaagaacactgcattcatccaccacgaagcagagttgaaaacacgggggctgcctgcctgcctcgatcaagctcctttagttgtaagggcccatgccaatgctggagccagcaccaccagcggcatctcgggatttggagtagctgaggtagtatacctcgcccaggatggccgtgaagaaggtaaatgccgcgccagcagcgaagacgcccttccgcaccgtctcgcatgagagggactcgccgtagaatacgcccctgtaccgggtgtggtacgcgttgcgtactgatcccgccagcaggcacgcctccgcgatgaggaaggtcaccctgtcaatgggaatgagacatgttgttggtaagcatttggatgggaagtgcagttgagattagttgaacaataagattttgttttattagatacgctggcttgatgttttaggtatccaaatcagttggacatattcaaaatatgccagaaaatatatcacgtgtttggttgtagtccatcatcttctcgctcctcactttttttatttggtttgtgaaataaaaatgagttaatctatcaccatttcattcctcataagctaataaatagtaataatataaggaataagttcattctaccaaatttatggaatggactaataatacaccacctcatctagaatacattgactcctcaaaccaaacacaccatagtatatctcgaatctttaggtaatgaaatacgaaaatatatgctcatgtcataacggcttgaagatgacttcagacagccgacaattcctagttcaggctttattgaattcaatttcaggaaggaaagcaagcaagcagcatccagagacacacagacacacaactcatgtgattccgaatacaatctgtggcttttgcgaatagattatggcagatgcttcctccagattccagaacgctggctaggcaaggacacccagaaagcaaggctattaattgatgttgacttgggaattgattaggagatgtcagtcacatggtgacctcaagagaaacaaatcaatgacagactattgaaaaaactaatgtggtttagcagttcatcacaaaatcttaacataagtcaagtcgtgtgtgaacaaatatcaatgcatagatatggatgtatcgaggtatcaaacatggtttcattactttactgcaagcccttgaccaaccgcttagctaagctaccccgaacaaataaagatgtagtttttactagtccctcaagtgaaatataaccaaaatttcaatggtgtgcattcaagttttgaaggaatctggctatgtgtataattgtggatatttagagtttatatatggatagatttatctcgaactattgcgcaatgttaatcttgctgactgtattagtgtgaaagttgtattctgagtattactgatcatcaaaaacgatactttgatggaaggggctttcaacatctccatcctatcacaggagtacgaagtctaccaaacactaagccccataaaaggaccagtaccaagcaatttgtggcacaaggacagtgggagtagctggacatctacaataaacaatgtagagatctagcagatctatgacaggtgctgaagataaatatctaaaacagcttcagagatctaagacagacatgtgccactactaacagcctcctaccaataattagttaaattattatagaggggttgtagcctgaaatccttgaaacatggcagtaaactgtatgtaaagagcagatgttagcttgcatgaggttacagagcttaaatactgagcattgccacgctagtgcagcttcagtaatgaaagcaaaagccccacccagcaaggggctaactggagaaggtgggagaaatgatttgcatctggccactagaaaagtactagtattatattattactaattgatgaatggatctcacaactcgttcgccaaaagcaatagagcaaagcgctgggtgagacgcttgaagtttaagacaagaaagtgacggtcggccactaaaacaagcgacacttcacctaataagactcaaaaggaaaagaaaaaaaaactaacatgcgcatcttcctgcagaggcaacagcggcgaaccagtagtcagttcaccaccacatggacagatggtgcatagcattctatcatccttttctgtctacgcctagaaactaagctgcagagcttggcaatcacaggatttcagttgaaaagcacaagatccagaccaagaacaggcggcggaaaacggatcttagatagctccgtgcacccgcagctgagaacgacgcgaaaccacgatgcagatcctatttttcaatctgctcgtagaactagaccagcgatgggacggatatagcagaatcctacccacccgagtttggatctcg

SEQ ID NO: 65256 - DNA, 1422 bp, Zea Mays
cccccaactgctggtgcctaccgaactcacgagcaaagcaaaggctccaaacttactcgtcgccctcaaaaaccacgctaatcagtgccaaaacgcaaataacgcgagggagaagaagagacagaaacagtaagggtttgactgtttggctaacgtcatggcgtcgacctctccgcgccgctcctctggcggggactcagcttccccgtccgcacccctcatcccctcgccgccgacctccccggcatccggcccctccggtggcccgctagggcggctcacgagcctccgcggcgcggcgcggttcatccgccgcacggggagccggcgcctgatgagggagccctccgtggcggtgcgggagacggccgccgagcacctcgaggagcgccagaccgactgggcctactcgaagcccgtcgtcgtgctcgacatgctctggaacctcgccttcgtcgccgtcgccgcggccgtactcgccgcatcggtgggcgagcggcccaccgtgccgctccgtgtctggatcgtaggctacgtgctccagtgcctcctccacgtactcagcgtcaccgtcgagtacaggcgtcgacgcaggaacgcggaccaggagggagcgggtgatgaggatttaaagctcagtattgtgaagcacttggagtctgcaaacacgatgttttccttcatatggtggattgttgggttctattgggtgtctgcaggagggagcatctgaagatgacataaacaacctatccaaattcaaatttcagacaatgagtgatgcagacaagctagctgctggcattgcagcacctgtgggtggagtgatgacagagtgtggtaccaatcctcctgtcgaacatattctctcagctgaggatgcagagtgctgtatctgcctatgcccgtatgaagatggcgtggaactacgtgagcttccttgcaaccaccattttcactgcagctgcattgacaagtggcttcacataaatgctacatgcccattgtgcaagttcgacatcatcaagagcaaccgtgacatagaagaggtctaggtcactaaggaaaaaacgccgcaaaacttttcgtcatgtctctgctgtgttcttcagtactaccgctaccacatttgcgatcctgagttgtgattaccggtcctttaggtgatgcacaaatggtactcgtgaatattctttttattagcagttttctgcagggcctgtacattctctttctgctcgatccgattgcattgcagattgatttgtaaatgagtacatggtcacgttgaaccttgaaagcagtcaatcatttcaaaaatggtttatgaattggaagctagtatacaggctgcttttggttggcattaatgattagagggcaatatgaatgcgggaaggtttgtgcagatgttcacttctg

SEQ ID NO: 65257 - DNA, 971 bp, Zea Mays
ggaaggttgatttattgtgaagcacttggagtctgcaaacacgatgttttccttcatatggtggattgttgggttctattgggtgtctgcaggtggtaaagctttatcacatgatgctcctcagctttattggctgtcaattgtttttctggcgtttgatgttttctttgtggtcttctgtgttgccttggcttgtgtgattggaatcgctgtttgttgctgccttccctgcattattgctatcttatatgctgtaactgatcagcaggagggagcatctgaagatgacataaacaacctatccaaattcaaatttcagacaatgagtgatgcagacaagctagctgctggcattgcagcacctgtgggtggagtgatgacagagtgtggtaccaatcctcctgtcgaacatattctctcagctgaggatgcagagtgctgtatctgcctatgcccgtatgaagatggcgtggaactacgtgagcttccttgcaaccaccattttcactgcagctgcattgacaagtggcttcacataaatgctacatgcccattgtgcaagttcgacatcatcaagagcaaccgtgacatagaagaggtctaggtcactaaggaaaaaacgccgcaaaacttttcgtcatgtctctgctgtgttcttcagtactaccgctaccacatttgcgatcctgagttgtgattaccggtcctttaggtgatgcacaaatggtactcgtgaatattctttttattagcagttttctgcagggcctgtacattctctttctgctcgatccgattgcattgcagattgatttgtaaatgagtacatggtcacgttgaaccttgaaagcagtcaatcatttcaaaaatggtttatgaattggaagctagtatacaggctgcttttggttggcattaatgattagagggcaatatgaatgcgggaaggtttgtgcagatgttcacttctg

SEQ ID NO: 65258 - DNA, 2654 bp, Zea Mays
gagttctgcaacggatagccgctatttggctacgcgtgcaacaggcatatataatttcctgttcctccgcctcgtctccgcctcccatcgccgcatcagatatccgcacaaaccaagccatcagcgccatggcgatctccacctggagcgcgcgccttctcctcacccctgcttcctcccgcgccaccctatcaccccctcgccctcccactacaaacccgctctcatcgttctttcctcgcaatcgtctccatttcgtgcgcccgcgcccgcgcccgccgtgcgcctacatctctgcgccagcgccgggcccggaggccgcatacgcgccgccttctctcgacgccaccgccgcggcagccgatgtcgccgctgcgatatcctcctccgacgcggtcacttgggccggcgtctgggcgctgctctcgcgacacagggcccgcatcgcggtctgcatcgccgcgctcgtcgcctgcaccacctgcacgctctccatgccgctcttctcagggaggtttttcgagaccctgattgggagggggaacgagccattgtggaggctcttatccaagattgcgatactgtacacactggagcccatcttcaccatcatattcgtgatcaatataactatcatctgggagcaggttatggcaaggctgcggagccagatatttcgaaggattctgatccaaaagatgttattttttgatcgtcacaaggttggtgaattgaccggtttgttgacatctgatttgggttccttgaagagtgttgtaagtgataacatatccagagatcgtggactgagggcactctctgaggcaagaaattttacactatgagaatatcattggtacactttgtatacttttcacactatcaactgagctagctccagttcttgggctccttatggtgtccgtctccgtgctagttgctattttcaagaggtcaactgttcccacttttaaatcttatggaatcgtgcaagcacgcatatcagactgtgcatcagagacattttcagctattcgtactgttcgatcatttggtggtgaaaaacgacaaatttctttgtttgacaatttggcacatgcttaccaaaataatggcacaaaacttggagtgctgaaatctgctaatgaatcattaactcgagtagtcgtctatgtctccctaatggcactttacattcttggcggtagaaaggtcaatgcgggcaaattatctgttggaaccatggtatcttttattggttacaccttcacattaacctttgctgttcaaggagctgttaatacccttggtgatctgcgtggcacattggcttccgtagagagaataaattctattctttcagcgaaggacattgatgattcacttgcatatggtttagccaaagaacttgatggcaaagagtttgatgattccaatggagtgtatgaaaatggatctgttaacaaacatttcatgtcagagctgaaatcatccagtagctgtagtaatctagcctggtctggtgacattcgtctgaaagaagtccatttctcttatccattgagatctaatgtggagattttaaatggccttgaccttacaattgagtgtggaaaagtcacagcacttgtcgggcctagtggtgctgggaaaagcacagtggtacaacttctagcacggtattatgagccaactcaaggttccatcactgtcgcaggagaagacatccgtgtatttgacaaaagggaatggtctcgagtagtatctctagtcaatcaggatccggtcctattctccgtgtctgttggagaaaatattgcttatggtctcccagatgatgttgtctctaaggatgagataataaaagctgctaaagctgccaatgctcatgaattcatcatctctcttccacaggggtatgatactcttgttggagagcgaggtagtctcctaagtgggggacaaaggcagaggattgcaattgcacgagccctcttgaaaaatgctcctattctaatacttgatgaggctactagtgcactggacgcgacaagtgagcgactcgtgcaggaagctctcaatcacttgatgaagggaaggacttctctggtcattgctcacaggttgagtaccgtacagaatgcacatcgaattgctgtttgttcagagggcaggataactgaactggggacacaccgagaactggttgctaagggaggcagttatgcatcacttgtcgggacacagagacttgctttcgagtaatcacacgtcaactgcgaggaacggatcgactgcaatgtaggggattctatatattactctattttccttcagggcccatcggaacataggaattctcgtggaaatcagaatgaatttcatgggtaaaatatagaaaacagaagatgaaaaaaaacccaccttctgaatgtggccttggttataggttgtttcttatccacagaagcaacacatgaatcagaaaacacatgtatgtatcgaactttataatatattaacctaaacaaaggacaacaaacttcttatcctcacttgcattccttatttattagttctatgtttggttgtaatgatgggacagcatgggatggaacgatcccttagataaggctatttagagtgcgtttggt

SEQ ID NO: 65259 - DNA, 2629 bp, Zea Mays
gagttctgcaacggatagccgctatttggctacgcgtgcaacaggcatatataatttcctgttcctccgcctcgtctccgcctcccatcgccgcatcagatatccgcacaaaccaagccatcagcgccatggcgatctccacctggagcgcgcgccttctcctcacccctgcttcctcccgcgccaccctatcaccccctcgccctcccactacaaacccgctctcatcgttctttcctcgcaatcgtctccatttcgtgcgcccgcgcccgcgcccgccgtgcgcctacatctctgcgccagcgccgggcccggaggccgcatacgcgccgccttctctcgacgccaccgccgcggcagccgatgtcgccgctgcgatatcctcctccgacgcggtcacttgggccggcgtctgggcgctgctctcgcgacacagggcccgcatcgcggtctgcatcgccgcgctcgtcgcctgcaccacctgcacgctctccatgccgctcttctcagggaggtttttcgagaccctgattgggagggggaacgagccattgtggaggctcttatccaagattgcgatactgtacacactggagcccatcttcaccatcatattcgtgatcaatataactatcatctgggagcaggttatggcaaggctgcggagccagatatttcgaaggattctgatccaaaagatgttattttttgatcgtcacaaggttggtgaattgaccggtttgttgacatctgatttgggttccttgaagagtgttgtaagtgataacatatccagagatcgtggactgagggcactctctgagatcattggtacactttgtatacttttcacactatcaactgagctagctccagttcttgggctccttatggtgtccgtctccgtgctagttgctattttcaagaggtcaactgttcccacttttaaatcttatggaatcgtgcaagcacgcatatcagactgtgcatcagagacattttcagctattcgtactgttcgatcatttggtggtgaaaaacgacaaatttctttgtttgacaatttggcacatgcttaccaaaataatggcacaaaacttggagtgctgaaatctgctaatgaatcattaactcgagtagtcgtctatgtctccctaatggcactttacattcttggcggtagaaaggtcaatgcgggcaaattatctgttggaaccatggtatcttttattggttacaccttcacattaacctttgctgttcaaggagctgttaatacccttggtgatctgcgtggcacattggcttccgtagagagaataaattctattctttcagcgaaggacattgatgattcacttgcatatggtttagccaaagaacttgatggcaaagagtttgatgattccaatggagtgtatgaaaatggatctgttaacaaacatttcatgtcagagctgaaatcatccagtagctgtagtaatctagcctggtctggtgacattcgtctgaaagaagtccatttctcttatccattgagatctaatgtggagattttaaatggccttgaccttacaattgagtgtggaaaagtcacagcacttgtcgggcctagtggtgctgggaaaagcacagtggtacaacttctagcacggtattatgagccaactcaaggttccatcactgtcgcaggagaagacatccgtgtatttgacaaaagggaatggtctcgagtagtatctctagtcaatcaggatccggtcctattctccgtgtctgttggagaaaatattgcttatggtctcccagatgatgttgtctctaaggatgagataataaaagctgctaaagctgccaatgctcatgaattcatcatctctcttccacaggggtatgatactcttgttggagagcgaggtagtctcctaagtgggggacaaaggcagaggattgcaattgcacgagccctcttgaaaaatgctcctattctaatacttgatgaggctactagtgcactggacgcgacaagtgagcgactcgtgcaggaagctctcaatcacttgatgaagggaaggacttctctggtcattgctcacaggttgagtaccgtacagaatgcacatcgaattgctgtttgttcagagggcaggataactgaactggggacacaccgagaactggttgctaagggaggcagttatgcatcacttgtcgggacacagagacttgctttcgagtaatcacacgtcaactgcgaggaacggatcgactgcaatgtaggggattctatatattactctattttccttcagggcccatcggaacataggaattctcgtggaaatcagaatgaatttcatgggtaaaatatagaaaacagaagatgaaaaaaaacccaccttctgaatgtggccttggttataggttgtttcttatccacagaagcaacacatgaatcagaaaacacatgtatgtatcgaactttataatatattaacctaaacaaaggacaacaaacttcttatcctcacttgcattccttatttattagttctatgtttggttgtaatgatgggacagcatgggatggaacgatcccttagataaggctatttagagtgcgtttggt

SEQ ID NO: 65260 - DNA, 3137 bp, Zea Mays
gctatttggctacgcgtgcaacaggcatatataatttcctgttcctccgcctcgtctccgcctcccatcgccgcatcagatatccgcacaaaccaagccatcagcgccatggcgatctccacctggagcgcgcgccttctcctcacccctgcttcctcccgcgccaccctatcaccccctcgccctcccactacaaacccgctctcatcgttctttcctcgcaatcgtctccatttcgtgcgcccgcgcccgcgcccgccgtgcgcctacatctctgcgccagcgccgggcccggaggccgcatacgcgccgccttctctcgacgccaccgccgcggcagccgatgtcgccgctgcgatatcctcctccgacgcggtcacttgggccggcgtctgggcgctgctctcgcgacacagggcccgcatcgcggtctgcatcgccgcgctcgtcgcctgcaccacctgcacgctctccatgccgctcttctcagggaggtttttcgagaccctgattgggagggggaacgagccattgtggaggctcttatccaagattgcgatactgtacacactggagcccatcttcaccatcatattcgtgatcaatataactatcatctgggagcaggttatggcaaggctgcggagccagatatttcgaaggattctgatccaaaagatgttattttttgatcgtcacaaggttggtgaattgaccggtttgttgacatctgatttgggttccttgaagagtgttgtaagtgataacatatccagagatcgtggactgagggcactctctgagatcattggtacactttgtatacttttcacactatcaactgagctagctccagttcttgggctccttatggtgtccgtctccgtgctagttgctattttcaagaggtcaactgttcccacttttaaatcttatggaatcgtgcaagcacgcatatcagactgtgcatcagagacattttcagctattcgtactgttcgatcatttggtggtgaaaaacgacaaatttctttgtttgacaatttggcacatgcttaccaaaataatggcacaaaacttggagtgctgaaatctgctaatgaatcattaactcgagtagtcgtctatgtctccctaatggcactttacattcttggcggtagaaaggtcaatgcgggcaaattatctgttggaaccatggtatcttttattggttacaccttcacattaacctttgctgttcaaggagctgttaatacccttggtgatctgcgtggcacattggcttccgtagagagaataaattctattctttcagcgaaggacattgatgattcacttgcatatggtttagccaaagaacttgatggcaaagagtttgatgattccaatggagtgtatgaaaatggatctgttaacaaacatttcatgtcagagctgaaatcatccagtagctgtagtaatctagcctggtctggtgacattcgtctgaaaggtcatattattattacatctggtctggtgacatttgtctttacatctagggtgcccttatatctaagcttatactatatttcaccttttgtatgctttatatattattactatatagcgtattgttccttagcttatgggtcatgattgaatatcctcgtaacttaaaattgtgtcattagctcatcttttctaaaatattgtttcaccttctttatctaaaaacatacttaagatgaaatatgttcacacatcaaatttgtgaatagtactggtaactcaccagtgtatcattacctcgatagaacattatttcttttgattgtttttgtaatgtcgatagaacatgcaacattcaacctctaatgcactaacataacattcttggatgacttcagttctacttgctcatgtagtcatgtgtttctgacagaagtccatttctcttatccattgagatctaatgtggagattttaaatggccttgaccttacaattgagtgtggaaaagtcacagcacttgtcgggcctagtggtgctgggaaaagcacagtggtacaacttctagcacggtattatgagccaactcaaggttccatcactgtcgcaggagaagacatccgtgtatttgacaaaagggaatggtctcgagtagtatctctagtcaatcaggatccggtcctattctccgtgtctgttggagaaaatattgcttatggtctcccagatgatgttgtctctaaggatgagataataaaagctgctaaagctgccaatgctcatgaattcatcatctctcttccacaggggtatgatactcttgttggagagcgaggtagtctcctaagtgggggacaaaggcaggtaatcagctacattcacaattgaaggaagttcataattattccatagggttcataattctgttgtcaatgtacactcttatctgttgccttgcagaggattgcaattgcacgagccctcttgaaaaatgctcctattctaatacttgatgaggctactagtgcactggacgcgacaagtgagcgactcgtgcaggaagctctcaatcacttgatgaagggaaggacttctctggtcattgctcacaggttgagtaccgtacagaatgcacatcgaattgctgtttgttcagagggcaggataactgaactggggacacaccgagaactggttgctaagggaggcagttatgcatcacttgtcgggacacagagacttgctttcgagtaatcacacgtcaactgcgaggaacggatcgactgcaatgtaggggattctatatattactctattttccttcagggcccatcggaacataggaattctcgtggaaatcagaatgaatttcatgggtaaaatatagaaaacagaagatgaaaaaaaacccaccttctgaatgtggccttggttataggttgtttcttatccacagaagcaacacatgaatcagaaaacacatgtatgtatcgaactttataatatattaacctaaacaaaggacaacaaacttcttatcctcacttgcattccttatttattagttctatgtttggttgtaatgatgggacagcatgggatggaacgatcccttagataaggctatttagagtgcgtttggt

SEQ ID NO: 65261 - DNA, 1786 bp, Zea Mays
atttcctgttcctccgcctcgtctccgcctcccatcgccgcatcagatatccgcacaaaccaagccatcagcgccatggcgatctccacctggagcgcgcgccttctcctcacccctgcttcctcccgcgccaccctatcaccccctcgccctcccactacaaacccgctctcatcgttctttcctcgcaatcgtctccatttcgtgcgcccgcgcccgcgcccgccgtgcgcctacatctctgcgccagcgccgggcccggaggccgcatacgcgccgccttctctcgacgccaccgccgcggcagccgatgtcgccgctgcgatatcctcctccgacgcggtcacttgggccggcgtctgggcgctgctctcgcgacacagggcccgcatcgcggtctgcatcgccgcgctcgtcgcctgcaccacctgcacgctctccatgccgctcttctcagggaggtttttcgagaccctgattgggagggggaacgagccattgtggaggctcttatccaagattgcgatactgtacacactggagcccatcttcaccatcatattcgtgatcaatataactatcatctgggagcaggttatggcaaggctgcggagccagatatttcgaaggattctgatccaaaagatgttattttttgatcgtcacaaggttggtgaattgaccggtttgttgacatctgatttgggttccttgaagagtgttgtaagtgataacatatccagagatcgtggactgagggcactctctgaggcaagaaattttacactatgagaatatcattggtacactttgtatacttttcacactatcaactgagctagctccagttcttgggctccttatggtgtccgtctccgtgctagttgctattttcaagaggtcaactgttcccacttttaaatcttatggaatcgtgcaagcacgcatatcagactgtgcatcagagacattttcagctattcgtactgttcgatcatttggtggtgaaaaacgacaaatttctttgtttgacaatttggcacatgcttaccaaaataatggcacaaaacttggagtgctgaaatctgctaatgaatcattaactcgagtagtcgtctatgtctccctaatggcactttacattcttggcggtagaaaggtcaatgcgggcaaattatctgttggaaccatggtatcttttattggttacaccttcacattaacctttgctgttcaaggagctgttaatacccttggtgatctgcgtggcacattggcttccgtagagagaataaattctattctttcagcgaaggacattgatgattcacttgcatatggtttagccaaagaacttgatggcaaagagtttgatgattccaatggagtgtatgaaaatggatctgttaacaaacatttcatgtcagagctgaaatcatccagtagctgtagtaatctagcctggtctggtgacattcgtctgaaagaagtccatttctcttatccattgagatctaatgtggagattttaaatggccttgaccttacaattgagtgtggaaaagtcacagcacttgtcgggcctagtggtgctgggaaaagcacagtggtacaacttctagcacggtattatgagccaactcaaggttccatcactgtcgcaggagaagacatccgtgtatttgacaaaagggaatggtctcgagtagtatctctagtcaatcaggagaaatacattcagaggcttcttgatcgggtatctctgaccgatcacggcaccgttgag

SEQ ID NO: 65262 - DNA, 1183 bp, Zea Mays
ctcgtctccgcctcccatcgccgcatcagatatccgcacaaaccaagccatcagcgccatggcgatctccacctggagcgcgcgccttctcctcacccctgcttcctcccgcgccaccctatcaccccctcgccctcccactacaaacccgctctcatcgttctttcctcgcaatcgtctccatttcgtgcgcccgcgcccgcgcccgccgtgcgcctacatctctgcgccagcgccgggcccggaggccgcatacgcgccgccttctctcgacgccaccgccgcggcagccgatgtcgccgctgcgatatcctcctccgacgcggtcacttgggccggcgtctgggcgctgctctcgcgacacagggcccgcatcgcggtctgcatcgccgcgctcgtcgcctgcaccacctgcacgctctccatgccgctcttctcagggaggtttttcgagaccctgattgggagggggaacgagccattgtggaggctcttatccaagattgcgatactgtacacactggagcccatcttcaccatcatattcgtgatcaatataactatcatctgggagcaggttatggcaaggctgcggagccagatatttcgaaggattctgatccaaaagatgttattttttgatcgtcacaaggttggtgaattgaccggtttgttgacatctgatttgggttccttgaagagtgttgtaagtgataacatatccagagatcgtggactgagggcactctctgagatcattggtacactttgtatacttttcacactatcaactgagctagctccagttcttgggctccttatggtgtccgtctccgtgctagttgctattttcaagaggtcaactgttcccacttttaaatcttatggaatcgtgcaagcacgcatatcagactgtgcatcagagacattttcagctattcgtactgttcgatcatttggtggtgaaaaacgacaaatttctttgtttgacaatttgcgtgctgcagggacaacaacatctccttttcagcttttgctgcagcagggacaacatctcctttttagcttttggaggacaaccgattgctgcagtctttcttttgactagagtacaacaacacctctatgtagtgcagtttgtaggacagtgtgttcactgtgtaatgtgtagtgcagttagtag

SEQ ID NO: 65263 - DNA, 2489 bp, Zea Mays
ctcgtctccgcctcccatcgccgcatcagatatccgcacaaaccaagccatcagcgccatggcgatctccacctggagcgcgcgccttctcctcacccctgcttcctcccgcgccaccctatcaccccctcgccctcccactacaaacccgctctcatcgttctttcctcgcaatcgtctccatttcgtgcgcccgcgcccgcgcccgccgtgcgcctacatctctgcgccagcgccgggcccggaggccgcatacgcgccgccttctctcgacgccaccgccgcggcagccgatgtcgccgctgcgatatcctcctccgacgcggtcacttgggccggcgtctgggcgctgctctcgcgacacagggcccgcatcgcggtctgcatcgccgcgctcgtcgcctgcaccacctgcacgctctccatgccgctcttctcagggaggtttttcgagaccctgattgggagggggaacgagccattgtggaggctcttatccaagattgcgatactgtacacactggagcccatcttcaccatcatattcgtgatcaatataactatcatctgggagcaggttatggcaaggctgcggagccagatatttcgaaggattctgatccaaaagatgttattttttgatcgtcacaaggttggtgaattgaccggtttgttgacatctgatttgggttccttgaagagtgttgtaagtgataacatatccagagatcgtggactgagggcactctctgagatcattggtacactttgtatacttttcacactatcaactgagctagctccagttcttgggctccttatggtgtccgtctccgtgctagttgctattttcaagaggtcaactgttcccacttttaaatcttatggaatcgtgcaagcacgcatatcagactgtgcatcagagacattttcagctattcgtactgttcgatcatttggtggtgaaaaacgacaaatttctttgtttgacaatttggcacatgcttaccaaaataatggcacaaaacttggagtgctgaaatctgctaatgaatcattaactcgagtagtcgtctatgtctccctaatggcactttacattcttggcggtagaaaggtcaatgcggagctgttaatacccttggtgatctgcgtggcacattggcttccgtagagagaataaattctattctttcagcgaaggacattgatgattcacttgcatatggtttagccaaagaacttgatggcaaagagtttgatgattccaatggagtgtatgaaaatggatctgttaacaaacatttcatgtcagagctgaaatcatccagtagctgtagtaatctagcctggtctggtgacattcgtctgaaagaagtccatttctcttatccattgagatctaatgtggagattttaaatggccttgaccttacaattgagtgtggaaaagtcacagcacttgtcgggcctagtggtgctgggaaaagcacagtggtacaacttctagcacggtattatgagccaactcaaggttccatcactgtcgcaggagaagacatccgtgtatttgacaaaagggaatggtctcgagtagtatctctagtcaatcaggatccggtcctattctccgtgtctgttggagaaaatattgcttatggtctcccagatgatgttgtctctaaggatgagataataaaagctgctaaagctgccaatgctcatgaattcatcatctctcttccacaggggtatgatactcttgttggagagcgaggtagtctcctaagtgggggacaaaggcagaggattgcaattgcacgagccctcttgaaaaatgctcctattctaatacttgatgaggctactagtgcactggacgcgacaagtgagcgactcgtgcaggaagctctcaatcacttgatgaagggaaggacttctctggtcattgctcacaggttgagtaccgtacagaatgcacatcgaattgctgtttgttcagagggcaggataactgaactggggacacaccgagaactggttgctaagggaggcagttatgcatcacttgtcgggacacagagacttgctttcgagtaatcacacgtcaactgcgaggaacggatcgactgcaatgtaggggattctatatattactctattttccttcagggcccatcggaacataggaattctcgtggaaatcagaatgaatttcatgggtaaaatatagaaaacagaagatgaaaaaaaacccaccttctgaatgtggccttggttataggttgtttcttatccacagaagcaacacatgaatcagaaaacacatgtatgtatcgaactttataatatattaacctaaacaaaggacaacaaacttcttatcctcacttgcattccttatttattagttctatgtttggttgtaatgatgggacagcatgggatggaacgatcccttagataaggctatttagagtgcgtttggt

SEQ ID NO: 65264 - DNA, 2531 bp, Zea Mays
ctcgtctccgcctcccatcgccgcatcagatatccgcacaaaccaagccatcagcgccatggcgatctccacctggagcgcgcgccttctcctcacccctgcttcctcccgcgccaccctatcaccccctcgccctcccactacaaacccgctctcatcgttctttcctcgcaatcgtctccatttcgtgcgcccgcgcccgcgcccgccgtgcgcctacatctctgcgccagcgccgggcccggaggccgcatacgcgccgccttctctcgacgccaccgccgcggcagccgatgtcgccgctgcgatatcctcctccgacgcggtcacttgggccggcgtctgggcgctgctctcgcgacacagggcccgcatcgcggtctgcatcgccgcgctcgtcgcctgcaccacctgcacgctctccatgccgctcttctcagggaggtttttcgagaccctgattgggagggggaacgagccattgtggaggctcttatccaagattgcgatactgtacacactggagcccatcttcaccatcatattcgtgatcaatataactatcatctgggagcaggttatggcaaggctgcggagccagatatttcgaaggattctgatccaaaagatgttattttttgatcgtcacaaggttggtgaattgaccggtttgttgacatctgatttgggttccttgaagagtgttgtaagtgataacatatccagagatcgtggactgagggcactctctgagatcattggtacactttgtatacttttcacactatcaactgagctagctccagttcttgggctccttatggtgtccgtctccgtgctagttgctattttcaagaggtcaactgttcccacttttaaatcttatggaatcgtgcaagcacgcatatcagactgtgcatcagagacattttcagctattcgtactgttcgatcatttggtggtgaaaaacgacaaatttctttgtttgacaatttggcacatgcttaccaaaataatggcacaaaacttggagtgctgaaatctgctaatgaatcattaactcgagtagtcgtctatgtctccctaatggcactttacattcttggcggtagaaaggtcaatgcgggcaaattatctgttggaaccatggtatcttttattggttacaccttcacattaacctttgctgttcaaggagctgttaatacccttggtgatctgcgtggcacattggcttccgtagagagaataaattctattctttcagcgaaggacattgatgattcacttgcatatggtttagccaaagaacttgatggcaaagagtttgatgattccaatggagtgtatgaaaatggatctgttaacaaacatttcatgtcagagctgaaatcatccagtagctgtagtaatctagcctggtctggtgacattcgtctgaaagaagtccatttctcttatccattgagatctaatgtggagattttaaatggccttgaccttacaattgagtgtggaaaagtcacagcacttgtcgggcctagtggtgctgggaaaagcacagtggtacaacttctagcacggtattatgaggagaagacatccgtgtatttgacaaaagggaatggtctcgagtagtatctctagtcaatcaggatccggtcctattctccgtgtctgttggagaaaatattgcttatggtctcccagatgatgttgtctctaaggatgagataataaaagctgctaaagctgccaatgctcatgaattcatcatctctcttccacaggggtatgatactcttgttggagagcgaggtagtctcctaagtgggggacaaaggcagaggattgcaattgcacgagccctcttgaaaaatgctcctattctaatacttgatgaggctactagtgcactggacgcgacaagtgagcgactcgtgcaggaagctctcaatcacttgatgaagggaaggacttctctggtcattgctcacaggttgagtaccgtacagaatgcacatcgaattgctgtttgttcagagggcaggataactgaactggggacacaccgagaactggttgctaagggaggcagttatgcatcacttgtcgggacacagagacttgctttcgagtaatcacacgtcaactgcgaggaacggatcgactgcaatgtaggggattctatatattactctattttccttcagggcccatcggaacataggaattctcgtggaaatcagaatgaatttcatgggtaaaatatagaaaacagaagatgaaaaaaaacccaccttctgaatgtggccttggttataggttgtttcttatccacagaagcaacacatgaatcagaaaacacatgtatgtatcgaactttataatatattaacctaaacaaaggacaacaaacttcttatcctcacttgcattccttatttattagttctatgtttggttgtaatgatgggacagcatgggatggaacgatcccttagataaggctatttagagtgcgtttggt

SEQ ID NO: 65265 - DNA, 1588 bp, Zea Mays
attaatttccaccatccggtctcacggcacatgcttaccaaaataatggcacaaaacttggagtgctgaaatctgctaatgaatcattaactcgagtagtcgtctatgtctccctaatggcactttacattcttggcggtagaaaggtcaatgcgggcaaattatctgttggaaccatggtatcttttattggttacaccttcacattaacctttgctgttcaaggagctgttaatacccttggtgatctgcgtggcacattggcttccgtagagagaataaattctattctttcagcgaaggacattgatgattcacttgcatatggtttagccaaagaacttgatggcaaagagtttgatgattccaatggagtgtatgaaaatggatctgttaacaaacatttcatgtcagagctgaaatcatccagtagctgtagtaatctagcctggtctggtgacattcgtctgaaagaagtccatttctcttatccattgagatctaatgtggagattttaaatggccttgaccttacaattgagtgtggaaaagtcacagcacttgtcgggcctagtggtgctgggaaaagcacagtggtacaacttctagcacggtattatgagccaactcaaggttccatcactgtcgcaggagaagacatccgtgtatttgacaaaagggaatggtctcgagtagtatctctagtcaatcaggatccggtcctattctccgtgtctgttggagaaaatattgcttatggtctcccagatgatgttgtctctaaggatgagataataaaagctgctaaagctgccaatgctcatgaattcatcatctctcttccacaggggtatgatactcttgttggagagcgaggtagtctcctaagtgggggacaaaggcagaggattgcaattgcacgagccctcttgaaaaatgctcctattctaatacttgatgaggctactagtgcactggacgcgacaagtgagcgactcgtgcaggaagctctcaatcacttgatgaagggaaggacttctctggtcattgctcacaggttgagtaccgtacagaatgcacatcgaattgctgtttgttcagagggcaggataactgaactggggacacaccgagaactggttgctaagggaggcagttatgcatcacttgtcgggacacagagacttgctttcgagtaatcacacgtcaactgcgaggaacggatcgactgcaatgtaggggattctatatattactctattttccttcagggcccatcggaacataggaattctcgtggaaatcagaatgaatttcatgggtaaaatatagaaaacagaagatgaaaaaaaacccaccttctgaatgtggccttggttataggttgtttcttatccacagaagcaacacatgaatcagaaaacacatgtatgtatcgaactttataatatattaacctaaacaaaggacaacaaacttcttatcctcacttgcattccttatttattagttctatgtttggttgtaatgatgggacagcatgggatggaacgatcccttagataaggctatttagagtgcgtttggt

SEQ ID NO: 65266 - DNA, 1336 bp, Zea Mays
gggcaaattatctgttggaaccatggtatcttttattggttacaccttcacattaacctttgctgttcaaggagctgttaatacccttggtgatctgcgtggcacattggcttccgtagagagaataaattctattctttcagcgaaggacattgatgattcacttgcatatggtttagccaaagaacttgatggcaaagagtttgatgattccaatggagtaagtccatttctcttatccattgagatctaatgtggagattttaaatggccttgaccttacaattgagtgtggaaaagtcacagcacttgtcgggcctagtggtgctgggaaaagcacagtggtacaacttctagcacggtattatgagccaactcaaggttccatcactgtcgcaggagaagacatccgtgtatttgacaaaagggaatggtctcgagtagtatctctagtcaatcaggatccggtcctattctccgtgtctgttggagaaaatattgcttatggtctcccagatgatgttgtctctaaggatgagataataaaagctgctaaagctgccaatgctcatgaattcatcatctctcttccacaggggtatgatactcttgttggagagcgaggtagtctcctaagtgggggacaaaggcagaggattgcaattgcacgagccctcttgaaaaatgctcctattctaatacttgatgaggctactagtgcactggacgcgacaagtgagcgactcgtgcaggaagctctcaatcacttgatgaagggaaggacttctctggtcattgctcacaggttgagtaccgtacagaatgcacatcgaattgctgtttgttcagagggcaggataactgaactggggacacaccgagaactggttgctaagggaggcagttatgcatcacttgtcgggacacagagacttgctttcgagtaatcacacgtcaactgcgaggaacggatcgactgcaatgtaggggattctatatattactctattttccttcagggcccatcggaacataggaattctcgtggaaatcagaatgaatttcatgggtaaaatatagaaaacagaagatgaaaaaaaacccaccttctgaatgtggccttggttataggttgtttcttatccacagaagcaacacatgaatcagaaaacacatgtatgtatcgaactttataatatattaacctaaacaaaggacaacaaacttcttatcctcacttgcattccttatttattagttctatgtttggttgtaatgatgggacagcatgggatggaacgatcccttagataaggctatttagagtgcgtttggt

SEQ ID NO: 65267 - DNA, 900 bp, Zea Mays
ctcgcctctccctgcaccaatcgttgatccggtcctattctccgtgtctgttggagaaaatattgcttatggtctcccagatgatgttgtctctaaggatgagataataaaagctgctaaagctgccaatgctcatgaattcatcatctctcttccacaggggtatgatactcttgttggagagcgaggtagtctcctaagtgggggacaaaggcagaggattgcaattgcacgagccctcttgaaaaatgctcctattctaatacttgatgaggctactagtgcactggacgcgacaagtgagcgactcgtgcaggaagctctcaatcacttgatgaagggaaggacttctctggtcattgctcacaggttgagtaccgtacagaatgcacatcgaattgctgtttgttcagagggcaggataactgaactggggacacaccgagaactggttgctaagggaggcagttatgcatcacttgtcgggacacagagacttgctttcgagtaatcacacgtcaactgcgaggaacggatcgactgcaatgtaggggattctatatattactctattttccttcagggcccatcggaacataggaattctcgtggaaatcagaatgaatttcatgggtaaaatatagaaaacagaagatgaaaaaaaacccaccttctgaatgtggccttggttataggttgtttcttatccacagaagcaacacatgaatcagaaaacacatgtatgtatcgaactttataatatattaacctaaacaaaggacaacaaacttcttatcctcacttgcattccttatttattagttctatgtttggttgtaatgatgggacagcatgggatggaacgatcccttagataaggctatttagagtgcgtttggt

SEQ ID NO: 65268 - DNA, 5263 bp, Zea Mays
ggacgacgaccctgacacgcactggcaggggatccgactgcaggtgatcggcgacgccgcgaagatgccagcctctctgcggagcgcagcggcgcaggccgacgaggccacgaggcaaaactcgcagctgcacgtgatgctggccatctgctacagcgggcgatgggacatggtccaggcgtgccgggagctggcccgggaggcgcaggcgaaccggctcagtccggacgacatcgacgagtcgatcatcgccggcaagctcgcgacgagcgccgccggcgagttctcctgtcccgacctggtcatcagaaccagcggcgagatgaggctcagcaacttcttgctatggcagtcggcgtactcggagttgttcttcaccgccaagatgtggcctgactttggggaggctgagtacctggaagcgttgcgctccttccagggcagagaccgccgcttcggccaatcaaaattactctaaggcctcgtttggtttaagagtccctctattttagttttatttagttcctaaattgtcaaacagtaggattaaaacagagactaaactgatttagtctctagtctctcaagatatggttaaaaagactaaatcatattaattctacatttgcccttcatttagttcaattgtactaatagcaggagaatattaaaggctattttagtcttcttatgagtcatttagtatatttttactaattttagtccttagaaacaaacatgttagagactaaattttagtcccctaactaaactttagtccctagactaaagaaaccaaacatggtctaacttgatggagtgttacacctgcatctccagcgtcagcacccaaaagaccgtcccgactcgcgtgcaagggcgtccaatcgtcggatccacaacagcgactatgtcctgtaaccgtggcccatgagccgatatggagtagcgtgtgtgtttgcagccagttgtcacgacgcacaaaagcgcgccactagcttctgtaaggatgaatcatccagagaattgcaaacagaactattccccccgtatctcatcttcttcctctccaagcattctcttcttccttccttcctccccaatctatcgtgttaacaagtggtatcagaggggtctgatcctcgtcactgttccactctggatcccacaacctcccacccctacgacactcgtcttcgtcgccagcgcgccgccatgaacgtcgacttccagcacctgctcgacgaaatgtccaagcgcttcgacggctacgatgcgaagctgacgcagcgcctctccgactacggcgtcaagctgcagcagcgaatgctagatcgcaatctggaactggagcgtcgtatggcggatctcgacacacggatggacgacaagttggcttcgctctccacggccaacgagacgcgcttgtcgcagctcgagtcggtggccatctccttcgacggttggcatccctgcatggagggttccgtcgacgacatccgtcttcacgtctccaagttgaccaatctctacgaacggtcggcagtggagcaccctaccgtcatgactggtgtgcttgttccggctccctctccggccgtgcgcccatctgctgctgcctccacggacgctcaacctgacaggcaccgcctgaatccatcaatccgggatgatggttgcggagttgtcacaattcttgatcatcacccggcaaagggtgcgtcatccccttctcaccccatgtgtttgcttctcctattttccactgttcgagatccgagtttaaggaacccgtgggtggaagtttggctggtttatctgatcattttcctaaaatgttgtttcctacgtccgatggggatcaacccaagttatggatctgtagatgtgaggattactttgatctgtatagtgttgatccagcgcagtgggtgagggtgtcatctatgcatttcagtgctgctgcatctcgcttggtgcaaactgtgcagagccatcttagatcccgttcgtggttagagttctgtggttgggttttggctcgatttggctatgaccatcacgaattgttgatccgccagttgtttaacattcgtcaaacttcatcggtgtctgagtacatcgatcgtttctcatccctttgtcgaccaattgacagcttacggatcgcacacagaccccctttatttcaccatgcgctttattgatgatttgcgtgatgatattaattcttctattttggttcaacgtccatcttcttggaattctgcctgtgtgttggctcaattacaggaggaggtctcggagtacggcaagaggccaccgacccggcaacctgatccattctcgagaactcagtcaacaccaccagcttctcttccacttccaccacccccgtggaaaggagagaaacagacaactctgggcgaggaccgtcggggcgctaactcaaataatatggaggacaagtggtctacccttcgggcttatcggcgtgcaaggggctgtgtattaagtgtgcagagaaatggtctaaggatcaccgttgtgctgattcgattcaactcaatgctgtgcaggagatatttgagctgttttagtgggattcggatgctcaatcagaagggaatgacccaatccaacctttagagcagatatttatgttcgtgtcggtggctgctgtatctagaatgccaggtccacgtacattttgtctgggtggcattattcatcaccaagctgttcgaatcatggtggactccgacagttctcattctttcttgaaaacaaaattggccactcagcttcaaggcattgttcctctatcagttcctattgttgttcaagtagctaatggtgctcggttacagtgttcagcgcattgtccagccactgcgtggtcggtccaagagttcaccttctccacagacttcaaaatcttggatgtgttttcttatgatgctatattggggattgattggttgtctcaattcagtccgatgcacatacactagcaacatcagtggatggtacttccataccaaggagtatcagtcttattgcaagggtccaattgttccatttctaagggtactgtggtccaattatgcttgttggtcgcgtgcctagaattagatgccatggtttctgaggccccctgccattcaagcagtgttatcagagttctcagctttgtttgctgtgcccacataattaccacctacccgagcatgtgaccatgcaatcccattgttccatggtgcttctccggtcacggtccgtccttaccgttatgctctagcactcaaggatgaaatcgagaaacaattttgtgacatgttggccaatggcatcatccaacccagagctcgtcccttctcttcttccatcacttgaatgctatcactgtcaagggcaagtatccagtaccaattattgatgaacttctggatgaattattagcaacatcttggttctccaaacttgaccttcgtgctaggttccaccagatctgactgaagtagggcgaggaaataagacaatgtttcagacacactatggacaatatgagtttaaggtcgtggcgtttggcctcacaggtgctccaggcacgtttcagtcggccatgaactcaactttagcctcttgcctgtgtcagagtgcactggtgtttttcgacgacattttagtctacaactcatccttgtctgaccatgtaatacaccttcggatagtactacagctgttagctcgagacaagtggtgtattaaactgtccaaatgttcatttgcacaacaacaaatcagctatttggctcacattatcagtgcccgtggtgtagctactgatcccgaaaggtgtcagccatcgctaattggccttgtcctcaaatagtgaaggaactacgcagcttcctttgattggctggttactaccgcaaatttgtccgtaacttcgaagtcatatcaaaactttgactcttctcctcaagaaacattcagtgtttgtgtggacgtcagtacatgatcatgcttttaacgtgctgaaacagtccttgtgcttggcgcatgtgttgaagttgcccaactttggacatccattttcagttgaaattgacgcagcaacaactggagtgggtgcaatattgattcaggatggtcacccaatagcctttatcagcaaggcattaggccccaaatctcaaggcctctccacttatgaaaaatagtatatggccattctattagcagtgtctcactagtgcgcttatttgcatctcaaagaattcaccatttttactgaccaacgcagcctaatatcattgttcgaacaacgcctccatacaatgtggcaacaacgggtgttttccaaactcttgggcattaattaccatattgtttacaaacgcgacactgagaattgagtgatagatgccctttcacggaaatcttctcatgaagcttcttgtgcagctatttcatcagctactccaaagtggtttgccgaggtgattgctggatacgatcaggatacccatgcaacaaacctacgagctcaattggctgttgatcccacattggtgcccactttcgcattggtggagggattactgcgctacaagtccaaagtttggattttccataatgtgccactacaacagaaaactgctatcagcttgttacgccagtgcattaggtggccattctagattcccggtaacatatatgaggatgaagaagctgtttgcttggaccgacatgtgtgttgcggtgaagcaatttgtgcaaacatgtctggtatgccagcaagctaaaccggacagaacccgtttaccaggtctgctacagccgttaccaatgccctcatcagcttggcagattatttcggtggactttgtggaaggcttgccgacctcttcttcatacaactgcatcttggttgttattgattttttcacaaagtatggtcacttcattcctcttcgccatccgttcactgctaccagcattgccaagttattcttgctgcatgtgtatcgtctccatgggatgccttcctcaattgtttctgattgggacagaatattcaccagttcgctttggaaggaactgtttcgtcttgccgaagtttagttacaaatgtcatcatcttatcacccacaatccgacgaacaaaaagagcgactgaaccagactgtaatacccaaacttgtaaactatatcaaaggaaataattcgcttatgtgatatgtctctatttctt

SEQ ID NO: 65269 - DNA, 4688 bp, Zea Mays
ggacgacgaccctgacacgcactggcaggggatccgactgcaggtgatcggcgacgccgcgaagatgccagcctctctgcggagcgcagcggcgcaggccgacgaggccacgaggcaaaactcgcagctgcacgtgatgctggccatctgctacagcgggcgatgggacatggtccaggcgtgccgggagctggcccgggaggcgcaggcgaaccggctcagtccggacgacatcgacgagtcgatcatcgccggcaagctcgcgacgagcgccgccggcgagttctcctgtcccgacctggtcatcagaaccagcggcgagatgaggctcagcaacttcttgctatggcagtcggcgtactcggagttgttcttcaccgccaagatgtggcctgactttggggaggctgagtacctggaagcgttgcgctccttccagggcagagaccgccgcttcggccaatcaaaattactctaaggcctcgtttggtttaagagtccctctattttagttttatttagttcctaaattgtcaaacagtaggattaaaacagagactaaactgatttagtctctagtctctcaagatatggttaaaaagactaaatcatattaattctacatttgcccttcatttagttcaattgtactaatagcaggagaatattaaaggctattttagtcttcttatgagtcatttagtatatttttactaattttagtccttagaaacaaacatgttagagactaaattttagtcccctaactaaactttagtccctagactaaagaaaccaaacatggtctaacttgatggagtgttacacctgcatctccagcgtcagcacccaaaagaccgtcccgactcgcgtgcaagggcgtccaatcgtcggatccacaacagcgactatgtcctgtaaccgtggcccatgagccgatatggagtagcgtgtgtgtttgcagccagttgtcacgacgcacaaaagcgcgccactagcttctgtaaggatgaatcatccagagaattgcaaacagaactattccccccgtatctcatcttcttcctctccaagcattctcttcttccttccttcctccccaatctatcgtgttaacaagtggtatcagaggggtctgatcctcgtcactgttccactctggatcccacaacctcccacccctacgacactcgtcttcgtcgccagcgcgccgccatgaacgtcgacttccagcacctgctcgacgaaatgtccaagcgcttcgacggctacgatgcgaagctgacgcagcgcctctccgactacggcgtcaagctgcagcagcgaatgctagatcgcaatctggaactggagcgtcgtatggcggatctcgacacacggatggacgacaagttggcttcgctctccacggccaacgagacgcgcttgtcgcagctcgagtcggtggccatctccttcgacggttggcatccctgcatggagggttccgtcgacgacatccgtcttcacgtctccaagttgaccaatctctacgaacggtcggcagtggagcaccctaccgtcatgactggtgtgcttgttccggctccctctccggccgtgcgcccatctgctgctgcctccacggacgctcaacctgacaggcaccgcctgaatccatcaatccgggatgatggttgcggagttgtcacaattcttgatcatcacccggcaaagggaggaggtctcggagtacggcaagaggccaccgacccggcaacctgatccattctcgagaactcagtcaacaccaccagcttctcttccacttccaccacccccgtggaaaggagagaaacagacaactctgggcgaggaccgtcggggcgctaactcaaataatatggaggacaagtggtctacccttcgggcttatcggcgtgcaaggggctgtgtattaagtgtgcagagaaatggtctaaggatcaccgttgtgctgattcgattcaactcaatgctgtgcaggagatatttgagctgttttagtgggattcggatgctcaatcagaagggaatgacccaatccaacctttagagcagatatttatgttcgtgtcggtggctgctgtatctagaatgccaggtccacgtacattttgtctgggtggcattattcatcaccaagctgttcgaatcatggtggactccgacagttctcattctttcttgaaaacaaaattggccactcagcttcaaggcattgttcctctatcagttcctattgttgttcaagtagctaatggtgctcggttacagtgttcagcgcattgtccagccactgcgtggtcggtccaagagttcaccttctccacagacttcaaaatcttggatgtgttttcttatgatgctatattggggattgattggttgtctcaattcagtccgatgcacatacactagcaacatcagtggatggtacttccataccaaggagtatcagtcttattgcaagggtccaattgttccatttctaagggtactgtggtccaattatgcttgttggtcgcgtgcctagaattagatgccatggtttctgaggccccctgccattcaagcagtgttatcagagttctcagctttgtttgctgtgcccacataattaccacctacccgagcatgtgaccatgcaatcccattgttccatggtgcttctccggtcacggtccgtccttaccgttatgctctagcactcaaggatgaaatcgagaaacaattttgtgacatgttggccaatggcatcatccaacccagagctcgtcccttctcttcttccatcacttgaatgctatcactgtcaagggcaagtatccagtaccaattattgatgaacttctggatgaattattagcaacatcttggttctccaaacttgaccttcgtgctaggttccaccagatctgactgaagtagggcgaggaaataagacaatgtttcagacacactatggacaatatgagtttaaggtcgtggcgtttggcctcacaggtgctccaggcacgtttcagtcggccatgaactcaactttagcctcttgcctgtgtcagagtgcactggtgtttttcgacgacattttagtctacaactcatccttgtctgaccatgtaatacaccttcggatagtactacagctgttagctcgagacaagtggtgtattaaactgtccaaatgttcatttgcacaacaacaaatcagctatttggctcacattatcagtgcccgtggtgtagctactgatcccgaaaggtgtcagccatcgctaattggccttgtcctcaaatagtgaaggaactacgcagcttcctttgattggctggttactaccgcaaatttgtccgtaacttcgaagtcatatcaaaactttgactcttctcctcaagaaacattcagtgtttgtgtggacgtcagtacatgatcatgcttttaacgtgctgaaacagtccttgtgcttggcgcatgtgttgaagttgcccaactttggacatccattttcagttgaaattgacgcagcaacaactggagtgggtgcaatattgattcaggatggtcacccaatagcctttatcagcaaggcattaggccccaaatctcaaggcctctccacttatgaaaaatagtatatggccattctattagcagtgtctcactagtgcgcttatttgcatctcaaagaattcaccatttttactgaccaacgcagcctaatatcattgttcgaacaacgcctccatacaatgtggcaacaacgggtgttttccaaactcttgggcattaattaccatattgtttacaaacgcgacactgagaattgagtgatagatgccctttcacggaaatcttctcatgaagcttcttgtgcagctatttcatcagctactccaaagtggtttgccgaggtgattgctggatacgatcaggatacccatgcaacaaacctacgagctcaattggctgttgatcccacattggtgcccactttcgcattggtggagggattactgcgctacaagtccaaagtttggattttccataatgtgccactacaacagaaaactgctatcagcttgttacgccagtgcattaggtggccattctagattcccggtaacatatatgaggatgaagaagctgtttgcttggaccgacatgtgtgttgcggtgaagcaatttgtgcaaacatgtctggtatgccagcaagctaaaccggacagaacccgtttaccaggtctgctacagccgttaccaatgccctcatcagcttggcagattatttcggtggactttgtggaaggcttgccgacctcttcttcatacaactgcatcttggttgttattgattttttcacaaagtatggtcacttcattcctcttcgccatccgttcactgctaccagcattgccaagttattcttgctgcatgtgtatcgtctccatgggatgccttcctcaattgtttctgattgggacagaatattcaccagttcgctttggaaggaactgtttcgtcttgccgaagtttagttacaaatgtcatcatcttatcacccacaatccgacgaacaaaaagagcgactgaaccagactgtaatacccaaacttgtaaactatatcaaaggaaataattcgcttatgtgatatgtctctatttctt

SEQ ID NO: 65270 - DNA, 735 bp, Zea Mays
cccgtatctcatcttcttcctctccaagcattctcttcttccttccttcctccccaatctatcgtgttaacaagtggtatcagaggggtctgatcctcgtcactgttccactctggatcccacaacctcccacccctacgacactcgtcttcgtcgccagcgcgccgccatgaacgtcgacttccagcacctgctcgacgaaatgtccaagcgcttcgacggctacgatgcgaagctgacgcagcgcctctccgactacggcgtcaagctgcagcagcgaatgctagatcgcaatctggaactggagcgtcgtatggcggatctcgacacacggatggacgacaagttggcttcgctctccacggccaacgagacgcgcttgtcgcagctcgagtcggtggccatctccttcgacggttggcatccctgcatggagggttccgtcgacgacatccgtcttcacgtctccaagttgaccaatctctacgaacggtcggcagtggagcaccctaccgtcatgactggtgtgcttgttccggctccctctccggccgtgcgcccatctgctgctgcctccacggacgctcaacctgacaggcaccgcctgaatccatcaatccgggatgatggttgcggagttgtcacaattcttgatcatcacccggcaaaggaagagccagtggatgaggagtcaggtgttcagcagggaagttgctgagcaggagctcattgaag

SEQ ID NO: 65271 - DNA, 326 bp, Zea Mays
gctctgagaagattaggcggagagaaaaataaatcagtacgcggtcggagaattcttgatgtggacaaagaagaagcgcgattcgacgcaacactcaccctattttcagtgaaatgctgaattgaaaggcgtcgtcgatttcgtggtttcaagtcggatgtcataagggtacattaattaatcacgcgatgcggaggacgatcccaaatcgaccccaagcgcgggctactccgcatggtggtgcggatggacacacctgaagaagggcagactgaacgagtgttgggataaaagctgatcgtcaagcggacgtcgtctaacaaaca

SEQ ID NO: 65272 - DNA, 296 bp, Zea Mays
ctcgccgaacttcgaccgcccgccgccacgcgtgaaccggatcacttggccggagcacgcaccgccgacgagcctgaccgcctgcgcacgcggccagcccacctttggtcaccaccgacgatgactcgcacctcgacgtgatcgccagagactcccagacctcactcgaccctttgtcggccctctactgtgccgataagccgcgccaccgctttttcctcctcggttactgttcacgcgagggaggagtgcgggttagagggggtaaaaggccagggggttaagtgttaagtcag

SEQ ID NO: 65273 - DNA, 1007 bp, Zea Mays
gatgtatatggaccttccaaatacactagacttttgcaagcaaccaaagatactctcagagaagaagcatgctgatattgtcaatcaaggaaaactggtgtctgatgagatcatcataaatctgctgtcaagacgcctagaagagggagaagaaaagggtgaattggggttcatccttgatggctttcctcgaaccttgagacaagcggtagaaaatggctgatgccgaggatatccagcccctcgtctgcgacaacagaactggcatggtcaaggctgggttcgctggcgacgacgccccgagggccgtcttccccagcatcgtggggcgcccgcgccacactggtgtcatggtcgggatggggcagaaggacgcctacgtcggtgacgaggcgcagtccaagaggggtatcctaaccctcaagtaccccatcgagcacgggatcgtcagcaactgggacgacatggagaagatctggcatcacaccttctacaacgagctccgcgtggctcccgaggagcaccccatcctcctcaccgaggtgcccctgaaccccaaggctaacaaggagaagatgacccagatcatgttcgagaccttcaacacccccgctatgtacgtcgccatctaggtcgtgctctctctgtatgccagtggtcgtaccacaggtatcgtgctcgactcgggagatggtgtgagccacaccgtccccatctacgagggatacgccctcccccacgccatccttcgtcttgacctggccggtcgcgacctcaccgactgctcatctgcgctagactgtgtttgttcaaaagatattattcaaaatttaactgaaagattttattccttgcacaattattgtattgctttctttgttgaatattatttgcttggtgatgggctgctgttgctgctagcaggattgagaaccgatgggctgcaatctattgttggtgcctggtatcaaagagggagacaggggtgcacctgttcacaatcttga

SEQ ID NO: 65274 - DNA, 4801 bp, Zea Mays
aggtttttgtcccgcgagaatggaatctctatttgtaggcttgtctcataacaagccaaaaaaatcggtggcaaccgcaatagttcgagaagttttatctcatgactggttgctcctagactatatttgcacgcaaggtgatcttgctctcatcgattttatcaaggaaatcccttgtgaaccaagggtagaagtcgttcttattgatgatgcctttgttgaaaggaagtggatggagtgtttatttcagccgagcgcatatttaggtgacgaggtgtttattccgataaacatccgagagacgcattggtatcttgctgtgatccatgcaagaaatatggagatacaagtgctcgattcacttggtacttcacaagaccgcaaagacctcactgactttattaaaggactgcaaagacaaatagatatgatatctcaacgtaaggagttaaaagaccacaggtggccagacctccaagttgcttcttggccgctcagagaaatagacatgggatatgcaaagcagacagatagctcttcatgtggcctctttcttttgaactatatcgaatactggacaggggatgaactgtctgacagttttacccaggatgacatgtcacactttaggaaaaaaatggctgctatattactatcttcagacctgaataagagaagggggtgtctgttatacaaaaatgaaaaagaagttgactctggaagcccatctgatgttgagatattagaaaacccaacagattctaataagaggaaactactccacgtgcttgatgatagcgaagtagtgtttgaagatgaggaaggccctattactcaagcagacttgcaaaggtggtttgttgatgattgggataaaagagctcctgtaaaagtctctaacgatggttgcaccagtgactttttaatggttggtctttccacaaaggacatgccagtgaccaaagccgattcaatagatgttttatgtgattatatcatggcaatagaagacgatgcgacactagagagaacatgggtgcgaagtttcaatccttttaagatagaaatatctgtcaaagacctgcaaaacatattaacgacaactcaagatatgattctaagatgttttgatatggctgttcggctgcttgccaataaagagtcacgtaaaccgaaagaagaaatcataaataatagaaagcattatatggacatgcgtttttggagaatggttggttttggtaaacttccaaagtaccatcaggatcctacaacagaagagttggctaaaacactagattgttggccatcaatgaattattatatcacgggttgtagatatgttctcatgccatggaaattcaatggatgtcacgcccttttcgtaatagatcatgttaaaaagcatgtgacttttatcgattttacaccgactcaagattggtgtaaacacatgccatacaagaggtttaataccagctacctcgttctacaagctatggccatgtgggggaatgacagacgactgaaatttgttggggataacattggggtattcgttgatcaaaatggtaaacttattcaagacggcagaattatttggttagacacaccagcttctgttgttatacataaaccatatgctgtggcccgcctgccacgacatgttgagttttatgcaaataacgtcacaatagattatggtgaatttgagttgtctattctgcgcgctaggctcctcctccagctcctggtcgtgatggtggtggttgctccattcttggaggaattgggtccaccattgctcaagtgtctcaacgactatggcagtgagatcagcaagtgccagttctaccttgacatgttgaacgagtgccgccgtggtggtgtctgcctgagcttttcctccaattgggattattcatggcatgagcaggagttttgtaatgtgggtgatgatgcttgtcttattctgtgggatgctcgaactggcattgccccacctgttaagctagcgggtaccaacccggcggcgctggaaaggaaagcctgccgtcctgtcctctgtctccttttgctgccgcctgccggcctggaggaagggagggagggaggtgttcatctgcgcggcggcttcggtgtctggaggggctccgaggggaggcggggagccatggcgcggaagcacggctggcagctcccagcccacaccctgcagatcgttgcaattacagttttcttccttctgctggttgcgttttatgtcttctttgctccgtttttgggaaagcaagtactcgagtatattgccattggcgtttatactcctgtggcacttgcagttttcatcctttatattcgatgcacaagtataaaccctgcggatcctgggatcatgtcaaagtttgaggatggccttattaagataccaaccaatggctctggaatagaaggcatgaatttgccccagaaagcaaacaatgctacaggaacaaactccccaacgtctacttgcagaagttctttagatggacattctaatcaaagaggttcatccataggggaggcaaacatgaatctaggatcacaattgccaaagaaaagatcaagctgttggttgctaggtgggcttctgtgtgctatatttgtcaaggaggattgccgaaaaactgatgactcagagttgcaagcaaatggtgaggaggctctgttttgcacattatgtaatgctgagtggctaaataactgtgttgggcggaagaattatttcacattccttgctctgatggcaatcagtcttatctggcttgcaattgaatttggagcgggaattgctgttattgtactctgttttgtcgataagaatgcatcacgaaatatccaagacaagttggggaatggcttgactcgtgctccgtttgctgttatcgtgggaattacaacttatgattatgtcgttgcaatgagagctatgagtgaggcagctccagaggatgaggaaggagcaaatatcatttactccccatcaaattcagcaacaactgggttcagtgtaggaagttcacttggtcttcaccacaaaggtgcttggtgtacacctccaaggatatttatcgatcaggatgaaatgatcccacatttggagcctggaatggtgccttcaactgtggaccctgatgctgctggatatgctgaaagagcaaacagagctaagaaggcagtcaaaatcagtgctcgcagcctcgcaaagctcgataaaaatgaggtaatgaaagctgctgcaaaagctcgggcatcatcctcggttctgcgaccaatagatgcccgtcgtggtcatgaagctgatgtcatctccagcgacaatgccagtgtcaggagcggcatgagtggtgactacagcggcacaaaggaatcaaacatcgagatgaaactttctccacttcagaactcatacccccaaagccttgcaagccaggatgaatatgataccggcacaccaaccgcaagcagtctaagcagtccggtctacatccacaagcttgcctctcactctcagttcagtgcagcgcctcgccctgcgcctcctgaaagatttgtgccagctatggtacggccacccgttcctaccacacaaataaccaacccagggataccgcggccagctgttcccacaacacaaataaccaacccgatgttccaatcagccacgtcttatgttcgagagaaccgaagggcctctgtcatctgggatcaagaggctggtcggtacgtgtcagttcctgcacagacaagaatgggaagtggagtcgatctgccagcaagaaacccacggttcttgacgaacccaagtggcgagccaagcagccatgtgaggagcgtggtgcctggcaatgcctcgtcctcagcaatgccatcagggcagccttcagagaggttgacatattctgggcagtcaatattcttcggtggccccatgctgagcacccctggcgtgggcgccaataggaatgaggcagacgcaagagcacgccccgagggaagcagagatcctaatgccctgtgtgagaaagcgaggactggctctggctcctcgccaatatttgctcctggggcgttccagaggaacccaccctttgacaaatgacttgctcctgctcatgaagtttatctgaagtgccgttacgctggaataacctcagcctgaagagttgacagatagtttaggttgctcttttgggcttgccagaaggacggacaaaggcagccgtaggaatgaggctgctgccggctgtggcgataacgaaaaaaccacaaatatcgctcggagccagtgctgactttttccagtgttgggagagcgatggagtgactggtgtacactgtcatcttgttaggaattcatcagatacttgatgcgcgacagatagaaagagctctaatttctggcgatgtcaaacgctgatctgcagctgactttgtaggcgtcgattgcggtcactgtatgtgcgccatgggatactattcgacatgtgtaaaatgttcgttggggtgcactttcggacagtactcgtgcgtagtacttgctcgctagtagtaacaggtcttgagtttatccttgtagcagcatccttgtatgttgtgaaaccatctctgcgttttgctatgttgttcgctgttttgtcggcctttgcgtagcaagtagctgcgtggaggtttcccgccggcgcggcggacgcacacgatatgggcgtgtttgtttcgttttttttttctgaccagatatttttgaaatctggacgca

SEQ ID NO: 65275 - DNA, 2832 bp, Zea Mays
ccagagttgcgggcttgcggcgcaggaaccgaaacgaaagcgctagacgtccgccgtcccattcgctttcccccaaggcctttctatctgcagccggtgcggcggctgtgctgtctgcctttctcccgtctccgccaaccgctccgctagccaccacgcccgccgctttcctgccgtggcctccgtcggggttcctcaacgggtccgttggaatgaggcacgaggggcccgggctgtcaattaggcatgatgctgcgggctccatggcaggagctatcttcatgtccaacagcgtcacaagggaccaatgcttccaagcaagcattttcggtctacccttggagtatcgatcctttgtcagccacatcagaaaagggatgcccttgtttctctttgactatacactgcgtaagctttacggagtctttgaggctgcctctgatggagggtttaatattaacagtgacgcacttagatcagttcggcgctcatatccttcgcaggttcgcatcaatattatttggaagtgcaagccactaagtgaggatgagttttttcctgctatagaagacaactactatcggccaaggaagttctactttgacctttcctatgagcaggttgttcggctttatgaactgtttggcaacaagagagtaggacgccctattcatgactatcaaaaaaatgagtgtttgcaaacaaaccgctcaagcaaagggatacctgacaaagaaagcttgactccagatcctcattccagtaatcaatcacgccttttggttcccaacatttccgaaatcataagatattctactcctacaagcatacacacagatttaccacttaatgttgaggcatacccaagcacgttgatgcccttgggaactgaagttaatggagccaaaattgctcccaccttcagctcccatagtgaccaaatagaacctttttctcaaagtgagtttttcccagctgcttcaatgacagatgctgtttcaactcaagtatctgccccttgctctgaaactaataaccagttggttgggcaatcacatccattaccgcacaactatccacagaatattttttctgctggatttacagcccaggacccaattgaaggatctaaatttgttgcaaaccaattgtattcattatgtcgtgattatatgcacgatggcttgttaacttctggatatggaactcaaaatcgaacttacaaagggatgaatcacttgaattcaacttgtcctccatatgacccattacatccttttttgccagtgtcaaataatttcgattatcaggctcaatgtgacatctattccaaccaaggctgccctgatacatgtaatgacatatgtgcatatgagtgtgagtgtttaagtgaagaagtggtagcagcggaggaactgaaccaacgaggtatttctacatgcccacaagttcttggatgggatgggaaagcagtatcagcaattcatcaacagaatatgtgttctactgattactttcagatttctgatcgtgatgaagactctgaaaatgatcagatgaaacatggtactcatagcaatgcttcagattcatcagatcgtgaaaatggtattgttgatccacgacatacacaacatgctgtaggaactgaaaacaacacaaaggatcagtgtagccagccaaaaaaaggtgtattttctcgcttatcagtgaggaaggaactgacttctcaagatgccactggttctacactcaaccaattggtttcttctcttgttcggaagacagaacagtggagccacaacaatagaccgattgaagatggtctcattattcctttgattggggagcaggctgactgttctcatgcagcgctgaacctgctgagtgaactagagctggataaagacgtgagcatagagccacaacttcccttcttgaacttcaagagacgcagtgaagcagggaaggtggatgcaaatttaggaaaggagatcagtgggaaaatgaagagaagaaagcttgtgcgtccttccttaggagaaaacaatgattctacaaattttggagagcagcttataggaaattgcacacaagacaagaatcaaaaccatcaggaaagtgaaaaccattttgacattgacctaaacatacctgcagcaccaatagacgacggcccagtggaggttaacagaattgcagtgtgtcctagtgttgttatcaaggtacaaacagagaaaccatatgaaatagatacaaacaaggtaaactcaaatgtgatggagacaactgaagaacatgatccatccagtgcacccacacaaaaggttatccctgattttaacatggcagacttgaacacaatggatgaatctaaacttcgcacaatcctcgagcatacatcatcattgttgcaagcacttgctgaagtaaaaaatggggagtccaacaactgtgaacaggctaagtcaagctttgaagataagaaagtaaacatggcatactctgacggggccaccaaatctgagtgcgattagcagtagctgcaaagatattgatgtttatacgctaaactggtgcccgtcagtgcatgcagtggctttatccttaatcatagtaatattttttttgggttttttttggggtgcgggtgggagtgggattggggttttatcttctggaagagggaagagtgactatccccactcgttggaacctgaaagactagccatggaaccatgatccgtctaatgcgaagatgttctttaaattttgttcatatactcttgttactgcaattttagcgacaagaaattattgaattttctgcca

SEQ ID NO: 65276 - DNA, 3078 bp, Zea Mays
aattcctcaatacggactacaactcacacagtacttacaagcgcgtaggctgaaaggacacgaaagaatcgattaagtacaggctgtacagccacagcccttttacagtttacacccacaaagtgaaaaacatccggtgcgaatgctgtttgaaaacctaggtttttctcgcggttaagccgttaagctcgtgcttgctcactgctgatccctcgactgtgtcttttcgctttggagctcgaggaagcttgccttgccatccgccacagcaggctcatccatcaggatctactaatttggtttcgaattatgcccccattttcgtgttttgcccaaaatactcttattagggcatatattcatttggtgatttttcacatactcaggtaaatgatggcagtcatcctgcctaggaccgtccgcagggcggcggaggcagcgttgtcactacactccgtaccgccgcgcgccgcctgtcactttgcgcggtctttgggcggcgtctcttctgcttgcagcatggagttcgtgtcgtggcaaaatggcgggggcatcctgcaccgggcggcctccgttgaccccactgctgtggtggaggctggagcggttgtgcactctggtgccgtcctcggcaaagaggtcgtcgttggttctggggctgtggttgggccttcagtttccataggtcaatcaactagggtcgggtacaatgttgtcttaagcaattgctcagtgggtgagttctgtattatccacaatggatcctccattggtcaagatggttttggcttttttgtggatgaggctggacaagttaagaagaaaccacagcagcctgccgaagggagccatcatgtcctctataatctccgcccctccgaaaaaaagaaaaagagaacttaaagctcaacttatgctgtgcgcaagaattggagaccatgtagaaataggggcaaatacatgcattgacagaggcagctggagagagacaacggtcggaaatcataccaagattgataatctggtccagataggccacaatgtggtcattgggaagtgctgcatgatatgtgggcaagtagggattgctggttctgcaacgtatgtatagcttcattggttgcacctttcttctgcttatgattgttgtatgattcgtgtgggccatttctcaagattaatcctgttatgggtatgcagactgggggactatgttacattgggtggtagagtggcaattcgggaccatgtctcagtcgcatcgaaggtgctgtgttcacagctctggtttttttttttttgctttgccttctttgtgcaccttgtatcaaagctagtttgaattcggcgcaacatcgttttgccttgtctaatgtcatatcgtggttacattactctgagcagtgagcactcttgaatcctttgagctctgattcagttgtgcttacagtggtgcaaactattcttttctccatgctgagcagccgagcctaagaagtttatatgcaacttgtgtgtcttcacacctagtggtttcagcaaatagaatgtatagtcaaacaaaagatgttaactgtttataattatggcaagcacctgcatacctccaccccaactcagtggcggatgcacagggtatgctgggtatgcacccgcataccctgcaaaatcagtgaatatttacatattatataatagtattgttgtatgtagaaactaaaatggaaaaagaaagaaaaatatatctggactggacgagacgacgagtggacgctaaggcccatcacccatgacacagcagagagcacgccgctccttggtctggcccgtcgcgcgcaggtccgtacatagcccaattagtgaaacgtaattagcttctgcttgctacccgctgcagatccgtagcccaccgcgcgcgccggaaactgagagtctgagagccgccctagtgccctgccgccgccacccttcagtgagttcagtccttctctaaatcagattatatcatcttcaatatatatcagattatcagatatactcgtaggttcttcgtctactggttctcaaattggtattgcttttaccggtggcaactgcgagtgttgaaagggtattttctgcattggttatagtgaaatcaaaatcaagaaataagctaggtgatactattttggatgattgtctactcacgtttattgagcgagatattttcttctaagttgatgaatgtgatataattgagtcattcatgtcattagaaaagaggaggatcaacaagtaatattgtaagtctcttctatagctatactttaaattatatgtatttcatttgaacaatttgtatcaagatttatcgtcgtactctatatggttttaccgaattagaatgtggttttaccgaattattaatggtttaccaaattgcataagacattttttctatcgcataccctgtgatcaaatcttaggttcgccactgccccaacttctgaggctgatgcgactgtattgtagctgacctcaggcttctttctcactgtttttgcgtccttcttgcaggttcgactcgcagctaatagcttggtgacaaaagatattcaggagcctggtgactacggtggattccccgctgtaccgataaatgaatggcgcaggcaaattgcaaatttgcggttgttctcgaagaaagctagcgtgaaaagatagcatccagcaaccccccctgcgcgattttttttccctgacggtagtatttgacagtgactgtagccctcattttttaatcgagcgacattgcttggcttgtttgctgccgcttttgtctctggtgctccaaaatttcggctacacaatggaattcgaccttttgaaagattttttggactcttggttgtttaacttggccataaggaaccctctgcattagtagcggattattttctagctgtctgctcttcatgagttcactttcagagtttgaggcagcagaggtcgttcagttcctgagtccatgtcaataccggcaaaaactataatgatgcaagtcacatataatctgatgcagaaacaccaaaaaaa

SEQ ID NO: 65277 - DNA, 1492 bp, Zea Mays
ctcacacagtacttacaagcgcgtaggctgaaaggacacgaaagaatcgattaagtacaggctgtacagccacagcccttttacagtttacacccacaaagtgaaaaacatccggtgcgaatgctgtttgaaaacctaggtttttctcgcggttaagccgttaagctcgtgcttgctcactgctgatccctcgactgtgtcttttcgctttggagctcgaggaagcttgccttgccatccgccacagcaggctcatccatcaggatctactaatttggtaaatgatggcagtcatcctgcctaggaccgtccgcagggcggcggaggcagcgttgtcactacactccgtaccgccgcgcgccgcctgtcactttgcgcggtctttgggcggcgtctcttctgcttgcagcatggagttcgtgtcgtggcaaaatggcgggggcatcctgcaccgggcggcctccgttgaccccactgctgtggtggaggctggagcggttgtgcactctggtgccgtcctcggcaaagaggtcgtcgttggttctggggctgtggttgggccttcagtttccataggtcaatcaactagggtcgggtacaatgttgtcttaagcaattgctcagtgggtgagttctgtattatccacaatggatcctccattggtcaagatggttttggcttttttgtggatgaggctggacaagttaagaagaaaccacagatgctgtgcgcaagaattggagaccatgtagaaataggggcaaatacatgcattgacagagctggagagagacaacggtcggaaatcataccaagattgataatctggtccagataggccacaatgtggtcattgggaagtgctgcatgatatgtgggcaagtagggattgctggttctgcaacactgggggactatgttacattgggtggtagagtggcaattcgggaccatgtctcagtcgcatcgaaggttcgactcgcagctaatagcttggtgacaaaagatattcaggagcctggtgactacggtggattccccgctgtaccgataaatgaatggcgcaggcaaattgcaaatttgcggttgttctcgaagaaagctagcgtgaaaagatagcatccagcaaccccccctgcgcgattttttttccctgacggtagtatttgacagtgactgtagccctcattttttaatcgagcgacattgcttggcttgtttgctgccgcttttgtctctggtgctccaaaatttcggctacacaatggaattcgaccttttgaaagattttttggactcttggttgtttaacttggccataaggaaccctctgcattagtagcggattattttctagctgtctgctcttcatgagttcactttcagagtttgaggcagcagaggtcgttcagttcctgagtccatgtcaataccggcaaaaactataatgatgcaagtcacatataatctgatgcagaaacaccaaaaaaa

SEQ ID NO: 65278 - DNA, 1640 bp, Zea Mays
ggctgaaaggacacgaaagaatcgattaagtacaggctgtacagccacagcccttttacagtttacacccacaaagtgaaaaacatccggtgcgaatgctgtttgaaaacctaggtttttctcgcggttaagccgttaagctcgtgcttgctcactgctgatccctcgactgtgtcttttcgctttggagctcgaggaagcttgccttgccatccgccacagcaggctcatccatcaggatctactaatttggtttcgaattatgcccccattttcgtgttttgcccaaaatactcttattagggcatatattcatttggtgatttttcacatactcaggtaaatgatggcagtcatcctgcctaggaccgtccgcagggcggcggaggcagcgttgtcactacactccgtaccgccgcgcgccgcctgtcactttgcgcggtctttgggcggcgtctcttctgcttgcagcatggagttcgtgtcgtggcaaaatggcgggggcatcctgcaccgggcggcctccgttgaccccactgctgtggtggaggctggagcggttgtgcactctggtgccgtcctcggcaaagaggtcgtcgttggttctggggctgtggttgggccttcagtttccataggtcaatcaactagggtcgggtacaatgttgtcttaagcaattgctcagtgggtgagttctgtattatccacaatggatcctccattggtcaagatggttttggcttttttgtggatgaggctggacaagttaagaagaaaccacagcagcctgccgaagggagccatcatgtcctctataatctccgcccctccgaaaaaaagaaaaagagaacttaaagctcaacttatgctgtgcgcaagaattggagaccatgtagaaataggggcaaatacatgcattgacagaggcagctggagagagacaacggtcggaaatcataccaagattgataatctggtccagataggccacaatgtggtcattgggaagtgctgcatgatatgtgggcaagtagggattgctggttctgcaacactgggggactatgttacattgggtggtagagtggcaattcgggaccatgtctcagtcgcatcgaaggttcgactcgcagctaatagcttggtgacaaaagatattcaggagcctggtgactacggtggattccccgctgtaccgataaatgaatggcgcaggcaaattgcaaatttgcggttgttctcgaagaaagctagcgtgaaaagatagcatccagcaaccccccctgcgcgattttttttccctgacggtagtatttgacagtgactgtagccctcattttttaatcgagcgacattgcttggcttgtttgctgccgcttttgtctctggtgctccaaaatttcggctacacaatggaattcgaccttttgaaagattttttggactcttggttgtttaacttggccataaggaaccctctgcattagtagcggattattttctagctgtctgctcttcatgagttcactttcagagtttgaggcagcagaggtcgttcagttcctgagtccatgtcaataccggcaaaaactataatgatgcaagtcacatataatctgatgcagaaacaccaaaaaaa

SEQ ID NO: 65279 - DNA, 2667 bp, Zea Mays
attaagtacaggctgtacagccacagcccttttacagtttacacccacaaagtgaaaaacatccggtgcgaatgctgtttgaaaacctaggtttttctcgcggttaagccgttaagctcgtgcttgctcactgctgatccctcgactgtgtcttttcgctttggagctcgaggaagcttgccttgccatccgccacagcaggctcatccatcaggatctactaatttggtaaatgatggcagtcatcctgcctaggaccgtccgcagggcggcggaggcagcgttgtcactacactccgtaccgccgcgcgccgcctgtcactttgcgcggtctttgggcggcgtctcttctgcttgcagcatggagttcgtgtcgtggcaaaatggcgggggcatcctgcaccgggcggcctccgttgaccccactgctgtggtggaggctggagcggttgtgcactctggtgccgtcctcggcaaagaggtcgtcgttggttctggggctgtggttgggccttcagtttccataggtcaatcaactagggtcgggtacaatgttgtcttaagcaattgctcagtgggtgagttctgtattatccacaatggatcctccattggtcaagatggttttggcttttttgtggatgaggctggacaagttaagaagaaaccacagatgctgtgcgcaagaattggagaccatgtagaaataggggcaaatacatgcattgacagaggcagctggagagagacaacggtcggaaatcataccaagattgataatctggtccagataggccacaatgtggtcattgggaagtgctgcatgatatgtgggcaagtagggattgctggttctgcaacactgggggactatgttacattgggtggtagagtggcaattcgggaccatgtctcagtcgcatcgaaggtgctgtgttcacagctctggtttttttttttttgctttgccttctttgtgcaccttgtatcaaagctagtttgaattcggcgcaacatcgttttgccttgtctaatgtcatatcgtggttacattactctgagcagtgagcactcttgaatcctttgagctctgattcagttgtgcttacagtggtgcaaactattcttttctccatgctgagcagccgagcctaagaagtttatatgcaacttgtgtgtcttcacacctagtggtttcagcaaatagaatgtatagtcaaacaaaagatgttaactgtttataattatggcaagcacctgcatacctccaccccaactcagtggcggatgcacagggtatgctgggtatgcacccgcataccctgcaaaatcagtgaatatttacatattatataatagtattgttgtatgtagaaactaaaatggaaaaagaaagaaaaatatatctggactggacgagacgacgagtggacgctaaggcccatcacccatgacacagcagagagcacgccgctccttggtctggcccgtcgcgcgcaggtccgtacatagcccaattagtgaaacgtaattagcttctgcttgctacccgctgcagatccgtagcccaccgcgcgcgccggaaactgagagtctgagagccgccctagtgccctgccgccgccacccttcagttcttcgtctactggttctcaaattggtattgcttttaccggtggcaactgcgagtgttgaaagggtattttctgcattggttatagtgaaatcaaaatcaagaaataagctaggtgatactattttggatgattgtctactcacgtttattgagcgagatattttcttctaagttgatgaatgtgatataattgagtcattcatgtcattagaaaagaggaggatcaacaagtaatattgtaagtctcttctatagctatactttaaattatatgtatttcatttgaacaatttgtatcaagatttatcgtcgtactctatatggttttaccgaattagaatgtggttttaccgaattattaatggtttaccaaattgcataagacattttttctatcgcataccctgtgatcaaatcttaggttcgccactgccccaacttctgaggctgatgcgactgtattgtagctgacctcaggcttctttctcactgtttttgcgtccttcttgcaggttcgactcgcagctaatagcttggtgacaaaagatattcaggagcctggtgactacggtggattccccgctgtaccgataaatgaatggcgcaggcaaattgcaaatttgcggttgttctcgaagaaagctagcgtgaaaagatagcatccagcaaccccccctgcgcgattttttttccctgacggtagtatttgacagtgactgtagccctcattttttaatcgagcgacattgcttggcttgtttgctgccgcttttgtctctggtgctccaaaatttcggctacacaatggaattcgaccttttgaaagattttttggactcttggttgtttaacttggccataaggaaccctctgcattagtagcggattattttctagctgtctgctcttcatgagttcactttcagagtttgaggcagcagaggtcgttcagttcctgagtccatgtcaataccggcaaaaactataatgatgcaagtcacatataatctgatgcagaaacaccaaaaaaa

SEQ ID NO: 65280 - DNA, 2084 bp, Zea Mays
gcccttttacagtttacacccacaaagtgaaaaacatccggtgcgaatgctgtttgaaaacctaggtttttctcgcggttaagccgttaagctcgtgcttgctcactgctgatccctcgactgtgtcttttcgctttggagctcgaggaagcttgccttgccatccgccacagcaggctcatccatcaggatctactaatttggtaaatgatggcagtcatcctgcctaggaccgtccgcagggcggcggaggcagcgttgtcactacactccgtaccgccgcgcgccgcctgtcactttgcgcggtctttgggcggcgtctcttctgcttgcagcatggagttcgtgtcgtggcaaaatggcgggggcatcctgcaccgggcggcctccgttgaccccactgctgtggtggaggctggagcggttgtgcactctggtgccgtcctcggcaaagaggtcgtcgttggttctggggctgtggttgggccttcagtttccataggtcaatcaactagggtcgggtacaatgttgtcttaagcaattgctcagtgggtgagttctgtattatccacaatggatcctccattggtcaagatggttttggcttttttgtggatgaggctggacaagttaagaagaaaccacagatgctgtgcgcaagaattggagaccatgtagaaataggggcaaatacatgcattgacagaggcagctggagagagacaacggtcggaaatcataccaagattgataatctggtccagataggccacaatgtggtcattgggaagtgctgcatgatatgtgggcaagtagggattgctggttctgcaacactgggggactatgttacattgggtggtagagtggcaattcgggaccatgtctcagtcgcatcgaagatccgtagcccaccgcgcgcgccggaaactgagagtctgagagccgccctagtgccctgccgccgccacccttcagtgagttcagtccttctctaaatcagattatatcatcttcaatatatatcagattatcagatatactcgtaggttcttcgtctactggttctcaaattggtattgcttttaccggtggcaactgcgagtgttgaaagggtattttctgcattggttatagtgaaatcaaaatcaagaaataagctaggtgatactattttggatgattgtctactcacgtttattgagcgagatattttcttctaagttgatgaatgtgatataattgagtcattcatgtcattagaaaagaggaggatcaacaagtaatattgtaagtctcttctatagctatactttaaattatatgtatttcatttgaacaatttgtatcaagatttatcgtcgtactctatatggttttaccgaattagaatgtggttttaccgaattattaatggtttaccaaattgcataagacattttttctatcgcataccctgtgatcaaatcttaggttcgccactgccccaacttctgaggctgatgcgactgtattgtagctgacctcaggcttctttctcactgtttttgcgtccttcttgcaggttcgactcgcagctaatagcttggtgacaaaagatattcaggagcctggtgactacggtggattccccgctgtaccgataaatgaatggcgcaggcaaattgcaaatttgcggttgttctcgaagaaagctagcgtgaaaagatagcatccagcaaccccccctgcgcgattttttttccctgacggtagtatttgacagtgactgtagccctcattttttaatcgagcgacattgcttggcttgtttgctgccgcttttgtctctggtgctccaaaatttcggctacacaatggaattcgaccttttgaaagattttttggactcttggttgtttaacttggccataaggaaccctctgcattagtagcggattattttctagctgtctgctcttcatgagttcactttcagagtttgaggcagcagaggtcgttcagttcctgagtccatgtcaataccggcaaaaactataatgatgcaagtcacatataatctgatgcagaaacaccaaaaaaa

SEQ ID NO: 65281 - DNA, 1296 bp, Zea Mays
acagtttacacccacaaagtgaaaaacatccggtgcgaatgctgtttgaaaacctaggtttttctcgcggttaagccgttaagctcgtgcttgctcactgctgatccctcgactgtgtcttttcgctttggagctcgaggaagcttgccttgccatccgccacagcaggctcatccatcaggatctactaatttggtaaatgatggcagtcatcctgcctaggaccgtccgcagggcggcggaggcagcgttgtcactacactccgtaccgccgcgcgccgcctgtcactttgcgcggtctttgggcggcgtctcttctgcttgcagcatggagttcgtgtcgtggcaaaatggcgggggcatcctgcaccgggcggcctccgttgaccccactgctgtggtggaggctggagcggttgtgcactctggtgccgtcctcggcaaagaggtcgtcgttggttctggggctgtggttgggccttcagtttccataggtcaatcaactagggtcgggtacaatgttgtcttaagcaattgctcagtgggtgagttctgtattatccacaatggatcctccattggtcaagatggttttggcttttttgtggatgaggctggacaagttaagaagaaaccacagctggagagagacaacggtcggaaatcataccaagattgataatctggtccagataggccacaatgtggtcattgggaagtgctgcatgatatgtgggcaagtagggattgctggttctgcaacactgggggactatgttacattgggtggtagagtggcaattcgggaccatgtctcagtcgcatcgaaggtgctgtgttcacagctctggtttttttttttttgctttgccttctttgtgcaccttgtatcaaagctagtttgaattcggcgcaacatcgttttgccttgtctaatgtcatatcgtggttacattactctgagcagtgagcactcttgaatcctttgagctctgattcagttgtgcttacagtggtgcaaactattcttttctccatgctgagcagccgagcctaagaagtttatatgcaacttgtgtgtcttcacacctagtggtttcagcaaatagaatgtatagtcaaacaaaagatgttaactgtttataattatggcaagcacctgcatacctccaccccaactcagtggcggatgcacagggtatgctgggtatgcacccgcataccctgcaaaatcagtgaatatttacatattatataatagtattgttgtatgtagaaactaaaatggaaaaagaa

SEQ ID NO: 65282 - DNA, 2354 bp, Zea Mays
acagtttacacccacaaagtgaaaaacatccggtgcgaatgctgtttgaaaacctaggtttttctcgcggttaagccgttaagctcgtgcttgctcactgctgatccctcgactgtgtcttttcgctttggagctcgaggaagcttgccttgccatccgccacagcaggctcatccatcaggatctactaatttggtaaatgatggcagtcatcctgcctaggaccgtccgcagggcggcggaggcagcgttgtcactacactccgtaccgccgcgcgccgcctgtcactttgcgcggtctttgggcggcgtctcttctgcttgcagcatggagttcgtgtcgtggcaaaatggcgggggcatcctgcaccgggcggcctccgttgaccccactgctgtggtggaggctggagcggttgtgcactctggtgccgtcctcggcaaagaggtcgtcgttggttctggggctgtggttgggccttcagtttccataggtcaatcaactagggtcgggtacaatgttgtcttaagcaattgctcagtgggtgagttctgtattatccacaatggatcctccattggtcaagatggttttggcttttttgtggatgaggctggacaagttaagaagaaaccacagatgctgtgcgcaagaattggagaccatgtagaaataggggcaaatacatgcattgacagaggcagctggagagagacaacggtcggaaatcataccaagattgataatctggtccagataggccacaatgtggtcattgggaagtgctgcatgatatgtgggcaagtagggattgctggttctgcaacactgggggactatgttacattgggtggtagagtggcaattcgggaccatgtctcagtcgcatcgaaggtgctgtgttcacagctctggtttttttttttttgctttgccttctttgtgcaccttgtatcaaagctagtttgaattcggcgcaacatcgttttgccttgtctaatgtcatatcgtggttacattactctgagcagtgagcactcttgaatcctttgagctctgattcagttgtgcttacagtggtgcaaactattcttttctccatgctgagcagccgagcctaagaagtttatatgcaacttgtgtgtcttcacacctagtggtttcagcaaatagaatgtatagtcaaacaaaagatgttaactgtttataattatggcaagcacctgcatacctccaccccaactcagtggcggatgcacagggtatgctgggtatgcacccgcataccctgcaaaatcagtgaatatttacatattatataatagtattgttgtatgtagaaactaaaatggaaaaagaaagaaaaatatatctggactggacgagacgacgagtggacgctaaggcccatcacccatgacacagcagagagcacgccgctccttgatccgtagcccaccgcgcgcgccggaaactgagagtctgagagccgccctagtgccctgccgccgccacccttcagtgagttcagtccttctctaaatcagattatatcatcttcaatatatatcagattatcagatatactcgtaggttcttcgtctactggttctcaaattggtattgcttttaccggtggcaactgcgagtgttgaaagggtattttctgcattggttatagtgaaatcaaaatcaagaaataagctaggtgatactattttggatgattgtctactcacgtttattgagcgagatattttcttctaagttgatgaatgtgatataattgagtcattcatgtcattagaaaagaggaggatcaacaagtaatattgttcgactcgcagctaatagcttggtgacaaaagatattcaggagcctggtgactacggtggattccccgctgtaccgataaatgaatggcgcaggcaaattgcaaatttgcggttgttctcgaagaaagctagcgtgaaaagatagcatccagcaaccccccctgcgcgattttttttccctgacggtagtatttgacagtgactgtagccctcattttttaatcgagcgacattgcttggcttgtttgctgccgcttttgtctctggtgctccaaaatttcggctacacaatggaattcgaccttttgaaagattttttggactcttggttgtttaacttggccataaggaaccctctgcattagtagcggattattttctagctgtctgctcttcatgagttcactttcagagtttgaggcagcagaggtcgttcagttcctgagtccatgtcaataccggcaaaaactataatgatgcaagtcacatataatctgatgcagaaacaccaaaaaaa

SEQ ID NO: 65283 - DNA, 2702 bp, Zea Mays
acagtttacacccacaaagtgaaaaacatccggtgcgaatgctgtttgaaaacctaggtttttctcgcggttaagccgttaagctcgtgcttgctcactgctgatccctcgactgtgtcttttcgctttggagctcgaggaagcttgccttgccatccgccacagcaggctcatccatcaggatctactaatttggtaaatgatggcagtcatcctgcctaggaccgtccgcagggcggcggaggcagcgttgtcactacactccgtaccgccgcgcgccgcctgtcactttgcgcggtctttgggcggcgtctcttctgcttgcagcatggagttcgtgtcgtggcaaaatggcgggggcatcctgcaccgggcggcctccgttgaccccactgctgtggtggaggctggagcggttgtgcactctggtgccgtcctcggcaaagaggtcgtcgttggttctggggctgtggttgggccttcagtttccataggtcaatcaactagggtcgggtacaatgttgtcttaagcaattgctcagtgggtgagttctgtattatccacaatggatcctccattggtcaagatggttttggcttttttgtggatgaggctggacaagttaagaagaaaccacagatgctgtgcgcaagaattggagaccatgtagaaataggggcaaatacatgcattgacagagctggagagagacaacggtcggaaatcataccaagattgataatctggtccagataggccacaatgtggtcattgggaagtgctgcatgatatgtgggcaagtagggattgctggttctgcaacactgggggactatgttacattgggtggtagagtggcaattcgggaccatgtctcagtcgcatcgaaggtgctgtgttcacagctctggtttttttttttttgctttgccttctttgtgcaccttgtatcaaagctagtttgaattcggcgcaacatcgttttgccttgtctaatgtcatatcgtggttacattactctgagcagtgagcactcttgaatcctttgagctctgattcagttgtgcttacagtggtgcaaactattcttttctccatgctgagcagccgagcctaagaagtttatatgcaacttgtgtgtcttcacacctagtggtttcagcaaatagaatgtatagtcaaacaaaagatgttaactgtttataattatggcaagcacctgcatacctccaccccaactcagtggcggatgcacagggtatgctgggtatgcacccgcataccctgcaaaatcagtgaatatttacatattatataatagtattgttgtatgtagaaactaaaatggaaaaagaaagaaaaatatatctggactggacgagacgacgagtggacgctaaggcccatcacccatgacacagcagagagcacgccgctccttggtctggcccgtcgcgcgcaggtccgtacatagcccaattagtgaaacgtaattagcttctgcttgctacccgctgcagatccgtagcccaccgcgcgcgccggaaactgagagtctgagagccgccctagtgccctgccgccgccacccttcagtgagttcagtccttctctaaatcagattatatcatcttcaatatatatcagattatcagatatactcgtaggttcttcgtctactggttctcaaattggtattgcttttaccggtggcaactgcgagtgttgaaagggtattttctgcattggttatagtgaaatcaaaatcaagaaataagctaggtgatactattttggatgattgtctactcacgtttattgagcgagatattttcttctaagttgatgaatgtgatataattgagtcattcatgtcattagaaaagaggaggatcaacaagtaatattgtaagtctcttctatagctatactttaaattatatgtatttcatttgaacaatttgtatcaagatttatcgtcgtactctatatggttttaccgaattagaatgtggttttaccgaattattaatggtttaccaaattgcataagacattttttctatcgcataccctgtgatcaaatcttaggttcgccactgccccaacttctgaggctgatgcgactgtattgtagctgacctcaggcttctttctcactgtttttgcgtccttcttgcaggttcgactcgcagctaatagcttggtgacaaaagatattcaggagcctggtgactacggtggattccccgctgtaccgataaatgaatggcgcaggcaaattgcaaatttgcggttgttctcgaagaaagctagcgtgaaaagatagcatccagcaaccccccctgcgcgattttttttccctgacggtagtatttgacagtgactgtagccctcattttttaatcgagcgacattgcttggcttgtttgctgccgcttttgtctctggtgctccaaaatttcggctacacaatggaattcgaccttttgaaagattttttggactcttggttgtttaacttggccataaggaaccctctgcattagtagcggattattttctagctgtctgctcttcatgagttcactttcagagtttgaggcagcagaggtcgttcagttcctgagtccatgtcaataccggcaaaaactataatgatgcaagtcacatataatctgatgcagaaacaccaaaaaaa

SEQ ID NO: 65284 - DNA, 2256 bp, Zea Mays
acagtttacacccacaaagtgaaaaacatccggtgcgaatgctgtttgaaaacctaggtttttctcgcggttaagccgttaagctcgtgcttgctcactgctgatccctcgactgtgtcttttcgctttggagctcgaggaagcttgccttgccatccgccacagcaggctcatccatcaggatctactaatttggtaaatgatggcagtcatcctgcctaggaccgtccgcagggcggcggaggcagcgttgtcactacactccgtaccgccgcgcgccgcctgtcactttgcgcggtctttgggcggcgtctcttctgcttgcagcatggagttcgtgtcgtggcaaaatggcgggggcatcctgcaccgggcggcctccgttgaccccactgctgtggtggaggctggagcggttgtgcactctggtgccgtcctcggcaaagaggtcgtcgttggttctggggctgtggttgggccttcagtttccataggtcaatcaactagggtcgggtacaatgttgtcttaagcaattgctcagtgggtgagttctgtattatccacaatggatcctccattggtcaagatggttttggcttttttgtggatgaggctggacaagttaagaagaaaccacagatgctgtgcgcaagaattggagaccatgtagaaataggggcaaatacatgcattgacagagctggagagagacaacggtcggaaatcataccaagattgataatctggtccagataggccacaatgtggtcattgggaagtgctgcatgatatgtgggcaagtagggattgctggttctgcaacactgggggactatgttacattgggtggtagagtggcaattcgggaccatgtctcagtcgcatcgaagaaactaaaatggaaaaagaaagaaaaatatatctggactggacgagacgacgagtggacgctaaggcccatcacccatgacacagcagagagcacgccgctccttggtctggcccgtcgcgcgcaggtccgtacatagcccaattagtgaaacgtaattagcttctgcttgctacccgctgcagatccgtagcccaccgcgcgcgccggaaactgagagtctgagagccgccctagtgccctgccgccgccacccttcagtgagttcagtccttctctaaatcagattatatcatcttcaatatatatcagattatcagatatactcgtaggttcttcgtctactggttctcaaattggtattgcttttaccggtggcaactgcgagtgttgaaagggtattttctgcattggttatagtgaaatcaaaatcaagaaataagctaggtgatactattttggatgattgtctactcacgtttattgagcgagatattttcttctaagttgatgaatgtgatataattgagtcattcatgtcattagaaaagaggaggatcaacaagtaatattgtaagtctcttctatagctatactttaaattatatgtatttcatttgaacaatttgtatcaagatttatcgtcgtactctatatggttttaccgaattagaatgtggttttaccgaattattaatggtttaccaaattgcataagacattttttctatcgcataccctgtgatcaaatcttaggttcgccactgccccaacttctgaggctgatgcgactgtattgtagctgacctcaggcttctttctcactgtttttgcgtccttcttgcaggttcgactcgcagctaatagcttggtgacaaaagatattcaggagcctggtgactacggtggattccccgctgtaccgataaatgaatggcgcaggcaaattgcaaatttgcggttgttctcgaagaaagctagcgtgaaaagatagcatccagcaaccccccctgcgcgattttttttccctgacggtagtatttgacagtgactgtagccctcattttttaatcgagcgacattgcttggcttgtttgctgccgcttttgtctctggtgctccaaaatttcggctacacaatggaattcgaccttttgaaagattttttggactcttggttgtttaacttggccataaggaaccctctgcattagtagcggattattttctagctgtctgctcttcatgagttcactttcagagtttgaggcagcagaggtcgttcagttcctgagtccatgtcaataccggcaaaaactataatgatgcaagtcacatataatctgatgcagaaacaccaaaaaaa

SEQ ID NO: 65285 - DNA, 1675 bp, Zea Mays
cagagtgatggcgaggagaagagacggtgtacagacgagtgcgccagacggtgtctgcgtaggcgaacggataggagacatgacaatgagaaggtgtcagacaggtcctggtcctgttttggctgcaaggagtcctggtttgggcaacgttgacaatctccatgagagttcaagcttatctaggagctgggatttgaacagacagattgatgatgaccgtgatgtactcatagaatgtagagatgtccataagtcatttggagagaaacaagtattaagaggtgttagtttcaagacatggtgaagcagttgggataattggaccttcagggacgggaaaatcaactatattgaaggttatggctgggctgcttgctccggacaagggtgatgtaatcatttgtggaaagaaaaggcatggtttagttagcgatgaggatatagagggtctccgcattggtttggtctttcaaagtgctgcactttttgattctctcacagttcgtgaaaatgttggattccttttgtaagggaacatgcctgccagaaggtcatttttcagtaattgcttctgttcagctttcatctttgatacatccatcctttgctttagatatgaaaattcaagcttacccgaggaccgcattggtaaattggtgacagaaactttggctgcagtaggactaaagggtgttgaagatcgtatgccatccgagttgtctggtggaatgaaaaagcgtgttgctctagcacgttcgataatatttgatgatacaaaggatgtagtggagccagaggtccttttatatgatgaacctacagctgggctcgacccgattgcatcaactgtcgtggaagaccttatacgttctgtgcatatgactggacgggatgcccttggcaagccaggaaaaatagcttcctatgttgttgtgacccatcagcatagcacaataagaagagctgttgataggttgctatttcttcatgaggggaaggttgtttgggaaggaatgacacatgagttcacaacatcagctaatccaattgttcaacagtttgcatctggtagtttggatggacccataaaatatttttgaagacccaacccagtagtgaatgaagcataggtgttttgttacaccctcttaaagatcatcccaacaaaatctagagcatcaagaatccaacaatatctggagcatcaagaatccgaaatggggggtctatggcagttgggagaaggaaacacatttggtttgtcattgtttcattgagtttaacaggcatctgcagcagtatcattcggtcacgtcaccttctatgcgcataattgtggtaccagcttgtcaaataagcattagttttctatacaccattctttgagggaaactgtgcgagcgatccaagataaactacatcattcgtcaggaaaactgagctatcatgccaaaaacaaaaaaaaatactaaacacccttcttttagtcatttataaacgagactgatgtaaatgtttactgtaactgttgcttatggtatagcagcgtcgattcctcagtattctcagataattttatttatacgtttgtctgaactgaagatggtagcattagtgcacactctatttgcgcgcactggttgatttgacattgacaagtctctttagttacctg

SEQ ID NO: 65286 - DNA, 1825 bp, Zea Mays
gaacagagaagccaacgccaacgcctccatttcgtcgaatcccctcctctcttcgtccataatggcaattatctcgcgggagagagagacgggaggaagcggattccatccacaccgtcgtgcaccacttttccccgcacccaccacgcggcgccgcccgagcacgaccatggcgtcgccgtccatccccgccgctctccgccacccgcacctccccgccgatggaggacttcttttccactcgtccggcgacccaaccgcgcgctcctcgctctcgttcaggataggagacatgacaatgagaaggtgtcagacaggtcctggtcctgttttggctgcaaggagtcctggtttgggcaacgttgacaatctccatgagagttcaagcttatctaggagctgggatttgaacagacagattgatgatgaccgtgatgtactcatagaatgtagagatgtccataagtcatttggagagaaacaagtattaagaggtgttagtttcaagacatggtgaagcagttgggataattggaccttcagggacgggaaaatcaactatattgaaggttatggctgggctgcttgctccggacaagggtgatgtaatcatttgtggaaagaaaaggcatggtttagttagcgatgaggatatagagggtctccgcattggtttggtctttcaaagtgctgcactttttgattctctcacagttcgtgaaaatgttggattccttttgtaagggaacatgcctgccagaagatatgaaaattcaagcttacccgaggaccgcattggtaaattggtgacagaaactttggctgcagtaggactaaagggtgttgaagatcgtatgccatccgagttgtctggtggaatgaaaaagcgtgttgctctagcacgttcgataatatttgatgatacaaaggatgtagtggagccagaggtccttttatatgatgaacctacagctgggctcgacccgattgcatcaactgtcgtggaagaccttatacgttctgtgcatatgactggacgggatgcccttggcaagccaggaaaaatagcttcctatgttgttgtgacccatcagcatagcacaataagaagagctgttgataggttgctatttcttcatgaggggaaggttgtttgggaaggaatgacacatgagttcacaacatcagctaatccaattgttcaacagtttgcatctggtagtttggatggacccataaaatatttttgaagacccaacccagtagtgaatgaagcataggtgttttgttacaccctcttaaagatcatcccaacaaaatctagagcatcaagaatccaacaatatctggagcatcaagaatccgaaatggggggtctatggcagttgggagaaggaaacacatttggtttgtcattgtttcattgagtttaacaggcatctgcagcagtatcattcggtcacgtcaccttctatgcgcataattgtggtaccagcttgtcaaataagcattagttttctatacaccattctttgagggaaactgtgcgagcgatccaagataaactacatcattcgtcaggaaaactgagctatcatgccaaaaacaaaaaaaaatactaaacacccttcttttagtcatttataaacgagactgatgtaaatgtttactgtaactgttgcttatggtatagcagcgtcgattcctcagtattctcagataattttatttatacgtttgtctgaactgaagatggtagcattagtgcacactctatttgcgcgcactggttgatttgacattgacaagtctctttagttacctg

SEQ ID NO: 65287 - DNA, 1736 bp, Zea Mays
atctattttctggcaccgcaccgtgaaacattttggtgtgttggtcgatccagccgtggttaattttggttgattttcagctgcccgtgtactagaaacgattgttgctgttgtatcaaatgcaacatgtagtttcaatttggaaaaataaactgcctgaccaactatttgctcctcttgcttaacagtatcagaagggtccgtgtcctggaaataggataggagacatgacaatgagaaggtgtcagacaggtcctggtcctgttttggctgcaaggagtcctggtttgggcaacgttgacaatctccatgagagttcaagcttatctaggagctgggatttgaacagacagattgatgatgaccgtgatgtactcatagaatgtagagatgtccataagtcatttggagagaaacaagtattaagaggtgttagtttcaagacatggtgaagcagttgggataattggaccttcagggacgggaaaatcaactatattgaaggttatggctgggctgcttgctccggacaagggtgatgtaatcatttgtggaaagaaaaggcatggtttagttagcgatgaggatatagagggtctccgcattggtttggtctttcaaagtgctgcactttttgattctctcacagttcgtgaaaatgttggattccttttatatgaaaattcaagcttacccgaggaccgcattggtaaattggtgacagaaactttggctgcagtaggactaaagggtgttgaagatcgtatgccatccgagttgtctggtggaatgaaaaagcgtgttgctctagcacgttcgataatatttgatgatacaaaggatgtagtggagccagaggtccttttatatgatgaacctacagctgggctcgacccgattgcatcaactgtcgtggaagaccttatacgttctgtgcatatgactggacgggatgcccttggcaagccaggaaaaatagcttcctatgttgttgtgacccatcagcatagcacaataagaagagctgttgataggttgctatttcttcatgaggggaaggttgtttgggaaggaatgacacatgagttcacaacatcagctaatccaattgttcaacagtttgcatctggtagtttggatggacccataaaatatttttgaagacccaacccagtagtgaatgaagcataggtgttttgttacaccctcttaaagatcatcccaacaaaatctagagcatcaagaatccaacaatatctggagcatcaagaatccgaaatggggggtctatggcagttgggagaaggaaacacatttggtttgtcattgtttcattgagtttaacaggcatctgcagcagtatcattcggtcacgtcaccttctatgcgcataattgtggtaccagcttgtcaaataagcattagttttctatacaccattctttgagggaaactgtgcgagcgatccaagataaactacatcattcgtcaggaaaactgagctatcatgccaaaaacaaaaaaaaatactaaacacccttcttttagtcatttataaacgagactgatgtaaatgtttactgtaactgttgcttatggtatagcagcgtcgattcctcagtattctcagataattttatttatacgtttgtctgaactgaagatggtagcattagtgcacactctatttgcgcgcactggttgatttgacattgacaagtctctttagttacctg

SEQ ID NO: 65288 - DNA, 1736 bp, Zea Mays
attttggtgtgttggtcgatccagccgtggttaattttggttgattttcagctgcccgtgtactagaaacgattgttgctgttgtatcaaatgcaacatgtagtttcaatttggaaaaataaactgcctgaccaactatttgctcctcttgcttaacagtatcagaagggtccgtgtcctggaaataggataggagacatgacaatgagaaggtgtcagacaggtcctggtcctgttttggctgcaaggagtcctggtttgggcaacgttgacaatctccatgagagttcaagcttatctaggagctgggatttgaacagacagattgatgatgaccgtgatgtactcatagaatgtagagatgtccataagtcatttggagagaaacaagtattaagaggtgttagtttcaagattagacatggtgaagcagttgggataattggaccttcagggacgggaaaatcaactatattgaaggttatggctgggctgcttgctccggacaagggtgatgtaatcatttgtggaaagaaaaggcatggtttagttagcgatgaggatatagagggtctccgcattggtttggtctttcaaagtgctgcactttttgattctctcacagttcgtgaaaatgttggattccttttgtaagggaacatgcctgccagaagatatgaaaattcaagcttacccgaggaccgcattggtaaattggtgacagaaactttggctgcagtaggactaaagggtgttgaagatcgtatgccatccgagttgtctggtggaatgaaaaagcgtgttgctctagcacgttcgataatatttgatgatacaaaggatgtagtggagccagaggtccttttatatgatgaacctacagctgggctcgacccgattgcatcaactgtcgtggaagaccttatacgttctgtgcatatgactggacgggatgcccttggcaagccaggaaaaatagcttcctatgttgttgtgacccatcagcatagcacaataagaagagctgttgataggttgctatttcttcatgaggggaaggttgtttgggaaggaatgacacatgagttcacaacatcagctaatccaattgttcaacagtttgcatctggtagtttggatggacccataaaatatttttgaagacccaacccagtagtgaatgaagcataggtgttttgttacaccctcttaaagatcatcccaacaaaatctagagcatcaagaatccaacaatatctggagcatcaagaatccgaaatggggggtctatggcagttgggagaaggaaacacatttggtttgtcattgtttcattgagtttaacaggcatctgcagcagtatcattcggtcacgtcaccttctatgcgcataattgtggtaccagcttgtcaaataagcattagttttctatacaccattctttgagggaaactgtgcgagcgatccaagataaactacatcattcgtcaggaaaactgagctatcatgccaaaaacaaaaaaaaatactaaacacccttcttttagtcatttataaacgagactgatgtaaatgtttactgtaactgttgcttatggtatagcagcgtcgattcctcagtattctcagataattttatttatacgtttgtctgaactgaagatggtagcattagtgcacactctatttgcgcgcactggttgatttgacattgacaagtctctttagttacctg

SEQ ID NO: 65289 - DNA, 1614 bp, Zea Mays
gcttaacagtatcagaagggtccgtgtcctggaaataggataggagacatgacaatgagaaggtgtcagacaggtcctggtcctgttttggctgcaaggagtcctggtttgggcaacgttgacaatctccatgagagttcaagcttatctaggagctgggatttgaacagacagattgatgatgaccgtgatgtactcatagaatgtagagatgtccataagtcatttggagagaaacaagtattaagaggtgttagtttcaagacatggtgaagcagttgggataattggaccttcagggacgggaaaatcaactatattgaagggtgatgtaatcatttgtggaaagaaaaggcatggtttagttagcgatgaggatatagagggtctccgcattggtttggtctttcaaagtgctgcactttttgattctctcacagttcgtgaaaatgttggattccttttgtaagggaacatgcctgccagaaggtcatttttcagtaattgcttctgttcagctttcatctttgatacatccatcctttgctttagatatgaaaattcaagcttacccgaggaccgcattggtaaattggtgacagaaactttggctgcagtaggactaaagggtgttgaagatcgtatgccatccgagttgtctggtggaatgaaaaagcgtgttgctctagcacgttcgataatatttgatgatacaaaggatgtagtggagccagaggtccttttatatgatgaacctacagctgggctcgacccgattgcatcaactgtcgtggaagaccttatacgttctgtgcatatgactggacgggatgcccttggcaagccaggaaaaatagcttcctatgttgttgtgacccatcagcatagcacaataagaagagctgttgataggttgctatttcttcatgaggggaaggttgtttgggaaggaatgacacatgagttcacaacatcagctaatccaattgttcaacagtttgcatctggtagtttggatggacccataaaatatttttgaagacccaacccagtagtgaatgaagcataggtgttttgttacaccctcttaaagatcatcccaacaaaatctagagcatcaagaatccaacaatatctggagcatcaagaatccgaaatggggggtctatggcagttgggagaaggaaacacatttggtttgtcattgtttcattgagtttaacaggcatctgcagcagtatcattcggtcacgtcaccttctatgcgcataattgtggtaccagcttgtcaaataagcattagttttctatacaccattctttgagggaaactgtgcgagcgatccaagataaactacatcattcgtcaggaaaactgagctatcatgccaaaaacaaaaaaaaatactaaacacccttcttttagtcatttataaacgagactgatgtaaatgtttactgtaactgttgcttatggtatagcagcgtcgattcctcagtattctcagataattttatttatacgtttgtctgaactgaagatggtagcattagtgcacactctatttgcgcgcactggttgatttgacattgacaagtctctttagttacctg

SEQ ID NO: 65290 - DNA, 1494 bp, Zea Mays
ctttttcaatggaacgagggaaggcccccagaatatcatgtcggccggggccatctccaccgtacgtccactccatccgcacccagtctcggcgcctcaccccccaaaatcctctcgcggtcgcggatcgctcttccctccccctcttatctctttctcttctcccattccttccttccactcccccgcccagcgccaccatggcctcctccgtcgcggtgtccctccgcgccctcgctgccgccccgctccccaagtccagccccgccacttcctgccccttcttcgtgctccttgcgccggcgctgccccgacgcctgctccgcctccgctccgcacgccgcctgccgctcgccccgctcgccgcctccgattccgccttcgagtcctccgtcggagttaactacgcggagcccgacgactcggagaaggataaggaggtggagttgttcggatcgggtgacgacgagggggcgggtgagttggtggatgaccattccgtagaggtctcagccgctgtcgaggacgaggtggaggaggaggtcggggagtacgttgagccgcccgaggaggccaaggtctacgtcggaaacctgccctacgacgtcgacagcgagcgcctcgctcagctcttcgaccaggccggcgtcgtcgaggtcgcagaggtcatttacaacagagaaacagatcaaagtcgtgggtttgggtttgtcactatgagcactgtcgaggaggctgagaaggctgtggagatgttccatcgctatgatgtcaatggaaggcttctgactgtaaataaagcagctcctagaggctctcgtgtggacagacctcccagacaatctgggccttctctcagaatttatgttggcaacctgccttggcaagtggatgattctagattggtggagttgttcagcgagcatggtaaagtagttgatgccagagttgtctatgaccgagaaactgggcgttcgcggggatttggttttgttactatggcatcgcaggacgaattggatgatgctattgctgcccttgatggacagagtttggatggccgtgccttgcgggtgaatgttgcagaggagcggccacggcgaggtttctaatgagtttggctcttctgctttcttggcgagatcatgttcacgaaacgtacacttgtagctgccagccggcggtggtgccaaaatacacaaacaccgtatcaatgacacatgggccacatgctagaggaagctagccaatggctcgatgatgtacaacatttatagagaagggatcccatttaggacttgttcggttattttcaatctatatggattagagatgattgatacggattgaaggggattttgacttactggggattgaaaccccctcaatccatatggattaggatagaaccgaacaagtccttaatgtcattttgttgtggctagctatcacacctaaatcgattttattgttaaaataagattaatcaacaag

SEQ ID NO: 65291 - DNA, 295 bp, Zea Mays
tttttttttagataacactcgtctctcaaggatttttgagaattaagagtatttccatgtgcaatgtaacgaggcgtacttcagtgacatgatacccgtggccccaacataatagaaatccttacccgaattatcggtgtattccccaaaaaaactgtggcaattcacacaatggcaggactaaatcctacagaagaatcactgcaaaatttatataccccgcacaatgccactggctcaaaaaaaaaagttttaaggatctgccatcatgtaataatccccatttgaaacaaat

SEQ ID NO: 65292 - DNA, 1112 bp, Zea Mays
aaaccctcggtgtttcataatgacaaatttctcgcccgcgaggggccggccgagtacctgagctgatcacgagtctctcagcgagtgctggagagcccactatgtccgccgccggcggcgacctgccggagactgtggaggtgacgctgcgcgccgtcggcccgtcccgtccaaccaccctccgcctccctccgcttctctcggtcgccgagctgcgcggctgcatcgcgcgcgaacgccgtctagcaggcacggaagaagttcgactccgcttgatcctgcgggggaagacgctcccgcaccaagacgacagccatgtcactctccgcgatggggatactcttatagtcgccgtggcacctaagcctcctgttaatcatcttcttgatgatgacgttgaggacgaagaagaggatgaactgaagttcagaataccacaaacgacaaccttgtggaagaggaaattttttatgtttcttcgagacaaattgagattgcctgatatcattttgatggcgctgttttctctcagtatgaaagcatggattatcattgcaatgtggttcctattggcaccgattgctcagaagtacgacattggacctttatatataattggtactggtttcttgatcatacttattaatctcggaagacgacagcaagtgcatactccatattcaacgaagattttagggagctgccaggaacacttaatgcagatcgcattgatgcagacatccgggcaggtcaattttaagcccttactgggcattgcagagatagggaccatggtatgctgagatttgtacagaagcgtactgggcattgcatttgtttgtgcatggaaagcagtgtggagataaaggctgtgcccctctaaggttaaggtcaaataaatttctgacctgtaagtgaaaatgttgcctggttacaattggaaattaccgtgatactttgcagatctgtacttgtgaaaccaaaagagcagagtagcttaagactggcaacaaagtgattttattcctctcttgcaagttcttgtgtccgctatgagccacaaagtcctatatagcaacttgcatttatgagtttcattcaagttaatgttg

SEQ ID NO: 65293 - DNA, 1134 bp, Zea Mays
caaatttctcgcccgcgaggggccggccgagtacctgagctgatcacgagtctctcagcgagtgctggagagcccactatgtccgccgccggcggcgacctgccggagactgtggaggtgacgctgcgcgccgtcggcccgtcccgtccaaccaccctccgcctccctccgcttctctcggtcgccgagctgcgcggctgcatcgcgcgcgaacgccgtctagcaggcacggaagaagttcgactccgcttgatcctgcgggggaagacgctcccgcaccaagacgacagccatgtcactctccgcgatgggggtgggtgccctaaatctgaaccccttatgtcttcattggcgatatactcttatagtcgccgtggcacctaagcctcctgttaatcatcttcttgatgatgacgttgaggacgaagaagaggatgaactgaataccacaaacgacaaccttgtggaagaggaaattttttatgtttcttcgagacaaattgagattgcctgatatcattttgatggcgctgttttctctcagtatgaaagcatggattatcattgcaatgtggttcctattggcaccgattgctcagaagtacgacattggacctttatatataattggtactggtttcttgatcatacttattaatctcggaagacgacagcaaggtgatgttagtgcatactccatattcaacgaagattttagggagctgccaggaacacttaatgcagatcgcattgatgcagacatccgggcaggtcaattttaagcccttactgggcattgcagagatagggaccatggtatgctgagatttgtacagaagcgtactgggcattgcatttgtttgtgcatggaaagcagtgtggagataaaggctgtgcccctctaaggttaaggtcaaataaatttctgacctgtaagtgaaaatgttgcctggttacaattggaaattaccgtgatactttgcagatctgtacttgtgaaaccaaaagagcagagtagcttaagactggcaacaaagtgattttattcctctcttgcaagttcttgtgtccgctatgagccacaaagtcctatatagcaacttgcatttatgagtttcattcaagttaatgttg

SEQ ID NO: 65294 - DNA, 1187 bp, Zea Mays
aaatttctcgcccgcgaggggccggccgagtacctgagctgatcacgagtctctcagcgagtgctggagagcccactatgtccgccgccggcggcgacctgccggagactgtggaggtgacgctgcgcgccgtcggcccgtcccgtccaaccaccctccgcctccctccgcttctctcggtcgccgagctgcgcggctgcatcgcgcgcgaacgccgtctagcaggcacggaagaagttcgactccgcttgatcctgcgggggaagacgctcccgcaccaagacgacagccatgtcactctccgcgatggggatactcttatagtcgccgtggcacctaagcctcctgttaatcatcttcttgatgatgacgttgaggacgaagaagaggatgaactgaagttcagaataccacaaacgacaaccttgtggaagaggaaattttttatgtttcttcgagacaaattgagattgcctgatatcattttgatggcgctgttttctctcagtatgaaagcatggattatcattgcaatgtggttcctattggcaccgattgctcagaagtacgacattggacctttatatataattggtactggtttcttgatcatacttattaatctcggaagacgacagcaaggtgatgttagttctagtttgtctgggcctgtcaccagtggcggagctaaagggtggtccgtgtgtcctagcccaaaaccaagtaaactatgggtattagtgcatactccatattcaacgaagattttagggagctgccaggaacacttaatgcagatcgcattgatgcagacatccgggcaggtcaattttaagcccttactgggcattgcagagatagggaccatggtatgctgagatttgtacagaagcgtactgggcattgcatttgtttgtgcatggaaagcagtgtggagataaaggctgtgcccctctaaggttaaggtcaaataaatttctgacctgtaagtgaaaatgttgcctggttacaattggaaattaccgtgatactttgcagatctgtacttgtgaaaccaaaagagcagagtagcttaagactggcaacaaagtgattttattcctctcttgcaagttcttgtgtccgctatgagccacaaagtcctatatagcaacttgcatttatgagtttcattcaagttaatgttg

SEQ ID NO: 65295 - DNA, 1141 bp, Zea Mays
aaatttctcgcccgcgaggggccggccgagtacctgagctgatcacgagtctctcagcgagtgctggagagcccactatgtccgccgccggcggcgacctgccggagactgtggaggtgacgctgcgcgccgtcggcccgtcccgtccaaccaccctccgcctccctccgcttctctcggtcgccgagctgcgcggctgcatcgcgcgcgaacgccgtctagcaggcacggaagaagttcgactccgcttgatcctgcgggggaagacgctcccgcaccaagacgacagccatgtcactctccgcgatgggggtgggtgccctaaatctgaaccccttatgtcttcattggcgatatactcttatagtcgccgtggcacctaagcctcctgttaatcatcttcttgatgatgacgttgaggacgaagaagaggatgaactgaagttcagaataccacaaacgacaaccttgtggaagaggaaattttttatgtttcttcgagacaaattgagattgcctgatatcattttgatggcgctgttttctctcagtatgaaagcatggattatcattgcaatgtggttcctattggcaccgattgctcagaagtacgacattggacctttatatataattggtactggtttcttgatcatacttattaatctcggaagacgacagcaaggtgatgttagtgcatactccatattcaacgaagattttagggagctgccaggaacacttaatgcagatcgcattgatgcagacatccgggcaggtcaattttaagcccttactgggcattgcagagatagggaccatggtatgctgagatttgtacagaagcgtactgggcattgcatttgtttgtgcatggaaagcagtgtggagataaaggctgtgcccctctaaggttaaggtcaaataaatttctgacctgtaagtgaaaatgttgcctggttacaattggaaattaccgtgatactttgcagatctgtacttgtgaaaccaaaagagcagagtagcttaagactggcaacaaagtgattttattcctctcttgcaagttcttgtgtccgctatgagccacaaagtcctatatagcaacttgcatttatgagtttcattcaagttaatgttg

SEQ ID NO: 65296 - DNA, 1071 bp, Zea Mays
ggccggccgagtacctgagctgatcacgagtctctcagcgagtgctggagagcccactatgtccgccgccggcggcgacctgccggagactgtggaggtgacgctgcgcgccgtcggcccgtcccgtccaaccaccctccgcctccctccgcttctctcggtcgccgagctgcgcggctgcatcgcgcgcgaacgccgtctagcaggcacggaagaagttcgactccgcttgatcctgcgggggaagacgctcccgcaccaagacgacagccatgtcactctccgcgatggggatactcttatagtcgccgtggcacctaagcctcctgttaatcatcttcttgatgatgacgttgaggacgaagaagaggatgaactgaataccacaaacgacaaccttgtggaagaggaaattttttatgtttcttcgagacaaattgagattgcctgatatcattttgatggcgctgttttctctcagtatgaaagcatggattatcattgcaatgtggttcctattggcaccgattgctcagaagtacgacattggacctttatatataattggtactggtttcttgatcatacttattaatctcggaagacgacagcaaggtgatgttagtgcatactccatattcaacgaagattttagggagctgccaggaacacttaatgcagatcgcattgatgcagacatccgggcaggtcaattttaagcccttactgggcattgcagagatagggaccatggtatgctgagatttgtacagaagcgtactgggcattgcatttgtttgtgcatggaaagcagtgtggagataaaggctgtgcccctctaaggttaaggtcaaataaatttctgacctgtaagtgaaaatgttgcctggttacaattggaaattaccgtgatactttgcagatctgtacttgtgaaaccaaaagagcagagtagcttaagactggcaacaaagtgattttattcctctcttgcaagttcttgtgtccgctatgagccacaaagtcctatatagcaacttgcatttatgagtttcattcaagttaatgttg

SEQ ID NO: 65297 - DNA, 1126 bp, Zea Mays
gccgagtacctgagctgatcacgagtctctcagcgagtgctggagagcccactatgtccgccgccggcggcgacctgccggagactgtggaggtgacgctgcgcgccgtcggcccgtcccgtccaaccaccctccgcctccctccgcttctctcggtcgccgagctgcgcggctgcatcgcgcgcgaacgccgtctagcaggcacggaagaagttcgactccgcttgatcctgcgggggaagacgctcccgcaccaagacgacagccatgtcactctccgcgatgggggtgggtgccctaaatctgaaccccttatgtcttcattggcgatgtgcgagagatactcttatagtcgccgtggcacctaagcctcctgttaatcatcttcttgatgatgacgttgaggacgaagaagaggatgaactgaagttcagaataccacaaacgacaaccttgtggaagaggaaattttttatgtttcttcgagacaaattgagattgcctgatatcattttgatggcgctgttttctctcagtatgaaagcatggattatcattgcaatgtggttcctattggcaccgattgctcagaagtacgacattggacctttatatataattggtactggtttcttgatcatacttattaatctcggaagacgacagcaaggtgatgttagtgcatactccatattcaacgaagattttagggagctgccaggaacacttaatgcagatcgcattgatgcagacatccgggcaggtcaattttaagcccttactgggcattgcagagatagggaccatggtatgctgagatttgtacagaagcgtactgggcattgcatttgtttgtgcatggaaagcagtgtggagataaaggctgtgcccctctaaggttaaggtcaaataaatttctgacctgtaagtgaaaatgttgcctggttacaattggaaattaccgtgatactttgcagatctgtacttgtgaaaccaaaagagcagagtagcttaagactggcaacaaagtgattttattcctctcttgcaagttcttgtgtccgctatgagccacaaagtcctatatagcaacttgcatttatgagtttcattcaagttaatgttg

SEQ ID NO: 65298 - DNA, 1075 bp, Zea Mays
cgagtacctgagctgatcacgagtctctcagcgagtgctggagagcccactatgtccgccgccggcggcgacctgccggagactgtggaggtgacgctgcgcgccgtcggcccgtcccgtccaaccaccctccgcctccctccgcttctctcggtcgccgagctgcgcggctgcatcgcgcgcgaacgccgtctagcaggcacggaagaagttcgactccgcttgatcctgcgggggaagacgctcccgcaccaagacgacagccatgtcactctccgcgatggggatactcttatagtcgccgtggcacctaagcctcctgttaatcatcttcttgatgatgacgttgaggacgaagaagaggatgaactgaagttcagaataccacaaacgacaaccttgtggaagaggaaattttttatgtttcttcgagacaaattgagattgcctggtaatgtgcatgcatggtgctcatctattttctgtatgaaagcatggattatcattgcaatgtggttcctattggcaccgattgctcagaagtacgacattggacctttatatataattggtactggtttcttgatcatacttattaatctcggaagacgacagcaaggtgatgttagtgcatactccatattcaacgaagattttagggagctgccaggaacacttaatgcagatcgcattgatgcagacatccgggcaggtcaattttaagcccttactgggcattgcagagatagggaccatggtatgctgagatttgtacagaagcgtactgggcattgcatttgtttgtgcatggaaagcagtgtggagataaaggctgtgcccctctaaggttaaggtcaaataaatttctgacctgtaagtgaaaatgttgcctggttacaattggaaattaccgtgatactttgcagatctgtacttgtgaaaccaaaagagcagagtagcttaagactggcaacaaagtgattttattcctctcttgcaagttcttgtgtccgctatgagccacaaagtcctatatagcaacttgcatttatgagtttcattcaagttaatgttg

SEQ ID NO: 65299 - DNA, 961 bp, Zea Mays
gagtacctgagctgatcacgagtctctcagcgagtgctggagagcccactatgtccgccgccggcggcgacctgccggagactgtggaggtgacgctgcgcgccgtcggcccgtcccgtccaaccaccctccgcctccctccgcttctctcggtcgccgagctgcgcggctgcatcgcgcgcgaacgccgtctagcaggcacggaagaagttcgactccgcttgatcctgcgggggaagacgctcccgcaccaagacgacagccatgtcactctccgcgatggggatactcttatagtcgccgtggcacctaagcctcctgttaatcatcttcttgatgatgacgttgaggacgaagaagaggatgaactgtatgaaagcatggattatcattgcaatgtggttcctattggcaccgattgctcagaagtacgacattggacctttatatataattggtactggtttcttgatcatacttattaatctcggaagacgacagcaaggtgatgttagtgcatactccatattcaacgaagattttagggagctgccaggaacacttaatgcagatcgcattgatgcagacatccgggcaggtcaattttaagcccttactgggcattgcagagatagggaccatggtatgctgagatttgtacagaagcgtactgggcattgcatttgtttgtgcatggaaagcagtgtggagataaaggctgtgcccctctaaggttaaggtcaaataaatttctgacctgtaagtgaaaatgttgcctggttacaattggaaattaccgtgatactttgcagatctgtacttgtgaaaccaaaagagcagagtagcttaagactggcaacaaagtgattttattcctctcttgcaagttcttgtgtccgctatgagccacaaagtcctatatagcaacttgcatttatgagtttcattcaagttaatgttg

SEQ ID NO: 65300 - DNA, 1025 bp, Zea Mays
gagtacctgagctgatcacgagtctctcagcgagtgctggagagcccactatgtccgccgccggcggcgacctgccggagactgtggaggtgacgctgcgcgccgtcggcccgtcccgtccaaccaccctccgcctccctccgcttctctcggcacggaagaagttcgactccgcttgatcctgcgggggaagacgctcccgcaccaagacgacagccatgtcactctccgcgatggggatactcttatagtcgccgtggcacctaagcctcctgttaatcatcttcttgatgatgacgttgaggacgaagaagaggatgaactgaagttcagaataccacaaacgacaaccttgtggaagaggaaattttttatgtttcttcgagacaaattgagattgcctgatatcattttgatggcgctgttttctctcagtatgaaagcatggattatcattgcaatgtggttcctattggcaccgattgctcagaagtacgacattggacctttatatataattggtactggtttcttgatcatacttattaatctcggaagacgacagcaaggtgatgttagtgcatactccatattcaacgaagattttagggagctgccaggaacacttaatgcagatcgcattgatgcagacatccgggcaggtcaattttaagcccttactgggcattgcagagatagggaccatggtatgctgagatttgtacagaagcgtactgggcattgcatttgtttgtgcatggaaagcagtgtggagataaaggctgtgcccctctaaggttaaggtcaaataaatttctgacctgtaagtgaaaatgttgcctggttacaattggaaattaccgtgatactttgcagatctgtacttgtgaaaccaaaagagcagagtagcttaagactggcaacaaagtgattttattcctctcttgcaagttcttgtgtccgctatgagccacaaagtcctatatagcaacttgcatttatgagtttcattcaagttaatgttg

SEQ ID NO: 65301 - DNA, 1081 bp, Zea Mays
agcacgcacgaagcccgatggacgaagagcgagtgcgacgcagtgacaacgagcacgcacgcaagcgtcaacgcgagccagcggcaagcacgagtgctgagcgttggcaaactcaacgaacacgaccacggtcgcgtgctgacgtggataggacaacggcagctgatgagttggagcaccaccgagtagccgacgtgggtgagcaaagcaggcaggacgccgagcgtcacggcgagctagaaaatgatttggcgtgggagctcgacgcgccgtggcgagcagagaacttcacgcatacaatagaggggttcgacacgagcagcacgggcaaaccaggggcgcgcgagatccgggaggagggagcagaggatgggcgcgccgccatgggagaggactggggggtcacggcgcagcgggttgggcgccatggaagagggcagagctcggcgagctcgaaggaaatggggaggagtaaggagggcgcgcggatggtgtgactgccggggaggaacgccgtacagggcagggcgagctcgccaagaatctcagcgcctaggggacgggcgcatggccaaggaaggacagagagatgggctgggctccgacaggggaagtcgccgcgagggagctccaaggcttgaacggcgacaaatgtagcaggaaaaacacggaggggattcagggagatgggcaaccgagctaggctgcgacggccatggcgagctgggtgctggagattgcggagcaggggccgcgacgcaaaagggcgagcagggggcttgggcaccggcagagaggagcacgcagctgagttggagctagcgcgtagggagatggaatctgagcgcagggcgagctcgtggaaggtccgcgcgacgcagggggaaagtgctggaggtggacgacgcgtaggggcgagctgcaggcgccgagcagagtgacggcagcgacttgggcgagatccgaactgggcatagggagacgcgcaaggacgacgaggttggtcgaggcgcaatgggcgaagtggaggacgagtagagagggtcgcgatctgagctgggtgagctccatggccggacag

SEQ ID NO: 65302 - DNA, 1343 bp, Zea Mays
tcctagaatggcgcccgtcggagctgggagagcggcatgtgcgggttcagagagttgctgctagctgtgtttggctggcagggaagttggaggagagtcccaggaaatcaaggcatattatatttgtcttccacagaatggaatgtaggagagaaaacttgccaattgaatttttagatgttttttcaaagaaatattcggaactgaggcatgacctgatacggacagaacggcatctgttgaaggagatggggtttatttgccatgtcgagcacccccataagttcatatcaaactaccttgcaacacttgaagcccctcctgagcttactcaagaggcatggaaccttgccaatgatagcttaaggacaactctgtgtgtgcgatttaagagtgaagtagtagcatgcggagttgtgtatgctgcagctaggagacaccgggttccccttcctgaagatcctccgtggtggactgtctttgatgctgatgaagcaggaattcaggaagtttgcagggttcttgctcacctctacagcttgcccaaggcccaatacattccagtatataaagacaacgattcctttactgttaagagaatctctgatctacaggcttcaaaggaaagtccagcaagggctgttgctagcgataagggtacccctgtaccctcaagttctagccaggagaaggatccagtggctaagactatactgaacaaggtgaaggaaaaaagtgatgacgaaggtaaaccattgcccgctgaatttgatggaaaagaaaacccggtggcaaactcaaaaaatgacaagtctgattctggtgtcgaccggagtcgagaaagagagagatcaagagggcgggaacgtgatgccaggggtagggattctgatcgtgatagcaggggtcgcgagtctgatcgtgagagggaccggagacgctgctctagggaaagaagttcagcagacaaggagaaatcaaggcgccattcatcacgcgaccgggctgactactacaattcgcattcatctcgtgagaaagatcggcataggcaccattgatcaaggtgacgaggatccccggtctgcagggcttcgctgcatggagaccaccacttggcagtgccgaccggatcatgaaaacttgtggattatcatcccactggtggttgtattggcttgattgtgttttgcaccttggattgtaacttgcaagatacgctagccatgagctgtgtgcaacttgaatttataaacacaacatataagatacaattgacgcacgtgcactaactgccattccagcagagcttgtggaatgttataaagaaacagtttgtggaa

SEQ ID NO: 65303 - DNA, 1413 bp, Zea Mays
ggcgagcggaggaggggcgggggcggtctacaaccacaagcagtgatggccacggcacaagtattgttccatcgcttttactgcaagaaatcatttgttcgatttagtgcaaagagagttgctgctagctgtgtttggctggcagggaagttggaggagagtcccaggaaatcaaggcatattatatttgtcttccacagaatggaatgtaggagagaaaacttgccaattgaatttttagatgttttttcaaagaaatattcggaactgaggcatgacctgatacggacagaacggcatctgttgaaggagatggggtttatttgccatgtcgagcacccccataagttcatatcaaactaccttgcaacacttgaagcccctcctgagcttactcaagaggcatggaaccttgccaatgatagcttaaggacaactctgtgtgtgcgatttaagagtgaagtagtagcatgcggagttgtgtatgctgcagctaggagacaccgggttccccttcctgaagatcctccgtggtggactgtctttgatgctgatgaagcaggaattcaggaagtttgcagggttcttgctcacctctacagcttgcccaaggcccaatacattccagtatataaagacaacgattcctttactgttaagagaatctctgatctacaggcttcaaaggaaagtccagcaagggctgttgctagcgataagggtacccctgtaccctcaagttctagccaggagaaggatccagtggctaagactatactgaacaaggtgaaggaaaaaagtgatgacgaaggtaaaccattgcccgctgaatttgatggaaaagaaaacccggtggcaaactcaaaaaatgacaagtctgattctggtgtcgaccggagtcgagaaagagagagatcaagagggcgggaacgtgatgccaggggtagggattctgatcgtgatagcaggggtcgcgagtctgatcgtgagagggaccggagacgctgctctagggaaagaagttcaggacactcagacaaggagaaatcaaggcgccattcatcacgcgaccgggctgactactacaattcgcattcatctcgtgagaaagatcggcataggcaccattgatcaaggtgacgaggatccccggtctgcagggcttcgctgcatggagaccaccacttggcagtgccgaccggatcatgaaaacttgtggattatcatcccactggtggttgtattggcttgattgtgttttgcaccttggattgtaacttgcaagatacgctagccatgagctgtgtgcaacttgaatttataaacacaacatataagatacaattgacgcacgtgcactaactgccattccagcagagcttgtggaatgttataaagaaacagtttgtggaa

SEQ ID NO: 65304 - DNA, 1441 bp, Zea Mays
agcggaggaggggcgggggcggtctacaaccacaagcagtgatggccacggcacaagtattgttccatcgcttttactgcaagaaatcatttgttcgatttagtgcaaagagagttgctgctagctgtgtttggctggcagggaagttggaggagagtcccaggaaatcaaggcatattatatttgtcttccacagaatggaatgtaggagagaaaacttgccaattgaatttttagatgttttttcaaagaaatattcggaactgaggcatgacctgatacggacagaacggcatctgttgaaggagatggggtttatttgccatgtcgagcacccccataagttcatatcaaactaccttgcaacacttgaagcccctcctgagcttactcaagaggcatggaaccttgccaatgatagcttaaggacaactctgtgtgtgcgatttaagagtgaagtagtagcatgcggagttgtgtatgctgcagctaggagacaccgggttccccttcctgaagatcctccgtggtggactgtctttgatgctgatgaagcaggaattcaggaagtttgcagggttcttgctcacctctacagcttgcccaaggcccaatacattccagtatataaagacaacgattcctttactgttaagagaatctctgatctacaggcttcaaaggaaagtccagcaagggctgttgctagcgataagggtacccctgtaccctcaagttctagccaggagaaggatccagtggctaagactatactgaacaaggtgaaggaaaaaagtgatgacgaaggtaaaccattgcccgctgaatttgatggaaaagaaaacccggtggcaaactcaaaaaatgacaagtctgattctggtgtcgaccggagtcgagaaagagagagatcaagagggcgggaacgtgatgccaggggtagggattctgatcgtgatagcaggggtcgcgagtctgatcgtgagagggaccggagacgctgctctagggaaagaagttcagatgactcattggtcattgcaatttgaacgcaggacactcagacaaggagaaatcaaggcgccattcatcacgcgaccgggctgactactacaattcgcattcatctcgtgagaaagatcggcataggcaccattgatcaaggtgacgaggatccccggtctgcagggcttcgctgcatggagaccaccacttggcagtgccgaccggatcatgaaaacttgtggattatcatcccactggtggttgtattggcttgattgtgttttgcaccttggattgtaacttgcaagatacgctagccatgagctgtgtgcaacttgaatttataaacacaacatataagatacaattgacgcacgtgcactaactgccattccagcagagcttgtggaatgttataaagaaacagtttgtggaa

SEQ ID NO: 65305 - DNA, 1191 bp, Zea Mays
cggaggaggggcgggggcggtctacaaccacaagcagtgatggccacggcacaagtattgttccatcgcttttactgcaagaaatcatttgttcgatttagtgcaaagagagttgctgctagctgtgtttggctggcagggaagttggaggagagtcccaggaaatcaaggcatattatatttgtcttccacagaatggaatgtaggagagaaaacttgccaattgaatttttagatgttttttcaaagaaatattcggaactgaggcatgacctgatacggacagaacggcatctgttgaaggagatggggtttatttgccatgtcgagcacccccataagttcatatcaaactaccttgcaacacttgaagcccctcctgagcttactcaagaggcatggaaccttgccaatgatagcttaaggacaactctgtgtgtgcgatttaagagtgaagtagtagcatgcggagttgtgtatgctgcagctaggagacaccgggttccccttcctgaagatcctccgtggtggactgtctttgatgctgatgaagcaggaattcaggaagtttgcagggttcttgctcacctctacagcttgcccaaggcccaatacattccagtatataaagacaacgattcctttactgttaagagaatctctgatctacaggcttcaaaggaaagtccagcaagggctgttgctagcgataagggtacccctgtaccctcaagttctagccaggagaaggatccagtggctaagactatactgaacaaggtgaaggaaaaaagtgatgacgaaggacactcagacaaggagaaatcaaggcgccattcatcacgcgaccgggctgactactacaattcgcattcatctcgtgagaaagatcggcataggcaccattgatcaaggtgacgaggatccccggtctgcagggcttcgctgcatggagaccaccacttggcagtgccgaccggatcatgaaaacttgtggattatcatcccactggtggttgtattggcttgattgtgttttgcaccttggattgtaacttgcaagatacgctagccatgagctgtgtgcaacttgaatttataaacacaacatataagatacaattgacgcacgtgcactaactgccattccagcagagcttgtggaatgttataaagaaacagtttgtggaa

SEQ ID NO: 65306 - DNA, 1014 bp, Zea Mays
aaaaggttgacttgtatttgcatgagcttaaggacaactctgtgtgtgcgatttaagagtgaagtagtagcatgcggagttgtgtatgctgcagctaggagacaccgggttccccttcctgaagatcctccgtggtggactgtctttgatgctgatgaagcaggaattcaggaagtttgcagggttcttgctcacctctacagcttgcccaaggcccaatacattccagtatataaagacaacgattcctttactgttaagagaatctctgatctacaggcttcaaaggaaagtccagcaagggctgttgctagcgataagggtacccctgtaccctcaagttctagccaggagaaggatccagtggctaagactatactgaacaaggtgaaggaaaaaagtgatgacgaaggtaaaccattgcccgctgaatttgatggaaaagaaaacccggtggcaaactcaaaaaatgacaagtctgattctggtgtcgaccggagtcgagaaagagagagatcaagagggcgggaacgtgatgccaggggtagggattctgatcgtgatagcaggggtcgcgagtctgatcgtgagagggaccggagacgctgctctagggaaagaagttcaggacactcagacaaggagaaatcaaggcgccattcatcacgcgaccgggctgactactacaattcgcattcatctcgtgagaaagatcggcataggcaccattgatcaaggtgacgaggatccccggtctgcagggcttcgctgcatggagaccaccacttggcagtgccgaccggatcatgaaaacttgtggattatcatcccactggtggttgtattggcttgattgtgttttgcaccttggattgtaacttgcaagatacgctagccatgagctgtgtgcaacttgaatttataaacacaacatataagatacaattgacgcacgtgcactaactgccattccagcagagcttgtggaatgttataaagaaacagtttgtggaa

SEQ ID NO: 65307 - DNA, 866 bp, Zea Mays
ttgttcattcgctctctcatttagtccatatattccctaaccaagtctgttcatctcgcatgaagaaacggatgaacaacctgaccaaatgaatttctaatcacatacatgatctcgtgttaaccagagtgaactctcaacctttggcttacagatggtcctgagaggacttacccaatgtcaaaagaactttaacaagttggttttactaacttgtaactgccccatgaacaaaggctgagtttagagatcgttctgtcgagttatctaaactcactttggttcaaaccatcctaaagaaagtacttacacggatcaagttaagtcaaccaataaccacctaattatcgctctagtcacgcctcgaccgcctcacgtgtgctttttcagcgtgtgtgatcatgtcgatccatgtctagtgcttgctaaaatggattggttgcgaagacaacatctacagatccctccactggtgattctctcgaatctatatcacctttcggggacatggattttctggctagccacgggtcaactgtgatgttattcgacattcacacccgtctcctatgctatggatttacggtaaccacttgttggtaaacctctttctgtgtattttacccaagaggttgcatctgattctgtttggggaagatcgcgtaattgccacttgcccaatagactcagatagtacagtgtcatcagagaaagccaactgcacccatggaaccttatgtgttcctctggcagacatcgtctctactgatggacatatatgatttagcttgtggcgatacatgttatgtccactagagaaacgatattctgagacactcgccttcgcccaagactgccttatgatt

SEQ ID NO: 65308 - DNA, 2427 bp, Zea Mays
ctaaatcaaacagggcctcaaaatggcccaggttggatgactggtcctagaaccctagtgccctcatctgtctaaaaccctagttcggtgaagcactagcctgagcggcggcgcggaccggcgagacgactgaccgaacgagtgcgccagagagctccctgcaaaccttgccgcgcagtaaatggaacgcagacgtgcagacaaggaggaggcagaagagccgctgaggcccgaggaggaagaagatgaggaggacgaagaggaggggtgggacgactggtgctccgacggcgaagatgttggcggtgggctgctgtgtttgttctgtagctcgagtttcgactccgagagctcactcttcgagcactgcgccgccgagcactgctttgatttccacatgattgtgaaggagctggggctggatttctacagctgcatcaagctcatcaactttgtccgctccaaggttgcagagaaaaaatgctggagctgtggccaagcattctcttccaacacagaactctgcagccacttgcacacagtggagaattgcctaattgagggaaaggtgccatgggaggacgatgtgtacttgaaacctttcatggaagatgactcccttttgcacagcttgtcaatcgatgacgatgatgaagatggggactgtggagtgtcaatggaaaagggacaatattcagctgggaatgaggttttagctgaaccatgggggaacaagctgagcagcatatcagaaagaaatgattctgacatcagtgctcaatttcagcaagagtgtactattggtagtacacaaagggaagtcagagagtcccttcatgtggcgattgatggccacctaaaggttgcacgtgctagtgttaattccaaagcaatcaaaactgtggatgataactactttggatcttatagttcatttggtatccacagggagatgctcggtgataaagtcagaacagatgcttacagagatgcaattttaggcaatcctagcctaataagtggagcaactgtactagatgttggttgtggcacaggaattctaagtctttttgcagctagggctggtgcatctagagttgttgctgttgatgggagtgcaaagatggcttctgtggctacccaagttgcaaagaataatggtctgttgtatgatgagaacgtggaagcagaacagaagcaaggcagtgctcaagttataagtgtcgtacatacaaaggctgaagagctaaaccagaaaatacaagtcccacaaaatggctttgatctattagtgagtgaatggatgggatattgcctgctgtacgaatccatgctaagttctgtcatatatgcacgtgatcattttctaaaacctggtggtgctattctcccagatactgcaatgattcttggtgctggcttcgggaaaggtggaactagcttgccattttgggaaaacgtatatggctttgatatgtcatgtattggcaaagaagtaacttcaacttcagctcgatttcctgtagttgatgtactgtcttctcaggatattgtgacagagactgctgtactccattcctttgatcttgcaagtatgaaggaaagtgagatggattttactgcaagctttgagctgatgctcagtgaaagtagtgccactgtgtcaggagtgacctggtgctatggcattgtcttgtggtttgacacggggtttaccgacagattctgcaaggagaagcctgttgtcctctccacctctcccttctctacaccaactcactggtcacagacaatcttcacctttgaagagcccattgcaatggcgaaggaggaatcaaccctgggttcatctgcattggctggcacagatgagtgcccagctacggcgctcaggtctcggatcagcatcgtgagggcatctgagcaccgcagcatagacatatcggttgaaaccacagcaatcagttcagatggccggaagcgcagctggcctgttcagatattcaacttgtgaccaatcattatacctctttgggcttcctaccaccacaagcaattgttactagaatttgtcttggtcgtttaagttttgcacactgaatggagcactttgtgctactgattttttggtaaaacgatgatcgtgagaattagattggaaggctttctggaatggttagggtgtaatgttgtacaataatctaattcgcattggtttggccctagttcagttgaatgatgttgacggggttgaaggcaaacataatgtatttgttgtagtcatcaaacgtgttgcgcacaattcacaaacagcaatggcatgtagctgtttatctaaccgatgcacacctgcattgtactttaaaattaaacaaaaaaagtagagcttatggaatcagtgtatatgatatgatgccctccattcgt

SEQ ID NO: 65309 - DNA, 1351 bp, Zea Mays
acacgtatattacaacagctgtgctgctaggcacccactccccagtcaaggcatatccattccatggatctcgcgtccctgctcctctcccagctgctgctgcttccggtggtaacggttgtctccggcgagaccgccgcgcacccgggctacgcgcacgctgaggaggcatgcagcggtatgctagaggcagaggcggagaaagcaacggtgctggtgcctgcgccggagcggcgcgaagagttcgacggcgggcggatcgtggacatcagccactactaccgcgaggacatgccggagtgggagtcatcagagggctccggcgagttcctgcagctggcgcggtccatgcgcaacggctccgacatcgctaacttctcggagctccggctcactgcgcactccggcacccacgtcgacgcgccgggacacgtcttcgagcactactacgacaccggcttcgacgtcgacaccctcgacctcgctgtcctcaacggaccagcgctgttggttgacgttcccagagataagaacatcacagctgatgttatggcatccctaaacattcctaaaggtgttcgacgtgtactctttcggaccctaaatacagacaggagttgactacttgtcagtgggcgcatttgatgaatgcattccagctcatctagtatttcttgaaaaaagggaggtcatacttgtcgaagccttgaatctggagcatgttagccctggaatatacatcttgcattgcttgccactaagattgcggggtgctgaaggttctcctgcaagatgcatcctcatcaagtgacatggttataaccatcccaaaaagcattgtacaatcaatcttgaaacctacctattcagtcttttcaaagtgcttatagaagtatggttttcatgcgtgtgtttatagggatggtgtgaggacccaataatatggagctgggctagtgctgatccaatcgacactaatatgagctgaagatactacataaaacatgaacaatatggagttttatatactggaccccagtccaggttttaaatccacccctgcaaggggtgagtttatgtttgtgtttgggagtgtatatttctatattgcaatttgaaaaaaaactatgtatgtaataaaataagaatacatcaattcattcacatgacaattgaaaaatgtggctcccatcactcttccaccattttttgctaatattatctcttattagaactctattgtgttattattctctccatcacaaaacaaataaatttatcagttgttgtaaactaaaactatcatacttttaactgaatttttagtggaggacacatatgtcagtgtttg

SEQ ID NO: 65310 - DNA, 2071 bp, Zea Mays
acacgtatattacaacagctgtgctgctaggcacccactccccagtcaaggcatatccattccatggatctcgcgtccctgctcctctcccagctgctgctgcttccggtggtaacggttgtctccggcgagaccgccgcgcacccgggctacgcgcacgctgaggaggcatgcagcggtatgctagaggcagaggcggagaaagcaacggtgctggtgcctgcgccggagcggcgcgaagagttcgacggcgggcggatcgtggacatcagccactactaccgcgaggacatgccggagtgggagtcatcagagggctccggcgagttcctgcagctggcgcggtccatgcgcaacggctccgacatcgctaacttctcggagctccggctcactgcgcactccggcacccacgtcgacgcgccgggacacgtcttcgagcactactacgacaccggcttcgacgtcgacaccctcgacctcgctgtcctcaacggaccagcgctgttggttgacgttcccagagataagaacatcacagctgatgttatggcatccctaaacattcctaaaggtgttcgacgtgtactctttcggaccctaaatacagacaggtatgttttaggctgtctccagcagcgtcccctaaatttcgtcccctaaaggaatattctctgtcctttacagaacactctaaaagattctgtcctctatatattctccgtctccagcagcgtcctctaaattccgtcccctaaagctacagtgttaacagattcacattttccatttctttttcatttttctttgttttcttctcatttgacgctacataaatgatacgtaaaaattgtatttattaattttgaaagtaataaattcgaaatgtcaatattaattacattgcttgttttgttgttgtgtaattgttgtcgataacgcgccacatagtataatatcgttggcaaaatatgttttcaaatggacaagcttgcaccgtaagcccgtactcttcttcgagaagccatagcctagcttctcttgcacgagaagcgcatggcttctaccgaagcgtacttcctctataaataccaagtgagccttccatacttcactcaaccttgcctttacaaactccacaaccatgaatccctacttagaaaacaattttcttgtgcggttgatggaagaaatggaagaggaagaagaagagttgcagttggcgaggcacatggtcaataggaggcgacgtgtacgcaatgagcgtcgtcatggtggttcgattccagggcgtgttaggattcatcgtgatcacatgagcggcgatgcaagaatccgagcggactactttggagccaacccggtgtacacggatgctcaatttcgtaggaggatggtgcacaatggttggttgataatacagacatcaaactagttggagttgactacttgtcagtgggcgcatttgatgaatgcattccagctcatctagtatttcttgaaaaaagggaggtcatacttgtcgaagccttgaatctggagcatgttagccctggaatatacatcttgcattgcttgccactaagattgcggggtgctgaaggttctcctgcaagatgcatcctcatcaagtgacatgggatggtgtgaggacccaataatatggagctgggctagtgctgatccaatcgacactaatatgagctgaagatactacataaaacatgaacaatatggagttttatatactggaccccagtccaggttttaaatccacccctgcaaggggtgagtttatgtttgtgtttgggagtgtatatttctatattgcaatttgaaaaaaaactatgtatgtaataaaataagaatacatcaattcattcacatgacaattgaaaaatgtggctcccatcactcttccaccattttttgctaatattatctcttattagaactctattgtgttattattctctccatcacaaaacaaataaatttatcagttgttgtaaactaaaactatcatacttttaactgaatttttagtggaggacacatatgtcagtgtttg

SEQ ID NO: 65311 - DNA, 2243 bp, Zea Mays
acacgtatattacaacagctgtgctgctaggcacccactccccagtcaaggcatatccattccatggatctcgcgtccctgctcctctcccagctgctgctgcttccggtggtaacggttgtctccggcgagaccgccgcgcacccgggctacgcgcacgctgaggaggcatgcagcggtatgctagaggcagaggcggagaaagcaacggtgctggtgcctgcgccggagcggcgcgaagagttcgacggcgggcggatcgtggacatcagccactactaccgcgaggacatgccggagtgggagtcatcagagggctccggcgagttcctgcagctggcgcggtccatgcgcaacggctccgacatcgctaacttctcggagctccggctcactgcgcactccggcacccacgtcgacgcgccgggacacgtcttcgagcactactacgacaccggcttcgacgtcgacaccctcgacctcgctgtcctcaacggaccagcgctgttggttgacgttcccagagataagaacatcacagctgatgttatggcatccctaaacattcctaaaggtgttcgacgtgtactctttcggaccctaaatacagacagaacactctaaaagattctgtcctctatatattctccgtctccagcagcgtcctctaaattccgtcccctaaagctacagtgttaacagattcacattttccatttctttttcatttttctttgttttcttctcatttgacgctacataaatgatacgtaaaaattgtatttattaattttgaaagtaataaattcgaaatgtcaatattaattacattgcttgttttgttgttgtgtaattgttgtcgataacgcgccacatagtataatatcgttggcaaaatatgttttcaaatggacaagcttgcaccgtaagcccgtactcttcttcgagaagccatagcctagcttctcttgcacgagaagcgcatggcttctaccgaagcgtacttcctctataaataccaagtgagccttccatacttcactcaaccttgcctttacaaactccacaaccatgaatccctacttagaaaacaattttcttgtgcggttgatggaagaaatggaagaggaagaagaagagttgcagttggcgaggcacatggtcaataggaggcgacgtgtacgcaatgagcgtcgtcatggtggttcgattccagggcgtgttaggattcatcgtgatcacatgagcggcgatgcaagaatccgagcggactactttggagccaacccggtgtacacggatgctcaatttcgtaggaggttccgcatgcgtcgccatgtctttgagcgccttgttgatgttgtgcaacaagtggatccttattttattcagcgtccaaattgtgcggaaagcttatgtggaagaaagaatttgatacaagttatgttggcttcatgaaggatggtgcacaatggttggttgataatacagacatcaaactagttggagttgactacttgtcagtgggcgcatttgatgaatgcattccagctcatctagtatttcttgaaaaaagggaggtcatacttgtcgaagccttgaatctggagcatgttagccctggaatatacatcttgcattgcttgccactaagattgcggggtgctgaaggttctcctgcaagatgcatcctcatcaagtgacatggttataaccatcccaaaaagcattgtacaatcaatcttgaaacctacctattcagtcttttcaaagtgcttatagaagtatggttttcatgcgtgtgtttatagggatggtgtgaggacccaataatatggagctgggctagtgctgatccaatcgacactaatatgagctgaagatactacataaaacatgaacaatatggagttttatatactggaccccagtccaggttttaaatccacccctgcaaggggtgagtttatgtttgtgtttgggagtgtatatttctatattgcaatttgaaaaaaaactatgtatgtaataaaataagaatacatcaattcattcacatgacaattgaaaaatgtggctcccatcactcttccaccattttttgctaatattatctcttattagaactctattgtgttattattctctccatcacaaaacaaataaatttatcagttgttgtaaactaaaactatcatacttttaactgaatttttagtggaggacacatatgtcagtgtttg

SEQ ID NO: 65312 - DNA, 2470 bp, Zea Mays
acacgtatattacaacagctgtgctgctaggcacccactccccagtcaaggcatatccattccatggatctcgcgtccctgctcctctcccagctgctgctgcttccggtggtaacggttgtctccggcgagaccgccgcgcacccgggctacgcgcacgctgaggaggcatgcagcggtatgctagaggcagaggcggagaaagcaacggtgctggtgcctgcgccggagcggcgcgaagagttcgacggcgggcggatcgtggacatcagccactactaccgcgaggacatgccggagtgggagtcatcagagggctccggcgagttcctgcagctggcgcggtccatgcgcaacggctccgacatcgctaacttctcggagctccggctcactgcgcactccggcacccacgtcgacgcgccgggacacgtcttcgagcactactacgacaccggcttcgacgtcgacaccctcgacctcgctgtcctcaacggaccagcgctgttggttgacgttcccagagataagaacatcacagctgatgttatggcatccctaaacattcctaaaggtgttcgacgtgtactctttcggaccctaaatacagacagctttaaatgggacacatagatgcaagaagaagaagataaagaagaatacgactcgggagcagcaagagttacaacttgatttggattcaacattgacagcagaggcggagggacaagtagaggcaaagggaaacgaggtggaggagcaggatgccactgatgctgttgcttctggtattttgatggaggggacagcaaaatattatgaggaggactccaaggtgaaggtcagtctgatgcccgagaaggaagccaacaccactgttgtttcagtttctgagagtacaccaaaacacaagaagaggaggaaaaagaagaacaagattcaggggcaactagattctgcaaaggcatcatctagtgttgtttccatggatataattgcagctgataaatctgaaaatggttgcacagatgtggtaggggcatcaggacatgctgatatcaatatggatcccataaatggtgatgatctaagtagtgctcagtcaaaggcaaatgatgctgatgttttactgaagaataaggatggaaacaagggggataagaattgcgctgagaacagcgtcttgttgcaggagagctctgcaagaagaaaaagacggaggggaaaaagaaagtggggttcagccggtggaggaccaggcttctcttctgataatggaggcgtggttgctgagcatagcctgcattcttcagcaaaccatggtcttagctgcatatgtgctccatgtttagttgaggcacatgaaaagaagatccaaaatatctactcaccaagaggatcactggtaaggtttcaaaggaagaaactcctgatcttggaccttaatggtctgctagcagatataaatcaagattaccataatgcacacttggcacatgcaaaggttcgaaccaaattagttttcagaagaccatactgtgacgattttctgagattctgcttccagaattttgagctaggaatatggtcatcaaggaaaagggaaaatgttgaatcggttgttgatatccttatgaggggtcttaagcaatgcctactattttgttgggacatgtcttactgcactgttacagggtgcaaaacaattgacaacaaggacaaaccattagtgctgaaggaactaaaaagggtttggaataaggatgagccagacctcccatgggggcagggagagttttcaccttcaaatacattactggtggatgattcgccctacaaggctctgtgcaacccgccaaacactgcaatcttccccgaaccctacaattacatgaaccagagggatgattattccttgggacctggtggagatcttcgggtttatctgcagagaattgctgctgcagacaatgttcaaaattttgttcgggataacccatttggtcagaagtccatcacagagagtgatccaaactggaatttctatgtgaaaatagtcgataagatggagaagcaaatagttgatcaagtggaaacgaaaatagttgatgaagtggagaggtccttaggttaataggaacaaaggttcaatcaagagaaagttctgtatttgtttgtgttgattagcaggtgttttgcattgcgccagtgctatcatgtgtaatctaatttagtaattgttgtttcatagacaaaacatgatttgaagaatcttgataggttttgttgttccaaccgagggatgaatcattgtttgtcctgtatcgagtgttacaggctttctggtttgctaacttagctatttctggaagtttggttgactatgctggaggatgattcagttcgatggaactgttatatactcgaattgttgtaaatcatctcagtttcatggtttcttgccttgcct

SEQ ID NO: 65313 - DNA, 1858 bp, Zea Mays
agattactacggcccattaactcaaatttacggcccaaaatggcgaggcaggcgaaacggtgacggagctggtagttccccaaatcccgagccgcgccaccggcagcagggagaaacgccgccgcccgctcgccccgtgcactgctcctccgccttagcccgtagccaccagatccttggcgcaccagccctccatcgcagtcctggttaggctaggggatgtcaaatctcgattccgcgacgccggcggctgcagtggcggagatagggacggcggagcgggactctaccaccgcttctgtttcagctttaaatgggacacatagatgcaagaagaagaagataaagaagaatacgactcgggagcagcaagagttacaacttgatttggattcaacattgacagcagaggcggagggacaagtagaggcaaagggaaacgaggtggaggagcaggatgccactgatgctgttgcttctggtattttgatggaggggacagcaaaatattatgaggaggactccaaggtgaaggtcagtctgatgcccgagaaggaagccaacaccactgttgtttcaggagagctctgcaagaagaaaaagacggaggggaaaaagaaagtggggttcagccggtggaggaccaggcttctcttctgataatggaggcgtggttgctgagcatagcctgcattcttcagcaaaccatggtcttagctgcatatgtgctccatgtttagttgaggcacatgaaaagaagatccaaaatatctactcaccaagaggatcactggtaaggtttcaaaggaagaaactcctgatcttggaccttaatggtctgctagcagatataaatcaagattaccataatgcacacttggcacatgcaaaggttcgaaccaaattagttttcagaagaccatactgtgacgattttctgagattctgcttccagaattttgagctaggaatatggtcatcaaggaaaagggaaaatgttgaatcggttgttgatatccttatgaggggtcttaagcaatgcctactattttgttgggacatgtcttactgcactgttacagggtgcaaaacaattgacaacaaggacaaaccattagtgctgaaggaactaaaaagggtttggaataaggatgagccagacctcccatgggggcagggagagttttcaccttcaaatacattactggtggatgattcgccctacaaggctctgtgcaacccgccaaacactgcaatcttccccgaaccctacaattacatgaaccagagggatgattattccttgggacctggtggagatcttcgggtttatctgcagagaattgctgctgcagacaatgttcaaaattttgttcgggataacccatttggtcagaagtccatcacagagagtgatccaaactggaatttctatgtgaaaatagtcgataagatggagaagcaaatagttgatcaagtggaaacgaaaatagttgatgaagtggagaggtccttaggttaataggaacaaaggttcaatcaagagaaagttctgtatttgtttgtgttgattagcaggtgttttgcattgcgccagtgctatcatgtgtaatctaatttagtaattgttgtttcatagacaaaacatgatttgaagaatcttgataggttttgttgttccaaccgagggatgaatcattgtttgtcctgtatcgagtgttacaggctttctggtttgctaacttagctatttctggaagtttggttgactatgctggaggatgattcagttcgatggaactgttatatactcgaattgttgtaaatcatctcagtttcatggtttcttgccttgcct

SEQ ID NO: 65314 - DNA, 2016 bp, Zea Mays
agattactacggcccattaactcaaatttacggcccaaaatggcgaggcaggcgaaacggtgacggagctggtagttccccaaatcccgagccgcgccaccggcagcagggagaaacgccgccgcccgctcgccccgtgcactgctcctccgccttagcccgtagccaccagatccttggcgcaccagccctccatcgcagtcctggttaggctaggggatgtcaaatctcgattccgcgacgccggcggctgcagtggcggagatagggacggcggagcgggactctaccaccgcttctgtttcagctttaaatgggacacatagatgcaagaagaagaagataaagaagaatacgactcgggagcagcaagagttacaacttgatttggattcaacattgacagcagaggcggagggacaagtagaggcaaagggaaacgaggtggaggagcaggatgccactgatgctgttgcttctgtgatggaggggacagcaaaatattatgaggaggactccaaggtgaaggtcagtctgatgcccgagaaggaagccaacaccactgttgtttcagatgtggtaggggcatcaggacatgctgatatcaatatggatcccataaatggtgatgatctaagtagtgctcagtcaaaggcaaatgatgctgatgttttactgaagaataaggatggaaacaagggggataagaattgcgctgagaacagcgtcttgttgcaggagagctctgcaagaagaaaaagacggaggggaaaaagaaagtggggttcagccggtggaggaccaggcttctcttctgataatggaggcgtggttgctgagcatagcctgcattcttcagcaaaccatggtcttagctgcatatgtgctccatgtttagttgaggcacatgaaaagaagatccaaaatatctactcaccaagaggatcactggtaaggtttcaaaggaagaaactcctgatcttggaccttaatggtctgctagcagatataaatcaagattaccataatgcacacttggcacatgcaaaggttcgaaccaaattagttttcagaagaccatactgtgacgattttctgagattctgcttccagaattttgagctaggaatatggtcatcaaggaaaagggaaaatgttgaatcggttgttgatatccttatgaggggtcttaagcaatgcctactattttgttgggacatgtcttactgcactgttacagggtgcaaaacaattgacaacaaggacaaaccattagtgctgaaggaactaaaaagggtttggaataaggatgagccagacctcccatgggggcagggagagttttcaccttcaaatacattactggtggatgattcgccctacaaggctctgtgcaacccgccaaacactgcaatcttccccgaaccctacaattacatgaaccagagggatgattattccttgggacctggtggagatcttcgggtttatctgcagagaattgctgctgcagacaatgttcaaaattttgttcgggataacccatttggtcagaagtccatcacagagagtgatccaaactggaatttctatgtgaaaatagtcgataagatggagaagcaaatagttgatcaagtggaaacgaaaatagttgatgaagtggagaggtccttaggttaataggaacaaaggttcaatcaagagaaagttctgtatttgtttgtgttgattagcaggtgttttgcattgcgccagtgctatcatgtgtaatctaatttagtaattgttgtttcatagacaaaacatgatttgaagaatcttgataggttttgttgttccaaccgagggatgaatcattgtttgtcctgtatcgagtgttacaggctttctggtttgctaacttagctatttctggaagtttggttgactatgctggaggatgattcagttcgatggaactgttatatactcgaattgttgtaaatcatctcagtttcatggtttcttgccttgcct

SEQ ID NO: 65315 - DNA, 2022 bp, Zea Mays
agattactacggcccattaactcaaatttacggcccaaaatggcgaggcaggcgaaacggtgacggagctggtagttccccaaatcccgagccgcgccaccggcagcagggagaaacgccgccgcccgctcgccccgtgcactgctcctccgccttagcccgtagccaccagatccttggcgcaccagccctccatcgcagtcctggttaggctaggggatgtcaaatctcgattccgcgacgccggcggctgcagtggcggagatagggacggcggagcgggactctaccaccgcttctgtttcagctttaaatgggacacatagatgcaagaagaagaagataaagaagaatacgactcgggagcagcaagagttacaacttgatttggattcaacattgacagcagaggcggagggacaagtagaggcaaagggaaacgaggtggaggagcaggatgccactgatgctgttgcttctggtattttgatggaggggacagcaaaatattatgaggaggactccaaggtgaaggtcagtctgatgcccgagaaggaagccaacaccactgttgtttcagatgtggtaggggcatcaggacatgctgatatcaatatggatcccataaatggtgatgatctaagtagtgctcagtcaaaggcaaatgatgctgatgttttactgaagaataaggatggaaacaagggggataagaattgcgctgagaacagcgtcttgttgcaggagagctctgcaagaagaaaaagacggaggggaaaaagaaagtggggttcagccggtggaggaccaggcttctcttctgataatggaggcgtggttgctgagcatagcctgcattcttcagcaaaccatggtcttagctgcatatgtgctccatgtttagttgaggcacatgaaaagaagatccaaaatatctactcaccaagaggatcactggtaaggtttcaaaggaagaaactcctgatcttggaccttaatggtctgctagcagatataaatcaagattaccataatgcacacttggcacatgcaaaggttcgaaccaaattagttttcagaagaccatactgtgacgattttctgagattctgcttccagaattttgagctaggaatatggtcatcaaggaaaagggaaaatgttgaatcggttgttgatatccttatgaggggtcttaagcaatgcctactattttgttgggacatgtcttactgcactgttacagggtgcaaaacaattgacaacaaggacaaaccattagtgctgaaggaactaaaaagggtttggaataaggatgagccagacctcccatgggggcagggagagttttcaccttcaaatacattactggtggatgattcgccctacaaggctctgtgcaacccgccaaacactgcaatcttccccgaaccctacaattacatgaaccagagggatgattattccttgggacctggtggagatcttcgggtttatctgcagagaattgctgctgcagacaatgttcaaaattttgttcgggataacccatttggtcagaagtccatcacagagagtgatccaaactggaatttctatgtgaaaatagtcgataagatggagaagcaaatagttgatcaagtggaaacgaaaatagttgatgaagtggagaggtccttaggttaataggaacaaaggttcaatcaagagaaagttctgtatttgtttgtgttgattagcaggtgttttgcattgcgccagtgctatcatgtgtaatctaatttagtaattgttgtttcatagacaaaacatgatttgaagaatcttgataggttttgttgttccaaccgagggatgaatcattgtttgtcctgtatcgagtgttacaggctttctggtttgctaacttagctatttctggaagtttggttgactatgctggaggatgattcagttcgatggaactgttatatactcgaattgttgtaaatcatctcagtttcatggtttcttgccttgcct

SEQ ID NO: 65316 - DNA, 1932 bp, Zea Mays
gttcatgtggtatcaacttgggatgtgttcacggccacatagttccttagatgagcgtttgcttaacgaccttattctttaaatgggacacatagatgcaagaagaagaagataaagaagaatacgactcgggagcagcaagagttacaacttgatttggattcaacattgacagcagaggcggagggacaagtagaggcaaagggaaacgaggtggaggagcaggatgccactgatgctgttgcttctggtattttgatggaggggacagcaaaatattatgaggaggactccaaggtgaaggtcagtctgatgcccgagaaggaagccaacaccactgttgtttcagtttctgagagtacaccaaaacacaagaagaggaggaaaaagaagaacaagattcaggggcaactagattctgcaaaggcatcatctagtgttgtttccatggatataattgcagctgataaatctgaaaatggttgcacagatgtggtaggggcatcaggacatgctgatatcaatatggatcccataaatggtgatgatctaagtagtgctcagtcaaaggcaaatgatgctgatgttttactgaagaataaggatggaaacaagggggataagaattgcgctgagaacagcgtcttgttgcaggagagctctgcaagaagaaaaagacggaggggaaaaagaaagtggggttcagccggtggaggaccaggcttctcttctgataatggaggcgtggttgctgagcatagcctgcattcttcagcaaaccatggtcttagctgcatatgtgctccatgtttagttgaggcacatgaaaagaagatccaaaatatctactcaccaagaggatcactggtaaggtttcaaaggaagaaactcctgatcttggaccttaatggtctgctagcagatataaatcaagattaccataatgcacacttggcacatgcaaaggttcgaaccaaattagttttcagaagaccatactgtgacgattttctgagattctgcttccagaattttgagctaggaatatggtcatcaaggaaaagggaaaatgttgaatcggttgttgatatccttatgaggggtcttaagcaatgcctactattttgttgggacatgtcttactgcactgttacagggtgcaaaacaattgacaacaaggacaaaccattagtgctgaaggaactaaaaagggtttggaataaggatgagccagacctcccatgggggcagggagagttttcaccttcaaatacattactggtggatgattcgccctacaaggctctgtgcaacccgccaaacactgcaatcttccccgaaccctacaattacatgaaccagagggatgattattccttgggacctggtggagatcttcgggtttatctgcagagaattgctgctgcagacaatgttcaaaattttgttcgggataacccatttggtcagaagtccatcacagagagtgatccaaactggaatttctatgtgaaaatagtcgataagatggagaagcaaatagttgatcaagtggaaacgaaaatagttgatgaagtggagaggtccttaggttaataggaacaaaggttcaatcaagagaaagttctgtatttgtttgtgttgattagcaggtgttttgcattgcgccagtgctatcatgtgtaatctaatttagtaattgttgtttcatagacaaaacatgatttgaagaatcttgataggttttgttgttccaaccgagggatgaatcattgtttgtcctgtatcgagtgttacaggctttctggtttgctaacttagctatttctggaagtttggttgactatgctggaggatgattcagttcgatggaactgttatatactcgaattgttgtaaatcatctcagtttcatggtttcttgccttgcct

SEQ ID NO: 65317 - DNA, 1397 bp, Zea Mays
ctacaatgcttaagataaagctcaaatgatggaggggacagcaaaatattatgaggaggactccaaggtgaaggtcagtctgatgcccgagaaggaagccaacaccactgttgtttcaggagagctctgcaagaagaaaaagacggaggggaaaaagaaagtggggttcagccggtggaggaccaggcttctcttctgataatggaggcgtggttgctgagcatagcctgcattcttcagcaaaccatggtcttagctgcatatgtgctccatgtttagttgaggcacatgaaaagaagatccaaaatatctactcaccaagaggatcactggtaaggtttcaaaggaagaaactcctgatcttggaccttaatggtctgctagcagatataaatcaagattaccataatgcacacttggcacatgcaaaggttcgaaccaaattagttttcagaagaccatactgtgacgattttctgagattctgcttccagaattttgagctaggaatatggtcatcaaggaaaagggaaaatgttgaatcggttgttgatatccttatgaggggtcttaagcaatgcctactattttgttgggacatgtcttactgcactgttacagggtgcaaaacaattgacaacaaggacaaaccattagtgctgaaggaactaaaaagggtttggaataaggatgagccagacctcccatgggggcagggagagttttcaccttcaaatacattactggtggatgattcgccctacaaggctctgtgcaacccgccaaacactgcaatcttccccgaaccctacaattacatgaaccagagggatgattattccttgggacctggtggagatcttcgggtttatctgcagagaattgctgctgcagacaatgttcaaaattttgttcgggataacccatttggtcagaagtccatcacagagagtgatccaaactggaatttctatgtgaaaatagtcgataagatggagaagcaaatagttgatcaagtggaaacgaaaatagttgatgaagtggagaggtccttaggttaataggaacaaaggttcaatcaagagaaagttctgtatttgtttgtgttgattagcaggtgttttgcattgcgccagtgctatcatgtgtaatctaatttagtaattgttgtttcatagacaaaacatgatttgaagaatcttgataggttttgttgttccaaccgagggatgaatcattgtttgtcctgtatcgagtgttacaggctttctggtttgctaacttagctatttctggaagtttggttgactatgctggaggatgattcagttcgatggaactgttatatactcgaattgttgtaaatcatctcagtttcatggtttcttgccttgcct

SEQ ID NO: 65318 - DNA, 1699 bp, Zea Mays
caatgcttaagataaagctcaaatgatggaggggacagcaaaatattatgaggaggactccaaggtgaaggtcagtctgatgcccgagaaggaagccaacaccactgttgtttcagtttctgagagtacaccaaaacacaagaagaggaggaaaaagaagaacaagattcaggggcaactagattctgcaaaggcatcatctagtgttgtttccatggatataattgcagctgataaatctgaaaatggttgcacagatgtggtaggggcatcaggacatgctgatatcaatatggatcccataaatggtgatgatctaagtagtgctcagtcaaaggcaaatgatgctgatgttttactgaagaataaggatggaaacaagggggataagaattgcgctgagaacagcgtcttgttgcaggagagctctgcaagaagaaaaagacggaggggaaaaagaaagtggggttcagccggtggaggaccaggcttctcttctgataatggaggcgtggttgctgagcatagcctgcattcttcagcaaaccatggtcttagctgcatatgtgctccatgtttagttgaggcacatgaaaagaagatccaaaatatctactcaccaagaggatcactggtaaggtttcaaaggaagaaactcctgatcttggaccttaatggtctgctagcagatataaatcaagattaccataatgcacacttggcacatgcaaaggttcgaaccaaattagttttcagaagaccatactgtgacgattttctgagattctgcttccagaattttgagctaggaatatggtcatcaaggaaaagggaaaatgttgaatcggttgttgatatccttatgaggggtcttaagcaatgcctactattttgttgggacatgtcttactgcactgttacagggtgcaaaacaattgacaacaaggacaaaccattagtgctgaaggaactaaaaagggtttggaataaggatgagccagacctcccatgggggcagggagagttttcaccttcaaatacattactggtggatgattcgccctacaaggctctgtgcaacccgccaaacactgcaatcttccccgaaccctacaattacatgaaccagagggatgattattccttgggacctggtggagatcttcgggtttatctgcagagaattgctgctgcagacaatgttcaaaattttgttcgggataacccatttggtcagaagtccatcacagagagtgatccaaactggaatttctatgtgaaaatagtcgataagatggagaagcaaatagttgatcaagtggaaacgaaaatagttgatgaagtggagaggtccttaggttaataggaacaaaggttcaatcaagagaaagttctgtatttgtttgtgttgattagcaggtgttttgcattgcgccagtgctatcatgtgtaatctaatttagtaattgttgtttcatagacaaaacatgatttgaagaatcttgataggttttgttgttccaaccgagggatgaatcattgtttgtcctgtatcgagtgttacaggctttctggtttgctaacttagctatttctggaagtttggttgactatgctggaggatgattcagttcgatggaactgttatatactcgaattgttgtaaatcatctcagtttcatggtttcttgccttgcct

SEQ ID NO: 65319 - DNA, 4091 bp, Zea Mays
tgctagctggaggggctgtagctggacagtgactgagagtgagaggcagcagcggtccggtggctggcctccttgctggatgctcgccgtcagggaggtacgacgagcacgaccgcctctccctcccgggagcgttccctctccggcgaggtccctcctccgggaaatgcggcggggcagttacaaatgacatcttcttcttcttctccttcgtaacctgctgcaaaggagggcaacctcctgcatttccgggttctctttccacgagaagggaagggggaaccggaggatgccggccaagtacctgggggcgttggcggaggacaggcgcccggatctctatcgccaggtgggctgcgtcaccgggatcttgcaggccttcgaccgccgccaccatctcgcctcctcccacaagaggctcctccccccaacaggccatgcacccagcaatccaagcaaagggggagaatgcacgagatattcaccccaggttgttctggagaagaactcgagtaaaacttgggctgatagccaaagagcaccagcaacagaactatctcaaacctcatattcatcatcaccctcttcgtcattctcatcccttgatggcaacaggtcaacacaacaagacctatcatccactgaccgaatgctatttccagagaggccgtttaagagctcgccgaagctcaagagttcttttgacagtgacaatggactcgactaccctgatgatgcgcttaccaagtccaagaacatgcccatagttcaatccagcctgccaactcttggtataagaaatcttgtgaaggattcaatctacaaggatagccatgaattgtcagtcagaattagcactgaagaagaagtaaaagatcacccatccaactgtggagatcaacctatgcaattgaatgggcctcaccatgacagtacacaaggaaaaagcaagggtctcatggacatcaacgaatcgcttcgagtgctagccaagctcagggaagcctcgtggactcctcctgaatctgttcatcatgcaagactctcatatgatgctcctcggttctcatacgatggaaaggaagcaacatcaaaattgagggaggtaccgaggttgtcattggacatcaaggaaggtcacctttggaatcgtgaaattgactctaggttggacccaagcttgagttctgcagacagaaacagcaacactgttactgggtccaatgcagctttcgagacccagcaggaacagcctgcctgcaagcggcttcctagcgttgttgcaaagctcatgggtttggaagagttgccagagcataatcaaagtacagcatcatcacatgcatgcaataccgttcaagagaacaagcaagatgccatgttgaactccttgagcatctcctaccagtacgagcatgctcctcaacaagaaaggaatcctgattcaactgtaagaaatttacccaactctaagttccctgtccaaactgcaccatggaagcaacaagaaaggattgtccttccacgaaaactgccaaagggatcaaaaggagcccacggaagagaacctgctgcaccatggaaccagctgaaggatcttgattttcagcaaccaaacaaagaccttagagcacttaaacagattttggattctgcaaaaggactattagaaaataagaaacgggaggaagcatttatgccaaagctatataatggaaaccatgatgaccaagagatggccagtgcgaacatgagactgaaccgtaacaccaacaacatgtggatgcctgaagagagcaacgctgaaagctctttcaaatcgcctattgtgataatgaaaccttcaaaatctgcaaacctttacagcaaagtggattcttctgtcttcccattaggaggttcatctgatctcccacagccacaaacaagcaatagcactgatagaaggaaagcttcaacgattaatagaaccgccaaagggcaatatgcgaaattgagtccaagggtgcctacttctcaaccccttgtttcttgtgacaggagatcatatggaaggaatgatgatagcagcaacaaccaaaaatctagttcactgctggtcactgagagctcaaccagaagacagcagctgccaaggaatagtagcgtaagtatgcaaaagaacaaaaattccactagcccaaaattactacagagaaaacttgatccagagcggagggctagaccacctattccttctgctgagtctaacaaaagcgaaaggcaatctggagataggaacaattcagaaacagtgtcaccccgaagcaaattcagaaggaaacttgtgcgcccacaaggtgatgatggcatgcccattggattgaacaacaggacaaggagcctgtatcagcatgacaatgatatgtccataaggtcagatggcagtataagtgttgcttcagagctggatattataagcaatgacagatctacaggagttaatatttctaactttgagcaaggcattggaactccatctggaaggaacccacagaaagtggtaaagaatttccttgcaattatgccttctttctaaagcttcactaatttaagatgataatgtatatttccaatacttaactactatggagaaaataataatatgtaatggaaatagtatctgtttttggtcttgtattaatctctctccaaatgctagttgttgttgggccaggaaacgagaatggaaaattaaatcgcatgacatacgatgctgcatgtctcatttttatggtttgtgtcttcagaaaacctcatacgatgcaaatatggacgtgccatctgtagacccttcagctgctatttcggaacggcccagtccagtttctgtgttggactcttcatttgatcaggaggatttgttccctaccagcaggactccaaattcacttgctgttgatgatgagcgcgaaacattagaggaaccctggaaaccatctgtcgctatacagtccaagaacaataaactcgcaaatgttgcgagcttgcttgagaagctccagcagcttagcgtgaacaaggatgaggatgcacctccggttgaccatattgctttcttgtgtgagacagagagcccagaccaccgctacgtgtctgagatactgctggcctccggtcttctgatgaaagacctaggttcaggacagacaggtctccagctccactcctctggctacccgatcaaccctgacttgttccacgtgttggagcaaaggaaggctggatgggtcagtacacctgatggcatccatcagagcagaagcggcacaaaatctgatcccaggagagcgcaccggaagctgatgtttgacactgtgaatgagcttctccttcagaagtttgagaaggaaaccgccgtttatgcgctcagttccttcaccagagcgaaggatccacctgcaaagacttttagcgggcaacagctgccgaagttcatatcttcgggaattgaagaactggatatggagcgatcgtccatcagccagaaggacagcagcgtgatacctgatgcagagatcctgcggaggctgcagggatggacgagcttcagcaaggagctcccggggatggtgctggagatcgaaaggtcgatattcaaggagctggtggacgaggtggtgcatggggagtctgctgacggcccggagatgaaggctgctggcagacggagaaggcggctctttgcttgatacggtttgtttgaccatcgccatccaccatttggatgggcctgatttgtgaagctgtaactttgtttgtcttgccatgagagtgagaccctatttcatctcaagagaagagggagagagagggggtagcgcagatttggtgagagacccgaaaatgggcattcgttcgtgctatatatagatactatgtataccattgtttcttgactccttgtgatttactgtggatgatgctatttcagtaaaaaaaatggacgaatgacagttgttttttgccatgtaaaaggcaaattatatacgatgatgagtagaccactatgttgtatgatgcataatatttatctataaaaaagataacat

SEQ ID NO: 65320 - DNA, 3488 bp, Zea Mays
tgagtccatgcagatgcatgctcccgacttgtgtgttgattgcacccaacctgcaatgaattgcaactgttgataactgccatgcacccagcaatccaagcaaagggggagaatgcacgagatattcaccccaggttgttctggagaagaactcgagtaaaacttgggctgatagccaaagagcaccagcaacagaactatctcaaacctcatattcatcatcaccctcttcgtcattctcatcccttgatggcaacaggtcaacacaacaagacctatcatccactgaccgaatgctatttccagagaggccgtttaagagctcgccgaagctcaagagttcttttgacagtgacaatggactcgactaccctgatgatgcgcttaccaagtccaagaacatgcccatagttcaatccagcctgccaactcttggtataagaaatcttgtgaaggattcaatctacaaggatagccatgaattgtcagtcagaattagcactgaagaagaagtaaaagatcacccatccaactgtggagatcaacctatgcaattgaatgggcctcaccatgacagtacacaaggaaaaagcaagggtctcatggacatcaacgaatcgcttcgagtgctagccaagctcagggaagcctcgtggactcctcctgaatctgttcatcatgcaagactctcatatgatgctcctcggttctcatacgatggaaaggaagcaacatcaaaattgagggaggtaccgaggttgtcattggacatcaaggaaggtcacctttggaatcgtgaaattgactctaggttggacccaagcttgagttctgcagacagaaacagcaacactgttactgggtccaatgcagctttcgagacccagcaggaacagcctgcctgcaagcggcttcctagcgttgttgcaaagctcatgggtttggaagagttgccagagcataatcaaagtacagcatcatcacatgcatgcaataccgttcaagagaacaagcaagatgccatgttgaactccttgagcatctcctaccagtacgagcatgctcctcaacaagaaaggaatcctgattcaactgtaagaaatttacccaactctaagttccctgtccaaactgcaccatggaagcaacaagaaaggattgtccttccacgaaaactgccaaagggatcaaaaggagcccacggaagagaacctgctgcaccatggaaccagctgaaggatcttgattttcagcaaccaaacaaagaccttagagcacttaaacagattttggattctgcaaaaggactattagaaaataagaaacgggaggaagcatttatgccaaagctatataatggaaaccatgatgaccaagagatggccagtgcgaacatgagactgaaccgtaacaccaacaacatgtggatgcctgaagagagcaacgctgaaagctctttcaaatcgcctattgtgataatgaaaccttcaaaatctgcaaacctttacagcaaagtggattcttctgtcttcccattaggaggttcatctgatctcccacagccacaaacaagcaatagcactgatagaaggaaagcttcaacgattaatagaaccgccaaagggcaatatgcgaaattgagtccaagggtgcctacttctcaaccccttgtttcttgtgacaggagatcatatggaaggaatgatgatagcagcaacaaccaaaaatctagttcactgctggtcactgagagctcaaccagaagacagcagctgccaaggaatagtagcgtaagtatgcaaaagaacaaaaattccactagcccaaaattactacagagaaaacttgatccagagcggagggctagaccacctattccttctgctgagtctaacaaaagcgaaaggcaatctggagataggaacaattcagaaacagtgtcaccccgaagcaaattcagaaggaaacttgtgcgcccacaaggtgatgatggcatgcccattggattgaacaacaggacaaggagcctgtatcagcatgacaatgatatgtccataaggtcagatggcagtataagtgttgcttcagagctggatattataagcaatgacagatctacaggagttaatatttctaactttgagcaaggcattggaactccatctggaaggaacccacagaaagtgaaaacctcatacgatgcaaatatggacgtgccatctgtagacccttcagctgctatttcggaacggcccagtccagtttctgtgttggactcttcatttgatcaggaggatttgttccctaccagcaggactccaaattcacttgctgttgatgatgagcgcgaaacattagaggaaccctggaaaccatctgtcgctatacagtccaagaacaataaactcgcaaatgttgcgagcttgcttgagaagctccagcagcttagcgtgaacaaggatgaggatgcacctccggttgaccatattgctttcttgtgtgagacagagagcccagaccaccgctacgtgtctgagatactgctggcctccggtcttctgatgaaagacctaggttcaggacagacaggtctccagctccactcctctggctacccgatcaaccctgacttgttccacgtgttggagcaaaggaaggctggatgggtcagtacacctgatggcatccatcagagcagaagcggcacaaaatctgatcccaggagagcgcaccggaagctgatgtttgacactgtgaatgagcttctccttcagaagtttgagaaggaaaccgccgtttatgcgctcagttccttcaccagagcgaaggatccacctgcaaagacttttagcgggcaacagctgccgaagttcatatcttcgggaattgaagaactggatatggagcgatcgtccatcagccagaaggacagcagcgtgatacctgatgcagagatcctgcggaggctgcagggatggacgagcttcagcaaggagctcccggggatggtgctggagatcgaaaggtcgatattcaaggagctggtggacgaggtggtgcatggggagtctgctgacggcccggagatgaaggctgctggcagacggagaaggcggctctttgcttgatacggtttgtttgaccatcgccatccaccatttggatgggcctgatttgtgaagctgtaactttgtttgtcttgccatgagagtgagaccctatttcatctcaagagaagagggagagagagggggtagcgcagatttggtgagagacccgaaaatgggcattcgttcgtgctatatatagatactatgtataccattgtttcttgactccttgtgatttactgtggatgatgctatttcagtaaaaaaaatggacgaatgacagttgttttttgccatgtaaaaggcaaattatatacgatgatgagtagaccactatgttgtatgatgcataatatttatctataaaaaagataacat

SEQ ID NO: 65321 - DNA, 3454 bp, Zea Mays
atcatatgttcctcgcaagattttccctggcttgcttctgattttgcaatgccatgcacccagcaatccaagcaaagggggagaatgcacgagatattcaccccaggttgttctgaactcgagtaaaacttgggctgatagccaaagagcaccagcaacagaactatctcaaacctcatattcatcatcaccctcttcgtcattctcatcccttgatggcaacaggtcaacacaacaagacctatcatccactgaccgaatgctatttccagagaggccgtttaagagctcgccgaagctcaagagttcttttgacagtgacaatggactcgactaccctgatgatgcgcttaccaagtccaagaacatgcccatagttcaatccagcctgccaactcttggtataagaaatcttgtgaaggattcaatctacaaggatagccatgaattgtcagtcagaattagcactgaagaagaagtaaaagatcacccatccaactgtggagatcaacctatgcaattgaatgggcctcaccatgacagtacacaaggaaaaagcaagggtctcatggacatcaacgaatcgcttcgagtgctagccaagctcagggaagcctcgtggactcctcctgaatctgttcatcatgcaagactctcatatgatgctcctcggttctcatacgatggaaaggaagcaacatcaaaattgagggaggtaccgaggttgtcattggacatcaaggaaggtcacctttggaatcgtgaaattgactctaggttggacccaagcttgagttctgcagacagaaacagcaacactgttactgggtccaatgcagctttcgagacccagcaggaacagcctgcctgcaagcggcttcctagcgttgttgcaaagctcatgggtttggaagagttgccagagcataatcaaagtacagcatcatcacatgcatgcaataccgttcaagagaacaagcaagatgccatgttgaactccttgagcatctcctaccagtacgagcatgctcctcaacaagaaaggaatcctgattcaactgtaagaaatttacccaactctaagttccctgtccaaactgcaccatggaagcaacaagaaaggattgtccttccacgaaaactgccaaagggatcaaaaggagcccacggaagagaacctgctgcaccatggaaccagctgaaggatcttgattttcagcaaccaaacaaagaccttagagcacttaaacagattttggattctgcaaaaggactattagaaaataagaaacgggaggaagcatttatgccaaagctatataatggaaaccatgatgaccaagagatggccagtgcgaacatgagactgaaccgtaacaccaacaacatgtggatgcctgaagagagcaacgctgaaagctctttcaaatcgcctattgtgataatgaaaccttcaaaatctgcaaacctttacagcaaagtggattcttctgtcttcccattaggaggttcatctgatctcccacagccacaaacaagcaatagcactgatagaaggaaagcttcaacgattaatagaaccgccaaagggcaatatgcgaaattgagtccaagggtgcctacttctcaaccccttgtttcttgtgacaggagatcatatggaaggaatgatgatagcagcaacaaccaaaaatctagttcactgctggtcactgagagctcaaccagaagacagcagctgccaaggaatagtagcgtaagtatgcaaaagaacaaaaattccactagcccaaaattactacagagaaaacttgatccagagcggagggctagaccacctattccttctgctgagtctaacaaaagcgaaaggcaatctggagataggaacaattcagaaacagtgtcaccccgaagcaaattcagaaggaaacttgtgcgcccacaaggtgatgatggcatgcccattggattgaacaacaggacaaggagcctgtatcagcatgacaatgatatgtccataaggtcagatggcagtataagtgttgcttcagagctggatattataagcaatgacagatctacaggagttaatatttctaactttgagcaaggcattggaactccatctggaaggaacccacagaaagtgaaaacctcatacgatgcaaatatggacgtgccatctgtagacccttcagctgctatttcggaacggcccagtccagtttctgtgttggactcttcatttgatcaggaggatttgttccctaccagcaggactccaaattcacttgctgttgatgatgagcgcgaaacattagaggaaccctggaaaccatctgtcgctatacagtccaagaacaataaactcgcaaatgttgcgagcttgcttgagaagctccagcagcttagcgtgaacaaggatgaggatgcacctccggttgaccatattgctttcttgtgtgagacagagagcccagaccaccgctacgtgtctgagatactgctggcctccggtcttctgatgaaagacctaggttcaggacagacaggtctccagctccactcctctggctacccgatcaaccctgacttgttccacgtgttggagcaaaggaaggctggatgggtcagtacacctgatggcatccatcagagcagaagcggcacaaaatctgatcccaggagagcgcaccggaagctgatgtttgacactgtgaatgagcttctccttcagaagtttgagaaggaaaccgccgtttatgcgctcagttccttcaccagagcgaaggatccacctgcaaagacttttagcgggcaacagctgccgaagttcatatcttcgggaattgaagaactggatatggagcgatcgtccatcagccagaaggacagcagcgtgatacctgatgcagagatcctgcggaggctgcagggatggacgagcttcagcaaggagctcccggggatggtgctggagatcgaaaggtcgatattcaaggagctggtggacgaggtggtgcatggggagtctgctgacggcccggagatgaaggctgctggcagacggagaaggcggctctttgcttgatacggtttgtttgaccatcgccatccaccatttggatgggcctgatttgtgaagctgtaactttgtttgtcttgccatgagagtgagaccctatttcatctcaagagaagagggagagagagggggtagcgcagatttggtgagagacccgaaaatgggcattcgttcgtgctatatatagatactatgtataccattgtttcttgactccttgtgatttactgtggatgatgctatttcagtaaaaaaaatggacgaatgacagttgttttttgccatgtaaaaggcaaattatatacgatgatgagtagaccactatgttgtatgatgcataatatttatctataaaaaagataacat

SEQ ID NO: 65322 - DNA, 763 bp, Zea Mays
atagggccctgcgcggcgtggtcggctccgcggccggcacttgtccggcaactaccacacctcgccctcttctcgtagcttcggccaccgcaacaaaagagtttgcctgttgccttgcttccacctcccggctgcagctgcacctgctgctcgatcggatcggccgcgcgcggcatgtcgaccaccacccccaccaacgccgcctcccagcagggcgacgacgctgcggctggccgcgcggacaagaagccggcgcaagagacggtgacgaagacggtgcagacggtggaggtgcggtcctcggcagggcagcccgacgaggagggcgtgctcaagcccgtgaaggtggtgcacgagatccccgccaaggacagctccggcgtcaagcaggactaggactagctaagctgcctagctcgatcgatcatctagctaggatcgatgctgctgctgctaagctgagtggatttgatgctgctgcggtcagaaatcttatcgtcatttccaccccccaaccagatcctagctagtaattgcaaataaacaaatgttgcgttggatcctaatgtgaattagtgatctgtgcggcctgccgcttcatttgtaaacatgtactaataagacgcctgattttgtgttcgacacgatttgttgatcaagcgtcctaccgtttctcgagtatcccgttgagaaaataaacagttttttaaatcaaaaccagaacataaatgatcagatctgtagagaaaataaataaatttta

SEQ ID NO: 65323 - DNA, 714 bp, Zea Mays
atagggccctgcgcggcgtggtcggctccgcggccggcacttgtccggcaactaccacacctcgccctcttctcgtagcttcggccaccgcaacaaaagagtttgcctgttgccttgcttccacctcccggctgcagctgcacctgctgctcgatcggatcggccgcgacgacgctgcggctggccgcgcggacaagaagccggcgcaagagacggtgacgaagacggtgcagacggtggaggtgcggtcctcggcagggcagcccgacgaggagggcgtgctcaagcccgtgaaggtggtgcacgagatccccgccaaggacagctccggcgtcaagcaggactaggactagctaagctgcctagctcgatcgatcatctagctaggatcgatgctgctgctgctaagctgagtggatttgatgctgctgcggtcagaaatcttatcgtcatttccaccccccaaccagatcctagctagtaattgcaaataaacaaatgttgcgttggatcctaatgtgaattagtgatctgtgcggcctgccgcttcatttgtaaacatgtactaataagacgcctgattttgtgttcgacacgatttgttgatcaagcgtcctaccgtttctcgagtatcccgttgagaaaataaacagttttttaaatcaaaaccagaacataaatgatcagatctgtagagaaaataaataaatttta

SEQ ID NO: 65324 - DNA, 1314 bp, Zea Mays
gcagatagttgaagtgggccactcccacagccacctccttctctccggtagcagtaacgcagaagaggcaaacgggcagcgagctagatctcgcgtccccgctgcgactgtgaagccaccgtcgtcagatcggacaaggcgccggagcctcagcaatccctgagcagactagaggagtagctaaggcaaagggaggtggcaaagatgctgccgacgaccgcgtccaaggggcgcggggcctcccgctccgccccgccgctcttcggtccctacctccgccgcatcgtcaagtggcaacaaatggatattgaatacacattttggcaaatggttcatctctgtacttcaccaaaagtagtctatcagcacaccaaatatcacaagcaaacaaagaaccagtgggcccgtgatgatcctgcatttgttgttattctgattcttttcctcgtgtttgcaacatcagcttactgtgcagcatatggagagagtgcctcacatgctgctctaacaatcacttcggttgtgtttctccatttcttgtttgctgggatagttttggccacactttgctggctctatgcatttgacgttcattgtaactcgttctttcctgcgtttgtcatcctatatgtggtgcagtattttctgtcgcctctattggtcgcgcatggcttctttccagctttgttatctaatctactcttcgtggtggcaatttcttattatcactacctgaactttctaggatatgatgttcttccatttctggatagaacaacattcttcctgtacccgattggtctcgtcatcatcctgtctccacttatgatactaatagggttcaatccgacaagatattttctaagcttgtacttcggttaaagtctacggctagaatgccatgtacaagcaaaaatatggtgattggcgataactaatggcagatctggatacatactctgtagtaaagcattttagatatcttgtgtgaacgggggcgagtgaagttcagtaaagctcggagcattctatggatgtatcaggtgcctgtggcaaggctaacaatggaagacatatagtcttttgattgttatcaaatatcctttttgggtgtcaatttgttgttcataatatgagctgtttgcgttactttgggcccagtgaccagtgtatacttgtagtagaactgctacgtagagtctattgtactatcacatcggcatcagaattgcatcaagttctaccaccagtcatctctgtcatgtttactgtaagggcattctcgttctcgctaaagctcaatttttcgccggt

SEQ ID NO: 65325 - DNA, 1380 bp, Zea Mays
ctcgattaaacatgacatcaaacaaaagagatatgcttcggcatgatgcaacacccatgacaacttaggtttttgtttacacacgatactgacactagtcgctatactgctttgaatttgggaaggaaggagcgaagcgggaagagaaaaagagagtaacacctgaatttggtgagtattaaagaagaaaaaattctacccccaaattcagggcgttacaatgtggatattttgttgtgaagtctagacaggcctttttatagtttgagccattattagtgatgatctgaacaacatgcttgatcccaatatcagcaaccacctcagatataactccatagatataatcagaattttgaattagaccagttgcatttactgacttgtggaagaacatgcgcccattgcaaaagatcataaagttaataatggacatcatggtaggacctatacaatcaagacatagaaaacaaaagtaaggtcattatcaataccaacataaagtaaggtcaaataacttaacaagtgtttacctgtacatgaatcacacatgactgtaactccataatccttccaatcctctttaaatttagccatgtgagccaccatgtttgcataattcatatccaataatggaccatctatttctctcccacgtggaattggtactccatcaccaagttgttgagctaacttaagggctgaacgaaagtatgggcagtctgccttccttccaggaatgtcattagcatggaacttttttgccaatgctatccctagcttctctttgtgacccctctctagcataacatctatgtgtggctgcacttgtgtcctactgcgtgccaagtcaatgtcaaaaggacctctagaggtatcttgtgtattcttgtagtaccttgacagcctactttgcttccctgtagaacaacttgcagctccacttgcactaccagttgacttatcaaaaggtgaacaactatcatgttccaatgtggaaaaagaatccctcaatgaatttctcattgccatatcaatctgtgcttcttcatcaaaaggaattcttgcactttgataaccatgtcttattgcactaacctccttttcaacaaacaaacgaagcttcttaccacgtgccctcctaattctcccatccgttactttttgagacattaggtccttcacatgatttggcactttacgacatgcctccacactccctagtatgtgacctagattctcttttaatcgagacaccccccgccttttttggtggtaaaacaataaaagcacttaaagccagccccatgaggtccaggatatggttcaccatggttccaagtcacatcaattggtccatttagcttcactggtttccct

SEQ ID NO: 65326 - DNA, 576 bp, Zea Mays
attaccatatcgatcaagcaccacatcagcactactagaagatgtgttggcatcagccatggtctttcctttctatgtgtcagtagtagcacgacgatcagtaggatggttaaccacgtgcactttatcttcgctgtccgaatcccacaacatcgcaggaacagtgctagcgcctccacccatctcgtcgctgtccagcgcttggtgctagccggcagaacatatcaccaaatgaaatgcatcaagctgtacaagaaatgcaatagtattgtacctgtcttttggagagccgccacgtgaagaactggtgcacagcaggccagcaacacatctgcagaactttctcgggcacagctcttccttcacacgagatggtagtgcgggcagcatgggagtcagagggtggaagctcgtgggcgtcggactcttgaagaacagccacgggagaagctagcagcaaatctgacgagcggttgtgctgggctgctggcgggatggagaaaatctacagagctgcagcctgcccgtgaagaaaactagaacaacagagaagccagtgaaaaaatctgaacggcg

SEQ ID NO: 65327 - DNA, 1549 bp, Zea Mays
tctccgcaaccttcacttgccagttcccactcctaactctctcttcgtttactcttcttcccacccccagcgttcgcttccatccaagctcatatcatcatagatcgacggactaggccacgcgccccaatactcagaactagtcttgagtaaagcatggcgtcgtcttctccgtcctgccgtggcagcggcggcaagtcggacgtggaccggatcaagggcccctggagccccgaggaggacgaggccctgcagcgcctggtggcccgccacggcgcccgcaactggtccctcatcagccggtccatcccgggccgctccggcaagtcgtgccgcctccggtggtgcaaccagctgtcgccgcaggtggagcaccggcccttcacggccgaggaggacgacaccatcctccgcgcgcacgccaggttcggcaacaagtgggccaccatcgcgcgcctcctctccggccgcaccgacaacgccatcaagaaccactggaactccacgctaaagcgcaagtactacgccgccagcgacgctgttgttgctgacgctgacgacgagcgcccgctgaagcgcacaagcagcgacggccacccagggctctgcttcagccccggaagcccatccgggtccgacctcagcgactctagcaaccacagccttccctccgtcatgccgtcagccgcttctgctgccgccgtcacctcccaccagcagcagcagcacgtgtaccgccccgtgccgcgcgcgggcggcgtggtcatgctaccggtggcgcctcttgcgccgccgccgccgccacagcctccggcgacctccttatcactgtccctctccctgcccgggctggacggccagaagcccgaagcatcccaagcggttctgacgccggcaccggcaccgcctcaacctcctcttcagatacagcagcagcagcctgctccacctcagatgccgccaccacaagcccaaccgagcttgccgttccagctgcaggcggccgcgacgaacctcacgtcgcagcagccggcagcagcgccgttcagctcggagttcctgttgttgatgcaggagatgatccggatcgaggtacggaactacatgtccgggtcggggctcgatccgcgcaccgacggcgccgccgtgcacgccgtgagcaagcgtatgatgggtatggccaagatcgagtagtttcagcgcgcatgcacacagcggcagcagcaggcgtggaagatacaaaagaaaacgaaccgccgatcgatccgcggcggccagcgcgtgtatgaagtagtaatgaaccagcaagaacggcgtggccttgaaccatacggaggccgtgtggtgcggcaagtgaacagctccaaccatcggctttttagctcatgacaatatcataccctttgttaatctagccgtttctctatcttttattcttcttccccttctttttttttgaatttttgggtctccaagcaagcaagcagagacgaagacgaagagaactttgtctgttgtctgcctgcctgccactttggagagacgacga

SEQ ID NO: 65328 - DNA, 280 bp, Zea Mays
cgaaagagagcgactcttcggaggatgaggtggccccaaggaataccatgggagacgtgcctctagagtaatacaagaacgaatagcaacacaaatgattgttgatggaagatcaagaaacgtgataaggaggggcgcattgaggcctacctcaggaacgcacgtgatgccaagaattgagcaaagcagaagagatgatctggaatctctttgttatgtgctcatgtatttcttaagaggaagggtggctgatcatcagagggtgtccatgacattctaa

SEQ ID NO: 65329 - DNA, 872 bp, Zea Mays
cccacatgctctccatgcttgagctcgccccttgtcagcttcagctcgtgcccagggcctctgctcgccggacgctgtagcacatgctccctgctcggcctccctggcgtgctgctccctcaccttggcgtccctgcgagctccttctccctcgcccgatttccagctcaggccttgccgacgccgcttctctgaccttgccttgacactaaatcgctgcagcacaccatgccgtgtgtgctgcagtgtcatcgttcactatcctcatccttgccaattttcctcgtcgtttctcggctacaacctcgtcagctcctgcgcatcgtgcgcgtcttgtgttcgggtcgagccccaggattttgaggaaaaggaagctccagtgcatcgaccggtgaaatgaataaactagtggtagtcatggtccttgcgaaatccgagatcaggtacgctagctgatcacgtgatacgaaggaccagagctgagtcaaccacaagatgttgttaagcatgggtttcttcgcaaggtgatactgatgaatgaacttgaagattgggtgatcggatcaagcgccaagatgtgagatgctcgccaagtggacgtcatctaacaaacactaacctagtgttattccaggcaagccctggtgcatgcaaccccttccttgtgtttttaaatgatttttacacactttaagtctagtgaaatgtgcattaggtttataggagttgcttggaaaccttttgatgaattggctaccttgaaatccattccttttatagatacttctggtgaagtatcaaatatgatttacaaaattgcttagcactgcctagaggaaaatcttgcagatagagtttgtcctttgcactaa

SEQ ID NO: 65330 - DNA, 589 bp, Zea Mays
cccacatgctctccatgcttgagctcgccccttgtcagcttcagctcgtgcccagggcctctgctcgccggacgctgtagcacatgctccctgctcggcctccctggcgtgctgctccctcaccttggcgtccctgcgagctccttctccctcgcccgatttccagctcaggccttgccgacgccgcttctctgaccttgccttgacactaaatcgctgcagcacaccatgccgtgtgtgctgcagtgtcatcgttcactatcctcatccttgccaattttcctcgtcgtttctcggctacaacctcgtcagctcctgcgcatcgtgcgcgtcttgtgttcgggtcgagccccaggattttgaggaaaaggaagctccagtgcatcgaccggtgaaatgaataaactagtggtagtcatggtccttgcgaaatccgagatcaggtacgctagctgatcacgtgatacgaaggaccagagctgagtcaaccacaagatgttgttaagcatgggtttcttcgcaaggtgatactgatgaatgaacttgaagattgggtgatcggatcaagcgccaagatgtactaaaattt

SEQ ID NO: 65331 - DNA, 3820 bp, Zea Mays
gttcatactccaaataatagtcaatccgagatgaattgaaacaacagttttgacctggaagaaaggttgcaaattatactatactaagcacagcacataagttaggacatgaaaatgttctcatctattaattcaacatctatcaatctgatgtgatcagtttgggtttttgcatgggctatatattgttgtagctttccaatggaaaaacactgacaatttgaagtagacggtttttttttttttgagaaattattccatgtggcaccatataagaaacgctgaaaaagaaaagtaaattttcatctattgtgtcatacaactccaactatatccagatccctaatatggccaggaggttattgtttgtagaaatatctatttgatatttggatcaaaatcaagacaagtttcatatgaaaccataaaggtatgtggctgagttatggtgcaacctaagcgaactatccaaaattagtcatatgttctgtcatactgaagagcaaacttactagaaaattaattctatgttttgctcagtaaactagttacttgcctgtaacacccggcaccggctcaccacgcgatgggcctcgatgtcccatggcccaactcggagcagcctaaaggcaggaccacaacggcaggagagggatggaaatcaaatcagaaatcggaaacagggttcgtccccttcgctcgtcttcctccacggagaggcggcatatcgaaggtggagtcgctggtggggggtcaggcagatctagcagcagcggtggcacaggaagcggcggaggatctgcccgttctgcctcagttcggtcgatctgcgggcaacaccacggcatcaggctttgacgagggacctgtcttcgacgacgagatgcccatcgacttcggttcccaggggaagaccgcgtccatggcggcagcacgcgccgtgggggtccccggatccaccgcgacgccctccgtgcccttcttcgacaacgtcgacatcttccacctcaatagtgaacccgtctacgacgtctacgatgacgacgaggatggcgatccgtcgcagcaggccgtggtgctcgctgcggacaagaagtactaccccaccgctgaagaggacgagcaaccgctggagcagcccatcgtcgcagacgcgcttgcgctgttcgagaagatgcgaggcaaggggtaccacgctgacgtgatgaggctgcgcgatgcagacagggcggtccaggtgctcggggagatgatggaggccggcttcaggccatggaacttgacattgacatacagttttgtggtggctgtgctcgtgaaggcaggaaggatggaggaggcactaaagttgaaggatcagatgttgctggttgctggaaagatggatgtggttctcgcgacaacattgatgcatgggtattgcttgctcggtgaagttgggaaagcgctggatttatttaacgaggctgtcagggatggtgtgacagcaaccaatgtgacatatgcggttctgataaaaggttgtgatgcagaggggatgacagataaggcatatgagctatgtcgtcagatgatagagcagggattgctgtcaagcacgcatgggttcaatttggtgataaaaggtctgttaagagacaagcggtgggaggatgccatcggcttgcttgaggttatggttgatataccttctgctggtactgcggctaagtgggaagagcttgatatcatgacagaatgtgttgttcaatgcaatcttgtcactactgcgtcctctgattttcatcctgaattcatcagtctgtttgtcaaaaattttggtggctctgtggcagtatcaagcaagagagtattgtttctcagttggggctacatggaggagtatgaggttctgattccatttcagttcctccaggttcgtgagagccaagtaaatgatgtttgccaggacatgggtgtgggagataagtgcttggctgccattcatgactttggcgatgttcggggtgtagatgaagcaaaggaggagcttgttgagatagtgagctgtctgcatggttcactgaactccaagaagcttggagcaaaattgcccaggggtgtcctgcttgttggccctccaggaactggaaacactcttctagcaagggcagttgcaggagaggctggaattccatttttctatgtttctgctagtgagtttgttgaagctttcgttggaagaggtgttgcccgtgtcacggaattgttcaaggaagccaaagaagctgctccatccatcatttttattgatgaacatgttgtgggtggaaatagaggtagaagttttaacgatgtgagggaccaaactctaaaccagctaattgccgaaatggatggttttgactcggacatgaaagttattgccatggctgctactaacaggccaaaagcactggatgttgctctttgtcggcctggtcacttctccaaaaaggtgcggtcttggagacttggtacttttactctaggagtaagtggtctgcaacttgggccatacatgaggagacaatgggatcctggtattacaaatgggcaattggtgatgagccgcgaggagctagctttacagatcgcagtgtttcttggggacaagcaacatttcgtcggggcggtaatgtaacacccggcaccggctcaccacgcgatgggcctcgatgtcccatggcccaactcggagcagcctaaaggcaggaccacaacggcaggagaaggatggaaatcaaatcagaaatcggaaacagggttcgtccccttcgctcatctcgtcttcctccacggagaggcggcatatcggtgcatcatcagctcctcacgtcccggctcaccatcggcagccacggggacgtgacattgccctgtaatgtcatataccttttagcaaggtccacatgcatatggttgtagtgtgttgtgtgtctctgtgtgggtgtgttttttctgtaaagcctgttttctctgttatctataaagttgcgcagttctcctgcgctttcaggaaaaaaaaaggtccacatgcatattagctgttcagcaaaaaatgctgccagctgcttaacgcccagccccactttctaagaaataaattatattgatccttctctcccaccggcattcctgaaataaacttggttgttctttgtgtgcaaagtctaaaatacaacaagtgtgcctgacaggctgacactatgctgaagtactttaactttaccgcacagaccacacaattgtacaagctttaaattgtatgatgtattccatctcataactttactaactaaatcttgtgttaattctcaatatttaggctcagacaatccatcagtatagattatttgcttcttatgcagtatgtaaagttgcacggctccataacaactgctaactggaggtgaaagtttgagaagacattaagataacattttaggaagaaaacaggaagatgcagtttaactaagttgaaaggccataggctaaaatctatagtgcctttgaactgcctggatgatctggacacaacatatagaatttatcaaaaggtgaagctaaggtgaaaggatgtttgtggttttgtgcacttgccggcaacaaaacacaaaccggtcaagatcagaatcacacatgcatcatgcattcatgcatgcacctacataccagtgcagctgcaaggttgggaaacactttacacatgcagcctatcttctgaaatactgtaggagtataaagtagtgtaccgtttaagcatggatcaaaaaatggagcaaattggcagaattcaggg

SEQ ID NO: 65332 - DNA, 2352 bp, Zea Mays
atgccccgcccgccctgctctccgtcgcgcccttccagggatcctccatcgccgctcccgccatcatcgcgcccgcgctccatcgatggaaggtgtcgccccgccatcctcgcctcgctccccgcgacacgcggcgccagcttgtgtcgcatcttctatctattcaccagcaaggtacctggcacagaacccagccgaatcctagaacccagccggatcctagaaatttcccattggcatctggtgaccgtatccggtggttgggcgtcagacgcagcggggcggtaccggtgcttggagttggaccacccgtgcaaggcaccgtggtgcgacgggccgctcggcgcgctggagagcaacgggtgggtgtactcggcgcactgctccttcaagctctttgtggccgatgcgtcgtggtggtgccttgacgggaagtggctcttcttctggggcgactctaaccacgtcgacaccatccggaacctcctcaccttcgtcctcggcatcacggacacgtctgctgtgacacgccagtttgatgcagtgttcaccaatcccattggtggggcagggactctaaggatcacaagcatcttcaacggccactggaacatgagcatgaactatctcggcttgcattccctccggaacagaggtttccggcagctcatccggtcctacttcatgtccggtgatcgtgttccagacgtcatggtcctgaactctcgcctgcacgatggctgctactggaccagcgtccgcatctacgcgcaggctgcggatttcgcagcacagttctggtccggagtcatggacaaagtccgggctcgtgggcatgcagtgcccagggtgttctaccggacgcagatgcctcagatgcagggaaaaaccacgcgactcccttcacggaattgagagatgaagctggtgtcacatactcacatccgcagggatgggtcacgttgcagacacttcctaatgaagtccttgtagtgctgcgaaaggtaatcagattttgttagtagacaacacaaggaaggaagcacaaggaagtttaacctgtatagcacaaggaagcaagcagctcagcctccattttatttggaaaagtcttatacttatcagaaaaagaaaagctaaaactctaccctctgcgcccaccttcaagggtcgctccctatcttccttcactctccatcaaagctttgctcgcatcaaattaaatttcttttcgttacgaatttagcttcattatataatattttgctcagtgaattgatcaagtttggtgcacgagtgtcatgctcctaggttttgtactaattgaagaagtagcaaatgtagttcgtggtggtggtttaagtcatgtctgatgaaattgatgcttatatagaggggttctttgtgctttcgaaagaattctgcaggaaaatcgactgcatttgttgttcttgggtacacaatgaaagatgggaaggcatattttcccccacatgacagtatctatacatattgcagttgaaatggaaataattgaaatacaaggtatgtgcaggtgcagtctattatattggagttaagagagcgctagcttgcagtcacactcgatgaagtcctatagggctagattttaaaagtaagatccagtacaaggttacttcaattgcaattagcgattagccaaaactttcatcttcggtctcactaggcctcactaggcctttcatcttcaaaagaatttataaagatattatttttcagtctatctctacatccctctctccatcttgttatgcaattatgagttcattagatgtcattgatctaaattaatttctatccattatgaacttatttttaatgaaccatgctccttcttcgttgctcacaacagggtccatgtacttggcacatgatatacatatacgagatggacttaaaaattaacaaaggtcttcttttggtggtagataattttggttttcttatgattctctttatgaagtgggtgtggtacctctaaacaaatagatgatctgttgacttatggcagtcaggcattacatttttttgcatgaaatcgacatctgagaagtgataattttgttttgatcgcttctctattgcaagatttagatggctactatcctttgcaattgatcaagaatggtgagctattctaaggaagcttctgaacaatatacctgttgtcctggagtgtcacagatggcaaagatttgcgcttagagaaggaggaagaacggtcggtgctagagtcatctccaaagttcttagctgatcagtttccactttcttctctgtagtctggttgcaactgttgatggtgtatat

SEQ ID NO: 65333 - DNA, 2965 bp, Zea Mays
atgccccgcccgccctgctctccgtcgcgcccttccagggatcctccatcgccgctcccgccatcatcgcgcccgcgctccatcgatggaaggtgtcgccccgccatcctcgcctcgctccccgcgacacgcggcgccagcttgtgtcgcatcttctatctattcaccagcaaggtacctggcacagaacccagccgaatcctagaacccagccggatcctagaaatttcccattggcatctggtgaccgtatccggtggttgggcgtcagacgcagcggggcggtaccggtgcttggagttggaccacccgtgcaaggcaccgtggtgcgacgggccgctcggcgcgctggagagcaacgggtgggtgtactcggcgcactgctccttcaagctctttgtggccgatgcgtcgtggtggtgccttgacgggaagtggctcttcttctggggcgactctaaccacgtcgacaccatccggaacctcctcaccttcgtcctcggcatcacggacacgtctgctgtgacacgccagtttgatgcagtgttcaccaatcccattggtggggcagggactctaaggatcacaagcatcttcaacggccactggaacatgagcatgaactatctcggcttgcattccctccggaacagaggtttccggcagctcatccggtcctacttcatgtccggtgatcgtgttccagacgtcatggtcctgaactctcgcctgcacgatggctgctactggaccagcgtccgcatctacgcgcaggctgcggatttcgcagcacagttctggtccggagtcatggacaaagtccgggctcgtgggcatgcagtgcccagggtgttctaccggacgcagatgcctcagggtggtatagatgcagggaaaaaccacgcgactcccttcacggaattgagagatgaagctggtgtcacatactcacatccgcagggatgggtcacgttgcagacacttcctaatgaagtccttgtagtgctgcgaaaggtaatcagattttgttagtagacaacacaaggaaggaagcacaaggaagtttaacctgtatagcacaaggaagcaagcagctcagcctccattttatttggaaaagtcttatacttatcagaaaaagaaaagctaaaactctaccctctgcgcccaccttcaagggtcgctccctatcttccttcactctccatcaaagctttgctcgcatcaaattaaatttcttttcgttacgaatttagcttcattatataatattttgctcagtgaattgatcaagtttggtgcacgagtgtcatgctcctaggttttgtactaattgaagaagtagcaaatgtagttcgtggtggtggtttaagtcatgtctgatgaaattgatgcttatatagaggggttctttgtgctttcgaaagaattctgcaggaaaatcgactgcatttgttgttcttgggtacacaatgaaagatgggaaggcatattttcccccacatgacagtatctatacatattgcagttgaaatggaaataattgaaatacaaggtatgtgcaggtgcagtctattatattggagttaagagagcgctagcttgcagtcacactcgatgaagtcctatagggctagattttaaaagtaagatccagtacaaggttacttcaattgcaattagcgattagccaaaactttcatcttcggtctcactaggcctcactaggcctttcatcttcaaaagaatttataaagatattatttttcagtctatctctacatccctctctccatcttgttatgcaattatgagttcattagatgtcattgatctaaattaatttctatccattatgaacttatttttaatgaaccatgctccttcttcgttgctcacaacagggtccatgtacttggcacatgatatacatatacgagatggacttaaaaattaacaaaggtcttcttttggtggtagataattttggttttcttatgattctctttatgaagtgggtgtggtacctctaaacaaatagatgatctgttgacttatggcagtcaggcattacatttttttgcatgaaatcgacatctgagaagtgataattttgttttgatcgcttctctattgcaagatttagatggctactatcctttgcaattgatcaagaatggtgagctattctaaggaagcttctgaacaatatacctgttgtcctggagtgtcacagatgtaagaaccatgaccaaccatcgcttactatgctttattaatgtacaatacattagtaattctaaaaatatgaggcaaactgaccacaaaagggttgagatgattccatcatacttatacgaagattttcctagcaaggtaaacacattattatctttacatgttggatcgtcaactcgtgcctttgatgcagggcaaagatttgcgcttagagaaggaggaagaacggtcggtgctagagtcatctccaaagttcttagctgatcagtttccactttcttctctgtagtctggttgcaactgttgatgttttaagggtctgttcaatccctctccaagatattgtaggtgtatgaaatcttctaagcaaactgttaaatacattgcacccgatcagaagggatgctctataatgcagcctgggtgtgatctccgtacatcgtgctccagccgcactcagatctagccttggccgggagacaccgcgacagaggctggacgtgctcttcccgtcctcatgccccatgccgctgcgcgctcttcccttcacctctcactacacggcggctgcggggcaggggtgaaagaggcgaggcttctccagcttctcgaggccggagaccgtttgctcaagggtgtcgttcttgacggcctcctccgacagcgtggacgcgtggttctcaaccatggccttggtcacggcaggaagcagagcctggtaataatt

SEQ ID NO: 65334 - DNA, 2675 bp, Zea Mays
atgccccgcccgccctgctctccgtcgcgcccttccagggatcctccatcgccgctcccgccatcatcgcgcccgcgctccatcgatggaaggtgtcgccccgccatcctcgcctcgctccccgcgacacgcggcgccagcttgtgtcgcatcttctatctattcaccagcaaggtacctggcacagaacccagccgaatcctagaacccagccggatcctagaaatttcccattggcatctggtgaccgtatccggtggttgggcgtcagacgcagcggggcggtaccggtgcttggagttggaccacccgtgcaaggcaccgtggtgcgacgggccgctcggcgcgctggagagcaacgggtgggtgtactcggcgcactgctccttcaagctctttgtggccgatgcgtcgtggtggtgccttgacgggaagtggctcttcttctggggcgactctaaccacgtcgacaccatccggaacctcctcaccttcgtcctcggcatcacggacacgtctgctgtgacacgccagtttgatgcagtgttcaccaatcccattggtggggcagggactctaaggatcacaagcatcttcaacggccactggaacatgagcatgaactatctcggcttgcattccctccggaacagaggtttccggcagctcatccggtcctacttcatgtccggtgatcgtgttccagacgtcatggtcctgaactctcgcctgcacgatggctgctactggaccagcgtccgcatctacgcgcaggctgcggatttcgcagcacagttctggtccggagtcatggacaaagtccgggctcgtgggcatgcagtgcccagggtgttctaccggacgcagatgcctcagggtggtatagatgcagggaaaaaccacgcgactcccttcacggaattgagagatgaagctggtgtcacatactcacatccgcagggatgggtcacgttgcagacacttcctaatgaagtccttgtagtgctgcgaaaggtaatcagattttgttagtagacaacacaaggaaggaagcacaaggaagtttaacctgtatagcacaaggaagcaagcagctcagcctccattttatttggaaaagtcttatacttatcagaaatttagatggctactatcctttgcaattgatcaagaatggtgagctattctaaggaagcttctgaacaatatacctgttgtcctggagtgtcacagatggcaaagatttgcgcttagagaaggaggaagaacggtcggtgctagagtcatctccaaagttcttagctgatcagtttccactttcttctctgtagtctggttgcaactgttgatggttagcacattctttatcttcaattattggaagaaacatttttgcgccaattacatgaaagtggttgcagttttaagggtctgttcaatccctctccaagatattgtaggtgtatgaaatcttctaagcaaactgttaaatacattgcacccgatcagaagggatgctctataatgcagcctgggtgtgatctccgtacatcgtgctccagccgcactcagatctagccttggccgggagacaccgcgacagaggctggacgtgctcttcccgtcctcatgccccatgccgctgcgcgctcttcccttcacctctcactacacggcggctgcggggcaggggtgaaagaggcgaggcttctccagcttctcgaggccggagaccgtttgctcaagggtgtcgttcttgacggcctcctccgacagcgtggacgcgtggttctcaaccatggccttggtcacggcaggaagcagagcctggtgccagagaagctcccagtgccccatgtgttggcagcatatcagcatgaaagatcctatgagccaagagctactagaggctgttgaacaagagaggaacatccgatctaatccttcacgtaatactgctgttttccaccatccaatgctgggtgattttgaggtgggcatgtttcttcatgcatgtttggggaactttttaggttaagaaactccatcaagaaaagcagttaggaatgatggtggacaaaggcctggtagcaactaggacagggttgagtcagtaccacctgtctcactggcctagaatgtttgaggtgatcaggatgctggaaggagacatgctcacagagagatgggaggtgtcgcagaacgtggacatgccagagttcgtctcatcggagctcctacttcaaaagtacatggattttgcagcggacgaatgctcgcttggtgtagaagccatggagctctctggactaaggtgaccatctgatcgatcgaatcggccatcacacaggtcgcataggtgtcttgccatatcaagcctatattattgttgtattacattggacacatagggaagggaaaaaatccggtgaattatagggtgtgatctgtctgcctatacttgtggtggcattcatttgtgcaaatgattttgatatattgatgtagagaatatatatgttgtttatttctatgtaatcgttgcacactataattttatcaaacaacttttgtattgttgcaaggggcgacaaaaatccagtggattgtagtgtgtgatttgtctatctataactgtggtggtattcatttgtgcaaatgatttgttgtatatt

SEQ ID NO: 65335 - DNA, 3542 bp, Zea Mays
atgccccgcccgccctgctctccgtcgcgcccttccagggatcctccatcgccgctcccgccatcatcgcgcccgcgctccatcgatggaaggtgtcgccccgccatcctcgcctcgctccccgcgacacgcggcgccagacgcagcggggcggtaccggtgcttggagttggaccacccgtgcaaggcaccgtggtgcgacgggccgctcggcgcgctggagagcaacgggtgggtgtactcggcgcactgctccttcaagctctttgtggccgatgcgtcgtggtggtgccttgacgggaagtggctcttcttctggggcgactctaaccacgtcgacaccatccggaacctcctcaccttcgtcctcggcatcacggacacgtctgctgtgacacgccagtttgatgcagtgttcaccaatcccattggtggggcagggactctaaggatcacaagcatcttcaacggccactggaacatgagcatgaactatctcggcttgcattccctccggaacagaggtttccggcagctcatccggtcctacttcatgtccggtgatcgtgttccagacgtcatggtcctgaactctcgcctgcacgatggctgctactggaccagcgtccgcatctacgcgcaggctgcggatttcgcagcacagttctggtccggagtcatggacaaagtccgggctcgtgggcatgcagtgcccagggtgttctaccggacgcagatgcctcagggtggtatagatgcagggaaaaaccacgcgactcccttcacggaattgagagatgaagctggtgtcacatactcacatccgcagggatgggtcacgttgcagacacttcctaatgaagtccttgtagtgctgcgaaagattttgttagtagacaacacaaggaaggaagcacaaggaagtttaacctgtatagcacaaggaagcaagcagctcagcctccattttatttggaaaagtcttatacttatcagaagtaagtttttgatcctctattttattacagattttgtgattccagatctgttgacctcaaggcagattggaaacaaccttattgttgttttgttgaccaactctagaaagaaaagctaaaactctaccctctgcgcccaccttcaagggtcgctccctatcttccttcactctccatcaaagctttgctcgcatcaaattaaatttcttttcgttacgaatttagcttcattatataatattttgctcagtgaattgatcaagtttggtgcacgagtgtcatgctcctaggttttgtactaattgaagaagtagcaaatgtagttcgtggtggtggtttaagtcatgtctgatgaaattgatgcttatatagaggggttctttgtgctttcgaaagaattctgcaggaaaatcgactgcatttgttgttcttgggtacacaatgaaagatgggaaggcatattttcccccacatgacagtatctatacatattgcagttgaaatggaaataattgaaatacaaggtatgtgcaggtgcagtctattatattggagttaagagagcgctagcttgcagtcacactcgatgaagtcctatagggctagattttaaaagtaagatccagtacaaggttacttcaattgcaattagcgattagccaaaactttcatcttcggtctcactaggcctcactaggcctttcatcttcaaaagaatttataaagatattatttttcagtctatctctacatccctctctccatcttgttatgcaattatgagttcattagatgtcattgatctaaattaatttctatccattatgaacttatttttaatgaaccatgctccttcttcgttgctcacaacagggtccatgtacttggcacatgatatacatatacgagatggacttaaaaattaacaaaggtcttcttttggtggtagataattttggttttcttatgattctctttatgaagtgggtgtggtacctctaaacaaatagatgatctgttgacttatggcagtcaggcattacatttttttgcatgaaatcgacatctgagaagtgataattttgttttgatcgcttctctattgcaagatttagatggctactatcctttgcaattgatcaagaatggtgagctattctaaggaagcttctgaacaatatacctgttgtcctggagtgtcacagatggcaaagatttgcgcttagagaaggaggaagaacggtcggtgctagagtcatctccaaagttcttagctgatcagtttccactttcttctctgtagtctggttgcaactgttgatggttagcacattctttatcttcaattattggaagaaacatttttgcgccaattacatgaaagtggttgcagttttaagggtctgttcaatccctctccaagatattgtaggtgtatgaaatcttctaagcaaactgttaaatacattgcacccgatcagaagggatgctctataatgcagcctgggtgtgatctccgtacatcgtgctccagccgcactcagatctagccttggccgggagacaccgcgacagaggctggacgtgctcttcccgtcctcatgccccatgccgctgcgcgctcttcccttcacctctcactacacggcggctgcggggcaggggtgaaagaggcgaggcttctccagcttctcgaggccggagaccgtttgctcaagggtgtcgttcttgacggcctcctccgacagcgtggacgcgtggttctcaaccatggccttggtcacggcaggaagcagagcctgccaagagctactagaggctgttgaacaagagaggaacatccgatctaatccttcacgtaatactgctgttttccaccatccaatgctgggtgattttgaggttaagaaactccatcaagaaaagcagttaggaatgatggtggacaaaggcctggtagcaactaggacagggttgagtcagtaccacctgtctcactggcctagaatgtttgaggtgatcaggatgctggaaggagacatgctcacagagagatgggaggtgtcgcagaacgtggacatgccagagttcgtctcatcggagctcctacttcaaaagtacatggattttgcagcggacgaatgctcgcttggtgtagaagccatggagctctctggactaaggtgaccatctgatcgatcgaatcggccatcacacaggtcgcataggtgtcttgccatatcaagcctatattattgttgtattacattggacacatagggaagggaaaaaatccggtgaattatagggtgtgatctgtctgcctatacttgtggtggcattcatttgtgcaaatgattttgatatattgatgtagagaatatatatgttgtttatttctatgtaatcgttgcacactataattttatcaaacaacttttgtattgttgcaaggggcgacaaaaatccagtggattgtagtgtgtgatttgtctatctataactgtggtggtattcatttgtgcaaatgatttgttgtatatt

SEQ ID NO: 65336 - DNA, 3179 bp, Zea Mays
atgccccgcccgccctgctctccgtcgcgcccttccagggatcctccatcgccgctcccgccatcatcgcgcccgcgctccatcgatggaaggtgtcgccccgccatcctcgcctcgctccccgcgacacgcggcgccagcttgtgtcgcatcttctatctattcaccagcaaggtacctggcacagaacccagccgaatcctagaacccagccggatcctagaaatttcccattggcatctggtgaccgtatccggtggttgggcgtcagacgcagcggggcggtaccggtgcttggagttggaccacccgtgcaaggcaccgtggtgcgacgggccgctcggcgcgctggagagcaacgggtgggtgtactcggcgcactgctccttcaagctctttgtggccgatgcgtcgtggtggtgccttgacgggaagtggctcttcttctggggcgactctaaccacgtcgacaccatccggaacctcctcaccttcgtcctcggcatcacggacacgtctgctgtgacacgccagtttgatgcagtgttcaccaatcccattggtggggcagggactctaaggatcacaagcatcttcaacggccactggaacatgagcatgaactatctcggcttgcattccctccggaacagaggtttccggcagctcatccggtcctacttcatgtccggtgatcgtgttccagacgtcatggtcctgaactctcgcctgcacgatggctgctactggaccagcgtccgcatctacgcgcaggctgcggatttcgcagcacagttctggtccggagtcatggacaaagtccgggctcgtgggcatgcagtgcccagggtgttctaccggacgcagatgcctcagggtggtatagatgcagggaaaaaccacgcgactcccttcacggaattgagagatgaagctggtgtcacatactcacatccgcagggatgggtcacgttgcagacacttcctaatgaagtccttgtagtgctgcgaaaggtaatcagattttgttagtagacaacacaaggaaggaagcacaaggaagtttaacctgtatagcacaaggaagcaagcagctcagcctccattttatttggaaaagtcttatacttatcagaaaaagaaaagctaaaactctaccctctgcgcccaccttcaagggtcgctccctatcttccttcactctccatcaaagctttgctcgcatcaaattaaatttcttttcgttacgaatttagcttcattatataatattttgctcagtgaattgatcaagtttggtgcacgagtgtcatgctcctaggttttgtactaattgaagaagtagcaaatgtagttcgtggtggtggtttaagtcatgtctgatgaaattgatgcttatatagaggggttctttgtgctttcgaaagaattctgcaggaaaatcgactgcatttgttgttcttgggtacacaatgaaagatgggaaggcatattttcccccacatgacagtatctatacatattgcagttgaaatggaaataattgaaatacaaggtatgtgcaggtgcagtctattatattggagttaagagagcgctagcttgcagtcacactcgatgaagtcctatagggctagattttaaaagtaagatccagtacaaggttacttcaattgcaattagcgattagccaaaactttcatcttcggtctcactaggcctcactaggcctttcatcttcaaaagaatttataaagatattatttttcagtctatctctacatccctctctccatcttgttatgcaattatgagttcattagatgtcattgatctaaattaatttctatccattatgaacttatttttaatgaaccatgctccttcttcgttgctcacaacagggtccatgtacttggcacatgatatacatatacgagatggacttaaaaattaacaaaggtcttcttttggtggtagataattttggttttcttatgattctctttatgaagtgggtgtggtacctctaaacaaatagatgatctgttgacttatggcagtcaggcattacatttttttgcatgaaatcgacatctgagaagtgataattttgttttgatcgcttctctattgcaagatttagatggctactatcctttgcaattgatcaagaatggtgagctattctaaggaagcttctgaacaatatacctgttgtcctggagtgtcacagatggcaaagatttgcgcttagagaaggaggaagaacggtcggtgctagagtcatctccaaagttcttagctgatcagtttccactttcttctctgtagtctggttgcaactgttgatggttagcacattctttatcttcaattattggaagaaacatttttgcgccaattacatgaaagtggttgcagttttaagggtctgttcaatccctctccaagatattgtaggtgtatgaaatcttctaagcaaactgttaaatacattgcacccgatcagaagggatgctctataatgcagcctggtaaacctccctcctgggcccagctgtcctctgctttcagtgtgaaactactgatttgggtgttgctgattttcatcatgattttttcagtttgtctcatcatttatcatccgcactcagatctagccttggccgggagacaccgcgacagaggctggacgtgctcttcccgtcctcatgccccatgccgctgcgcgctcttcccttcacctctcactacacggcggctgcggggcaggggtgaaagaggcgaggcttctccagcttctcgaggccggagaccgtttgctcaagggtgtcgttcttgacggcctcctccgacagcgtggacgcgtggttctcaacctatattattgttgtattacattggacacatagggaagggaaaaaatccggtgaattatagggtgtgatctgtctgcctatacttgtggtggcattcatttgtgcaaatgattttgatatattgatgtagagaatatatatgttgtttatttctatgtaatcgttgcacactataattttatcaaacaacttttgtattgttgcaaggggcgacaaaaatccagtggattgtagtgtgtgatttgtctatctataactgtggtggtattcatttgtgcaaatgatttgttgtatatt

SEQ ID NO: 65337 - DNA, 3450 bp, Zea Mays
atgccccgcccgccctgctctccgtcgcgcccttccagggatcctccatcgccgctcccgccatcatcgcgcccgcgctccatcgatggaaggtgtcgccccgccatcctcgcctcgctccccgcgacacgcggcgccagacgcagcggggcggtaccggtgcttggagttggaccacccgtgcaaggcaccgtggtgcgacgggccgctcggcgcgctggagagcaacgggtgggtgtactcggcgcactgctccttcaagctctttgtggccgatgcgtcgtggtggtgccttgacgggaagtggctcttcttctggggcgactctaaccacgtcgacaccatccggaacctcctcaccttcgtcctcggcatcacggacacgtctgctgtgacacgccagtttgatgcagtgttcaccaatcccattggtggggcagggactctaaggatcacaagcatcttcaacggccactggaacatgagcatgaactatctcggcttgcattccctccggaacagaggtttccggcagctcatccggtcctacttcatgtccggtgatcgtgttccagacgtcatggtcctgaactctcgcctgcacgatggctgctactggaccagcgtccgcatctacgcgcaggctgcggatttcgcagcacagttctggtccggagtcatggacaaagtccgggctcgtgggcatgcagtgcccagggtgttctaccggacgcagatgcctcagggtggtatagatgcagggaaaaaccacgcgactcccttcacggaattgagagatgaagctggtgtcacatactcacatccgcagggatgggtcacgttgcagacacttcctaatgaagtccttgtagtgctgcgaaaggtaatcagattttgttagtagacaacacaaggaaggaagcacaaggaagtttaacctgtatagcacaaggaagcaagcagctcagcctccattttatttggaaaagtcttatacttatcagaagtaagtttttgatcctctattttattacagattttgtgattccagatctgttgacctcaaggcagattggaaacaaccttattgttgttttgttgaccaactctagaaagaaaagctaaaactctaccctctgcgcccaccttcaagggtcgctccctatcttccttcactctccatcaaagctttgctcgcatcaaattaaatttcttttcgttacgaatttagcttcattatataatattttgctcagtgaattgatcaagtttggtgcacgagtgtcatgctcctaggttttgtactaattgaagaagtagcaaatgtagttcgtggtggtggtttaagtcatgtctgatgaaattgatgcttatatagaggggttctttgtgctttcgaaagaattctgcaggaaaatcgactgcatttgttgttcttgggtacacaatgaaagatgggaaggcatattttcccccacatgacagtatctatacatattgcagttgaaatggaaataattgaaatacaaggtatgtgcaggtgcagtctattatattggagttaagagagcgctagcttgcagtcacactcgatgaagtcctatagggctagattttaaaagtaagatccagtacaaggttacttcaattgcaattagcgattagccaaaactttcatcttcggtctcactaggcctcactaggcctttcatcttcaaaagaatttataaagatattatttttcagtctatctctacatccctctctccatcttgttatgcaattatgagttcattagatgtcattgatctaaattaatttctatccattatgaacttatttttaatgaaccatgctccttcttcgttgctcacaacagggtccatgtacttggcacatgatatacatatacgagatggacttaaaaattaacaaaggtcttcttttggtggtagataattttggttttcttatgattctctttatgaagtgggtgtggtacctctaaacaaatagatgatctgttgacttatggcagtcaggcattacatttttttgcatgaaatcgacatctgagaagtgataattttgttttgatcgcttctctattgcaagatttagatggctactatcctttgcaattgatcaagaatggtgagctattctaaggaagcttctgaacaatatacctgttgtcctggagtgtcacagatggcaaagatttgcgcttagagaaggaggaagaacggtcggtgctagagtcatctccaaagttcttagctgatcagtttccactttcttctctgtagtctggttgcaactgttgatgatattgtaggtgtatgaaatcttctaagcaaactgttaaatacattgcacccgatcagaagggatgctctataatgcagcctgggtgtgatctccgtacatcgtgctccagccgcactcagatctagccttggccgggagacaccgcgacagaggctggacgtgctcttcccgtcctcatgccccatgccgctgcgcgctcttcccttcacctctcactacacggcggctgcggggcaggggtgaaagaggcgaggcttctccagcttctcgaggccggagaccgtttgctcaagggtgtcgttcttgacggcctcctccgacagcgtggacgcgtggttctcaaccatggccttggtcacggcaggaagcagagcctgccaagagctactagaggctgttgaacaagagaggaacatccgatctaatccttcacgtaatactgctgttttccaccatccaatgctgggtgattttgaggttaagaaactccatcaagaaaagcagttaggaatgatggtggacaaaggcctggtagcaactaggacagggttgagtcagtaccacctgtctcactggcctagaatgtttgaggtgatcaggatgctggaaggagacatgctcacagagagatgggaggtgtcgcagaacgtggacatgccagagttcgtctcatcggagctcctacttcaaaagtacatggattttgcagcggacgaatgctcgcttggtgtagaagccatggagctctctggactaaggtgaccatctgatcgatcgaatcggccatcacacaggtcgcataggtgtcttgccatatcaagcctatattattgttgtattacattggacacatagggaagggaaaaaatccggtgaattatagggtgtgatctgtctgcctatacttgtggtggcattcatttgtgcaaatgattttgatatattgatgtagagaatatatatgttgtttatttctatgtaatcgttgcacactataattttatcaaacaacttttgtattgttgcaaggggcgacaaaaatccagtggattgtagtgtgtgatttgtctatctataactgtggtggtattcatttgtgcaaatgatttgttgtatatt

SEQ ID NO: 65338 - DNA, 3557 bp, Zea Mays
atgccccgcccgccctgctctccgtcgcgcccttccagggatcctccatcgccgctcccgccatcatcgcgcccgcgctccatcgatggaaggtgtcgccccgccatcctcgcctcgctccccgcgacacgcggcgccagcttgtgtcgcatcttctatctattcaccagcaaggtacctggcacagaacccagccgaatcctagaacccagccggatcctagaaatttcccattggcatctggtgaccgtatccggtggttgggcgtcagacgcagcggggcggtaccggtgcttggagttggaccacccgtgcaaggcaccgtggtgcgacgggccgctcggcgcgctggagagcaacgggtgggtgtactcggcgcactgctccttcaagctctttgtggccgatgcgtcgtggtggtgccttgacgggaagtggctcttcttctggggcgactctaaccacgtcgacaccatccggaacctcctcaccttcgtcctcggcatcacggacacgtctgctgtgacacgccagtttgatgcagtgttcaccaatcccattggtggggcagggactctaaggatcacaagcatcttcaacggccactggaacatgagcatgaactatctcggcttgcattccctccggaacagaggtttccggcagctcatccggtcctacttcatgtccggtgatcgtgttccagacgtcatggtcctgaactctcgcctgcacgatggctgctactggaccagcgtccgcatctacgcgcaggctgcggatttcgcagcacagttctggtccggagtcatggacaaagtccgggctcgtgggcatgcagtgcccagggtgttctaccggacgcagatgcctcagggtggtatagatgcagggaaaaaccacgcgactcccttcacggaattgagagatgaagctggtgtcacatactcacatccgcagggatgggtcacgttgcagacacttcctaatgaagtccttgtagtgctgcgaaaggtaatcagattttgttagtagacaacacaaggaaggaagcacaaggaagtttaacctgtatagcacaaggaagcaagcagctcagcctccattttatttggaaaagtcttatacttatcagaaaaagaaaagctaaaactctaccctctgcgcccaccttcaagggtcgctccctatcttccttcactctccatcaaagctttgctcgcatcaaattaaatttcttttcgttacgaatttagcttcattatataatattttgctcagtgaattgatcaagtttggtgcacgagtgtcatgctcctaggttttgtactaattgaagaagtagcaaatgtagttcgtggtggtggtttaagtcatgtctgatgaaattgatgcttatatagaggggttctttgtgctttcgaaagaattctgcaggaaaatcgactgcatttgttgttcttgggtacacaatgaaagatgggaaggcatattttcccccacatgacagtatctatacatattgcagttgaaatggaaataattgaaatacaaggtatgtgcaggtgcagtctattatattggagttaagagagcgctagcttgcagtcacactcgatgaagtcctatagggctagattttaaaagtaagatccagtacaaggttacttcaattgcaattagcgattagccaaaactttcatcttcggtctcactaggcctcactaggcctttcatcttcaaaagaatttataaagatattatttttcagtctatctctacatccctctctccatcttgttatgcaattatgagttcattagatgtcattgatctaaattaatttctatccattatgaacttatttttaatgaaccatgctccttcttcgttgctcacaacagggtccatgtacttggcacatgatatacatatacgagatggacttaaaaattaacaaaggtcttcttttggtggtagataattttggttttcttatgattctctttatgaagtgggtgtggtacctctaaacaaatagatgatctgttgacttatggcagtcaggcattacatttttttgcatgaaatcgacatctgagaagtgataattttgttttgatcgcttctctattgcaagatttagatggctactatcctttgcaattgatcaagaatggtgagctattctaaggaagcttctgaacaatatacctgttgtcctggagtgtcacagatggcaaagatttgcgcttagagaaggaggaagaacggtcggtgctagagtcatctccaaagttcttagctgatcagtttccactttcttctctgtagtctggttgcaactgttgatgatattgtaggtgtatgaaatcttctaagcaaactgttaaatacattgcacccgatcagaagggatgctctataatgcagcctggtaaacctccctcctgggcccagctgtcctctgctttcagtgtgaaactactgatttgggtgttgctgattttcatcatgattttttcagtttgtctcatcatttatcatccgcactcagatctagccttggccgggagacaccgcgacagaggctggacgtgctcttcccgtcctcatgccccatgccgctgcgcgctcttcccttcacctctcactacacggcggctgcggggcaggggtgaaagaggcgaggcttctccagcttctcgaggccggagaccgtttgctcaagggtgtcgttcttgacggcctcctccgacagcgtggacgcgtggttctcaaccatggccttggtcacggcaggaagcagagcctgccaagagctactagaggctgttgaacaagagaggaacatccgatctaatccttcacgtaatactgctgttttccaccatccaatgctgggtgattttgaggttaagaaactccatcaagaaaagcagttaggaatgatggtggacaaaggcctggtagcaactaggacagggttgagtcagtaccacctgtctcactggcctagaatgtttgaggtgatcaggatgctggaaggagacatgctcacagagagatgggaggtgtcgcagaacgtggacatgccagagttcgtctcatcggagctcctacttcaaaagtacatggattttgcagcggacgaatgctcgcttggtgtagaagccatggagctctctggactaaggtgaccatctgatcgatcgaatcggccatcacacaggtcgcataggtgtcttgccatatcaagcctatattattgttgtattacattggacacatagggaagggaaaaaatccggtgaattatagggtgtgatctgtctgcctatacttgtggtggcattcatttgtgcaaatgattttgatatattgatgtagagaatatatatgttgtttatttctatgtaatcgttgcacactataattttatcaaacaacttttgtattgttgcaaggggcgacaaaaatccagtggattgtagtgtgtgatttgtctatctataactgtggtggtattcatttgtgcaaatgatttgttgtatatt

SEQ ID NO: 65339 - DNA, 3626 bp, Zea Mays
atgccccgcccgccctgctctccgtcgcgcccttccagggatcctccatcgccgctcccgccatcatcgcgcccgcgctccatcgatggaaggtgtcgccccgccatcctcgcctcgctccccgcgacacgcggcgccagcttgtgtcgcatcttctatctattcaccagcaaggtacctggcacagaacccagccgaatcctagaacccagccggatcctagaaatttcccattggcatctggtgaccgtatccggtggttgggcgtcagacgcagcggggcggtaccggtgcttggagttggaccacccgtgcaaggcaccgtggtgcgacgggccgctcggcgcgctggagagcaacgggtgggtgtactcggcgcactgctccttcaagctctttgtggccgatgcgtcgtggtggtgccttgacgggaagtggctcttcttctggggcgactctaaccacgtcgacaccatccggaacctcctcaccttcgtcctcggcatcacggacacgtctgctgtgacacgccagtttgatgcagtgttcaccaatcccattggtggggcagggactctaaggatcacaagcatcttcaacggccactggaacatgagcatgaactatctcggcttgcattccctccggaacagaggtttccggcagctcatccggtcctacttcatgtccggtgatcgtgttccagacgtcatggtcctgaactctcgcctgcacgatggctgctactggaccagcgtccgcatctacgcgcaggctgcggatttcgcagcacagttctggtccggagtcatggacaaagtccgggctcgtgggcatgcagtgcccagggtgttctaccggacgcagatgcctcagatgcagggaaaaaccacgcgactcccttcacggaattgagagatgaagctggtgtcacatactcacatccgcagggatgggtcacgttgcagacacttcctaatgaagtccttgtagtgctgcgaaagattttgttagtagacaacacaaggaaggaagcacaaggaagtttaacctgtatagcacaaggaagcaagcagctcagcctccattttatttggaaaagtcttatacttatcagaagtaagtttttgatcctctattttattacagattttgtgattccagatctgttgacctcaaggcagattggaaacaaccttattgttgttttgttgaccaactctagaaagaaaagctaaaactctaccctctgcgcccaccttcaagggtcgctccctatcttccttcactctccatcaaagctttgctcgcatcaaattaaatttcttttcgttacgaatttagcttcattatataatattttgctcagtgaattgatcaagtttggtgcacgagtgtcatgctcctaggttttgtactaattgaagaagtagcaaatgtagttcgtggtggtggtttaagtcatgtctgatgaaattgatgcttatatagaggggttctttgtgctttcgaaagaattctgcaggaaaatcgactgcatttgttgttcttgggtacacaatgaaagatgggaaggcatattttcccccacatgacagtatctatacatattgcagttgaaatggaaataattgaaatacaaggtatgtgcaggtgcagtctattatattggagttaagagagcgctagcttgcagtcacactcgatgaagtcctatagggctagattttaaaagtaagatccagtacaaggttacttcaattgcaattagcgattagccaaaactttcatcttcggtctcactaggcctcactaggcctttcatcttcaaaagaatttataaagatattatttttcagtctatctctacatccctctctccatcttgttatgcaattatgagttcattagatgtcattgatctaaattaatttctatccattatgaacttatttttaatgaaccatgctccttcttcgttgctcacaacagggtccatgtacttggcacatgatatacatatacgagatggacttaaaaattaacaaaggtcttcttttggtggtagataattttggttttcttatgattctctttatgaagtgggtgtggtacctctaaacaaatagatgatctgttgacttatggcagtcaggcattacatttttttgcatgaaatcgacatctgagaagtgataattttgttttgatcgcttctctattgcaagatttagatggctactatcctttgcaattgatcaagaatggtgagctattctaaggaagcttctgaacaatatacctgttgtcctggagtgtcacagatggcaaagatttgcgcttagagaaggaggaagaacggtcggtgctagagtcatctccaaagttcttagctgatcagtttccactttcttctctgtagtctggttgcaactgttgatgatattgtaggtgtatgaaatcttctaagcaaactgttaaatacattgcacccgatcagaagggatgctctataatgcagcctgggtgtgatctccgtacatcgtgctccagccgcactcagatctagccttggccgggagacaccgcgacagaggctggacgtgctcttcccgtcctcatgccccatgccgctgcgcgctcttcccttcacctctcactacacggcggctgcggggcaggggtgaaagaggcgaggcttctccagcttctcgaggccggagaccgtttgctcaagggtgtcgttcttgacggcctcctccgacagcgtggacgcgtggttctcaaccatggccttggtcacggcaggaagcagagcctggtgccagagaagctcccagtgccccatgtgttggcagcatatcagcatgaaagatcctatgagccaagagctactagaggctgttgaacaagagaggaacatccgatctaatccttcacgtaatactgctgttttccaccatccaatgctgggtgattttgaggttaagaaactccatcaagaaaagcagttaggaatgatggtggacaaaggcctggtagcaactaggacagggttgagtcagtaccacctgtctcactggcctagaatgtttgaggtgatcaggatgctggaaggagacatgctcacagagagatgggaggtgtcgcagaacgtggacatgccagagttcgtctcatcggagctcctacttcaaaagtacatggattttgcagcggacgaatgctcgcttggtgtagaagccatggagctctctggactaaggtgaccatctgatcgatcgaatcggccatcacacaggtcgcataggtgtcttgccatatcaagcctatattattgttgtattacattggacacatagggaagggaaaaaatccggtgaattatagggtgtgatctgtctgcctatacttgtggtggcattcatttgtgcaaatgattttgatatattgatgtagagaatatatatgttgtttatttctatgtaatcgttgcacactataattttatcaaacaacttttgtattgttgcaaggggcgacaaaaatccagtggattgtagtgtgtgatttgtctatctataactgtggtggtattcatttgtgcaaatgatttgttgtatatt

SEQ ID NO: 65340 - DNA, 3622 bp, Zea Mays
atgccccgcccgccctgctctccgtcgcgcccttccagggatcctccatcgccgctcccgccatcatcgcgcccgcgctccatcgatggaaggtgtcgccccgccatcctcgcctcgctccccgcgacacgcggcgccagcttgtgtcgcatcttctatctattcaccagcaaggtacctggcacagaacccagccgaatcctagaacccagccggatcctagaaatttcccattggcatctggtgaccgtatccggtggttgggcgtcagacgcagcggggcggtaccggtgcttggagttggaccacccgtgcaaggcaccgtggtgcgacgggccgctcggcgcgctggagagcaacgggtgggtgtactcggcgcactgctccttcaagctctttgtggccgatgcgtcgtggtggtgccttgacgggaagtggctcttcttctggggcgactctaaccacgtcgacaccatccggaacctcctcaccttcgtcctcggcatcacggacacgtctgctgtgacacgccagtttgatgcagtgttcaccaatcccattggtggggcagggactctaaggatcacaagcatcttcaacggccactggaacatgagcatgaactatctcggcttgcattccctccggaacagaggtttccggcagctcatccggtcctacttcatgtccggtgatcgtgttccagacgtcatggtcctgaactctcgcctgcacgatggctgctactggaccagcgtccgcatctacgcgcaggctgcggatttcgcagcacagttctggtccggagtcatggacaaagtccgggctcgtgggcatgcagtgcccagggtgttctaccggacgcagatgcctcagggtggtatagatgcagggaaaaaccacgcgactcccttcacggaattgagagatgaagctggtgtcacatactcacatccgcagggatgggtcacgttgcagacacttcctaatgaagtccttgtagtgctgcgaaagattttgttagtagacaacacaaggaaggaagcacaaggaagtttaacctgtatagcacaaggaagcaagcagctcagcctccattttatttggaaaagtcttatacttatcagaaaaagaaaagctaaaactctaccctctgcgcccaccttcaagggtcgctccctatcttccttcactctccatcaaagctttgctcgcatcaaattaaatttcttttcgttacgaatttagcttcattatataatattttgctcagtgaattgatcaagtttggtgcacgagtgtcatgctcctaggttttgtactaattgaagaagtagcaaatgtagttcgtggtggtggtttaagtcatgtctgatgaaattgatgcttatatagaggggttctttgtgctttcgaaagaattctgcaggaaaatcgactgcatttgttgttcttgggtacacaatgaaagatgggaaggcatattttcccccacatgacagtatctatacatattgcagttgaaatggaaataattgaaatacaaggtatgtgcaggtgcagtctattatattggagttaagagagcgctagcttgcagtcacactcgatgaagtcctatagggctagattttaaaagtaagatccagtacaaggttacttcaattgcaattagcgattagccaaaactttcatcttcggtctcactaggcctcactaggcctttcatcttcaaaagaatttataaagatattatttttcagtctatctctacatccctctctccatcttgttatgcaattatgagttcattagatgtcattgatctaaattaatttctatccattatgaacttatttttaatgaaccatgctccttcttcgttgctcacaacagggtccatgtacttggcacatgatatacatatacgagatggacttaaaaattaacaaaggtcttcttttggtggtagataattttggttttcttatgattctctttatgaagtgggtgtggtacctctaaacaaatagatgatctgttgacttatggcagtcaggcattacatttttttgcatgaaatcgacatctgagaagtgataattttgttttgatcgcttctctattgcaagatttagatggctactatcctttgcaattgatcaagaatggtgagctattctaaggaagcttctgaacaatatacctgttgtcctggagtgtcacagatggcaaagatttgcgcttagagaaggaggaagaacggtcggtgctagagtcatctccaaagttcttagctgatcagtttccactttcttctctgtagtctggttgcaactgttgatggttagcacattctttatcttcaattattggaagaaacatttttgcgccaattacatgaaagtggttgcagttttaagggtctgttcaatccctctccaagatattgtaggtgtatgaaatcttctaagcaaactgttaaatacattgcacccgatcagaagggatgctctataatgcagcctgtttgtctcatcatttatcatccgcactcagatctagccttggccgggagacaccgcgacagaggctggacgtgctcttcccgtcctcatgccccatgccgctgcgcgctcttcccttcacctctcactacacggcggctgcggggcaggggtgaaagaggcgaggcttctccagcttctcgaggccggagaccgtttgctcaagggtgtcgttcttgacggcctcctccgacagcgtggacgcgtggttctcaaccatggccttggtcacggcaggaagcagagcctggtgccagagaagctcccagtgccccatgtgttggcagcatatcagcatgaaagatcctatgagccaagagctactagaggctgttgaacaagagaggaacatccgatctaatccttcacgtaatactgctgttttccaccatccaatgctgggtgattttgaggttaagaaactccatcaagaaaagcagttaggaatgatggtggacaaaggcctggtagcaactaggacagggttgagtcagtaccacctgtctcactggcctagaatgtttgaggtgatcaggatgctggaaggagacatgctcacagagagatgggaggtgtcgcagaacgtggacatgccagagttcgtctcatcggagctcctacttcaaaagtacatggattttgcagcggacgaatgctcgcttggtgtagaagccatggagctctctggactaaggtgaccatctgatcgatcgaatcggccatcacacaggtcgcataggtgtcttgccatatcaagcctatattattgttgtattacattggacacatagggaagggaaaaaatccggtgaattatagggtgtgatctgtctgcctatacttgtggtggcattcatttgtgcaaatgattttgatatattgatgtagagaatatatatgttgtttatttctatgtaatcgttgcacactataattttatcaaacaacttttgtattgttgcaaggggcgacaaaaatccagtggattgtagtgtgtgatttgtctatctataactgtggtggtattcatttgtgcaaatgatttgttgtatatt

SEQ ID NO: 65341 - DNA, 3230 bp, Zea Mays
atgccccgcccgccctgctctccgtcgcgcccttccagggatcctccatcgccgctcccgccatcatcgcgcccgcgctccatcgatggaaggtgtcgccccgccatcctcgcctcgctccccgcgacacgcggcgccagcttgtgtcgcatcttctatctattcaccagcaaggtacctggcacagaacccagccgaatcctagaacccagccggatcctagaaatttcccattggcatctggtgaccgtatccggtggttgggcgtcagacgcagcggggcggtaccggtgcttggagttggaccacccgtgcaaggcaccgtggtgcgacgggccgctcggcgcgctggagagcaacgggtgggtgtactcggcgcactgctccttcaagctctttgtggccgatgcgtcgtggtggtgccttgacgggaagtggctcttcttctggggcgactctaaccacgtcgacaccatccggaacctcctcaccttcgtcctcggcatcacggacacgtctgctgtgacacgccagtttgatgcagtgttcaccaatcccattggtggggcagggactctaaggatcacaagcatcttcaacggccactggaacatgagcatgaactatctcggcttgcattccctccggaacagaggtttccggcagctcatccggtcctacttcatgtccggtgatcgtgttccagacgtcatggtcctgaactctcgcctgcacgatggctgctactggaccagcgtccgcatctacgcgcaggctgcggatttcgcagcacagttctggtccggagtcatggacaaagtccgggctcgtgggcatgcagtgcccagggtgttctaccggacgcagatgcctcagatgcagggaaaaaccacgcgactcccttcacggaattgagagatgaagctggtgtcacatactcacatccgcagggatgggtcacgttgcagacacttcctaatgaagtccttgtagtgctgcgaaaggtaatcagattttgttagtagacaacacaaggaaggaagcacaaggaagtttaacctgtatagcacaaggaagcaagcagctcagcctccattttatttggaaaagtcttatacttatcagaaaaagaaaagctaaaactctaccctctgcgcccaccttcaagggtcgctccctatcttccttcactctccatcaaagctttgctcgcatcaaattaaatttcttttcgttacgaatttagcttcattatataatattttgctcagtgaattgatcaagtttggtgcacgagtgtcatgctcctaggttttgtactaattgaagaagtagcaaatgtagttcgtggtggtggtttaagtcatgtctgatgaaattgatgcttatatagaggggttctttgtgctttcgaaagaattctgcaggaaaatcgactgcatttgttgttcttgggtacacaatgaaagatgggaaggcatattttcccccacatgacagtatctatacatattgcagttgaaatggaaataattgaaatacaaggtatgtgcaggtgcagtctattatattggagttaagagagcgctagcttgcagtcacactcgatgaagtcctatagggctagattttaaaagtaagatccagtacaaggttacttcaattgcaattagcgattagccaaaactttcatcttcggtctcactaggcctcactaggcctttcatcttcaaaagaatttataaagatattatttttcagtctatctctacatccctctctccatcttgttatgcaattatgagttcattagatgtcattgatctaaattaatttctatccattatgaacttatttttaatgaaccatgctccttcttcgttgctcacaacagggtccatgtacttggcacatgatatacatatacgagatggacttaaaaattaacaaaggtcttcttttggtggtagataattttggttttcttatgattctctttatgaagtgggtgtggtacctctaaacaaatagatgatctgttgacttatggcagtcaggcattacatttttttgcatgaaatcgacatctgagaagtgataattttgttttgatcgcttctctattgcaagatttagatggctactatcctttgcaattgatcaagaatggtgagctattctaaggaagcttctgaacaatatacctgttgtcctggagtgtcacagatggcaaagatttgcgcttagagaaggaggaagaacggtcggtgctagagtcatctccaaagttcttagctgatcagtttccactttcttctctgtagtctggttgcaactgttgatggttagcacattctttatcttcaattattggaagaaacatttttgcgccaattacatgaaagtggttgcagttttaagggtctgttcaatccctctccaagatattgtaggtgtatgaaatcttctaagcaaactgttaaatacattgcacccgatcaggtatataagcaaagactatattctctcattactagacaaaaaaaatgaaaggaagcagttgtaacatatttttgtatgatgcagaagggatgctctataatgcagcctggtaaacctccctcctgggcccagctgtcctctgctttcagtgtgaaactactgatttggggtgtgatctccgtacatcgtgctccagccgcactcagatctagccttggccgggagacaccgcgacagaggctggacgtgctcttcccgtcctcatgccccatgccgctgcgcgctcttcccttcacctctcactacacggcggctgcggggcaggggtgaaagaggcgaggcttctccagcttctcgaggccggagaccgtttgctcaagggtgtcgttcttgacggcctcctccgacagcgtggacgcgtggttctcaacctatattattgttgtattacattggacacatagggaagggaaaaaatccggtgaattatagggtgtgatctgtctgcctatacttgtggtggcattcatttgtgcaaatgattttgatatattgatgtagagaatatatatgttgtttatttctatgtaatcgttgcacactataattttatcaaacaacttttgtattgttgcaaggggcgacaaaaatccagtggattgtagtgtgtgatttgtctatctataactgtggtggtattcatttgtgcaaatgatttgttgtatatt

SEQ ID NO: 65342 - DNA, 3647 bp, Zea Mays
atgccccgcccgccctgctctccgtcgcgcccttccagggatcctccatcgccgctcccgccatcatcgcgcccgcgctccatcgatggaaggtgtcgccccgccatcctcgcctcgctccccgcgacacgcggcgccagcttgtgtcgcatcttctatctattcaccagcaaggtacctggcacagaacccagccgaatcctagaacccagccggatcctagaaatttcccattggcatctggtgaccgtatccggtggttgggcgtcagacgcagcggggcggtaccggtgcttggagttggaccacccgtgcaaggcaccgtggtgcgacgggccgctcggcgcgctggagagcaacgggtgggtgtactcggcgcactgctccttcaagctctttgtggccgatgcgtcgtggtggtgccttgacgggaagtggctcttcttctggggcgactctaaccacgtcgacaccatccggaacctcctcaccttcgtcctcggcatcacggacacgtctgctgtgacacgccagtttgatgcagtgttcaccaatcccattggtggggcagggactctaaggatcacaagcatcttcaacggccactggaacatgagcatgaactatctcggcttgcattccctccggaacagaggtttccggcagctcatccggtcctacttcatgtccggtgatcgtgttccagacgtcatggtcctgaactctcgcctgcacgatggctgctactggaccagcgtccgcatctacgcgcaggctgcggatttcgcagcacagttctggtccggagtcatggacaaagtccgggctcgtgggcatgcagtgcccagggtgttctaccggacgcagatgcctcagatgcagggaaaaaccacgcgactcccttcacggaattgagagatgaagctggtgtcacatactcacatccgcagggatgggtcacgttgcagacacttcctaatgaagtccttgtagtgctgcgaaaggtaatcagattttgttagtagacaacacaaggaaggaagcacaaggaagtttaacctgtatagcacaaggaagcaagcagctcagcctccattttatttggaaaagtcttatacttatcagaaaaagaaaagctaaaactctaccctctgcgcccaccttcaagggtcgctccctatcttccttcactctccatcaaagctttgctcgcatcaaattaaatttcttttcgttacgaatttagcttcattatataatattttgctcagtgaattgatcaagtttggtgcacgagtgtcatgctcctaggttttgtactaattgaagaagtagcaaatgtagttcgtggtggtggtttaagtcatgtctgatgaaattgatgcttatatagaggggttctttgtgctttcgaaagaattctgcaggaaaatcgactgcatttgttgttcttgggtacacaatgaaagatgggaaggcatattttcccccacatgacagtatctatacatattgcagttgaaatggaaataattgaaatacaaggtatgtgcaggtgcagtctattatattggagttaagagagcgctagcttgcagtcacactcgatgaagtcctatagggctagattttaaaagtaagatccagtacaaggttacttcaattgcaattagcgattagccaaaactttcatcttcggtctcactaggcctcactaggcctttcatcttcaaaagaatttataaagatattatttttcagtctatctctacatccctctctccatcttgttatgcaattatgagttcattagatgtcattgatctaaattaatttctatccattatgaacttatttttaatgaaccatgctccttcttcgttgctcacaacagggtccatgtacttggcacatgatatacatatacgagatggacttaaaaattaacaaaggtcttcttttggtggtagataattttggttttcttatgattctctttatgaagtgggtgtggtacctctaaacaaatagatgatctgttgacttatggcagtcaggcattacatttttttgcatgaaatcgacatctgagaagtgataattttgttttgatcgcttctctattgcaagatttagatggctactatcctttgcaattgatcaagaatggtgagctattctaaggaagcttctgaacaatatacctgttgtcctggagtgtcacagatggcaaagatttgcgcttagagaaggaggaagaacggtcggtgctagagtcatctccaaagttcttagctgatcagtttccactttcttctctgtagtctggttgcaactgttgatggttagcacattctttatcttcaattattggaagaaacatttttgcgccaattacatgaaagtggttgcagttttaagggtctgttcaatccctctccaagatattgtaggtgtatgaaatcttctaagcaaactgttaaatacattgcacccgatcagaagggatgctctataatgcagcctggtaaacctccctcctgggcccagctgtcctctgctttcagtgtgaaactactgatttgggtgttgctgattttcatcatgattttttcagtttgtctcatcatttatcatccgcactcagatctagccttggccgggagacaccgcgacagaggctggacgtgctcttcccgtcctcatgccccatgccgctgcgcgctcttcccttcacctctcactacacggcggctgcggggcaggggtgaaagaggcgaggcttctccagcttctcgaggccggagaccgtttgctcaagggtgtcgttcttgacggcctcctccgacagcgtggacgcgtggttctcaaccatggccttggtcacggcaggaagcagagcctgccaagagctactagaggctgttgaacaagagaggaacatccgatctaatccttcacgtaatactgctgttttccaccatccaatgctgggtgattttgaggttaagaaactccatcaagaaaagcagttaggaatgatggtggacaaaggcctggtagcaactaggacagggttgagtcagtaccacctgtctcactggcctagaatgtttgaggtgatcaggatgctggaaggagacatgctcacagagagatgggaggtgtcgcagaacgtggacatgccagagttcgtctcatcggagctcctacttcaaaagtacatggattttgcagcggacgaatgctcgcttggtgtagaagccatggagctctctggactaaggtgaccatctgatcgatcgaatcggccatcacacaggtcgcataggtgtcttgccatatcaagcctatattattgttgtattacattggacacatagggaagggaaaaaatccggtgaattatagggtgtgatctgtctgcctatacttgtggtggcattcatttgtgcaaatgattttgatatattgatgtagagaatatatatgttgtttatttctatgtaatcgttgcacactataattttatcaaacaacttttgtattgttgcaaggggcgacaaaaatccagtggattgtagtgtgtgatttgtctatctataactgtggtggtattcatttgtgcaaatgatttgttgtatatt

SEQ ID NO: 65343 - DNA, 2937 bp, Zea Mays
atgccccgcccgccctgctctccgtcgcgcccttccagggatcctccatcgccgctcccgccatcatcgcgcccgcgctccatcgatggaaggtgtcgccccgccatcctcgcctcgctccccgcgacacgcggcgccagcttgtgtcgcatcttctatctattcaccagcaaggtacctggcacagaacccagccgaatcctagaacccagccggatcctagaaatttcccattggcatctggtgaccgtatccggtggttgggcgtcagacgcagcggggcggtaccggtgcttggagttggaccacccgtgcaaggcaccgtggtgcgacgggccgctcggcgcgctggagagcaacgggtgggtgtactcggcgcactgctccttcaagctctttgtggccgatgcgtcgtggtggtgccttgacgggaagtggctcttcttctggggcgactctaaccacgtcgacaccatccggaacctcctcaccttcgtcctcggcatcacggacacgtctgctgtgacacgccagtttgatgcagtgttcaccaatcccattggtggggcagggactctaaggatcacaagcatcttcaacggccactggaacatgagcatgaactatctcggcttgcattccctccggaacagaggtttccggcagctcatccggtcctacttcatgtccggtgatcgtgttccagacgtcatggtcctgaactctcgcctgcacgatggctgctactggaccagcgtccgcatctacgcgcaggctgcggatttcgcagcacagttctggtccggagtcatggacaaagtccgggctcgtgggcatgcagtgcccagggtgttctaccggacgcagatgcctcagggtggtatagatgcagggaaaaaccacgcgactcccttcacggaattgagagatgaagctggtgtcacatactcacatccgcagggatgggtcacgttgcagacacttcctaatgaagtccttgtagtgctgcgaaaggtaatcagattttgttagtagacaacacaaggaaggaagcacaaggaagtttaacctgtatagcacaaggaagcaagcagctcagcctccattttatttggaaaagtcttatacttatcagaagtgcagtctattatattggagttaagagagcgctagcttgcagtcacactcgatgaagtcctatagggctagattttaaaagtaagatccagtacaaggttacttcaattgcaattagcgattagccaaaactttcatcttcggtctcactaggcctcactaggcctttcatcttcaaaagaatttataaagatattatttttcagtctatctctacatccctctctccatcttgttatgcaattatgagttcattagatgtcattgatctaaattaatttctatccattatgaacttatttttaatgaaccatgctccttcttcgttgctcacaacagggtccatgtacttggcacatgatatacatatacgagatggacttaaaaattaacaaaggtcttcttttggtggtagataattttggttttcttatgattctctttatgaagtgggtgtggtacctctaaacaaatagatgatctgttgacttatggcagtcaggcattacatttttttgcatgaaatcgacatctgagaagtgataattttgttttgatcgcttctctattgcaagatttagatggctactatcctttgcaattgatcaagaatggtgagctattctaaggaagcttctgaacaatatacctgttgtcctggagtgtcacagatggcaaagatttgcgcttagagaaggaggaagaacggtcggtgctagagtcatctccaaagttcttagctgatcagtttccactttcttctctgtagtctggttgcaactgttgatggttagcacattctttatcttcaattattggaagaaacatttttgcgccaattacatgaaagtggttgcagttttaagggtctgttcaatccctctccaagatattgtaggtgtatgaaatcttctaagcaaactgttaaatacattgcacccgatcaggtatataagcaaagactatattctctcattactagacaaaaaaaatgaaaggaagcagttgtaacatatttttgtatgatgcagaagggatgctctataatgcagcctggtaaacctccctcctgggcccagctgtcctctgctttcagtgtgaaactactgatttgggtgttgctgattttcatcatgattttttcagtttgtctcatcatttatcatgtaatttgctaaacctttgggcacaatgttcatcatttatcatgcatatgctattttctattgtattggtttagggtgtgatctccgtacatcgtgctccagccgcactcagatctagccttggccgggagacaccgcgacagaggctggacgtgctcttcccgtcctcatgccccatgccgctgcgcgctcttcccttcacctctcactacacggcggctgcggggcaggggtgaaagaggcgaggcttctccagcttctcgaggccggagaccgtttgctcaagggtgtcgttcttgacggcctcctccgacagcgtggacgcgtggttctcaacctatattattgttgtattacattggacacatagggaagggaaaaaatccggtgaattatagggtgtgatctgtctgcctatacttgtggtggcattcatttgtgcaaatgattttgatatattgatgtagagaatatatatgttgtttatttctatgtaatcgttgcacactataattttatcaaacaacttttgtattgttgcaaggggcgacaaaaatccagtggattgtagtgtgtgatttgtctatctataactgtggtggtattcatttgtgcaaatgatttgttgtatatt

SEQ ID NO: 65344 - DNA, 3274 bp, Zea Mays
atgccccgcccgccctgctctccgtcgcgcccttccagggatcctccatcgccgctcccgccatcatcgcgcccgcgctccatcgatggaaggtgtcgccccgccatcctcgcctcgctccccgcgacacgcggcgccagcttgtgtcgcatcttctatctattcaccagcaaggtacctggcacagaacccagccgaatcctagaacccagccggatcctagaaatttcccattggcatctggtgaccgtatccggtggttgggcgtcagacgcagcggggcggtaccggtgcttggagttggaccacccgtgcaaggcaccgtggtgcgacgggccgctcggcgcgctggagagcaacgggtgggtgtactcggcgcactgctccttcaagctctttgtggccgatgcgtcgtggtggtgccttgacgggaagtggctcttcttctggggcgactctaaccacgtcgacaccatccggaacctcctcaccttcgtcctcggcatcacggacacgtctgctgtgacacgccagtttgatgcagtgttcaccaatcccattggtggggcagggactctaaggatcacaagcatcttcaacggccactggaacatgagcatgaactatctcggcttgcattccctccggaacagaggtttccggcagctcatccggtcctacttcatgtccggtgatcgtgttccagacgtcatggtcctgaactctcgcctgcacgatggctgctactggaccagcgtccgcatctacgcgcaggctgcggatttcgcagcacagttctggtccggagtcatggacaaagtccgggctcgtgggcatgcagtgcccagggtgttctaccggacgcagatgcctcagatgcagggaaaaaccacgcgactcccttcacggaattgagagatgaagctggtgtcacatactcacatccgcagggatgggtcacgttgcagacacttcctaatgaagtccttgtagtgctgcgaaagattttgttagtagacaacacaaggaaggaagcacaaggaagtttaacctgtatagcacaaggaagcaagcagctcagcctccattttatttggaaaagtcttatacttatcagaagtgcagtctattatattggagttaagagagcgctagcttgcagtcacactcgatgaagtcctatagggctagattttaaaagtaagatccagtacaaggttacttcaattgcaattagcgattagccaaaactttcatcttcggtctcactaggcctcactaggcctttcatcttcaaaagaatttataaagatattatttttcagtctatctctacatccctctctccatcttgttatgcaattatgagttcattagatgtcattgatctaaattaatttctatccattatgaacttatttttaatgaaccatgctccttcttcgttgctcacaacagggtccatgtacttggcacatgatatacatatacgagatggacttaaaaattaacaaaggtcttcttttggtggtagataattttggttttcttatgattctctttatgaagtgggtgtggtacctctaaacaaatagatgatctgttgacttatggcagtcaggcattacatttttttgcatgaaatcgacatctgagaagtgataattttgttttgatcgcttctctattgcaagatttagatggctactatcctttgcaattgatcaagaatggtgagctattctaaggaagcttctgaacaatatacctgttgtcctggagtgtcacagatggcaaagatttgcgcttagagaaggaggaagaacggtcggtgctagagtcatctccaaagttcttagctgatcagtttccactttcttctctgtagtctggttgcaactgttgatggttagcacattctttatcttcaattattggaagaaacatttttgcgccaattacatgaaagtggttgcagttttaagggtctgttcaatccctctccaagatattgtaggtgtatgaaatcttctaagcaaactgttaaatacattgcacccgatcagaagggatgctctataatgcagcctgggtgtgatctccgtacatcgtgctccagccgcactcagatctagccttggccgggagacaccgcgacagaggctggacgtgctcttcccgtcctcatgccccatgccgctgcgcgctcttcccttcacctctcactacacggcggctgcggggcaggggtgaaagaggcgaggcttctccagcttctcgaggccggagaccgtttgctcaagggtgtcgttcttgacggcctcctccgacagcgtggacgcgtggttctcaaccatggccttggtcacggcaggaagcagagcctggtgccagagaagctcccagtgccccatgtgttggcagcatatcagcatgaaagatcctatgaggtgaaaattgcaacctctactctgtcttaactcctaagggactgaattgctggttctcacttattcttgcgacactctgcagccaagagctactagaggctgttgaacaagagaggaacatccgatctaatccttcacgtaatactgctgttttccaccatccaatgctgggtgattttgaggttaagaaactccatcaagaaaagcagttaggaatgatggtggacaaaggcctggtagcaactaggacagggttgagtcagtaccacctgtctcactggcctagaatgtttgaggtgatcaggatgctggaaggagacatgctcacagagagatgggaggtgtcgcagaacgtggacatgccagagttcgtctcatcggagctcctacttcaaaagtacatggattttgcagcggacgaatgctcgcttggtgtagaagccatggagctctctggactaaggtgaccatctgatcgatcgaatcggccatcacacaggtcgcataggtgtcttgccatatcaagcctatattattgttgtattacattggacacatagggaagggaaaaaatccggtgaattatagggtgtgatctgtctgcctatacttgtggtggcattcatttgtgcaaatgattttgatatattgatgtagagaatatatatgttgtttatttctatgtaatcgttgcacactataattttatcaaacaacttttgtattgttgcaaggggcgacaaaaatccagtggattgtagtgtgtgatttgtctatctataactgtggtggtattcatttgtgcaaatgatttgttgtatatt

SEQ ID NO: 65345 - DNA, 3332 bp, Zea Mays
atgccccgcccgccctgctctccgtcgcgcccttccagggatcctccatcgccgctcccgccatcatcgcgcccgcgctccatcgatggaaggtgtcgccccgccatcctcgcctcgctccccgcgacacgcggcgccagcttgtgtcgcatcttctatctattcaccagcaaggtacctggcacagaacccagccgaatcctagaacccagccggatcctagaaatttcccattggcatctggtgaccgtatccggtggttgggcgtcagacgcagcggggcggtaccggtgcttggagttggaccacccgtgcaaggcaccgtggtgcgacgggccgctcggcgcgctggagagcaacgggtgggtgtactcggcgcactgctccttcaagctctttgtggccgatgcgtcgtggtggtgccttgacgggaagtggctcttcttctggggcgactctaaccacgtcgacaccatccggaacctcctcaccttcgtcctcggcatcacggacacgtctgctgtgacacgccagtttgatgcagtgttcaccaatcccattggtggggcagggactctaaggatcacaagcatcttcaacggccactggaacatgagcatgaactatctcggcttgcattccctccggaacagaggtttccggcagctcatccggtcctacttcatgtccggtgatcgtgttccagacgtcatggtcctgaactctcgcctgcacgatggctgctactggaccagcgtccgcatctacgcgcaggctgcggatttcgcagcacagttctggtccggagtcatggacaaagtccgggctcgtgggcatgcagtgcccagggtgttctaccggacgcagatgcctcagggtggtatagatgcagggaaaaaccacgcgactcccttcacggaattgagagatgaagctggtgtcacatactcacatccgcagggatgggtcacgttgcagacacttcctaatgaagtccttgtagtgctgcgaaaggtaatcagattttgttagtagacaacacaaggaaggaagcacaaggaagtttaacctgtatagcacaaggaagcaagcagctcagcctccattttatttggaaaagtcttatacttatcagaagtgcagtctattatattggagttaagagagcgctagcttgcagtcacactcgatgaagtcctatagggctagattttaaaagtaagatccagtacaaggttacttcaattgcaattagcgattagccaaaactttcatcttcggtctcactaggcctcactaggcctttcatcttcaaaagaatttataaagatattatttttcagtctatctctacatccctctctccatcttgttatgcaattatgagttcattagatgtcattgatctaaattaatttctatccattatgaacttatttttaatgaaccatgctccttcttcgttgctcacaacagggtccatgtacttggcacatgatatacatatacgagatggacttaaaaattaacaaaggtcttcttttggtggtagataattttggttttcttatgattctctttatgaagtgggtgtggtacctctaaacaaatagatgatctgttgacttatggcagtcaggcattacatttttttgcatgaaatcgacatctgagaagtgataattttgttttgatcgcttctctattgcaagatttagatggctactatcctttgcaattgatcaagaatggtgagctattctaaggaagcttctgaacaatatacctgttgtcctggagtgtcacagatggcaaagatttgcgcttagagaaggaggaagaacggtcggtgctagagtcatctccaaagttcttagctgatcagtttccactttcttctctgtagtctggttgcaactgttgatggttagcacattctttatcttcaattattggaagaaacatttttgcgccaattacatgaaagtggttgcagttttaagggtctgttcaatccctctccaagatattgtaggtgtatgaaatcttctaagcaaactgttaaatacattgcacccgatcagaagggatgctctataatgcagcctggtaaacctccctcctgggcccagctgtcctctgctttcagtgtgaaactactgatttgggtgttgctgattttcatcatgattttttcagtttgtctcatcatttatcatccgcactcagatctagccttggccgggagacaccgcgacagaggctggacgtgctcttcccgtcctcatgccccatgccgctgcgcgctcttcccttcacctctcactacacggcggctgcggggcaggggtgaaagaggcgaggcttctccagcttctcgaggccggagaccgtttgctcaagggtgtcgttcttgacggcctcctccgacagcgtggacgcgtggttctcaaccatggccttggtcacggcaggaagcagagcctggtgccagagaagctcccagtgccccatgtgttggcagcatatcagcatgaaagatcctatgagccaagagctactagaggctgttgaacaagagaggaacatccgatctaatccttcacgtaatactgctgttttccaccatccaatgctgggtgattttgaggtgggcatgtttcttcatgcatgtttggggaactttttaggttaagaaactccatcaagaaaagcagttaggaatgatggtggacaaaggcctggtagcaactaggacagggttgagtcagtaccacctgtctcactggcctagaatgtttgaggtgatcaggatgctggaaggagacatgctcacagagagatgggaggtgtcgcagaacgtggacatgccagagttcgtctcatcggagctcctacttcaaaagtacatggattttgcagcggacgaatgctcgcttggtgtagaagccatggagctctctggactaaggtgaccatctgatcgatcgaatcggccatcacacaggtcgcataggtgtcttgccatatcaagcctatattattgttgtattacattggacacatagggaagggaaaaaatccggtgaattatagggtgtgatctgtctgcctatacttgtggtggcattcatttgtgcaaatgattttgatatattgatgtagagaatatatatgttgtttatttctatgtaatcgttgcacactataattttatcaaacaacttttgtattgttgcaaggggcgacaaaaatccagtggattgtagtgtgtgatttgtctatctataactgtggtggtattcatttgtgcaaatgatttgttgtatatt

SEQ ID NO: 65346 - DNA, 3549 bp, Zea Mays
atgccccgcccgccctgctctccgtcgcgcccttccagggatcctccatcgccgctcccgccatcatcgcgcccgcgctccatcgatggaaggtgtcgccccgccatcctcgcctcgctccccgcgacacgcggcgccagcttgtgtcgcatcttctatctattcaccagcaaggtacctggcacagaacccagccgaatcctagaacccagccggatcctagaaatttcccattggcatctggtgaccgtatccggtggttgggcgtcagacgcagcggggcggtaccggtgcttggagttggaccacccgtgcaaggcaccgtggtgcgacgggccgctcggcgcgctggagagcaacgggtgggtgtactcggcgcactgctccttcaagctctttgtggccgatgcgtcgtggtggtgccttgacgggaagtggctcttcttctggggcgactctaaccacgtcgacaccatccggaacctcctcaccttcgtcctcggcatcacggacacgtctgctgtgacacgccagtttgatgcagtgttcaccaatcccattggtggggcagggactctaaggatcacaagcatcttcaacggccactggaacatgagcatgaactatctcggcttgcattccctccggaacagaggtttccggcagctcatccggtcctacttcatgtccggtgatcgtgttccagacgtcatggtcctgaactctcgcctgcacgatggctgctactggaccagcgtccgcatctacgcgcaggctgcggatttcgcagcacagttctggtccggagtcatggacaaagtccgggctcgtgggcatgcagtgcccagggtgttctaccggacgcagatgcctcagggtggtatagatgcagggaaaaaccacgcgactcccttcacggaattgagagatgaagctggtgtcacatactcacatccgcagggatgggtcacgttgcagacacttcctaatgaagtccttgtagtgctgcgaaagattttgttagtagacaacacaaggaaggaagcacaaggaagtttaacctgtatagcacaaggaagcaagcagctcagcctccattttatttggaaaagtcttatacttatcagaaaaagaaaagctaaaactctaccctctgcgcccaccttcaagggtcgctccctatcttccttcactctccatcaaagctttgctcgcatcaaattaaatttcttttcgttacgaatttagcttcattatataatattttgctcagtgaattgatcaagtttggtgcacgagtgtcatgctcctaggttttgtactaattgaagaagtagcaaatgtagttcgtggtggtggtttaagtcatgtctgatgaaattgatgcttatatagaggggttctttgtgctttcgaaagaattctgcaggaaaatcgactgcatttgttgttcttgggtacacaatgaaagatgggaaggcatattttcccccacatgacagtatctatacatattgcagttgaaatggaaataattgaaatacaaggtatgtgcaggtgcagtctattatattggagttaagagagcgctagcttgcagtcacactcgatgaagtcctatagggctagattttaaaagtaagatccagtacaaggttacttcaattgcaattagcgattagccaaaactttcatcttcggtctcactaggcctcactaggcctttcatcttcaaaagaatttataaagatattatttttcagtctatctctacatccctctctccatcttgttatgcaattatgagttcattagatgtcattgatctaaattaatttctatccattatgaacttatttttaatgaaccatgctccttcttcgttgctcacaacagggtccatgtacttggcacatgatatacatatacgagatggacttaaaaattaacaaaggtcttcttttggtggtagataattttggttttcttatgattctctttatgaagtgggtgtggtacctctaaacaaatagatgatctgttgacttatggcagtcaggcattacatttttttgcatgaaatcgacatctgagaagtgataattttgttttgatcgcttctctattgcaagatttagatggctactatcctttgcaattgatcaagaatggtgagctattctaaggaagcttctgaacaatatacctgttgtcctggagtgtcacagatggcaaagatttgcgcttagagaaggaggaagaacggtcggtgctagagtcatctccaaagttcttagctgatcagtttccactttcttctctgtagtctggttgcaactgttgatgatattgtaggtgtatgaaatcttctaagcaaactgttaaatacattgcacccgatcagaagggatgctctataatgcagcctggtaaacctccctcctgggcccagctgtcctctgctttcagtgtgaaactactgatttgggtgttgctgattttcatcatgattttttcagtttgtctcatcatttatcatccgcactcagatctagccttggccgggagacaccgcgacagaggctggacgtgctcttcccgtcctcatgccccatgccgctgcgcgctcttcccttcacctctcactacacggcggctgcggggcaggggtgaaagaggcgaggcttctccagcttctcgaggccggagaccgtttgctcaagggtgtcgttcttgacggcctcctccgacagcgtggacgcgtggttctcaaccatggccttggtcacggcaggaagcagagcctgccaagagctactagaggctgttgaacaagagaggaacatccgatctaatccttcacgtaatactgctgttttccaccatccaatgctgggtgattttgaggttaagaaactccatcaagaaaagcagttaggaatgatggtggacaaaggcctggtagcaactaggacagggttgagtcagtaccacctgtctcactggcctagaatgtttgaggtgatcaggatgctggaaggagacatgctcacagagagatgggaggtgtcgcagaacgtggacatgccagagttcgtctcatcggagctcctacttcaaaagtacatggattttgcagcggacgaatgctcgcttggtgtagaagccatggagctctctggactaaggtgaccatctgatcgatcgaatcggccatcacacaggtcgcataggtgtcttgccatatcaagcctatattattgttgtattacattggacacatagggaagggaaaaaatccggtgaattatagggtgtgatctgtctgcctatacttgtggtggcattcatttgtgcaaatgattttgatatattgatgtagagaatatatatgttgtttatttctatgtaatcgttgcacactataattttatcaaacaacttttgtattgttgcaaggggcgacaaaaatccagtggattgtagtgtgtgatttgtctatctataactgtggtggtattcatttgtgcaaatgatttgttgtatatt

SEQ ID NO: 65347 - DNA, 3179 bp, Zea Mays
atgccccgcccgccctgctctccgtcgcgcccttccagggatcctccatcgccgctcccgccatcatcgcgcccgcgctccatcgatggaaggtgtcgccccgccatcctcgcctcgctccccgcgacacgcggcgccagcttgtgtcgcatcttctatctattcaccagcaaggtacctggcacagaacccagccgaatcctagaacccagccggatcctagaaatttcccattggcatctggtgaccgtatccggtggttgggcgtcagacgcagcggggcggtaccggtgcttggagttggaccacccgtgcaaggcaccgtggtgcgacgggccgctcggcgcgctggagagcaacgggtgggtgtactcggcgcactgctccttcaagctctttgtggccgatgcgtcgtggtggtgccttgacgggaagtggctcttcttctggggcgactctaaccacgtcgacaccatccggaacctcctcaccttcgtcctcggcatcacggacacgtctgctgtgacacgccagtttgatgcagtgttcaccaatcccattggtggggcagggactctaaggatcacaagcatcttcaacggccactggaacatgagcatgaactatctcggcttgcattccctccggaacagaggtttccggcagctcatccggtcctacttcatgtccggtgatcgtgttccagacgtcatggtcctgaactctcgcctgcacgatggctgctactggaccagcgtccgcatctacgcgcaggctgcggatttcgcagcacagttctggtccggagtcatggacaaagtccgggctcgtgggcatgcagtgcccagggtgttctaccggacgcagatgcctcagggtggtatagatgcagggaaaaaccacgcgactcccttcacggaattgagagatgaagctggtgtcacatactcacatccgcagggatgggtcacgttgcagacacttcctaatgaagtccttgtagtgctgcgaaagattttgttagtagacaacacaaggaaggaagcacaaggaagtttaacctgtatagcacaaggaagcaagcagctcagcctccattttatttggaaaagtcttatacttatcagaagtaagtttttgatcctctattttattacagattttgtgattccagatctgttgacctcaaggcagattggaaacaaccttattgttgttttgttgaccaactctagaaagaaaagctaaaactctaccctctgcgcccaccttcaagggtcgctccctatcttccttcactctccatcaaagctttgctcgcatcaaattaaatttcttttcgttacgaatttagcttcattatataatattttgctcagtgaattgatcaagtttggtgcacgagtgtcatgctcctaggttttgtactaattgaagaagtagcaaatgtagttcgtggtggtggtttaagtcatgtctgatgaaattgatgcttatatagaggggttctttgtgctttcgaaagaattctgcaggaaaatcgactgcatttgttgttcttgggtacacaatgaaagatgggaaggcatattttcccccacatgacagtatctatacatattgcagttgaaatggaaataattgaaatacaaggtatgtgcaggtgcagtctattatattggagttaagagagcgctagcttgcagtcacactcgatgaagtcctatagggctagattttaaaaatttagatggctactatcctttgcaattgatcaagaatggtgagctattctaaggaagcttctgaacaatatacctgttgtcctggagtgtcacagatggcaaagatttgcgcttagagaaggaggaagaacggtcggtgctagagtcatctccaaagttcttagctgatcagtttccactttcttctctgtagtctggttgcaactgttgatggttagcacattctttatcttcaattattggaagaaacatttttgcgccaattacatgaaagtggttgcagttttaagggtctgttcaatccctctccaagatattgtaggtgtatgaaatcttctaagcaaactgttaaatacattgcacccgatcagaagggatgctctataatgcagcctgggtgtgatctccgtacatcgtgctccagccgcactcagatctagccttggccgggagacaccgcgacagaggctggacgtgctcttcccgtcctcatgccccatgccgctgcgcgctcttcccttcacctctcactacacggcggctgcggggcaggggtgaaagaggcgaggcttctccagcttctcgaggccggagaccgtttgctcaagggtgtcgttcttgacggcctcctccgacagcgtggacgcgtggttctcaaccatggccttggtcacggcaggaagcagagcctgccaagagctactagaggctgttgaacaagagaggaacatccgatctaatccttcacgtaatactgctgttttccaccatccaatgctgggtgattttgaggttaagaaactccatcaagaaaagcagttaggaatgatggtggacaaaggcctggtagcaactaggacagggttgagtcagtaccacctgtctcactggcctagaatgtttgaggtgatcaggatgctggaaggagacatgctcacagagagatgggaggtgtcgcagaacgtggacatgccagagttcgtctcatcggagctcctacttcaaaagtacatggattttgcagcggacgaatgctcgcttggtgtagaagccatggagctctctggactaaggtgaccatctgatcgatcgaatcggccatcacacaggtcgcataggtgtcttgccatatcaagcctatattattgttgtattacattggacacatagggaagggaaaaaatccggtgaattatagggtgtgatctgtctgcctatacttgtggtggcattcatttgtgcaaatgattttgatatattgatgtagagaatatatatgttgtttatttctatgtaatcgttgcacactataattttatcaaacaacttttgtattgttgcaaggggcgacaaaaatccagtggattgtagtgtgtgatttgtctatctataactgtggtggtattcatttgtgcaaatgatttgttgtatatt

SEQ ID NO: 65348 - DNA, 2839 bp, Zea Mays
atgccccgcccgccctgctctccgtcgcgcccttccagggatcctccatcgccgctcccgccatcatcgcgcccgcgctccatcgatggaaggtgtcgccccgccatcctcgcctcgctccccgcgacacgcggcgccagcttgtgtcgcatcttctatctattcaccagcaaggtacctggcacagaacccagccgaatcctagaacccagccggatcctagaaatttcccattggcatctggtgaccgtatccggtggttgggcgtcagacgcagcggggcggtaccggtgcttggagttggaccacccgtgcaaggcaccgtggtgcgacgggccgctcggcgcgctggagagcaacgggtgggtgtactcggcgcactgctccttcaagctctttgtggccgatgcgtcgtggtggtgccttgacgggaagtggctcttcttctggggcgactctaaccacgtcgacaccatccggaacctcctcaccttcgtcctcggcatcacggacacgtctgctgtgacacgccagtttgatgcagtgttcaccaatcccattggtggggcagggactctaaggatcacaagcatcttcaacggccactggaacatgagcatgaactatctcggcttgcattccctccggaacagaggtttccggcagctcatccggtcctacttcatgtccggtgatcgtgttccagacgtcatggtcctgaactctcgcctgcacgatggctgctactggaccagcgtccgcatctacgcgcaggctgcggatttcgcagcacagttctggtccggagtcatggacaaagtccgggctcgtgggcatgcagtgcccagggtgttctaccggacgcagatgcctcagggtggtatagatgcagggaaaaaccacgcgactcccttcacggaattgagagatgaagctggtgtcacatactcacatccgcagggatgggtcacgttgcagacacttcctaatgaagtccttgtagtgctgcgaaaggtaatcagattttgttagtagacaacacaaggaaggaagcacaaggaagtttaacctgtatagcacaaggaagcaagcagctcagcctccattttatttggaaaagtcttatacttatcagaaatttagatggctactatcctttgcaattgatcaagaatggtgagctattctaaggaagcttctgaacaatatacctgttgtcctggagtgtcacagatggcaaagatttgcgcttagagaaggaggaagaacggtcggtgctagagtcatctccaaagttcttagctgatcagtttccactttcttctctgtagtctggttgcaactgttgatggttagcacattctttatcttcaattattggaagaaacatttttgcgccaattacatgaaagtggttgcagttttaagggtctgttcaatccctctccaagatattgtaggtgtatgaaatcttctaagcaaactgttaaatacattgcacccgatcagaagggatgctctataatgcagcctggtaaacctccctcctgggcccagctgtcctctgctttcagtgtgaaactactgatttgggtgttgctgattttcatcatgattttttcagtttgtctcatcatttatcatccgcactcagatctagccttggccgggagacaccgcgacagaggctggacgtgctcttcccgtcctcatgccccatgccgctgcgcgctcttcccttcacctctcactacacggcggctgcggggcaggggtgaaagaggcgaggcttctccagcttctcgaggccggagaccgtttgctcaagggtgtcgttcttgacggcctcctccgacagcgtggacgcgtggttctcaaccatggccttggtcacggcaggaagcagagcctggtgccagagaagctcccagtgccccatgtgttggcagcatatcagcatgaaagatcctatgaggtgaaaattgcaacctctactctgtcttaactcctaagggactgaattgctggttctcacttattcttgcgacactctgcagccaagagctactagaggctgttgaacaagagaggaacatccgatctaatccttcacgtaatactgctgttttccaccatccaatgctgggtgattttgaggtgggcatgtttcttcatgcatgtttggggaactttttaggttaagaaactccatcaagaaaagcagttaggaatgatggtggacaaaggcctggtagcaactaggacagggttgagtcagtaccacctgtctcactggcctagaatgtttgaggtgatcaggatgctggaaggagacatgctcacagagagatgggaggtgtcgcagaacgtggacatgccagagttcgtctcatcggagctcctacttcaaaagtacatggattttgcagcggacgaatgctcgcttggtgtagaagccatggagctctctggactaaggtgaccatctgatcgatcgaatcggccatcacacaggtcgcataggtgtcttgccatatcaagcctatattattgttgtattacattggacacatagggaagggaaaaaatccggtgaattatagggtgtgatctgtctgcctatacttgtggtggcattcatttgtgcaaatgattttgatatattgatgtagagaatatatatgttgtttatttctatgtaatcgttgcacactataattttatcaaacaacttttgtattgttgcaaggggcgacaaaaatccagtggattgtagtgtgtgatttgtctatctataactgtggtggtattcatttgtgcaaatgatttgttgtatatt

SEQ ID NO: 65349 - DNA, 3674 bp, Zea Mays
atgccccgcccgccctgctctccgtcgcgcccttccagggatcctccatcgccgctcccgccatcatcgcgcccgcgctccatcgatggaaggtgtcgccccgccatcctcgcctcgctccccgcgacacgcggcgccagcttgtgtcgcatcttctatctattcaccagcaaggtacctggcacagaacccagccgaatcctagaacccagccggatcctagaaatttcccattggcatctggtgaccgtatccggtggttgggcgtcagacgcagcggggcggtaccggtgcttggagttggaccacccgtgcaaggcaccgtggtgcgacgggccgctcggcgcgctggagagcaacgggtgggtgtactcggcgcactgctccttcaagctctttgtggccgatgcgtcgtggtggtgccttgacgggaagtggctcttcttctggggcgactctaaccacgtcgacaccatccggaacctcctcaccttcgtcctcggcatcacggacacgtctgctgtgacacgccagtttgatgcagtgttcaccaatcccattggtggggcagggactctaaggatcacaagcatcttcaacggccactggaacatgagcatgaactatctcggcttgcattccctccggaacagaggtttccggcagctcatccggtcctacttcatgtccggtgatcgtgttccagacgtcatggtcctgaactctcgcctgcacgatggctgctactggaccagcgtccgcatctacgcgcaggctgcggatttcgcagcacagttctggtccggagtcatggacaaagtccgggctcgtgggcatgcagtgcccagggtgttctaccggacgcagatgcctcagggtggtatagatgcagggaaaaaccacgcgactcccttcacggaattgagagatgaagctggtgtcacatactcacatccgcagggatgggtcacgttgcagacacttcctaatgaagtccttgtagtgctgcgaaaggtaatcagattttgttagtagacaacacaaggaaggaagcacaaggaagtttaacctgtatagcacaaggaagcaagcagctcagcctccattttatttggaaaagtcttatacttatcagaagtaagtttttgatcctctattttattacagattttgtgattccagatctgttgacctcaaggcagattggaaacaaccttattgttgttttgttgaccaactctagaaagaaaagctaaaactctaccctctgcgcccaccttcaagggtcgctccctatcttccttcactctccatcaaagctttgctcgcatcaaattaaatttcttttcgttacgaatttagcttcattatataatattttgctcagtgaattgatcaagtttggtgcacgagtgtcatgctcctaggttttgtactaattgaagaagtagcaaatgtagttcgtggtggtggtttaagtcatgtctgatgaaattgatgcttatatagaggggttctttgtgctttcgaaagaattctgcaggaaaatcgactgcatttgttgttcttgggtacacaatgaaagatgggaaggcatattttcccccacatgacagtatctatacatattgcagttgaaatggaaataattgaaatacaaggtatgtgcaggtgcagtctattatattggagttaagagagcgctagcttgcagtcacactcgatgaagtcctatagggctagattttaaaagtaagatccagtacaaggttacttcaattgcaattagcgattagccaaaactttcatcttcggtctcactaggcctcactaggcctttcatcttcaaaagaatttataaagatattatttttcagtctatctctacatccctctctccatcttgttatgcaattatgagttcattagatgtcattgatctaaattaatttctatccattatgaacttatttttaatgaaccatgctccttcttcgttgctcacaacagggtccatgtacttggcacatgatatacatatacgagatggacttaaaaattaacaaaggtcttcttttggtggtagataattttggttttcttatgattctctttatgaagtgggtgtggtacctctaaacaaatagatgatctgttgacttatggcagtcaggcattacatttttttgcatgaaatcgacatctgagaagtgataattttgttttgatcgcttctctattgcaagatttagatggctactatcctttgcaattgatcaagaatggtgagctattctaaggaagcttctgaacaatatacctgttgtcctggagtgtcacagatggcaaagatttgcgcttagagaaggaggaagaacggtcggtgctagagtcatctccaaagttcttagctgatcagtttccactttcttctctgtagtctggttgcaactgttgatgttttaagggtctgttcaatccctctccaagatattgtaggtgtatgaaatcttctaagcaaactgttaaatacattgcacccgatcagaagggatgctctataatgcagcctgggtgtgatctccgtacatcgtgctccagccgcactcagatctagccttggccgggagacaccgcgacagaggctggacgtgctcttcccgtcctcatgccccatgccgctgcgcgctcttcccttcacctctcactacacggcggctgcggggcaggggtgaaagaggcgaggcttctccagcttctcgaggccggagaccgtttgctcaagggtgtcgttcttgacggcctcctccgacagcgtggacgcgtggttctcaaccatggccttggtcacggcaggaagcagagcctggtgccagagaagctcccagtgccccatgtgttggcagcatatcagcatgaaagatcctatgagccaagagctactagaggctgttgaacaagagaggaacatccgatctaatccttcacgtaatactgctgttttccaccatccaatgctgggtgattttgaggttaagaaactccatcaagaaaagcagttaggaatgatggtggacaaaggcctggtagcaactaggacagggttgagtcagtaccacctgtctcactggcctagaatgtttgaggtgatcaggatgctggaaggagacatgctcacagagagatgggaggtgtcgcagaacgtggacatgccagagttcgtctcatcggagctcctacttcaaaagtacatggattttgcagcggacgaatgctcgcttggtgtagaagccatggagctctctggactaaggtgaccatctgatcgatcgaatcggccatcacacaggtcgcataggtgtcttgccatatcaagcctatattattgttgtattacattggacacatagggaagggaaaaaatccggtgaattatagggtgtgatctgtctgcctatacttgtggtggcattcatttgtgcaaatgattttgatatattgatgtagagaatatatatgttgtttatttctatgtaatcgttgcacactataattttatcaaacaacttttgtattgttgcaaggggcgacaaaaatccagtggattgtagtgtgtgatttgtctatctataactgtggtggtattcatttgtgcaaatgatttgttgtatatt

SEQ ID NO: 65350 - DNA, 3530 bp, Zea Mays
atgccccgcccgccctgctctccgtcgcgcccttccagggatcctccatcgccgctcccgccatcatcgcgcccgcgctccatcgatggaaggtgtcgccccgccatcctcgcctcgctccccgcgacacgcggcgccagcttgtgtcgcatcttctatctattcaccagcaaggtacctggcacagaacccagccgaatcctagaacccagccggatcctagaaatttcccattggcatctggtgaccgtatccggtggttgggcgtcagacgcagcggggcggtaccggtgcttggagttggaccacccgtgcaaggcaccgtggtgcgacgggccgctcggcgcgctggagagcaacgggtgggtgtactcggcgcactgctccttcaagctctttgtggccgatgcgtcgtggtggtgccttgacgggaagtggctcttcttctggggcgactctaaccacgtcgacaccatccggaacctcctcaccttcgtcctcggcatcacggacacgtctgctgtgacacgccagtttgatgcagtgttcaccaatcccattggtggggcagggactctaaggatcacaagcatcttcaacggccactggaacatgagcatgaactatctcggcttgcattccctccggaacagaggtttccggcagctcatccggtcctacttcatgtccggtgatcgtgttccagacgtcatggtcctgaactctcgcctgcacgatggctgctactggaccagcgtccgcatctacgcgcaggctgcggatttcgcagcacagttctggtccggagtcatggacaaagtccgggctcgtgggcatgcagtgcccagggtgttctaccggacgcagatgcctcagggtggtatagatgcagggaaaaaccacgcgactcccttcacggaattgagagatgaagctggtgtcacatactcacatccgcagggatgggtcacgttgcagacacttcctaatgaagtccttgtagtgctgcgaaagattttgttagtagacaacacaaggaaggaagcacaaggaagtttaacctgtatagcacaaggaagcaagcagctcagcctccattttatttggaaaagtcttatacttatcagaaaaagaaaagctaaaactctaccctctgcgcccaccttcaagggtcgctccctatcttccttcactctccatcaaagctttgctcgcatcaaattaaatttcttttcgttacgaatttagcttcattatataatattttgctcagtgaattgatcaagtttggtgcacgagtgtcatgctcctaggttttgtactaattgaagaagtagcaaatgtagttcgtggtggtggtttaagtcatgtctgatgaaattgatgcttatatagaggggttctttgtgctttcgaaagaattctgcaggaaaatcgactgcatttgttgttcttgggtacacaatgaaagatgggaaggcatattttcccccacatgacagtatctatacatattgcagttgaaatggaaataattgaaatacaaggtatgtgcaggtgcagtctattatattggagttaagagagcgctagcttgcagtcacactcgatgaagtcctatagggctagattttaaaagtaagatccagtacaaggttacttcaattgcaattagcgattagccaaaactttcatcttcggtctcactaggcctcactaggcctttcatcttcaaaagaatttataaagatattatttttcagtctatctctacatccctctctccatcttgttatgcaattatgagttcattagatgtcattgatctaaattaatttctatccattatgaacttatttttaatgaaccatgctccttcttcgttgctcacaacagggtccatgtacttggcacatgatatacatatacgagatggacttaaaaattaacaaaggtcttcttttggtggtagataattttggttttcttatgattctctttatgaagtgggtgtggtacctctaaacaaatagatgatctgttgacttatggcagtcaggcattacatttttttgcatgaaatcgacatctgagaagtgataattttgttttgatcgcttctctattgcaagatttagatggctactatcctttgcaattgatcaagaatggtgagctattctaaggaagcttctgaacaatatacctgttgtcctggagtgtcacagatggcaaagatttgcgcttagagaaggaggaagaacggtcggtgctagagtcatctccaaagttcttagctgatcagtttccactttcttctctgtagtctggttgcaactgttgatgatattgtaggtgtatgaaatcttctaagcaaactgttaaatacattgcacccgatcagaagggatgctctataatgcagcctgggtgtgatctccgtacatcgtgctccagccgcactcagatctagccttggccgggagacaccgcgacagaggctggacgtgctcttcccgtcctcatgccccatgccgctgcgcgctcttcccttcacctctcactacacggcggctgcggggcaggggtgaaagaggcgaggcttctccagcttctcgaggccggagaccgtttgctcaagggtgtcgttcttgacggcctcctccgacagcgtggacgcgtggttctcaaccatggccttggtcacggcaggaagcagagcctggtgccagagaagctcccagtgccccatgtgttggcagcatatcagcatgaaagatcctatgagccaagagctactagaggctgttgaacaagagaggaacatccgatctaatccttcacgtaatactgctgttttccaccatccaatgctgggtgattttgaggttaagaaactccatcaagaaaagcagttaggaatgatggtggacaaaggcctggtagcaactaggacagggttgagtcagtaccacctgtctcactggcctagaatgtttgaggtgatcaggatgctggaaggagacatgctcacagagagatgggaggtgtcgcagaacgtggacatgccagagttcgtctcatcggagctcctacttcaaaagtacatggattttgcagcggacgaatgctcgcttggtgtagaagccatggagctctctggactaaggtgaccatctgatcgatcgaatcggccatcacacaggtcgcataggtgtcttgccatatcaagcctatattattgttgtattacattggacacatagggaagggaaaaaatccggtgaattatagggtgtgatctgtctgcctatacttgtggtggcattcatttgtgcaaatgattttgatatattgatgtagagaatatatatgttgtttatttctatgtaatcgttgcacactataattttatcaaacaacttttgtattgttgcaaggggcgacaaaaatccagtggattgtagtgtgtgatttgtctatctataactgtggtggtattcatttgtgcaaatgatttgttgtatatt

SEQ ID NO: 65351 - DNA, 3210 bp, Zea Mays
atgccccgcccgccctgctctccgtcgcgcccttccagggatcctccatcgccgctcccgccatcatcgcgcccgcgctccatcgatggaaggtgtcgccccgccatcctcgcctcgctccccgcgacacgcggcgccagcttgtgtcgcatcttctatctattcaccagcaaggtacctggcacagaacccagccgaatcctagaacccagccggatcctagaaatttcccattggcatctggtgaccgtatccggtggttgggcgtcagacgcagcggggcggtaccggtgcttggagttggaccacccgtgcaaggcaccgtggtgcgacgggccgctcggcgcgctggagagcaacgggtgggtgtactcggcgcactgctccttcaagctctttgtggccgatgcgtcgtggtggtgccttgacgggaagtggctcttcttctggggcgactctaaccacgtcgacaccatccggaacctcctcaccttcgtcctcggcatcacggacacgtctgctgtgacacgccagtttgatgcagtgttcaccaatcccattggtggggcagggactctaaggatcacaagcatcttcaacggccactggaacatgagcatgaactatctcggcttgcattccctccggaacagaggtttccggcagctcatccggtcctacttcatgtccggtgatcgtgttccagacgtcatggtcctgaactctcgcctgcacgatggctgctactggaccagcgtccgcatctacgcgcaggctgcggatttcgcagcacagttctggtccggagtcatggacaaagtccgggctcgtgggcatgcagtgcccagggtgttctaccggacgcagatgcctcagggtggtatagatgcagggaaaaaccacgcgactcccttcacggaattgagagatgaagctggtgtcacatactcacatccgcagggatgggtcacgttgcagacacttcctaatgaagtccttgtagtgctgcgaaaggtaatcagattttgttagtagacaacacaaggaaggaagcacaaggaagtttaacctgtatagcacaaggaagcaagcagctcagcctccattttatttggaaaagtcttatacttatcagaagtgcagtctattatattggagttaagagagcgctagcttgcagtcacactcgatgaagtcctatagggctagattttaaaagtaagatccagtacaaggttacttcaattgcaattagcgattagccaaaactttcatcttcggtctcactaggcctcactaggcctttcatcttcaaaagaatttataaagatattatttttcagtctatctctacatccctctctccatcttgttatgcaattatgagttcattagatgtcattgatctaaattaatttctatccattatgaacttatttttaatgaaccatgctccttcttcgttgctcacaacagggtccatgtacttggcacatgatatacatatacgagatggacttaaaaattaacaaaggtcttcttttggtggtagataattttggttttcttatgattctctttatgaagtgggtgtggtacctctaaacaaatagatgatctgttgacttatggcagtcaggcattacatttttttgcatgaaatcgacatctgagaagtgataattttgttttgatcgcttctctattgcaagatttagatggctactatcctttgcaattgatcaagaatggtgagctattctaaggaagcttctgaacaatatacctgttgtcctggagtgtcacagatggcaaagatttgcgcttagagaaggaggaagaacggtcggtgctagagtcatctccaaagttcttagctgatcagtttccactttcttctctgtagtctggttgcaactgttgatggttagcacattctttatcttcaattattggaagaaacatttttgcgccaattacatgaaagtggttgcagttttaagggtctgttcaatccctctccaagatattgtaggtgtatgaaatcttctaagcaaactgttaaatacattgcacccgatcagaagggatgctctataatgcagcctgggtgtgatctccgtacatcgtgctccagccgcactcagatctagccttggccgggagacaccgcgacagaggctggacgtgctcttcccgtcctcatgccccatgccgctgcgcgctcttcccttcacctctcactacacggcggctgcggggcaggggtgaaagaggcgaggcttctccagcttctcgaggccggagaccgtttgctcaagggtgtcgttcttgacggcctcctccgacagcgtggacgcgtggttctcaaccatggccttggtcacggcaggaagcagagcctggtgccagagaagctcccagtgccccatgtgttggcagcatatcagcatgaaagatcctatgagccaagagctactagaggctgttgaacaagagaggaacatccgatctaatccttcacgtaatactgctgttttccaccatccaatgctgggtgattttgaggttaagaaactccatcaagaaaagcagttaggaatgatggtggacaaaggcctggtagcaactaggacagggttgagtcagtaccacctgtctcactggcctagaatgtttgaggtgatcaggatgctggaaggagacatgctcacagagagatgggaggtgtcgcagaacgtggacatgccagagttcgtctcatcggagctcctacttcaaaagtacatggattttgcagcggacgaatgctcgcttggtgtagaagccatggagctctctggactaaggtgaccatctgatcgatcgaatcggccatcacacaggtcgcataggtgtcttgccatatcaagcctatattattgttgtattacattggacacatagggaagggaaaaaatccggtgaattatagggtgtgatctgtctgcctatacttgtggtggcattcatttgtgcaaatgattttgatatattgatgtagagaatatatatgttgtttatttctatgtaatcgttgcacactataattttatcaaacaacttttgtattgttgcaaggggcgacaaaaatccagtggattgtagtgtgtgatttgtctatctataactgtggtggtattcatttgtgcaaatgatttgttgtatatt

SEQ ID NO: 65352 - DNA, 3770 bp, Zea Mays
atgccccgcccgccctgctctccgtcgcgcccttccagggatcctccatcgccgctcccgccatcatcgcgcccgcgctccatcgatggaaggtgtcgccccgccatcctcgcctcgctccccgcgacacgcggcgccagcttgtgtcgcatcttctatctattcaccagcaaggtacctggcacagaacccagccgaatcctagaacccagccggatcctagaaatttcccattggcatctggtgaccgtatccggtggttgggcgtcagacgcagcggggcggtaccggtgcttggagttggaccacccgtgcaaggcaccgtggtgcgacgggccgctcggcgcgctggagagcaacgggtgggtgtactcggcgcactgctccttcaagctctttgtggccgatgcgtcgtggtggtgccttgacgggaagtggctcttcttctggggcgactctaaccacgtcgacaccatccggaacctcctcaccttcgtcctcggcatcacggacacgtctgctgtgacacgccagtttgatgcagtgttcaccaatcccattggtggggcagggactctaaggatcacaagcatcttcaacggccactggaacatgagcatgaactatctcggcttgcattccctccggaacagaggtttccggcagctcatccggtcctacttcatgtccggtgatcgtgttccagacgtcatggtcctgaactctcgcctgcacgatggctgctactggaccagcgtccgcatctacgcgcaggctgcggatttcgcagcacagttctggtccggagtcatggacaaagtccgggctcgtgggcatgcagtgcccagggtgttctaccggacgcagatgcctcagggtggtatagatgcagggaaaaaccacgcgactcccttcacggaattgagagatgaagctggtgtcacatactcacatccgcagggatgggtcacgttgcagacacttcctaatgaagtccttgtagtgctgcgaaaggtaatcagattttgttagtagacaacacaaggaaggaagcacaaggaagtttaacctgtatagcacaaggaagcaagcagctcagcctccattttatttggaaaagtcttatacttatcagaagtaagtttttgatcctctattttattacagattttgtgattccagatctgttgacctcaaggcagattggaaacaaccttattgttgttttgttgaccaactctagaaagaaaagctaaaactctaccctctgcgcccaccttcaagggtcgctccctatcttccttcactctccatcaaagctttgctcgcatcaaattaaatttcttttcgttacgaatttagcttcattatataatattttgctcagtgaattgatcaagtttggtgcacgagtgtcatgctcctaggttttgtactaattgaagaagtagcaaatgtagttcgtggtggtggtttaagtcatgtctgatgaaattgatgcttatatagaggggttctttgtgctttcgaaagaattctgcaggaaaatcgactgcatttgttgttcttgggtacacaatgaaagatgggaaggcatattttcccccacatgacagtatctatacatattgcagttgaaatggaaataattgaaatacaaggtatgtgcaggtgcagtctattatattggagttaagagagcgctagcttgcagtcacactcgatgaagtcctatagggctagattttaaaagtaagatccagtacaaggttacttcaattgcaattagcgattagccaaaactttcatcttcggtctcactaggcctcactaggcctttcatcttcaaaagaatttataaagatattatttttcagtctatctctacatccctctctccatcttgttatgcaattatgagttcattagatgtcattgatctaaattaatttctatccattatgaacttatttttaatgaaccatgctccttcttcgttgctcacaacagggtccatgtacttggcacatgatatacatatacgagatggacttaaaaattaacaaaggtcttcttttggtggtagataattttggttttcttatgattctctttatgaagtgggtgtggtacctctaaacaaatagatgatctgttgacttatggcagtcaggcattacatttttttgcatgaaatcgacatctgagaagtgataattttgttttgatcgcttctctattgcaagatttagatggctactatcctttgcaattgatcaagaatggtgagctattctaaggaagcttctgaacaatatacctgttgtcctggagtgtcacagatggcaaagatttgcgcttagagaaggaggaagaacggtcggtgctagagtcatctccaaagttcttagctgatcagtttccactttcttctctgtagtctggttgcaactgttgatggttagcacattctttatcttcaattattggaagaaacatttttgcgccaattacatgaaagtggttgcagttttaagggtctgttcaatccctctccaagatattgtaggtgtatgaaatcttctaagcaaactgttaaatacattgcacccgatcagaagggatgctctataatgcagcctggtaaacctccctcctgggcccagctgtcctctgctttcagtgtgaaactactgatttgggtgttgctgattttcatcatgattttttcaggtgtgatctccgtacatcgtgctccagccgcactcagatctagccttggccgggagacaccgcgacagaggctggacgtgctcttcccgtcctcatgccccatgccgctgcgcgctcttcccttcacctctcactacacggcggctgcggggcaggggtgaaagaggcgaggcttctccagcttctcgaggccggagaccgtttgctcaagggtgtcgttcttgacggcctcctccgacagcgtggacgcgtggttctcaaccatggccttggtcacggcaggaagcagagcctgccaagagctactagaggctgttgaacaagagaggaacatccgatctaatccttcacgtaatactgctgttttccaccatccaatgctgggtgattttgaggttaagaaactccatcaagaaaagcagttaggaatgatggtggacaaaggcctggtagcaactaggacagggttgagtcagtaccacctgtctcactggcctagaatgtttgaggtgatcaggatgctggaaggagacatgctcacagagagatgggaggtgtcgcagaacgtggacatgccagagttcgtctcatcggagctcctacttcaaaagtacatggattttgcagcggacgaatgctcgcttggtgtagaagccatggagctctctggactaaggtgaccatctgatcgatcgaatcggccatcacacaggtcgcataggtgtcttgccatatcaagcctatattattgttgtattacattggacacatagggaagggaaaaaatccggtgaattatagggtgtgatctgtctgcctatacttgtggtggcattcatttgtgcaaatgattttgatatattgatgtagagaatatatatgttgtttatttctatgtaatcgttgcacactataattttatcaaacaacttttgtattgttgcaaggggcgacaaaaatccagtggattgtagtgtgtgatttgtctatctataactgtggtggtattcatttgtgcaaatgatttgttgtatatt

SEQ ID NO: 65353 - DNA, 2653 bp, Zea Mays
atgccccgcccgccctgctctccgtcgcgcccttccagggatcctccatcgccgctcccgccatcatcgcgcccgcgctccatcgatggaaggtgtcgccccgccatcctcgcctcgctccccgcgacacgcggcgccagcttgtgtcgcatcttctatctattcaccagcaaggtacctggcacagaacccagccgaatcctagaacccagccggatcctagaaatttcccattggcatctggtgaccgtatccggtggttgggcgtcagacgcagcggggcggtaccggtgcttggagttggaccacccgtgcaaggcaccgtggtgcgacgggccgctcggcgcgctggagagcaacgggtgggtgtactcggcgcactgctccttcaagctctttgtggccgatgcgtcgtggtggtgccttgacgggaagtggctcttcttctggggcgactctaaccacgtcgacaccatccggaacctcctcaccttcgtcctcggcatcacggacacgtctgctgtgacacgccagtttgatgcagtgttcaccaatcccattggtggggcagggactctaaggatcacaagcatcttcaacggccactggaacatgagcatgaactatctcggcttgcattccctccggaacagaggtttccggcagctcatccggtcctacttcatgtccggtgatcgtgttccagacgtcatggtcctgaactctcgcctgcacgatggctgctactggaccagcgtccgcatctacgcgcaggctgcggatttcgcagcacagttctggtccggagtcatggacaaagtccgggctcgtgggcatgcagtgcccagggtgttctaccggacgcagatgcctcagggtggtatagatgcagggaaaaaccacgcgactcccttcacggaattgagagatgaagctggtgtcacatactcacatccgcagggatgggtcacgttgcagacacttcctaatgaagtccttgtagtgctgcgaaaggtaatcagattttgttagtagacaacacaaggaaggaagcacaaggaagtttaacctgtatagcacaaggaagcaagcagctcagcctccattttatttggaaaagtcttatacttatcagaagtgcagtctattatattggagttaagagagcgctagcttgcagtcacactcgatgaagtcctatagggctagattttaaaaatttagatggctactatcctttgcaattgatcaagaatggtgagctattctaaggaagcttctgaacaatatacctgttgtcctggagtgtcacagatggcaaagatttgcgcttagagaaggaggaagaacggtcggtgctagagtcatctccaaagttcttagctgatcagtttccactttcttctctgtagtctggttgcaactgttgatggttagcacattctttatcttcaattattggaagaaacatttttgcgccaattacatgaaagtggttgcagttttaagggtctgttcaatccctctccaagatattgtaggtgtatgaaatcttctaagcaaactgttaaatacattgcacccgatcagaagggatgctctataatgcagcctgggtgtgatctccgtacatcgtgctccagccgcactcagatctagccttggccgggagacaccgcgacagaggctggacgtgctcttcccgtcctcatgccccatgccgctgcgcgctcttcccttcacctctcactacacggcggctgcggggcaggggtgaaagaggcgaggcttctccagcttctcgaggccggagaccgtttgctcaagggtgtcgttcttgacggcctcctccgacagcgtggacgcgtggttctcaaccatggccttggtcacggcaggaagcagagcctgccaagagctactagaggctgttgaacaagagaggaacatccgatctaatccttcacgtaatactgctgttttccaccatccaatgctgggtgattttgaggttaagaaactccatcaagaaaagcagttaggaatgatggtggacaaaggcctggtagcaactaggacagggttgagtcagtaccacctgtctcactggcctagaatgtttgaggtgatcaggatgctggaaggagacatgctcacagagagatgggaggtgtcgcagaacgtggacatgccagagttcgtctcatcggagctcctacttcaaaagtacatggattttgcagcggacgaatgctcgcttggtgtagaagccatggagctctctggactaaggtgaccatctgatcgatcgaatcggccatcacacaggtcgcataggtgtcttgccatatcaagcctatattattgttgtattacattggacacatagggaagggaaaaaatccggtgaattatagggtgtgatctgtctgcctatacttgtggtggcattcatttgtgcaaatgattttgatatattgatgtagagaatatatatgttgtttatttctatgtaatcgttgcacactataattttatcaaacaacttttgtattgttgcaaggggcgacaaaaatccagtggattgtagtgtgtgatttgtctatctataactgtggtggtattcatttgtgcaaatgatttgttgtatatt

SEQ ID NO: 65354 - DNA, 3940 bp, Zea Mays
atgccccgcccgccctgctctccgtcgcgcccttccagggatcctccatcgccgctcccgccatcatcgcgcccgcgctccatcgatggaaggtgtcgccccgccatcctcgcctcgctccccgcgacacgcggcgccagcttgtgtcgcatcttctatctattcaccagcaaggtacctggcacagaacccagccgaatcctagaacccagccggatcctagaaatttcccattggcatctggtgaccgtatccggtggttgggcgtcagacgcagcggggcggtaccggtgcttggagttggaccacccgtgcaaggcaccgtggtgcgacgggccgctcggcgcgctggagagcaacgggtgggtgtactcggcgcactgctccttcaagctctttgtggccgatgcgtcgtggtggtgccttgacgggaagtggctcttcttctggggcgactctaaccacgtcgacaccatccggaacctcctcaccttcgtcctcggcatcacggacacgtctgctgtgacacgccagtttgatgcagtgttcaccaatcccattggtggggcagggactctaaggatcacaagcatcttcaacggccactggaacatgagcatgaactatctcggcttgcattccctccggaacagaggtttccggcagctcatccggtcctacttcatgtccggtgatcgtgttccagacgtcatggtcctgaactctcgcctgcacgatggctgctactggaccagcgtccgcatctacgcgcaggctgcggatttcgcagcacagttctggtccggagtcatggacaaagtccgggctcgtgggcatgcagtgcccagggtgttctaccggacgcagatgcctcagggtggtatagatgcagggaaaaaccacgcgactcccttcacggaattgagagatgaagctggtgtcacatactcacatccgcagggatgggtcacgttgcagacacttcctaatgaagtccttgtagtgctgcgaaagattttgttagtagacaacacaaggaaggaagcacaaggaagtttaacctgtatagcacaaggaagcaagcagctcagcctccattttatttggaaaagtcttatacttatcagaagtaagtttttgatcctctattttattacagattttgtgattccagatctgttgacctcaaggcagattggaaacaaccttattgttgttttgttgaccaactctagaaagaaaagctaaaactctaccctctgcgcccaccttcaagggtcgctccctatcttccttcactctccatcaaagctttgctcgcatcaaattaaatttcttttcgttacgaatttagcttcattatataatattttgctcagtgaattgatcaagtttggtgcacgagtgtcatgctcctaggttttgtactaattgaagaagtagcaaatgtagttcgtggtggtggtttaagtcatgtctgatgaaattgatgcttatatagaggggttctttgtgctttcgaaagaattctgcaggaaaatcgactgcatttgttgttcttgggtacacaatgaaagatgggaaggcatattttcccccacatgacagtatctatacatattgcagttgaaatggaaataattgaaatacaaggtatgtgcaggtgcagtctattatattggagttaagagagcgctagcttgcagtcacactcgatgaagtcctatagggctagattttaaaagtaagatccagtacaaggttacttcaattgcaattagcgattagccaaaactttcatcttcggtctcactaggcctcactaggcctttcatcttcaaaagaatttataaagatattatttttcagtctatctctacatccctctctccatcttgttatgcaattatgagttcattagatgtcattgatctaaattaatttctatccattatgaacttatttttaatgaaccatgctccttcttcgttgctcacaacagggtccatgtacttggcacatgatatacatatacgagatggacttaaaaattaacaaaggtcttcttttggtggtagataattttggttttcttatgattctctttatgaagtgggtgtggtacctctaaacaaatagatgatctgttgacttatggcagtcaggcattacatttttttgcatgaaatcgacatctgagaagtgataattttgttttgatcgcttctctattgcaagatttagatggctactatcctttgcaattgatcaagaatggtgagctattctaaggaagcttctgaacaatatacctgttgtcctggagtgtcacagatggcaaagatttgcgcttagagaaggaggaagaacggtcggtgctagagtcatctccaaagttcttagctgatcagtttccactttcttctctgtagtctggttgcaactgttgatggttagcacattctttatcttcaattattggaagaaacatttttgcgccaattacatgaaagtggttgcagttttaagggtctgttcaatccctctccaagatattgtaggtgtatgaaatcttctaagcaaactgttaaatacattgcacccgatcagaagggatgctctataatgcagcctggtaaacctccctcctgggcccagctgtcctctgctttcagtgtgaaactactgatttgggtgttgctgattttcatcatgattttttcagtttgtctcatcatttatcatccgcactcagatctagccttggccgggagacaccgcgacagaggctggacgtgctcttcccgtcctcatgccccatgccgctgcgcgctcttcccttcacctctcactacacggcggctgcggggcaggggtgaaagaggcgaggcttctccagcttctcgaggccggagaccgtttgctcaagggtgtcgttcttgacggcctcctccgacagcgtggacgcgtggttctcaaccatggccttggtcacggcaggaagcagagcctggtgccagagaagctcccagtgccccatgtgttggcagcatatcagcatgaaagatcctatgaggtgaaaattgcaacctctactctgtcttaactcctaagggactgaattgctggttctcacttattcttgcgacactctgcagccaagagctactagaggctgttgaacaagagaggaacatccgatctaatccttcacgtaatactgctgttttccaccatccaatgctgggtgattttgaggtgggcatgtttcttcatgcatgtttggggaactttttaggttaagaaactccatcaagaaaagcagttaggaatgatggtggacaaaggcctggtagcaactaggacagggttgagtcagtaccacctgtctcactggcctagaatgtttgaggtgatcaggatgctggaaggagacatgctcacagagagatgggaggtgtcgcagaacgtggacatgccagagttcgtctcatcggagctcctacttcaaaagtacatggattttgcagcggacgaatgctcgcttggtgtagaagccatggagctctctggactaaggtgaccatctgatcgatcgaatcggccatcacacaggtcgcataggtgtcttgccatatcaagcctatattattgttgtattacattggacacatagggaagggaaaaaatccggtgaattatagggtgtgatctgtctgcctatacttgtggtggcattcatttgtgcaaatgattttgatatattgatgtagagaatatatatgttgtttatttctatgtaatcgttgcacactataattttatcaaacaacttttgtattgttgcaaggggcgacaaaaatccagtggattgtagtgtgtgatttgtctatctataactgtggtggtattcatttgtgcaaatgatttgttgtatatt

SEQ ID NO: 65355 - DNA, 3141 bp, Zea Mays
atgccccgcccgccctgctctccgtcgcgcccttccagggatcctccatcgccgctcccgccatcatcgcgcccgcgctccatcgatggaaggtgtcgccccgccatcctcgcctcgctccccgcgacacgcggcgccagcttgtgtcgcatcttctatctattcaccagcaaggtacctggcacagaacccagccgaatcctagaacccagccggatcctagaaatttcccattggcatctggtgaccgtatccggtggttgggcgtcagacgcagcggggcggtaccggtgcttggagttggaccacccgtgcaaggcaccgtggtgcgacgggccgctcggcgcgctggagagcaacgggtgggtgtactcggcgcactgctccttcaagctctttgtggccgatgcgtcgtggtggtgccttgacgggaagtggctcttcttctggggcgactctaaccacgtcgacaccatccggaacctcctcaccttcgtcctcggcatcacggacacgtctgctgtgacacgccagtttgatgcagtgttcaccaatcccattggtggggcagggactctaaggatcacaagcatcttcaacggccactggaacatgagcatgaactatctcggcttgcattccctccggaacagaggtttccggcagctcatccggtcctacttcatgtccggtgatcgtgttccagacgtcatggtcctgaactctcgcctgcacgatggctgctactggaccagcgtccgcatctacgcgcaggctgcggatttcgcagcacagttctggtccggagtcatggacaaagtccgggctcgtgggcatgcagtgcccagggtgttctaccggacgcagatgcctcagatgcagggaaaaaccacgcgactcccttcacggaattgagagatgaagctggtgtcacatactcacatccgcagggatgggtcacgttgcagacacttcctaatgaagtccttgtagtgctgcgaaagattttgttagtagacaacacaaggaaggaagcacaaggaagtttaacctgtatagcacaaggaagcaagcagctcagcctccattttatttggaaaagtcttatacttatcagaagtaagtttttgatcctctattttattacagattttgtgattccagatctgttgacctcaaggcagattggaaacaaccttattgttgttttgttgaccaactctagaaagaaaagctaaaactctaccctctgcgcccaccttcaagggtcgctccctatcttccttcactctccatcaaagctttgctcgcatcaaattaaatttcttttcgttacgaatttagcttcattatataatattttgctcagtgaattgatcaagtttggtgcacgagtgtcatgctcctaggttttgtactaattgaagaagtagcaaatgtagttcgtggtggtggtttaagtcatgtctgatgaaattgatgcttatatagaggggttctttgtgctttcgaaagaattctgcaggaaaatcgactgcatttgttgttcttgggtacacaatgaaagatgggaaggcatattttcccccacatgacagtatctatacatattgcagttgaaatggaaataattgaaatacaagatttagatggctactatcctttgcaattgatcaagaatggtgagctattctaaggaagcttctgaacaatatacctgttgtcctggagtgtcacagatggcaaagatttgcgcttagagaaggaggaagaacggtcggtgctagagtcatctccaaagttcttagctgatcagtttccactttcttctctgtagtctggttgcaactgttgatggttagcacattctttatcttcaattattggaagaaacatttttgcgccaattacatgaaagtggttgcagttttaagggtctgttcaatccctctccaagatattgtaggtgtatgaaatcttctaagcaaactgttaaatacattgcacccgatcagaagggatgctctataatgcagcctgggtgtgatctccgtacatcgtgctccagccgcactcagatctagccttggccgggagacaccgcgacagaggctggacgtgctcttcccgtcctcatgccccatgccgctgcgcgctcttcccttcacctctcactacacggcggctgcggggcaggggtgaaagaggcgaggcttctccagcttctcgaggccggagaccgtttgctcaagggtgtcgttcttgacggcctcctccgacagcgtggacgcgtggttctcaaccatggccttggtcacggcaggaagcagagcctggtgccagagaagctcccagtgccccatgtgttggcagcatatcagcatgaaagatcctatgagccaagagctactagaggctgttgaacaagagaggaacatccgatctaatccttcacgtaatactgctgttttccaccatccaatgctgggtgattttgaggttaagaaactccatcaagaaaagcagttaggaatgatggtggacaaaggcctggtagcaactaggacagggttgagtcagtaccacctgtctcactggcctagaatgtttgaggtgatcaggatgctggaaggagacatgctcacagagagatgggaggtgtcgcagaacgtggacatgccagagttcgtctcatcggagctcctacttcaaaagtacatggattttgcagcggacgaatgctcgcttggtgtagaagccatggagctctctggactaaggtgaccatctgatcgatcgaatcggccatcacacaggtcgcataggtgtcttgccatatcaagcctatattattgttgtattacattggacacatagggaagggaaaaaatccggtgaattatagggtgtgatctgtctgcctatacttgtggtggcattcatttgtgcaaatgattttgatatattgatgtagagaatatatatgttgtttatttctatgtaatcgttgcacactataattttatcaaacaacttttgtattgttgcaaggggcgacaaaaatccagtggattgtagtgtgtgatttgtctatctataactgtggtggtattcatttgtgcaaatgatttgttgtatatt

SEQ ID NO: 65356 - DNA, 805 bp, Zea Mays
gcctccctgacacaacgtcgccttcaagcgctgccactcctaggcccacgcccctgcccccgactctgcacccctgcctcggcgccgctccagcagcctccccttccatgtgccccacccgcccgcatgcatcgacgcccgcacgacaacctttcccctgtgcccacaatctcaaccatccgcgtgagaacaatcgattacgcgcctccaatctcctccatccggcggacgcaatctcctccatcctcacttcccgcagtcattcccgtgctcgccccgctgccgcccgccgcaccccaccacaagcaggaagcaaccaacacgtgaggtccctcccccactgcttagagcgagaagtcatcccccactgaaatagcaatatcttcttatcacctgaggtccgaggatcatgtacagaaatgaggctgaccttctatcctatcgctgtgacttgacttgaaagctctcatcccatatatccctagaagctatcagtccattctgatgtctgcaacttcagggtagcaagtgttgggcgaagtacaaagatactggccaacaaaaacatggagtttccgtgtgttgcagtattctacacttgcctaatagtatttattaattgtagttagcatatatgtttatactcacttgttgctgccaagaataatactaaagttttctaataagtttcagtgatggaattcatgaagcacactgtctgaatttatagagcttggtgccacaatgaaactgtgataaaccagctttctttttttccgaatgagctagtttgcccagaattaat

SEQ ID NO: 65357 - DNA, 1138 bp, Zea Mays
gtcgccttcaagcgctgccactcctaggcccacgcccctgcccccgactctgcacccctgcctcggcgccgctccagcagcctccccttccatgtgccccacccgcccgcatgcatcgacgcccgcacgacaacctttcccctgtgcccacaatctcaaccatccgcgtgagaacaatcgattacgcgcctccaatctcctccatccggcggacgcaatctcctccatcctcacttcccgcagtcattcccgtgctcgccccgctgccgcccgccgcaccccaccacaagcaggaagcaaccaacacgtgaggtccctcccccactgcttagagcgagaagtcatcccccactgaaatagttaattatcttgccaagctttttttcctttctttttttgtgtaagtgcgtaaaggcaatatcttcttatcacctgaggtccgaggatcatgtacagaaatgagttctcactccacgtttcactttgagcggccgcctaggtcttcatgtgtgcccccaaggtcctgagtcacgacgacacaaggcatcacaaggctcaaggtcagaacctcataaacaagctgaaaataaaaaagaatcatcatcggttcaaggttagaactgaatctagacatcgaacatctcattcagttaaaaagaaggaagcatctcttcagatatgctgctctatgtataacctgtacacaaatagaactaatggtctattctagaatgaaaaactaaattaagttgtacaagaacatgttaaagcaagtcgtggttcgccagtgctgtcaggtttagctggtactcaatggaaaacacatctccaccaggtatactagagatctgttatgttaattaccgatgatctactttcattaaccttagaaccatatttggaaatgactaggtgaagaattttatggctacgtgacaccaccaagtgatcttgtaacttgtaagtaaatttccagtgaacatttgccattcactaaaacaactgccatttctaccaacaagtctgtggccatatttccagtgagcatcttccaggggtccacccatagccattgctctcaatgggtctatagtctgaaatctcaacaaatgaaagaaactcaaaacgtatctaaatg

SEQ ID NO: 65358 - DNA, 822 bp, Zea Mays
gtcgccttcaagcgctgccactcctaggcccacgcccctgcccccgactctgcacccctgcctcggcgccgctccagcagcctccccttccatgtgccccacccgcccgcatgcatcgacgcccgcacgacaacctttcccctgtgcccacaatctcaaccatccgcgtgagaacaatcgattacgcgcctccaatctcctccatccggcggacgcaatctcctccatcctcacttcccgcagtcattcccgtgctcgccccgctgccgcccgccgcaccccaccacaagcaggaagcaaccaacacgtgaggtccctcccccactgcttagagcgagaagtcatcccccactgaaatagttaattatcttgccaagctttttttcctttctttttttgtgtaagtgcgtaaaggcaatatcttcttatcacctgaggtccgaggatcatgtacagaaatgagttctcactccacgtttcactttgagcggccgcctaggtcttcatgtgtgcccccaaggtcctgagtcacgacgacacaaggcatcacaaggctcaaggtcagaacctcataaacaagctgaaaataaaaaagaatcatcatcggttcaaggctgaccttctatcctatcgctgtgacttgacttgaaagctctcatcccatatatccctagaagctatcagtccattctgatgtctgcaacttcaggtgatggaattcatgaagcacactgtctgaatttatagagcttggtgccacaatgaaactgtgataaaccagctttctttttttccgaatgagctagtttgcccagaattaat

SEQ ID NO: 65359 - DNA, 941 bp, Zea Mays
gtcgccttcaagcgctgccactcctaggcccacgcccctgcccccgactctgcacccctgcctcggcgccgctccagcagcctccccttccatgtgccccacccgcccgcatgcatcgacgcccgcacgacaacctttcccctgtgcccacaatctcaaccatccgcgtgagaacaatcgattacgcgcctccaatctcctccatccggcggacgcaatctcctccatcctcacttcccgcagtcattcccgtgctcgccccgctgccgcccgccgcaccccaccacaagcaggaagcaaccaacacgtgaggtccctcccccactgcttagagcgagaagtcatcccccactgaaatagttaattatcttgccaagctttttttcctttctttttttgtgtaagtgcgtaaaggcaatatcttcttatcacctgaggtccgaggatcatgtacagaaatgagttctcactccacgtttcactttgagcggccgcctaggtcttcatgtgtgcccccaaggtcctgagtcacgacgacacaaggcatcacaaggctcaaggctgaccttctatcctatcgctgtgacttgacttgaaagctctcatcccatatatccctagaagctatcagtccattctgatgtctgcaacttcagggtagcaagtgttgggcgaagtacaaagatactggccaacaaaaacatggagtttccgtgtgttgcagtattctacacttgcctaatagtatttattaattgtagttagcatatatgtttatactcacttgttgctgccaagaataatactaaagttttctaataagtttcagtgatggaattcatgaagcacactgtctgaatttatagagcttggtgccacaatgaaactgtgataaaccagctttctttttttccgaatgagctagtttgcccagaattaat

SEQ ID NO: 65360 - DNA, 778 bp, Zea Mays
tagttctaactctgttgtactatcatatttaatctatcacaggtagacaaaatcatggatgaggagtcgactgaaatgaatgattctgctcttaattttttctgaacacgcatgagatgtttcattgcattaatagaataagagagttactaaaaacgcttcaaatttttgaatgtattgatatgactttatactcaaaacatgcatttaatttaattaactgttggtcaaaattacaaactttttttgcatcaaaatatgctatagaaggttgaggaagggagtacaaaattctttgatgtgatgtacatcagattccacaccttttgtgtagtaattataattttcaagcaagtttctttttgaaaacgatactaatctaccaatgttttgatgtcaggctgaccttctatcctatcgctgtgacttgacttgaaagctctcatcccatatatccctagaagctatcagtccattctgatgtctgcaacttcagggtgagtccccccagtgcagtttcagattttagtactagttcgacgcacagctctgtatgttcaccaaggaatctagtccccccccccccgcccccaagataatttgtgtacatatagggagcctgttcttgttctcctgtaggtatacgaccatcaatttggtctagacggacggacaccggtaggtatacggccatccagtgcagtcttatttcgtcgaggaggcgttagtccacaactccgttggttcctggccttgatttttgttcctgatatttttt

SEQ ID NO: 65361 - DNA, 481 bp, Zea Mays
ctcacctccccggcccagcaccgcacccctgtgccattggcccaccgagcacgcacgcagcccagcagccgcgctgcactgcacgcaggtgcacatccaccatgaaatccccacagctccgcacaccgtatctgcgccgcagcttctatcgctcacgcccacgcggagctcccttcctcaatcgcctattcccccacgccgccctcaaaatcgggaggatccatagcacgccgtagttcctctcaaacaggcccgatgccctcctccccattcctccctctcgcccaaccggagttcgcaacgtcgttcatgctggacctgccccttcgctcgttcatgattgcgatctattcctgagcttcgaggaatcgacgatcaatatttggtgaaccgctggtgccgagatcaagttcttcgagttctacggggttgaagaccctgagcatatgtttggtaaaggcaagtgtcctctgacccatta

SEQ ID NO: 65362 - DNA, 1505 bp, Zea Mays
tacatatcatgtctacagtagaaggcttccaaagttgtcagagacggcgagagtagggggtttccaggaagcttcgccagggcgccggtaagttgactggatttgctgctaggcagtcaggcaagctcgagttttgccatttgagaaggagagggaaaatgatgacctcgtggcttctgggccgccggggcccctccggcttctcctggagttccaccgccgaccaagtcacgcagggcatctccgccgccggcctcaccgccatcgtcactggggcgtccagcggcatcggcgcggagacggcgcgaacgctggcgctgcgcggggcccacgtcatcatggccgtcaggagccttcccgctgcccaggccgtcaaggacgccgtcctcgcccaggcgccgggggccaagctcgacgtcatggagctcgacctctcgtccatggcctctgtccgcgctttcgcgtcccaattcatcgacaggggtctccccctcaacatccttatcaacaatgcaggagtaatggcaataccttttgcgctttcaaaggatggaattgagatgcagtttgcaactaatcatgttgggcatttcctgctcacacaccttctattggataccatgaagaggacctctcatgaatcaaatttggaaggaagaattgtcaacgtgtcatcagaggggcacagacttgcatatcgggaaggaatccgttttgacaagatcaacgatgaatcagtgtatagtagcattggtgcatatgggcaatcaaagcttgcaaacatattgcatgctaatgaacttgccaggcgatttgaggaagataatgtcaacataactgcaaattctcttcatcctggttccattatcacgaaccttcttcgctaccacagtatcctagatgttctccatcggacgctgggtaaattggtgttgaaaaatgctgagcagggtgcggcaactacatgctatttggcactccacccgcatgtgaagggcgtgtccgggaagtacttctgcgactgtaacctgtacgagccaagcgcgaacgccaaggacatggagttggccaagaggctctgggacttcggcgtcgagctcatcacctagctcatgcttcttgttgttagcgacttgttttcagacatggatgtaatgtaaatcccttgacagatggtaaattctgtaggccctcgaggagctcctgtgtggtaaactcattcacctcaatctatctacgtgtattaaggtggattagggtgtaaattaaattaatttacactccaatcgccctcgaggagctccggggtggataatgctttggttggatattttagtattcacctgaatttacgtgtattaagatgaattagggtgtaaattaaattaattacactccaatccatctcaatatatatggattaggtcgaatactagagtattgtaatacttcaaaatcctattttggataaattagtaaaacgtatttcatgatttaaataaata

SEQ ID NO: 65363 - DNA, 903 bp, Zea Mays
tgtttttttacatatgaacacgggcacacgaatcgtcggctcacggcctcgtcacgcccaccctctccctcttcgggttccaggcttccaaagttgtcagagacggcgagagtagggggtttccaggaagcttcgccagggcgccggtaagttgactggatttgctgctaggcagtcaggcaagctcgagttttgccatttgagaaggagagggaaaatgatgacctcgtggcttctgggccgccggggcccctccggcttctcctggagttccaccgccgaccaagtcacgcagggcatctccgccgccggcctcaccgccatcgtcactggggcgtccagcggcatcggcgcggagacggcgcgaacgctggcgctgcgcggggcccacgtcatcatggccgtcaggagccttcccgctgcccaggccgtcaaggacgccgtcctcgcccaggcgccgggggccaagctcgacgtcatggagctcgacctctcgtccatggcctctgtccgcgctttcgcgtcccaattcatcgacaggggtctccccctcaacatccttatcaacaatgcaggagtaatggcaataccttttgcgctttcaaaggatggaattgagatgcagtttgcaactaatcatgttgggcatttcctgctcacacaccttctattggataccatgaagaggacctctcatgaatcaaatttggaaggaagaattgtcaacgtgtcatcagaggggcacagacttgcatatcgggaaggaatccgttttgacaagatcaacgatgaatcagtgtatagtagcattggtgcatatgggcaatcaaagcttgcaaacatattgcatgctaatgaacttgccaggcgatttgagggagccgatcagctaccttatcaatg

SEQ ID NO: 65364 - DNA, 1555 bp, Zea Mays
tgtttttttacatatgaacacgggcacacgaatcgtcggctcacggcctcgtcacgcccaccctctccctcttcgggttccaggcttccaaagttgtcagagacggcgagagtagggggtttccaggaagcttcgccagggcgccggtaagttgactggatttgctgctaggcagtcaggcaagctcgagttttgccatttgagaaggagagggaaaatgatgacctcgtggcttctgggccgccggggcccctccggcttctcctggagttccaccgccgaccaagtcacgcagggcatctccgccgccggcctcaccgccatcgtcactggcggcatcggcgcggagacggcgcgaacgctggcgctgcgcggggcccacgtcatcatggccgtcaggagccttcccgctgcccaggccgtcaaggacgccgtcctcgcccaggcgccgggggccaagctcgacgtcatggagctcgacctctcgtccatggcctctgtccgcgctttcgcgtcccaattcatcgacaggggtctccccctcaacatccttatcaacaatgcaggagtaatggcaataccttttgcgctttcaaaggatggaattgagatgcagtttgcaactaatcatgttgggcatttcctgctcacacaccttctattggataccatgaagaggacctctcatgaatcaaatttggaaggaagaattgtcaacgtgtcatcagaggggcacagacttgcatatcgggaaggaatccgttttgacaagatcaacgatgaatcagtgtatagtagcattggtgcatatgggcaatcaaagcttgcaaacatattgcatgctaatgaacttgccaggcgatttgaggaagataatgtcaacataactgcaaattctcttcatcctggttccattatcacgaaccttcttcgctaccacagtatcctagatgttctccatcggacgctgggtaaattggtgttgaaaaatgctgagcagggtgcggcaactacatgctatttggcactccacccgcatgtgaagggcgtgtccgggaagtacttctgcgactgtaacctgtacgagccaagcgcgaacgccaaggacatggagttggccaagaggctctgggacttcggcgtcgagctcatcacctagctcatgcttcttgttgttagcgacttgttttcagacatggatgtaatgtaaatcccttgacagatggtaaattctgtaggccctcgaggagctcctgtgtggtaaactcattcacctcaatctatctacgtgtattaaggtggattagggtgtaaattaaattaatttacactccaatcgccctcgaggagctccggggtggataatgctttggttggatattttagtattcacctgaatttacgtgtattaagatgaattagggtgtaaattaaattaattacactccaatccatctcaatatatatggattaggtcgaatactagagtattgtaatacttcaaaatcctattttggataaattagtaaaacgtatttcatgatttaaataaata

SEQ ID NO: 65365 - DNA, 1040 bp, Zea Mays
aaacagctcgtactcggttccaaattacaagatgttaatgcaacaatgcaggagtaatggcaataccttttgcgctttcaaaggatggaattgagatgcagtttgcaactaatcatgttgggcatttcctgctcacacaccttctattggataccatgaagaggacctctcatgaatcaaatttggaaggaagaattgtcaacgtgtcatcagaggggcacagacttgcatatcgggaaggaatccgttttgacaagatcaacgatgaatcagtgtatagtagcattggtgcatatgggcaatcaaagcttgcaaacatattgcatgctaatgaacttgccaggcgatttgaggaagataatgtcaacataactgcaaattctcttcatcctggttccattatcacgaaccttcttcgctaccacagtatcctagatgttctccatcggacgctgggtaaattggtgttgaaaaatgctgagcagggtgcggcaactacatgctatttggcactccacccgcatgtgaagggcgtgtccgggaagtacttctgcgactgtaacctgtacgagccaagcgcgaacgccaaggacatggagttggccaagaggctctgggacttcggcgtcgagctcatcacctagctcatgcttcttgttgttagcgacttgttttcagacatggatgtaatgtaaatcccttgacagatggtaaattctgtaggccctcgaggagctcctgtgtggtaaactcattcacctcaatctatctacgtgtattaaggtggattagggtgtaaattaaattaatttacactccaatcgccctcgaggagctccggggtggataatgctttggttggatattttagtattcacctgaatttacgtgtattaagatgaattagggtgtaaattaaattaattacactccaatccatctcaatatatatggattaggtcgaatactagagtattgtaatacttcaaaatcctattttggataaattagtaaaacgtatttcatgatttaaataaata

SEQ ID NO: 65366 - DNA, 3762 bp, Zea Mays
gtatacatgtattgttgtttgttactgccatccaatgttccttctcaaaagtactaatcgtaaagcatgcagcttcattgtaaaggtatacgatttataagagagaaaaaaggacaaaaaagtaaattaaattgtcgacacatctctgcctttccttcacaagtgcacactttccaattcagttcaattttcattcgaattcgttttcgtttttcgttcttttttgtttttccccattctcacacgaacaagacgaacacgttcgtccccatcgccgtgttcttcgcgccgccgctgcccaccgatcgaatccgcccgccgcctcccagtaacctccggatccctactcctccaagcttctgtacatctcatcctattcgatttgtctctcgattgccatcatcagtcgcaacccagatatgagtttcactaccaaattctagggtttggggcatatggcctcgtgggtttgggagtgtgatcgacgggcagtgtaatttaataattagctaggatgtcaagagatgatcacgttgaaatctaagtcttgaagagatgattgcggagaagccaaactggattcgtcacgagggcctacagatcttctccatcgacatccagcccggcggcctccgcttcgccactggcggcggcgaccagaaggttcgaatatggagcatgaaatctgtggacaagaataataatcacaatgattccagccaagggttgctagctacaatgcgtgaccattttggatcggtaaactgtgtgagatgggcaaggcatggccgctatctggcttctggatcagatgatcaggttatcctaattcatgagagaaaagctggttctggaacatctgagtttggtagtggggaacctccagatgtggaaaattggaaggttattatgaccttaagagggcatactgcggacgtggtagatcttaactggtcccctgatgattcaacattggctagtggtagcttggataatactgttcacatatggaacataaccaatggtatgtgcactgccgtcttgagagggcattccagcttggtcaagggtgttacctgggatcctattggctctttcatcgcaagccaatcagatgataagaccgttataatatggcgtacaagtgactggagtcttgctcacaagacagaaggccattgggaaaaatctcttggttcaacattttttaggcgacttgcgtggtcaccttgtggccacttcattactacgactcatggcttccagaaacctaggcattcagcccctgtgcttgaaagaggcgagtggtctgctacatttgactttctaggacataacgcacctatcgtggtggttaagtttaataactcaatgttccgtaagagtttctccaatggtcaagacacaaaagctgcaccagctggatgggccaatgggacatcaaagatatcatcaaaagaacagcaaccatataatgttattgctattggaagtcaggacagaacaattactgtttggacaacagcgagtgcacggccattgttcgttgctaagcattttttctctcaaagcgtggttgatttatcttgcaaaggagcttggatacaagttaagtgattctgatctggatgaattgaagaggagcagatatggtgatgttagaggacggcaatcaaatctggctgaaagccctgcacagttactgctagaagaagcatcagcaaagcaatcggctagcaaaaaagggactccgattgtccagcaatttcaagcaccccaaaaactttctgcagatgtgcttaacccagctcctgttgtgcaaaatcagaaagctcctgaagctttacctgaagatgagaagaaatcatcagatcctgctgctgatggtatgaataaagttactcggttatctagtccagtgaagcagagagaataccggcgtcctgatggcaggaaaagaataatcccagaggctgttggatttccatccaaccaggataacatacccagccgttctcagaaccacgttatagatttttcatccttagatcagcgaatgaatgggataagaccatcttattgtagtagcagtaactgtaacaactctggagttaaggactgctctggtgtcacagcaagggctaacattacagaaagtcttgttattcaaaaagcttcaaccaatgctagcagtgatggaaggctgactgtagaacgcactggatctgttgttccaggctctttgaactgccctgcactttctatacatgtattagataagaaagacaatgaggattccttgccagtctgccttgaggcaaatcctgtagaacacgctgcaggtgatatgaatggtgtcggtggtgccttttcaacaaaaggaacagaaataaggtgtacaagaggaacagaaactctttggttggatcgtatatctgcaaaggttactgccttggcaggcaatacaaatttctgggctgttggctgtgaagatggttacctgcaggactcattggctgctttggttgcatctccagatgagtcatcagcaaatcatgcaggtgcagtaaaggttatatctgctaaattctcaagatgtggttttcccttagttgtccttgccagccgtcatgcttttctttttgacatgagcatgaagtgctggttaaggattgctgatgattgttttccggcatcaaattttgccagctcatttatttttccccaagctggagagctaggcaagttgcagattgatgtaggcaagtttatggctagaaagcctatatggagcagggttacagatgatggtttgcagacacgtgcccatttagagacccagttggcagcttctttggctttgaagtcaccacaggagtaccgccaatgcctcctatcctacatacggtttctggcaagagaagcagatgaatcccgtctacgtgaggtttgtgagagcttcctaggtcctcccatgggcatgcttggatctgagtcatctacggatcccaaaagtccagcgtgggattctgatgttctcgggatgaagaagcaccaactcctcagggaagacatacttccatcgatggcatctaaccggaaagtccagcgtctgctcaacgagtttatggatctcctatcagagtatgaagctgctaagagcaaagttgacccaatggatatcacaccggcgctaccacaacaagcaccagaagccaatgccaacgtggtcacctcgtagctgcaccagttccgttgatagttccgttgctggcgacttactgacctctcggtaagtatgataggatagcaatcttggtaagtccttatatgaatcaatcaattagttgtgcttgtaactggtagattgtttagcgagggaggcgacctcaggcaaacattgatattgaacccgttagctgtaacgctgtgtaacagtagaagaaagaagctgaggtcgccaggtaatttattgttaaactgtaggaggccgggtaaactcatgcccttcttgttccaagctaccgtatgcagtggtggcccactggccgtgtgtattttggcgaaaacctgcgtcgtcaaaactggcattgacatcttttagaggaacaggaacaatgagcatttcggcggtgatgattgagcgggcacgccataaacatgtgatttggataattctttatgtagagcggcttttatatgtgtaaacagaaacagaaaatggtggcttaatccaatcgtcagttggagaggaaccggtgg

SEQ ID NO: 65367 - DNA, 3882 bp, Zea Mays
gttccttctcaaaagtactaatcgtaaagcatgcagcttcattgtaaaggtatacgatttataagagagaaaaaaggacaaaaaagtaaattaaattgtcgacacatctctgcctttccttcacaagtgcacactttccaattcagttcaattttcattcgaattcgttttcgtttttcgttcttttttgtttttccccattctcacacgaacaagacgaacacgttcgtccccatcgccgtgttcttcgcgccgccgctgcccaccgatcgaatccgcccgccgcctcccagtaacctccggatccctactcctccaagcttctgtacatctcatcctattcgatttgtctctcgattgccatcatcagtcgcaacccagatatgagtttcactaccaaattctagggtttggggcatatggcctcgtgggtttgggagtgtgatcgacgggcagtgtaatttaataattagctaggatgtcaagagatgatcacgttgaaatctaagtcttgaagagatgattgcggagaagccaaactggattcgtcacgagggcctacagatcttctccatcgacatccagcccggcggcctccgcttcgccactggcggcggcgaccagaaggttcgaatatggagcatgaaatctgtggacaagaataataatcacaatgattccagccaagggttgctagctacaatgcgtgaccattttggatcggtaaactgtgtgagatgggcaaggcatggccgctatctggcttctggatcagatgatcaggttatcctaattcatgagagaaaagctggttctggaacatctgagtttggtagtggggaacctccagatgtggaaaattggaaggttattatgaccttaagagggcatactgcggacgtggtagatcttaactggtcccctgatgattcaacattggctagtggtagcttggataatactgttcacatatggaacataaccaatggtatgtgcactgccgtcttgagagggcattccagcttggtcaagggtgttacctgggatcctattggctctttcatcgcaagccaatcagatgataagaccgttataatatggcgtacaagtgactggagtcttgctcacaagacagaaggccattgggaaaaatctcttggttcaacattttttaggcgacttgcgtggtcaccttgtggccacttcattactacgactcatggcttccagaaacctaggcattcagcccctgtgcttgaaagaggcgagtggtctgctacatttgactttctaggacataacgcacctatcgtggtggttaagtttaataactcaatgttccgtaagagtttctccaatggtcaagacacaaaagctgcaccagctggatgggccaatgggacatcaaagatatcatcaaaagaacagcaaccatataatgttattgctattggaagtcaggacagaacaattactgtttggacaacagcgagtgcacggccattgttcgttgctaagcattttttctctcaaagcgtggttgatttatcttgcaaaggagcttggatacaagttaagtgattctgatctggatgaattgaagaggagcagatatggtgatgttagaggacggcaatcaaatctggctgaaagccctgcacagttactgctagaagaagcatcagcaaagcaatcggctagcaaaaaagggactccgattgtccagcaatttcaagcaccccaaaaactttctgcagatgtgcttaacccagctcctgttgtgcaaaatcagaaagctcctgaagctttacctgaagatgagaagaaatcatcagatcctgctgctgatggtatgaataaagttactcggttatctagtccagtgaagcagagagaataccggcgtcctgatggcaggaaaagaataatcccagaggctgttggatttccatccaaccaggataacatacccagccgttctcagaaccacgttatagatttttcatccttagatcagcgaatgaatgggataagaccatcttattgtagtagcagtaactgtaacaactctggagttaaggactgctctggtgtcacagcaagggctaacattacagaaagtcttgttattcaaaaagcttcaaccaatgctagcagtgatggaaggctgactgtagaacgcactggatctgttgttccaggctctttgaactgccctgcactttctatacatgtattagataagaaagacaatgaggattccttgccagtctgccttgaggcaaatcctgtagaacacgctgcaggtgatatgaatggtgtcggtggtgccttttcaacaaaaggaacagaaataaggtgtacaagaggaacagaaactctttggttggatcgtatatctgcaaaggttactgccttggcaggcaatacaaatttctgggctgttggctgtgaagatggttacctgcaggtttacacaaaatgtggaagacgagccatgccggcaatgatgatgggatctgcagctgtttttatagactgtgatgactgctggaaattgcttcttgtcacaagaagaggtttaatgtatatatgggacctccataacaggacctgcattttgcaggactcattggctgctttggttgcatctccagatgagtcatcagcaaatcatgcaggtgcagtaaaggttatatctgctaaattctcaagatgtggttttcccttagttgtccttgccagccgtcatgcttttctttttgacatgagcatgaagtgctggttaaggattgctgatgattgttttccggcatcaaattttgccagctcatttatttttccccaagctggagagctaggcaagttgcagattgatgtaggcaagtttatggctagaaagcctatatggagcagggttacagatgatggtttgcagacacgtgcccatttagagacccagttggcagcttctttggctttgaagtcaccacaggagtaccgccaatgcctcctatcctacatacggtttctggcaagagaagcagatgaatcccgtctacgtgaggtttgtgagagcttcctaggtcctcccatgggcatgcttggatctgagtcatctacggatcccaaaagtccagcgtgggattctgatgttctcgggatgaagaagcaccaactcctcagggaagacatacttccatcgatggcatctaaccggaaagtccagcgtctgctcaacgagtttatggatctcctatcagagtatgaagctgctaagagcaaagttgacccaatggatatcacaccggcgctaccacaacaagcaccagaagccaatgccaacgtggtcacctcgtagctgcaccagttccgttgatagttccgttgctggcgacttactgacctctcggtaagtatgataggatagcaatcttggtaagtccttatatgaatcaatcaattagttgtgcttgtaactggtagattgtttagcgagggaggcgacctcaggcaaacattgatattgaacccgttagctgtaacgctgtgtaacagtagaagaaagaagctgaggtcgccaggtaatttattgttaaactgtaggaggccgggtaaactcatgcccttcttgttccaagctaccgtatgcagtggtggcccactggccgtgtgtattttggcgaaaacctgcgtcgtcaaaactggcattgacatcttttagaggaacaggaacaatgagcatttcggcggtgatgattgagcgggcacgccataaacatgtgatttggataattctttatgtagagcggcttttatatgtgtaaacagaaacagaaaatggtggcttaatccaatcgtcagttggagaggaaccggtgg

SEQ ID NO: 65368 - DNA, 3672 bp, Zea Mays
ctcaaaagtactaatcgtaaagcatgcagcttcattgtaaaggtatacgatttataagagagaaaaaaggacaaaaaagtaaattaaattgtcgacacatctctgcctttccttcacaagtgcacactttccaattcagttcaattttcattcgaattcgttttcgtttttcgttcttttttgtttttccccattctcacacgaacaagacgaacacgttcgtccccatcgccgtgttcttcgcgccgccgctgcccaccgatcgaatccgcccgccgcctcccaggtttggggcatatggcctcgtgggtttgggagtgtgatcgacgggcagtgtaatttaataattagctaggatgtcaagagatgatcacgttgaaatctaagtcttgaagagatgattgcggagaagccaaactggattcgtcacgagggcctacagatcttctccatcgacatccagcccggcggcctccgcttcgccactggcggcggcgaccagaaggttcgaatatggagcatgaaatctgtggacaagaataataatcacaatgattccagccaagggttgctagctacaatgcgtgaccattttggatcggtaaactgtgtgagatgggcaaggcatggccgctatctggcttctggatcagatgatcaggttatcctaattcatgagagaaaagctggttctggaacatctgagtttggtagtggggaacctccagatgtggaaaattggaaggttattatgaccttaagagggcatactgcggacgtggtagatcttaactggtcccctgatgattcaacattggctagtggtagcttggataatactgttcacatatggaacataaccaatggtatgtgcactgccgtcttgagagggcattccagcttggtcaagggtgttacctgggatcctattggctctttcatcgcaagccaatcagatgataagaccgttataatatggcgtacaagtgactggagtcttgctcacaagacagaaggccattgggaaaaatctcttggttcaacattttttaggcgacttgcgtggtcaccttgtggccacttcattactacgactcatggcttccagaaacctaggcattcagcccctgtgcttgaaagaggcgagtggtctgctacatttgactttctaggacataacgcacctatcgtggtggttaagtttaataactcaatgttccgtaagagtttctccaatggtcaagacacaaaagctgcaccagctggatgggccaatgggacatcaaagatatcatcaaaagaacagcaaccatataatgttattgctattggaagtcaggacagaacaattactgtttggacaacagcgagtgcacggccattgttcgttgctaagcattttttctctcaaagcgtggttgatttatcttggagccctgatggttattcactttttgcatgctccttggatggatctgttgccaacttccactttgaagcaaaggagcttggatacaagttaagtgattctgatctggatgaattgaagaggagcagatatggtgatgttagaggacggcaatcaaatctggctgaaagccctgcacagttactgctagaagaagcatcagcaaagcaatcggctagcaaaaaagggactccgattgtccagcaatttcaagcaccccaaaaactttctgcagatgtgcttaacccagctcctgttgtgcaaaatcagaaagctcctgaagctttacctgaagatgagaagaaatcatcagatcctgctgctgatggtatgaataaagttactcggttatctagtccagtgaagcagagagaataccggcgtcctgatggcaggaaaagaataatcccagaggctgttggatttccatccaaccaggataacatacccagccgttctcagaaccacgttatagatttttcatccttagatcagcgaatgaatgggataagaccatcttattgtagtagcagtaactgtaacaactctggagttaaggactgctctggtgtcacagcaagggctaacattacagaaagtcttgttattcaaaaagcttcaaccaatgctagcagtgatggaaggctgactgtagaacgcactggatctgttgttccaggctctttgaactgccctgcactttctatacatgtattagataagaaagacaatgaggattccttgccagtctgccttgaggcaaatcctgtagaacacgctgcaggtgatatgaatggtgtcggtggtgccttttcaacaaaaggaacagaaataaggtgtacaagaggaacagaaactctttggttggatcgtatatctgcaaaggttactgccttggcaggcaatacaaatttctgggctgttggctgtgaagatggttacctgcaggactcattggctgctttggttgcatctccagatgagtcatcagcaaatcatgcaggtgcagtaaaggttatatctgctaaattctcaagatgtggttttcccttagttgtccttgccagccgtcatgcttttctttttgacatgagcatgaagtgctggttaaggattgctgatgattgttttccggcatcaaattttgccagctcatttatttttccccaagctggagagctaggcaagttgcagattgatgtaggcaagtttatggctagaaagcctatatggagcagggttacagatgatggtttgcagacacgtgcccatttagagacccagttggcagcttctttggctttgaagtcaccacaggagtaccgccaatgcctcctatcctacatacggtttctggcaagagaagcagatgaatcccgtctacgtgaggtttgtgagagcttcctaggtcctcccatgggcatgcttggatctgagtcatctacggatcccaaaagtccagcgtgggattctgatgttctcgggatgaagaagcaccaactcctcagggaagacatacttccatcgatggcatctaaccggaaagtccagcgtctgctcaacgagtttatggatctcctatcagagtatgaagctgctaagagcaaagttgacccaatggatatcacaccggcgctaccacaacaagcaccagaagccaatgccaacgtggtcacctcgtagctgcaccagttccgttgatagttccgttgctggcgacttactgacctctcggtaagtatgataggatagcaatcttggtaagtccttatatgaatcaatcaattagttgtgcttgtaactggtagattgtttagcgagggaggcgacctcaggcaaacattgatattgaacccgttagctgtaacgctgtgtaacagtagaagaaagaagctgaggtcgccaggtaatttattgttaaactgtaggaggccgggtaaactcatgcccttcttgttccaagctaccgtatgcagtggtggcccactggccgtgtgtattttggcgaaaacctgcgtcgtcaaaactggcattgacatcttttagaggaacaggaacaatgagcatttcggcggtgatgattgagcgggcacgccataaacatgtgatttggataattctttatgtagagcggcttttatatgtgtaaacagaaacagaaaatggtggcttaatccaatcgtcagttggagaggaaccggtgg

SEQ ID NO: 65369 - DNA, 3533 bp, Zea Mays
aagcatgcagcttcattgtaaaggtatacgatttataagagagaaaaaaggacaaaaaagtaaattaaattgtcgacacatctctgcctttccttcacaagtgcacactttccaattcagttcaattttcattcgaattcgttttcgtttttcgttcttttttgtttttccccattctcacacgaacaagacgaacacgttcgtccccatcgccgtgttcttcgcgccgccgctgcccaccgatcgaatccgcccgccgcctcccagtaacctccggatccctactcctccaagcttctgtacatctcatcctattcgatttgtctctcgattgccatcatcagtcgcaacccagatatgagtttcactaccaaattctagggtttggggcatatggcctcgtgggtttgggagtgtgatcgacgggcagtgtaatttaataattagctaggatgtcaagagatgatcacgttgaaatctaagtcttgaagagatgattgcggagaagccaaactggattcgtcacgagggcctacagatcttctccatcgacatccagcccggcggcctccgcttcgccactggcggcggcgaccagaaggttcgaatatggagcatgaaatctgtggacaagaataataatcacaatgattccagccaagggttgctagctacaatgcgtgaccattttggatcggtaaactgtgtgagatgggcaaggcatggccgctatctggcttctggatcagatgatcaggttatcctaattcatgagagaaaagctggttctggaacatctgagtttggtagtggggaacctccagatgtggaaaattggaaggttattatgaccttaagagggcatactgcggacgtggtagatcttaactggtcccctgatgattcaacattggctagtggtagcttggataatactgttcacatatggaacataaccaatggtatgtgcactgccgtcttgagagggcattccagcttggtcaagggtgttacctgggatcctattggctctttcatcgcaagccaatcagatgataagaccgttataatatggcgtacaagtgactggagtcttgctcacaagacagaaggccattgggaaaaatctcttggttcaacattttttaggcgacttgcgtggtcaccttgtggccacttcattactacgactcatggcttccagaaacctaggcattcagcccctgtgcttgaaagaggcgagtggtctgctacatttgactttctaggacataacgcacctatcgtggtggttaagtttaataactcaatgttccgtaagagtttctccaatggtcaagacacaaaagctgcaccagctggatgggccaatgggacatcaaagatatcatcaaaagaacagcaaccatataatgttattgctattggaagtcaggacagaacaattactgtttggacaacagcgagtgcacggccattgttcgttgctaagcattttttctctcaaagcgtggttgatttatcttggagccctgatggttattcactttttgcatgctccttggatggatctgttgccaacttccactttgaagcaaaggagcttggatacaagttaagtgattctgatctggatgaattgaagaggagcagatatggtgatgttagaggacggcaatcaaatctggctgaaagccctgcacagttactgctagaagaagcatcagcaaagcaatcggctagcaaaaaagggactccgattgtccagcaatttcaagcaccccaaaaactttctgcagatgtgcttaacccagctcctgttgtgcaaaatcagaaagctcctgaagctttacctgaagatgagaagaaatcatcagatcctgctgctgatggtatgaataaagttactcggttatctagtccagtgaagcagagagaataccggcgtcctgatggcaggaaaagaataatcccagaggctgttggatttccatccaaccaggataacatacccagccgttctcagaaccacgttatagatttttcatccttagatcagcgaatgaatgggataagaccatcttattgtagtagcagtaactgtaacaactctggagttaaggactgctctggtgtcacagcaagggctaacattacagaaagtcttgttattcaaaaagcttcaaccaatgctagcagtgatggaaggctgactgtagaacgcactggatctgttgttccaggctctttgaactgccctgcactttctatacatgtattagataagaaagacaatgaggattccttgccagtctgccttgaggcaaatcctgtagaacacgctgcaggtgatatgaatggtgtcggtggtgccttttcaacaaaaggaacagaaataaggtgtacaagaggaacagaaactctttggttggatcgtatatctgcaaaggttactgccttggcaggcaatacaaatttctgggctgttggctgtgaagatggttacctgcaggactcattggctgctttggttgcatctccagatgagtcatcagcaaatcatgcagggttacagatgatggtttgcagacacgtgcccatttagagacccagttggcagcttctttggctttgaagtcaccacaggagtaccgccaatgcctcctatcctacatacggtttctggcaagagaagcagatgaatcccgtctacgtgaggtttgtgagagcttcctaggtcctcccatgggcatgcttggatctgagtcatctacggatcccaaaagtccagcgtgggattctgatgttctcgggatgaagaagcaccaactcctcagggaagacatacttccatcgatggcatctaaccggaaagtccagcgtctgctcaacgagtttatggatctcctatcagagtatgaagctgctaagagcaaagttgacccaatggatatcacaccggcgctaccacaacaagcaccagaagccaatgccaacgtggtcacctcgtagctgcaccagttccgttgatagttccgttgctggcgacttactgacctctcggtaagtatgataggatagcaatcttggtaagtccttatatgaatcaatcaattagttgtgcttgtaactggtagattgtttagcgagggaggcgacctcaggcaaacattgatattgaacccgttagctgtaacgctgtgtaacagtagaagaaagaagctgaggtcgccaggtaatttattgttaaactgtaggaggccgggtaaactcatgcccttcttgttccaagctaccgtatgcagtggtggcccactggccgtgtgtattttggcgaaaacctgcgtcgtcaaaactggcattgacatcttttagaggaacaggaacaatgagcatttcggcggtgatgattgagcgggcacgccataaacatgtgatttggataattctttatgtagagcggcttttatatgtgtaaacagaaacagaaaatggtggcttaatccaatcgtcagttggagaggaaccggtgg

SEQ ID NO: 65370 - DNA, 3721 bp, Zea Mays
aaaagtaaattaaattgtcgacacatctctgcctttccttcacaagtgcacactttccaattcagttcaattttcattcgaattcgttttcgtttttcgttcttttttgtttttccccattctcacacgaacaagacgaacacgttcgtccccatcgccgtgttcttcgcgccgccgctgcccaccgatcgaatccgcccgccgcctcccagtaacctccggatccctactcctccaagcttctgtacatctcatcctattcgatttgtctctcgattgccatcatcagtcgcaacccagatatgagtttcactaccaaattctagggtttggggcatatggcctcgtgggtttgggagtgtgatcgacgggcagtgtaatttaataattagctaggatgtcaagagatgatcacgttgaaatctaagtcttgaagagatgattgcggagaagccaaactggattcgtcacgagggcctacagatcttctccatcgacatccagcccggcggcctccgcttcgccactggcggcggcgaccagaaggttcgaatatggagcatgaaatctgtggacaagaataataatcacaatgattccagccaagggttgctagctacaatgcgtgaccattttggatcggtaaactgtgtgagatgggcaaggcatggccgctatctggcttctggatcagatgatcaggttatcctaattcatgagagaaaagctggttctggaacatctgagtttggtagtggggaacctccagatgtggaaaattggaaggttattatgaccttaagagggcatactgcggacgtggtagatcttaactggtcccctgatgattcaacattggctagtggtagcttggataatactgttcacatatggaacataaccaatggtatgtgcactgccgtcttgagagggcattccagcttggtcaagggtgttacctgggatcctattggctctttcatcgcaagccaatcagatgataagaccgttataatatggcgtacaagtgactggagtcttgctcacaagacagaaggccattgggaaaaatctcttggttcaacattttttaggcgacttgcgtggtcaccttgtggccacttcattactacgactcatggcttccagaaacctaggcattcagcccctgtgcttgaaagaggcgagtggtctgctacatttgactttctaggacataacgcacctatcgtggtggttaagtttaataactcaatgttccgtaagagtttctccaatggtcaagacacaaaagctgcaccagctggatgggccaatgggacatcaaagatatcatcaaaagaacagcaaccatataatgttattgctattggaagtcaggacagaacaattactgtttggacaacagcgagtgcacggccattgttcgttgctaagcattttttctctcaaagcgtggttgatttatcttggagccctgatggttattcactttttgcatgctccttggatggatctgttgccaacttccactttgaagcaaaggagcttggatacaagttaagtgattctgatctggatgaattgaagaggagcagatatggtgatgttagaggacggcaatcaaatctggctgaaagccctgcacagttactgctagaagaagcatcagcaaagcaatcggctagcaaaaaagggactccgattgtccagcaatttcaagcaccccaaaaactttctgcagatgtgcttaacccagctcctgttgtgcaaaatcagaaagctcctgaagctttacctgaagatgagaagaaatcatcagatcctgctgctgatggtatgaataaagttactcggttatctagtccagtgaagcagagagaataccggcgtcctgatggcaggaaaagaataatcccagaggctgttggatttccatccaaccaggataacatacccagccgttctcagaaccacgttatagatttttcatccttagatcagcgaatgaatgggataagaccatcttattgtagtagcagtaactgtaacaactctggagttaaggactgctctggtgtcacagcaagggctaacattacagaaagtcttgttattcaaaaagcttcaaccaatgctagcagtgatggaaggctgactgtagaacgcactggatctgttgttccaggctctttgaactgccctgcactttctatacatgtattagataagaaagacaatgaggattccttgccagtctgccttgaggcaaatcctgtagaacacgctgcaggtgatatgaatggtgtcggtggtgccttttcaacaaaaggaacagaaataaggtgtacaagaggaacagaaactctttggttggatcgtatatctgcaaaggttactgccttggcaggcaatacaaatttctgggctgttggctgtgaagatggttacctgcaggtttacacaaaatgtggaagacgagccatgccggcaatgatgatgggatctgcagctgtttttatagactgtgatgactgctggaaattgcttcttgtcacaagaagaggtttaatgtatatatgggacctccataacaggacctgcattttgcaggactcattggctgctttggttgcatctccagatgagtcatcagcaaatcatgcagctcatttatttttccccaagctggagagctaggcaagttgcagattgatgtaggcaagtttatggctagaaagcctatatggagcagggttacagatgatggtttgcagacacgtgcccatttagagacccagttggcagcttctttggctttgaagtcaccacaggagtaccgccaatgcctcctatcctacatacggtttctggcaagagaagcagatgaatcccgtctacgtgaggtttgtgagagcttcctaggtcctcccatgggcatgcttggatctgagtcatctacggatcccaaaagtccagcgtgggattctgatgttctcgggatgaagaagcaccaactcctcagggaagacatacttccatcgatggcatctaaccggaaagtccagcgtctgctcaacgagtttatggatctcctatcagagtatgaagctgctaagagcaaagttgacccaatggatatcacaccggcgctaccacaacaagcaccagaagccaatgccaacgtggtcacctcgtagctgcaccagttccgttgatagttccgttgctggcgacttactgacctctcggtaagtatgataggatagcaatcttggtaagtccttatatgaatcaatcaattagttgtgcttgtaactggtagattgtttagcgagggaggcgacctcaggcaaacattgatattgaacccgttagctgtaacgctgtgtaacagtagaagaaagaagctgaggtcgccaggtaatttattgttaaactgtaggaggccgggtaaactcatgcccttcttgttccaagctaccgtatgcagtggtggcccactggccgtgtgtattttggcgaaaacctgcgtcgtcaaaactggcattgacatcttttagaggaacaggaacaatgagcatttcggcggtgatgattgagcgggcacgccataaacatgtgatttggataattctttatgtagagcggcttttatatgtgtaaacagaaacagaaaatggtggcttaatccaatcgtcagttggagaggaaccggtgg

SEQ ID NO: 65371 - DNA, 3865 bp, Zea Mays
aaaagtaaattaaattgtcgacacatctctgcctttccttcacaagtgcacactttccaattcagttcaattttcattcgaattcgttttcgtttttcgttcttttttgtttttccccattctcacacgaacaagacgaacacgttcgtccccatcgccgtgttcttcgcgccgccgctgcccaccgatcgaatccgcccgccgcctcccagtaacctccggatccctactcctccaagcttctgtacatctcatcctattcgatttgtctctcgattgccatcatcagtcgcaacccagatatgagtttcactaccaaattctagggtttggggcatatggcctcgtgggtttgggagtgtgatcgacgggcagtgtaatttaataattagctaggatgtcaagagatgatcacgttgaaatctaagtcttgaagagatgattgcggagaagccaaactggattcgtcacgagggcctacagatcttctccatcgacatccagcccggcggcctccgcttcgccactggcggcggcgaccagaaggttcgaatatggagcatgaaatctgtggacaagaataataatcacaatgattccagccaagggttgctagctacaatgcgtgaccattttggatcggtaaactgtgtgagatgggcaaggcatggccgctatctggcttctggatcagatgatcaggttatcctaattcatgagagaaaagctggttctggaacatctgagtttggtagtggggaacctccagatgtggaaaattggaaggttattatgaccttaagagggcatactgcggacgtgatcttaactggtcccctgatgattcaacattggctagtggtagcttggataatactgttcacatatggaacataaccaatggtatgtgcactgccgtcttgagagggcattccagcttggtcaagggtgttacctgggatcctattggctctttcatcgcaagccaatcagatgataagaccgttataatatggcgtacaagtgactggagtcttgctcacaagacagaaggccattgggaaaaatctcttggttcaacattttttaggcgacttgcgtggtcaccttgtggccacttcattactacgactcatggcttccagaaacctaggcattcagcccctgtgcttgaaagaggcgagtggtctgctacatttgactttctaggacataacgcacctatcgtggtggttaagtttaataactcaatgttccgtaagagtttctccaatggtcaagacacaaaagctgcaccagctggatgggccaatgggacatcaaagatatcatcaaaagaacagcaaccatataatgttattgctattggaagtcaggacagaacaattactgtttggacaacagcgagtgcacggccattgttcgttgctaagcattttttctctcaaagcgtggttgatttatcttggagccctgatggttattcactttttgcatgctccttggatggatctgttgccaacttccactttgaagcaaaggagcttggatacaagttaagtgattctgatctggatgaattgaagaggagcagatatggtgatgttagaggacggcaatcaaatctggctgaaagccctgcacagttactgctagaagaagcatcagcaaagcaatcggctagcaaaaaagggactccgattgtccagcaatttcaagcaccccaaaaactttctgcagatgtgcttaacccagctcctgttgtgcaaaatcagaaagctcctgaagctttacctgaagatgagaagaaatcatcagatcctgctgctgatggtatgaataaagttactcggttatctagtccagtgaagcagagagaataccggcgtcctgatggcaggaaaagaataatcccagaggctgttggatttccatccaaccaggataacatacccagccgttctcagaaccacgttatagatttttcatccttagatcagcgaatgaatgggataagaccatcttattgtagtagcagtaactgtaacaactctggagttaaggactgctctggtgtcacagcaagggctaacattacagaaagtcttgttattcaaaaagcttcaaccaatgctagcagtgatggaaggctgactgtagaacgcactggatctgttgttccaggctctttgaactgccctgcactttctatacatgtattagataagaaagacaatgaggattccttgccagtctgccttgaggcaaatcctgtagaacacgctgcaggtgatatgaatggtgtcggtggtgccttttcaacaaaaggaacagaaataaggtgtacaagaggaacagaaactctttggttggatcgtatatctgcaaaggttactgccttggcaggcaatacaaatttctgggctgttggctgtgaagatggttacctgcaggtttacacaaaatgtggaagacgagccatgccggcaatgatgatgggatctgcagctgtttttatagactgtgatgactgctggaaattgcttcttgtcacaagaagaggtttaatgtatatatgggacctccataacaggacctgcattttgcaggactcattggctgctttggttgcatctccagatgagtcatcagcaaatcatgcaggtgcagtaaaggttatatctgctaaattctcaagatgtggttttcccttagttgtccttgccagccgtcatgcttttctttttgacatgagcatgaagtgctggttaaggattgctgatgattgttttccggcatcaaattttgccagctcatttatttttccccaagctggagagctaggcaagttgcagattgatgtaggcaagtttatggctagaaagcctatatggagcagggttacagatgatggtttgcagacacgtgcccatttagagacccagttggcagcttctttggctttgaagtcaccacaggagtaccgccaatgcctcctatcctacatacggtttctggcaagagaagcagatgaatcccgtctacgtgaggtttgtgagagcttcctaggtcctcccatgggcatgcttggatctgagtcatctacggatcccaaaagtccagcgtgggattctgatgttctcgggatgaagaagcaccaactcctcagggaagacatacttccatcgatggcatctaaccggaaagtccagcgtctgctcaacgagtttatggatctcctatcagagtatgaagctgctaagagcaaagttgacccaatggatatcacaccggcgctaccacaacaagcaccagaagccaatgccaacgtggtcacctcgtagctgcaccagttccgttgatagttccgttgctggcgacttactgacctctcggtaagtatgataggatagcaatcttggtaagtccttatatgaatcaatcaattagttgtgcttgtaactggtagattgtttagcgagggaggcgacctcaggcaaacattgatattgaacccgttagctgtaacgctgtgtaacagtagaagaaagaagctgaggtcgccaggtaatttattgttaaactgtaggaggccgggtaaactcatgcccttcttgttccaagctaccgtatgcagtggtggcccactggccgtgtgtattttggcgaaaacctgcgtcgtcaaaactggcattgacatcttttagaggaacaggaacaatgagcatttcggcggtgatgattgagcgggcacgccataaacatgtgatttggataattctttatgtagagcggcttttatatgtgtaaacagaaacagaaaatggtggcttaatccaatcgtcagttggagaggaaccggtgg

SEQ ID NO: 65372 - DNA, 3565 bp, Zea Mays
aaaagtaaattaaattgtcgacacatctctgcctttccttcacaagtgcacactttccaattcagttcaattttcattcgaattcgttttcgtttttcgttcttttttgtttttccccattctcacacgaacaagacgaacacgttcgtccccatcgccgtgttcttcgcgccgccgctgcccaccgatcgaatccgcccgccgcctcccagtaacctccggatccctactcctccaagcttctgtacatctcatcctattcgatttgtctctcgattgccatcatcagtcgcaacccagatatgagtttcactaccaaattctagggtttggggcatatggcctcgtgggtttgggagtgtgatcgacgggcagtgtaatttaataattagctaggatgtcaagagatgatcacgttgaaatctaagtcttgaagagatgattgcggagaagccaaactggattcgtcacgagggcctacagatcttctccatcgacatccagcccggcggcctccgcttcgccactggcggcggcgaccagaaggttcgaatatggagcatgaaatctgtggacaagaataataatcacaatgattccagccaagggttgctagctacaatgcgtgaccattttggatcggtaaactgtgtgagatgggcaaggcatggccgctatctggcttctggatcagatgatcaggttatcctaattcatgagagaaaagctggttctggaacatctgagtttggtagtggggaacctccagatgtggaaaattggaaggttattatgaccttaagagggcatactgcggacgtggtagatcttaactggtcccctgatgattcaacattggctagtggtagcttggataatactgttcacatatggaacataaccaatggtatgtgcactgccgtcttgagagggcattccagcttggtcaagggtgttacctgggatcctattggctctttcatcgcaagccaatcagatgataagaccgttataatatggcgtacaagtgactggagtcttgctcacaagacagaaggccattgggaaaaatctcttggttcaacattttttaggcgacttgcgtggtcaccttgtggccacttcattactacgactcatggcttccagaaacctaggcattcagcccctgtgcttgaaagaggcgagtggtctgctacatttgactttctaggacataacgcacctatcgtggtggttaagtttaataactcaatgttccgtaagagtttctccaatggtcaagacacaaaagctgcaccagctggatgggccaatgggacatcaaagatatcatcaaaagaacagcaaccatataatgttattgctattggaagtcaggacagaacaattactgtttggacaacagcgagtgcacggccattgttcgttgctaagcattttttctctcaaagcgtggttgatttatcttggagccctgatggttattcactttttgcatgctccttggatggatctgttgccaacttccactttgaagcaaaggagcttggatacaagttaagtgattctgatctggatgaattgaagaggagcagatatggtgatgttagaggacggcaatcaaatctggctgaaagccctgcacagttactgctagaagaagcatcagcaaagcaatcggctagcaaaaaagggactccgattgtccagcaatttcaagcaccccaaaaactttctgcagatgtgcttaacccagctcctgttgtgcaaaatcagaaagctcctgaagctttacctgaagatgagaagaaatcatcagatcctgctgctgatggtatgaataaagttactcggttatctagtccagtgaagcagagagaataccggcgtcctgatggcaggaaaagaataatcccagaggctgttggatttccatccaaccaggataacatacccagccgttctcagaaccacgttatagatttttcatccttagatcagcgaatgaatgggataagaccatcttattgtagtagcagtaactgtaacaactctggagttaaggactgctctggtgtcacagcaagggctaacattacagaaagtcttgttattcaaaaagcttcaaccaatgctagcagtgatggaaggctgactgtagaacgcactggatctgttgttccaggctctttgaactgccctgcactttctatacatgtattagataagaaagacaatgaggattccttgccagtctgccttgaggcaaatcctgtagaacacgctgcaggtgatatgaatggtgtcggtggtgccttttcaacaaaaggaacagaaataaggtgtacaagaggaacagaaactctttggttggatcgtatatctgcaaaggttactgccttggcaggcaatacaaatttctgggctgttggctgtgaagatggttacctgcaggactcattggctgctttggttgcatctccagatgagtcatcagcaaatcatgcagctcatttatttttccccaagctggagagctaggcaagttgcagattgatgtaggcaagtttatggctagaaagcctatatggagcagggttacagatgatggtttgcagacacgtgcccatttagagacccagttggcagcttctttggctttgaagtcaccacaggagtaccgccaatgcctcctatcctacatacggtttctggcaagagaagcagatgaatcccgtctacgtgaggtttgtgagagcttcctaggtcctcccatgggcatgcttggatctgagtcatctacggatcccaaaagtccagcgtgggattctgatgttctcgggatgaagaagcaccaactcctcagggaagacatacttccatcgatggcatctaaccggaaagtccagcgtctgctcaacgagtttatggatctcctatcagagtatgaagctgctaagagcaaagttgacccaatggatatcacaccggcgctaccacaacaagcaccagaagccaatgccaacgtggtcacctcgtagctgcaccagttccgttgatagttccgttgctggcgacttactgacctctcggtaagtatgataggatagcaatcttggtaagtccttatatgaatcaatcaattagttgtgcttgtaactggtagattgtttagcgagggaggcgacctcaggcaaacattgatattgaacccgttagctgtaacgctgtgtaacagtagaagaaagaagctgaggtcgccaggtaatttattgttaaactgtaggaggccgggtaaactcatgcccttcttgttccaagctaccgtatgcagtggtggcccactggccgtgtgtattttggcgaaaacctgcgtcgtcaaaactggcattgacatcttttagaggaacaggaacaatgagcatttcggcggtgatgattgagcgggcacgccataaacatgtgatttggataattctttatgtagagcggcttttatatgtgtaaacagaaacagaaaatggtggcttaatccaatcgtcagttggagaggaaccggtgg

SEQ ID NO: 65373 - DNA, 3216 bp, Zea Mays
tatttggaggttaaggattgcaagtaggcaggggtggacttggtgccaggttcgaatatggagcatgaaatctgtggacaagaataataatcacaatgattccagccaagggttgctagctacaatgcgtgaccattttggatcggtaaactgtgtgagatgggcaaggcatggccgctatctggcttctggatcagatgatcaggttatcctaattcatgagagaaaagctggttctggaacatctgagtttggtagtggggaacctccagatgtggaaaattggaaggttattatgaccttaagagggcatactgcggacgtggtagatcttaactggtcccctgatgattcaacattggctagtggtagcttggataatactgttcacatatggaacataaccaatggtatgtgcactgccgtcttgagagggcattccagcttggtcaagggtgttacctgggatcctattggctctttcatcgcaagccaatcagatgataagaccgttataatatggcgtacaagtgactggagtcttgctcacaagacagaaggccattgggaaaaatctcttggttcaacattttttaggcgacttgcgtggtcaccttgtggccacttcattactacgactcatggcttccagaaacctaggcattcagcccctgtgcttgaaagaggcgagtggtctgctacatttgactttctaggacataacgcacctatcgtggtggttaagtttaataactcaatgttccgtaagagtttctccaatggtcaagacacaaaagctgcaccagctggatgggccaatgggacatcaaagatatcatcaaaagaacagcaaccatataatgttattgctattggaagtcaggacagaacaattactgtttggacaacagcgagtgcacggccattgttcgttgctaagcattttttctctcaaagcgtggttgatttatcttggagccctgatggttattcactttttgcatgctccttggatggatctgttgccaacttccactttgaagcaaaggagcttggatacaagttaagtgattctgatctggatgaattgaagaggagcagatatggtgatgttagaggacggcaatcaaatctggctgaaagccctgcacagttactgctagaagaagcatcagcaaagcaatcggctagcaaaaaagggactccgattgtccagcaatttcaagcaccccaaaaactttctgcagatgtgcttaacccagctcctgttgtgcaaaatcagaaagctcctgaagctttacctgaagatgagaagaaatcatcagatcctgctgctgatggtatgaataaagttactcggttatctagtccagtgaagcagagagaataccggcgtcctgatggcaggaaaagaataatcccagaggctgttggatttccatccaaccaggataacatacccagccgttctcagaaccacgttatagatttttcatccttagatcagcgaatgaatgggataagaccatcttattgtagtagcagtaactgtaacaactctggagttaaggactgctctggtgtcacagcaagggctaacattacagaaagtcttgttattcaaaaagcttcaaccaatgctagcagtgatggaaggctgactgtagaacgcactggatctgttgttccaggctctttgaactgccctgcactttctatacatgtattagataagaaagacaatgaggattccttgccagtctgccttgaggcaaatcctgtagaacacgctgcaggtgatatgaatggtgtcggtggtgccttttcaacaaaaggaacagaaataaggtgtacaagaggaacagaaactctttggttggatcgtatatctgcaaaggttactgccttggcaggcaatacaaatttctgggctgttggctgtgaagatggttacctgcaggactcattggctgctttggttgcatctccagatgagtcatcagcaaatcatgcaggtgcagtaaaggttatatctgctaaattctcaagatgtggttttcccttagttgtccttgccagccgtcatgcttttctttttgacatgagcatgaagtgctggttaaggattgctgatgattgttttccggcatcaaattttgccagctcatttatttttccccaagctggagagctaggcaagttgcagattgatgtaggcaagtttatggctagaaagcctatatggagcagggttacagatgatggtttgcagacacgtgcccatttagagacccagttggcagcttctttggctttgaagtcaccacaggagtaccgccaatgcctcctatcctacatacggtttctggcaagagaagcagatgaatcccgtctacgtgaggtttgtgagagcttcctaggtcctcccatgggcatgcttggatctgagtcatctacggatcccaaaagtccagcgtgggattctgatgttctcgggatgaagaagcaccaactcctcagggaagacatacttccatcgatggcatctaaccggaaagtccagcgtctgctcaacgagtttatggatctcctatcagagtatgaagctgctaagagcaaagttgacccaatggatatcacaccggcgctaccacaacaagcaccagaagccaatgccaacgtggtcacctcgtagctgcaccagttccgttgatagttccgttgctggcgacttactgacctctcggtaagtatgataggatagcaatcttggtaagtccttatatgaatcaatcaattagttgtgcttgtaactggtagattgtttagcgagggaggcgacctcaggcaaacattgatattgaacccgttagctgtaacgctgtgtaacagtagaagaaagaagctgaggtcgccaggtaatttattgttaaactgtaggaggccgggtaaactcatgcccttcttgttccaagctaccgtatgcagtggtggcccactggccgtgtgtattttggcgaaaacctgcgtcgtcaaaactggcattgacatcttttagaggaacaggaacaatgagcatttcggcggtgatgattgagcgggcacgccataaacatgtgatttggataattctttatgtagagcggcttttatatgtgtaaacagaaacagaaaatggtggcttaatccaatcgtcagttggagaggaaccggtgg

SEQ ID NO: 65374 - DNA, 1367 bp, Zea Mays
actcactttatttttagtaggccatagaggaagtacaaattttgaagtacaaccatttctattctgtgtttggcagttttagcacaattcaaacaactcattccggcgttcacaagtcgacctccatttactccacaaaacgagagccttccagacgaagtgtccgcccctccatgtcggcgccgtaggaggggttcaatcgccaacatccagatgcggcggaggagactcgccggcacgctcccactcgccctcccgtggcttcgccccctgatcggcctgtacctccacccagtattgcgtcgtcttcgtgggggatgaggcggcgctggtcggcgacaacgacggcgactacagtcctcgctccatagcctccctctctgcaccgcgtcaccgcttctcacatgtatctgtttctgctgcatttgaaggacaacttcaggactgcaatggcgcttcaatataaaaaaagatttagataaaacatgtgaggttatatggtttctttattactttttttaaaaaaagtttgccacctacatcagtgttttttattgcaacgagttgaatactaatgttttcccttacctctttatcacataaacattttattactcccccgatcattctatttactctaaagaaaacaaaaacaggacaacgctgcaagataggtatgtatttcaatcttctaaaattatgtttctttctccatcagggctttgtaggttatattcattttaattgttccttttaaagtcatacacatatcttaagtaaatcgaggcacaccgctccatgtttcatcagctctaaactacttttttacttctatagacgtgctcaaataattccatgtttgctattattttgtaggctagtctccccgagaacaaggaattgctagaatcccttaactcggaacaaaaagacaatggatgttacgtttatggagaatgatggtgatggaataagggaaaaacacagtggcaaagagagtcaagtacagtttatttgatgatcatcaaggaggaagagattttaaaaaggacaccatgacaagcagcaggcaaacagcttattgaagcatgtaactagcaccgcaagtttgcaaggccatgcggatagcttgttggatgcaacagtcattgcaccctctgatcattgagagatctgagggttcctatgtctatgacattaatgggaacaagtatctggactctcttgcaggattatggtgcacagctttaggtggtagcgagcctcgattagtcaaagcagcaactgagggtgcatggttatgttgtgcgataagatccatctatgaattgtttgtgcttctacatttaggaacaatgggcaattag

SEQ ID NO: 65375 - DNA, 1987 bp, Zea Mays
ggcagttttagcacaattcaaacaactcattccggcgttcacaagtcgacctccatttactccacaaaacgagagccttccagacgaagtgtccgcccctccatgtcggcgccgtaggaggggttcaatcgccaacatccagatgcggcggaggagactcgccggcacgctcccactcgccctcccgtggcttcgccccctgatcggcctgtacctccacccagtattgcgtcgtcttcgtgggggatgaggcggcgctggtcggcgacaacgacggcgactacagtcctcgctccatagcctccctctctgcaccgcgtcaccgcttctcacatgtatctgtttctgctgcatttgaaggacaacttcaggactgcaatggcgcttcaatataaaaaaagatttagataaaacatgtgaggttatatggtttctttattactttttttaaaaaaagtttgccacctacatcagtgttttttattgcaacgagttgaatactaatgttttcccttacctctttatcacataaacattttattactcccccgatcattctatttactctaaagaaaacaaaaacaggacaacgctgcaagataggtatgtatttcaatcttctaaaattatgtttctttctccatcagggctttgtaggttatattcattttaattgttccttttaaagtcatacacatatcttaagtaaatcgaggcacaccgctccatgtttcatcagctctaaactacttttttacttctatagacgtgctcaaataattccatgtttgctattattttgtaggctagtctccccgagaacaaggaattgctagaatcccttaactcggaacaaaaagacaatggatgttacgtttatggagaatgatggtgatggaataagggaaaaacacagtggcaaagagagtcaagtacagtttatttgatgatcatcaaggaggaagagattttaaaaaggacaccatgacaagcagcaggcaaacagcttattgaagcatgtaactagcaccgcaagtttgcaaggccatgcggatagcttgttggatgcaacagtcattgcaccctctgatcattgagagatctgagggttcctatgtctatgacattaatgggaacaagtatctggactctcttgcaggattatggtgcacagctttagtgcagagcaatccaccacaaccacgacgcgaaggactccaagctacaatttctgcatcactaaaacaaaaacacaacagtaatgcatccaaggtgctcactcaggtccttctgttctcttaaaattttatatgtgtaaaatatcatgctgactgtagttaataatcaagtgcattagtcctaggaaagctttgggcatttggtgaggagcgcaagcaaaatacggcaaaaacatcatggctggtgtctaaatttgtttccaatcttactatcactaatgcgttgcccttgcactattgggctcaccttgccatgcatgctggggcagtgcagttgtgcaggcttggagctgaagtttgggagctgaaggcaaagaggcagggactatgtgcagaaataataaataatgattagatcagtctaggctatacatgcttcccattgtatgaatttttgtgctataatatttttccttccccttctttgaaatgcgatatttgcacatctcttctcaactttgcattacttattcctgtcattttgtatatattaacctgttatattttctatgcttcattttttcagttctgaacctggaacactatgaagaagcaagggcttgctacatatggatatttgttttgcctattggtttatttaggatctagatcaccgatgactttgagtcatatgtaaatatatttttatcataccaaaagtgtctcgaacatatattatatatgaaactatggatcaacttcttgtaatgcaattattgatttttaatatatattattttttcttcttt

SEQ ID NO: 65376 - DNA, 1581 bp, Zea Mays
ggcagttttagcacaattcaaacaactcattccggcgttcacaagtcgacctccatttactccacaaaacgagagccttccagacgaagtgtccgcccctccatgtcggcgccgtaggaggggttcaatcgccaacatccagatgcggcggaggagactcgccggcacgctcccactcgccctcccgtggcttcgccccctgatcggcctgtacctccacccagtattgcgtcgtcttcgtgggggatgaggcggcgctggtcggcgacaacgacggcgactacagtcctcgctccatagcctccctctctgcaccgcgtcaccgcttctcacatgtatctgtttctgctgcatttgaaggacaacttcaggactgcaatggcgcttcaatataaaaaaagatttagataaaacatgtgaggttatatggtttctttattactttttttaaaaaaagtttgccacctacatcagtgttttttattgcaacgagttgaatactaatgttttcccttacctctttatcacataaacattttattactcccccgatcattctatttactctaaagaaaacaaaaacaggacaacgctgcaagataggtatgtatttcaatcttctaaaattatgtttctttctccatcagggctttgtaggttatattcattttaattgttccttttaaagtcatacacatatcttaagtaaatcgaggcacaccgctccatgtttcatcagctctaaactacttttttacttctatagacgtgctcaaataattccatgtttgctattattttgtaggctagtctccccgagaacaaggaattgctagaatcccttaactcggaacaaaaagacaatggatgttacgtttatggagaatggtcctttttattttcttgcaaggaaacaagtttaagcacttaaaaaggctggaagggaatctaaaatggatcaccactttggctttttcagatggtgatggaataagggaaaaacacagtggcaaagagagtcaagtacagtttatttgatgatcatcaaggaggaagagattttaaaaaggacaccatgacaagcagcaggcaaacagcttattgaagcatgtaactagcaccgcaagtttgcaaggccatgcggatagcttgttggatgcaacagtcattgcaccctctgatcattgagagatctgagggttcctatgtctatgacattaatgggaacaagtatctggactctcttgcaggattatggtgcacagctttagagcaatccaccacaaccacgacgcgaaggactccaagctacaatttctgcatcactaaaacaaaaacacaacagtaatgcatccaagttctgaacctggaacactatgaagaagcaagggcttgctacatatggatatttgttttgcctattggtttatttaggatctagatcaccgatgactttgagtcatatgtaaatatatttttatcataccaaaagtgtctcgaacatatattatatatgaaactatggatcaacttcttgtaatgcaattattgatttttaatatatattattttttcttcttt

SEQ ID NO: 65377 - DNA, 1282 bp, Zea Mays
ctcattccggcgttcacaagtcgacctccatttactccacaaaacgagagccttccagacgaagtgtccgcccctccatgtcggcgccgtaggaggggttcaatcgccaacatccagatgcggcggaggagactcgccggcacgctcccactcgccctcccgtggcttcgccccctgatcggcctgtacctccacccagtattgcgtcgtcttcgtgggggatgaggcggcgctggtcggcgacaacgacggcgactacagtcctcgctccatagcctccctctctgcaccgcgtcaccgcttctcacatgtatctgtttctgctgcatttgaaggacaacttcaggactgcaatggcgcttcaatataaaaaaagatttagataaaacatgtgaggttatatggtttctttattactttttttaaaaaaagtttgccacctacatcagtgttttttattgcaacgagttgaatactaatgttttcccttacctctttatcacataaacattttattactcccccgatcattctatttactctaaagaaaacaaaaacaggacaacgctgcaagataggtatgtatttcaatcttctaaaattatgtttctttctccatcagggctttgtaggttatattcattttaattgttccttttaaagtcatacacatatcttaagtaaatcgaggcacaccgctccatgtttcatcagctctaaactacttttttacttctatagacgtgctcaaataattccatgtttgctattattttgtaggctagtctccccgagaacaaggaattgctagaatcccttaactcggaacaaaaagacaatggatatggtgatggaataagggaaaaacacagtggcaaagagagtcaagtacagtttatttgatgatcatcaaggaggaagagattaatatttcttatttgtaggaggaagagattttaaaaaggacaccatgacaagcagcaggcaaacagcttattgaagcatgtaactagcaccgcaagtttgcaaggccatgcggatagcttgttggatgcaacagtcattgcaccctctgatcattgagagatctgagggttcctatgtctatgacattaatgggaacaagtatctggactctcttgcaggattatggtgcacagctttaggtggtagcgagcctcgattagtcaaagcagcaactgagggtgcatggttatgttgtgcgataagatccatctatgaattgtttgtgcttctacatttaggaacaatgggcaattag

SEQ ID NO: 65378 - DNA, 985 bp, Zea Mays
gtccgcccctccatgtcggcgccgtaggaggggttcaatcgccaacatccagatgcggcggaggagactcgccggcacgctcccactcgccctcccgtggcttcgccccctgatcggcctgtacctccacccagtattgcgtcgtcttcgtgggggatgaggcggcgctggtcggcgacaacgacggcgactacagtcctcgctccatagcctccctctctgcaccgcgtcaccgcttctcacatgtatctgtttctgctgcatttgaaggacaacttcaggactgcaatggcgcttcaatataaaaaaagatttagataaaacatgtgaggttatatggtttctttattactttttttaaaaaaagtttgccacctacatcagtgttttttattgcaacgagttgaatactaatgttttcccttacctctttatcacataaacattttattactcccccgatcattctatttactctaaagaaaacaaaaacaggacaacgctgcaagataggctagtctccccgagaacaaggaattgctagaatcccttaactcggaacaaaaagacaatggatatggtgatggaataagggaaaaacacagtggcaaagagagtcaagtacagtttatttgatgatcatcaaggaggaagagattttaaaaaggacaccatgacaagcagcaggcaaacagcttattgaagcatgtaactagcaccgcaagtttgcaaggccatgcggatagcttgttggatgcaacagtcattgcaccctctgatcattgagagatctgagggttcctatgtctatgacattaatgggaacaagtatctggactctcttgcaggattatggtgcacagctttaggtggtagcgagcctcgattagtcaaagcagcaactgagggtgcatggttatgttgtgcgataagatccatctatgaattgtttgtgcttctacatttaggaacaatgggcaattag

SEQ ID NO: 65379 - DNA, 2793 bp, Zea Mays
caataaacataacgatatttttagaattttaagtttccctctaaaatttcttatcctatatatttgaaagaaaaaaaataaataaaaacggatggaaaatgaaaaacccgcggcgagtggtgtcgtactgtcgtctccccgttcgaggggatcaggggaattggacgggcttgcttcgactccacctcgcctccgtcggcgtctcatctcatgctgggactctggtggggtggggattgacttcgctatagcccaatccagtcagcagcagcttcccgccgccccatgcctcgtcgcggccggtggcgatgggcgacgtcccagtcccttctccagctccccctgtttccggcatcgatatgaccccacgccgccgccgtgagccctccgagccccgcagcgacagcgactgggacgctggatccagtcgcgagggctccccggacctcctccgccgcgcgcccgccgtccagatctcgcgcgcctcctcttcctcgtcctcctggctccgcgagatcgagcgcgaccgtgtgcgcctcgtcagggagtgggtccacatggctgcccgcgaccgtgacgacgacaccggacccccaccgtcccccgtccatgaacacgctcgcagggacgcccccaggatccgcggccgccaagcgcgcctcgagctcgtcatgcgcatggccgccgaccgccaagccgagctccaccgcctctcgcagcaccgcgccgtctctgactttccgcatcgcaacagaatccatgcgctgctccggggtcggtttctgcgcaacagcggtttaccagaggagaggaggcccccatctgtggccgcaagggagcttggccagctgcggcaaaggcatcctgtctctggtttgagattggagaatcttgtccgtggtcaagcagatagccaagtggatgcttcttcagttcacgatgttgagttatctacaaatgatcgttctgaattaaggcctcctgaaactactcaggagagacatgagcggacaagtgagattgtcagtcttcaacaaatcgacagtacggcaatgacatcaggatttgaaagtggcagccctaacattgctgaagtcttctgcgggtctcatagccaagcagaaagtcaggatgatttggaacatgagagaagagactggcaacgattttcccatgctgtgattggagaggaatctgaaagaacttggcgtgaaaatgcagacaacatgtcatctcatgaggggacagcagttgaagatgataataacgatcatcttccagaagcaaatgaagagtcaaccagtgttgatcaccttcctgaaggacttgaagggtctatcactgatggtagtcttcctgaagcgcaagaagatcagcatgacagtgatcatcttcctgcagtgcttgaagagctgcatggaaataatcactttcaggaatcacatggggaatggagaagagatgatcgtcctgttgaagtctatgatgagtggcagagtgatgatcatctccctgaagtaaatgaagagtggcataatgatgatgagtctaatgatactgcagacaattggcatgataataattctgaccaaccaattgatcatgatgctgctcttattagaagagctaatactttcatccctggagatgatgataatgtgtacagcacagaattgagggaacttctaagcagaaggagcgtttctaatcttcttcacagtgcttttcgtgaaaacttggatcgacttatccggtcatatgtggaacggcaaggtcgtggtcctctcccttgggatctggaaggaacaacccctgcccctccatcaccagttcaaattcaggaggagcaaagagatgatgaggaccaggaactgcagcgcactgtcaacaggcctcctttagtgataccacccccacctatgcctcctcgtcagccactttggcattcagagttgcatcgtactaattggatcagacaaaacattcatcgttcatcttctgatattgaatgggaggctatcaatgatttaagagctgatatggctagacttcagcaaggcatgagccatatgcaaaggatgttggaagcttgcatggatatgcagctagagttgcagcgttctgtaaggcaagaagtatcagcagccttgaatcgtttcattggggagcaaggtggtgaaagtaaagaaataatcgatgatggatcgaaatggataaatgtgagaaaagggacctgctgcatatgctgtgagactccgattgactcccttctgtacagatgtgggcacatgtgcacttgctcgaaatgcgcaaacgaattggttcgaggtggagggaaatgcccgttgtgccgcgcacccataatcgaggtcatccgagcatacttcatcatgtagatacaaaaggaagacagcaagaagatagaagaggcccaaattgtttttggacgggaaggtggtcttctctcattaggacttgggtcactgctaattatgttccacaacgactaatggggttggaggttgtcgaaacacgagatgaggaaacttttggtatctttttgttcgtgtagcaccagcaaagtgcggcttggtcgcttcagtgtttcgtgtgattttgttgttggtcttggctatgtggtcatgatattttaggcttctagtttgcagatggatgtaaaagtggtactttgttgtcatgggcgatgctatttcctggatgtttgctttttctttccacaatagtaaaacagatcatttttatgcctagaaatcatcgaaaataagtttttct

SEQ ID NO: 65380 - DNA, 2755 bp, Zea Mays
gaaaaacccgcggcgagtggtgtcgtactgtcgtctccccgttcgaggggatcaggggaattggacgggcttgcttcgactccacctcgcctccgtcggcgtctcatctcatgctgggactctggtggggtggggattgacttcgctatagcccaatccagtcagcagcagcttcccgccgccccatgcctcgtcgcggccggtggcgatgggcgacgtcccagtcccttctccagctccccctgtttccggcatcgatatgaccccacgccgccgccgtgagccctccgagccccgcagcgacagcgactgggacgctggatccagtcgcgagggctccccggacctcctccgccgcgcgcccgccgtccagatctcgcgcgcctcctcttcctcgtcctcctggctccgcgagatcgagcgcgaccgtgtgcgcctcgtcagggagtgggtccacatggctgcccgcgaccgtgacgacgacaccggacccccaccgtcccccgtccatgaacacgctcgcagggacgcccccaggatccgcggccgccaagcgcgcctcgagctcgtcatgcgcatggccgccgaccgccaagccgagctccaccgcctctcgcagcaccgcgccgtctctgactttccgcatcgcaacagaatccatgcgctgctccggggtcggtttctgcgcaacagcggtttaccagaggagaggaggcccccatctgtggccgcaagggagcttggccagctgcggcaaaggcatcctgtctctggtttgagagaagagttccgcttcagattggagaatcttgtccgtggtcaagcagatagccaagtggatgcttcttcagttcacgatgttgagttatctacaaatgatcgttctgaattaaggcctcctgaaactactcaggagagacatgagcggacaagtgagattgtcagtcttcaacaaatcgacagtacggcaatgacatcaggatttgaaagtggcagccctaacattgctgaagtcttctgcgggtctcatagccaagcagaaagtcaggatgatttggaacatgagagaagagactggcaacgattttcccatgctgtgattggagaggaatctgaaagaacttggcgtgaaaatgcagacaacatgtcatctcatgaggggacagcagttgaagatgataataacgatcatcttccagaagcaaatgaagagtcaaccagtgttgatcaccttcctgaaggacttgaagggtctatcactgatggtagtcttcctgaagcgcaagaagatcagcatgacagtgatcatcttcctgcagtgcttgaagagctgcatggaaataatcactttcaggaatcacatggggaatggagaagagatgatcgtcctgttgaagtctatgatgagtggcagagtgatgatcatctccctgaagtaaatgaagagtggcataatgatgatgagtctaatgatactgcagacaattggcatgataataattctgaccaaccaattgatcatgatgctgctcttattagaagagctaatactttcatccctggagatgatgataatgtgtacagcacagaattgagggaacttctaagcagaaggagcgtttctaatcttcttcacagtgcttttcgtgaaaacttggatcgacttatccggtcatatgtggaacggcaaggtcgtggtcctctcccttgggatctggaaggaacaacccctgcccctccatcaccagttcaaattcaggaggagcaaagagatgatgaggaccaggaactgcagcgcactgtcaacaggcctcctttagtgataccacccccacctatgcctcctcgtcagccactttggcattcagagttgcatcgtactaattggatcagacaaaacattcatcgttcatcttctgatattgctgtgtttatagtaggctaatgcactcaactcttcgatttatagaatgggaggctatcaatgatttaagagctgatatggctagacttcagcaaggcatgagccatatgcaaaggatgttggaagcttgcatggatatgcagctagagttgcagcgttctgtaaggcaagaagtatcagcagccttgaatcgtttcattggggagcaaggtggtgaaagtaaagaaataatcgatgatggatcgaaatggataaatgtgagaaaagggacctgctgcatatgctgtgagactccgattgactcccttctgtacagatgtgggcacatgtgcacttgctcgaaatgcgcaaacgaattggttcgaggtggagggaaatgcccgttgtgccgcgcacccataatcgaggtcatccgagcatacttcatcatgtagatacaaaaggaagacagcaagaagatagaagaggcccaaattgtttttggacgggaaggtggtcttctctcattaggacttgggtcactgctaattatgttccacaacgactaatggggttggaggttgtcgaaacacgagatgaggaaacttttggtatctttttgttcgtgtagcaccagcaaagtgcggcttggtcgcttcagtgtttcgtgtgattttgttgttggtcttggctatgtggtcatgatattttaggcttctagtttgcagatggatgtaaaagtggtactttgttgtcatgggcgatgctatttcctggatgtttgctttttctttccacaatagtaaaacagatcatttttatgcctagaaatcatcgaaaataagtttttct

SEQ ID NO: 65381 - DNA, 2778 bp, Zea Mays
gtcgtctccccgttcgaggggatcaggggaattggacgggcttgcttcgactccacctcgcctccgtcggcgtctcatctcatgctgggactctggtggggtggggattgacttcgctatagcccaatccagtcagcagcagcttcccgccgccccatgcctcgtcgcggccggtggcgatgggcgacgtcccagtcccttctccagctccccctgtttccggcatcgatatgaccccacgccgccgccgtgagccctccgagccccgcagcgacagcgactgggacgctggatccagtcgcgagggctccccggacctcctccgccgcgcgcccgccgtccagatctcgcgcgcctcctcttcctcgtcctcctggctccgcgagatcgagcgcgaccgtgtgcgcctcgtcagggagtgggtccacatggctgcccgcgaccgtgacgacgacaccggacccccaccgtcccccgtccatgaacacgctcgcagggacgcccccaggatccgcggccgccaagcgcgcctcgagctcgtcatgcgcatggccgccgaccgccaagccgagctccaccgcctctcgcagcaccgcgccgtctctgactttccgcatcgcaacagaatccatgcgctgctccggggtcggtttctgcgcaacagcggtttaccagaggagaggaggcccccatctgtggccgcaagggagcttggccagctgcggcaaaggcatcctgtctctggtttgagatagccaagtggatgcttcttcagttcacgatgttgagttatctacaaatgatcgttctgaattaaggcctcctgaaactactcaggagagacatgagcggacaagtgagattgtcagtcttcaacaaatcgacagtacggcaatgacatcaggatttgaaagtggcagccctaacattgctgaagtcttctgcgggtctcatagccaagcagaaagtcaggatgatttggaacatgagagaagagactggcaacgattttcccatgctgtgattggagaggaatctgaaagaacttggcgtgaaaatgcagacaacatgtcatctcatgaggggacagcagttgaagatgataataacgatcatcttccagaagcaaatgaagagtcaaccagtgttgatcaccttcctgaaggacttgaagggtctatcactgatggtagtcttcctgaagcgcaagaagatcagcatgacagtgatcatcttcctgcagtgcttgaagagctgcatggaaataatcactttcaggaatcacatggggaatggagaagagatgatcgtcctgttgaagtctatgatgagtggcagagtgatgatcatctccctgaagtaaatgaagagtggcataatgatgatgagtctaatgatactgcagacaattggcatgataataattctgaccaaccaattgatcatgatgctgctcttattagaagagctaatactttcatccctggagatgatgataatgtgtacagcacagaattgagggaacttctaagcagaaggagcgtttctaatcttcttcacagtgcttttcgtgaaaacttggatcgacttatccggtcatatgtggaacggcaaggtcgtggtcctctcccttgggatctggaaggaacaacccctgcccctccatcaccagttcaaattcaggaggagcaaagagatgatgaggaccaggaactgcagcgcactgtcaacaggcctcctttagtgataccacccccacctatgcctcctcgtcagccactttggcattcagagttgcatcgtactaattggatcagacaaaacattcatcgttcatcttctgatattgaatgggaggctatcaatgatttaagagctgatatggctagacttcagcaaggcatgagccatatgcaaaggatgttggaagcttgcatggatatgcagctagagttgcagcgttctgtaaggcaagaagtatcagcagccttgaatcgtttcattggggagcaaggtggtgaaagtaaagaaataatcgatgatggatcgaaatggataaatgtgagaaaagggacctgctgcatatgctgtgagactccgattgactcccttctgtacagatgtgggcacatgtgcacttgctcgaaatgcgcaaacgaattggttcgaggtggagggaaatgcccgttgtgccgcgcacccataatcgaggtcatccgagcatacttcatcatgtagatacaaaaggaagacagcaagaagatagaagaggcccaaattgtttttggtctgtgtggagtcgttagcgggttgtgtattcaattttgttcattctctctaatgcgtttggttaagtttttttccggcttcatttcgttttggtctgcttgccctattgtaagtaatgtacggttttgggtgtggcggcaggacgggaaggtggtcttctctcattaggacttgggtcactgctaattatgttccacaacgactaatggggttggaggttgtcgaaacacgagatgaggaaacttttggtatctttttgttcgtgtagcaccagcaaagtgcggcttggtcgcttcagtgtttcgtgtgattttgttgttggtcttggctatgtggtcatgatattttaggcttctagtttgcagatggatgtaaaagtggtactttgttgtcatgggcgatgctatttcctggatgtttgctttttctttccacaatagtaaaacagatcatttttatgcctagaaatcatcgaaaataagtttttct

SEQ ID NO: 65382 - DNA, 2125 bp, Zea Mays
ccaacagctcctgcatctggtcatgattggagaatcttgtccgtggtcaagcagatagccaagtggatgcttcttcagttcacgatgttgagttatctacaaatgatcgttctgaattaaggcctcctgaaactactcaggagagacatgagcggacaagtgagattgtcagtcttcaacaaatcgacagtacggcaatgacatcaggatttgaaagtggcagccctaacattgctgaagtcttctgcgggtctcatagccaagcagaaagtcaggatgatttggaacatgagagaagagactggcaacgattttcccatgctgtgattggagaggaatctgaaagaacttggcgtgaaaatgcagacaacatgtcatctcatgaggggacagcagttgaagatgataataacgatcatcttccagaagcaaatgaagagtcaaccagtgttgatcaccttcctgaaggacttgaagggtctatcactgatggtagtcttcctgaagcgcaagaagatcagcatgacagtgatcatcttcctgcagtgcttgaagagctgcatggaaataatcactttcaggaatcacatggggaatggagaagagatgatcgtcctgttgaagtctatgatgagtggcagagtgatgatcatctccctgaagtaaatgaagagtggcataatgatgatgagtctaatgatactgcagacaattggcatgataataattctgaccaaccaattgatcatgatgctgctcttattagaagagctaatactttcatccctggagatgatgataatgtgtacagcacagaattgagggaacttctaagcagaaggagcgtttctaatcttcttcacagtgcttttcgtgaaaacttggatcgacttatccggtcatatgtggaacggcaaggtcgtggtcctctcccttgggatctggaaggaacaacccctgcccctccatcaccagttcaaattcaggaggagcaaagagatgatgaggaccaggaactgcagcgcactgtcaacaggcctcctttagtgataccacccccacctatgcctcctcgtcagccactttggcattcagagttgcatcgtactaattggatcagacaaaacattcatcgttcatcttctgatattgctgtgtttatagtaggctaatgcactcaactcttcgatttatagaatgggaggctatcaatgatttaagagctgatatggctagacttcagcaaggcatgagccatatgcaaaggatgttggaagcttgcatggatatgcagctagagttgcagcgttctgtaaggcaagaagtatcagcagccttgaatcgtttcattggggagcaaggtggtgaaagtaaagaaataatcgatgatggatcgaaatggataaatgtgagaaaagggacctgctgcatatgctgtgagactccgattgactcccttctgtacagatgtgggcacatgtgcacttgctcgaaatgcgcaaacgaattggttcgaggtggagggaaatgcccgttgtgccgcgcacccataatcgaggtcatccgagcatacttcatcatgtagatacaaaaggaagacagcaagaagatagaagaggcccaaattgtttttggtctgtgtggagtcgttagcgggttgtgtattcaattttgttcattctctctaatgcgtttggttaagtttttttccggcttcatttcgttttggtctgcttgccctattgtaagtaatgtacggttttgggtgtggcggcaggacgggaaggtggtcttctctcattaggacttgggtcactgctaattatgttccacaacgactaatggggttggaggttgtcgaaacacgagatgaggaaacttttggtatctttttgttcgtgtagcaccagcaaagtgcggcttggtcgcttcagtgtttcgtgtgattttgttgttggtcttggctatgtggtcatgatattttaggcttctagtttgcagatggatgtaaaagtggtactttgttgtcatgggcgatgctatttcctggatgtttgctttttctttccacaatagtaaaacagatcatttttatgcctagaaatcatcgaaaataagtttttct

SEQ ID NO: 65383 - DNA, 2101 bp, Zea Mays
cattcacttactatatgaacagatcttagaagagttccgcttcagattggagaatcttgtccgtggtcaagcagatagccaagtggatgcttcttcagttcacgatgttgagttatctacaaatgatcgttctgaattaaggcctcctgaaactactcaggagagacatgagcggacaagtgagattgtcagtcttcaacaaatcgacagtacggcaatgacatcaggatttgaaagtggcagccctaacattgctgaagtcttctgcgggtctcatagccaagcagaaagtcaggatgatttggaacatgagagaagagactggcaacgattttcccatgctgtgattggagaggaatctgaaagaacttggcgtgaaaatgcagacaacatgtcatctcatgaggggacagcagttgaagatgataataacgatcatcttccagaagcaaatgaagagtcaaccagtgttgatcaccttcctgaaggacttgaagggtctatcactgatggtagtcttcctgaagcgcaagaagatcagcatgacagtgatcatcttcctgcagtgcttgaagagctgcatggaaataatcactttcaggaatcacatggggaatggagaagagatgatcgtcctgttgaagtctatgatgagtggcagagtgatgatcatctccctgaagtaaatgaagagtggcataatgatgatgagtctaatgatactgcagacaattggcatgataataattctgaccaaccaattgatcatgatgctgctcttattagaagagctaatactttcatccctggagatgatgataatgtgtacagcacagaattgagggaacttctaagcagaaggagcgtttctaatcttcttcacagtgcttttcgtgaaaacttggatcgacttatccggtcatatgtggaacggcaaggtcgtggtcctctcccttgggatctggaaggaacaacccctgcccctccatcaccagttcaaattcaggaggagcaaagagatgatgaggaccaggaactgcagcgcactgtcaacaggcctcctttagtgataccacccccacctatgcctcctcgtcagccactttggcattcagagttgcatcgtactaattggatcagacaaaacattcatcgttcatcttctgatattgaatgggaggctatcaatgatttaagagctgatatggctagacttcagcaaggcatgagccatatgcaaaggatgttggaagcttgcatggatatgcagctagagttgcagcgttctgtaaggcaagaagtatcagcagccttgaatcgtttcattggggagcaaggtggtgaaagtaaagaaataatcgatgatggatcgaaatggataaatgtgagaaaagggacctgctgcatatgctgtgagactccgattgactcccttctgtacagatgtgggcacatgtgcacttgctcgaaatgcgcaaacgaattggttcgaggtggagggaaatgcccgttgtgccgcgcacccataatcgaggtcatccgagcatacttcatcatgtagatacaaaaggaagacagcaagaagatagaagaggcccaaattgtttttggtctgtgtggagtcgttagcgggttgtgtattcaattttgttcattctctctaatgcgtttggttaagtttttttccggcttcatttcgttttggtctgcttgccctattgtaagtaatgtacggttttgggtgtggcggcaggacgggaaggtggtcttctctcattaggacttgggtcactgctaattatgttccacaacgactaatggggttggaggttgtcgaaacacgagatgaggaaacttttggtatctttttgttcgtgtagcaccagcaaagtgcggcttggtcgcttcagtgtttcgtgtgattttgttgttggtcttggctatgtggtcatgatattttaggcttctagtttgcagatggatgtaaaagtggtactttgttgtcatgggcgatgctatttcctggatgtttgctttttctttccacaatagtaaaacagatcatttttatgcctagaaatcatcgaaaataagtttttct

SEQ ID NO: 65384 - DNA, 1800 bp, Zea Mays
cccagacgccagagtgccagacctcgtgtgtcctgcccaccaaacgcgggatcccaccaaaggccaacacacagtaaaatctcgtcgccgccgttgggctcgtcgccgtgcgtgggtgaccgcgatggacccgaaccgccctccgcttgggcgccgcgccttcctctcctcttccgtccacgctgcaaccgcgctcctctcgatccttctcctcgtcacgctcctccgcctccccctctccacctccccgcacgccgcctccaccatcgccgaccagaagcctaaggagcagacctgcgatcccacctccccgctcgactgcgccgacccgcgcttgttccatctcatgatgcgcagcgccatcgaagccttcccggccgtccattttgctcgcttcggccgccccgtccccggtgaccccccatcctcctcttgcgacatggcctggcgctcccgctcagacttcgactccccctctaaggctaccaccaaggactaccgccgcttcgccatcggccgcgacccccacacatgcgcctactccgtcctctcaatcggcgattaccattccggccccaatgcccgcaagccccgccgcggcgccaccaatgccaccatcgctactccaccaccgcctgcgctctcccgctcccagttcgccaagggcgcgtacctcgcttacctcggcggcggcgaccgctgcaagcccatgccacactacctgcgcagcctcctctgcgccctcgccgaggctcgctacctaaaccgcaccctcgtcctcgatctcacactctgcctcgctgcctcctatgccgcccctgggactggggaaatgcctgaggaaggcaagcgccttgccttctacatcgacgtcgagcacctacactcccaggtccccatcattgaggagagacagttctgggcagactgggacagttggggggtgcagggccaactccgggcacacctcattgaggacaccaggcttgcacttataaagttctccaaggtgaaggacaccctcatcatcagaaaattcggagacgtcgagccaggatgcaaccagactttgattcggtccatatcgatgccaagggtgaggacctgagacagagggtcgaggaagttcttggtggagggcggcaggtgtatgttgcaggggttggggtcaacagggcattgctggagtcactcaaggaaaagtgcattgtgcattatctggatgagtttgaggacctgtgggggacagacagcaagtggttcttggagatgaagaggctcaatggtggcgttcctgtggaatttgatgggtacatgcgtgatgttgttgatagagaggtcttcctcaaggggaagaagaaggtggaggtgctccggtgatttggttttttctctttgattggttacatgcgtgatgttgttgatagagaggtcttcctcaaggggaagaagaaggtggaggtgctccggtgatttggttttttctctcacctagataacttgttgtttgttgatacatcctagagaagttgaacagcacaagcatgcttttgccaagctagtcttttaaacctcactatatctgaatttagttctcaaactcatcggtaggggatttattttgctagcaattatcatttccatggaaatttggtaaaccatcaatgtatacctggttttgtgcttctgatagcactgttccatttaatttattagattcctaacactggttgctgctcaattatgatgtaataaggatttgtaatatttactatgctatttacttcatttcataacctc

SEQ ID NO: 65385 - DNA, 797 bp, Zea Mays
gctcacgccccaccgcgcgccatcttctccccccgctccgctctccgtcgatggaagggtcgctactgccgttgccctctccctcgtagtccatgtccgtcgatggaagggtcgctacagcccctgccctcacctccgcaatccatggacgcccccgccctgagacatgcccacctagagagccgctcgctcaccttgctacccggcccacacccgtctcgttttcctcctcatcccggcgctcctactactcccctccatggcgcgcaggcaaaagctctgtggggtccctttgctgcgtgggggacgaatcagcgagggcgcttagcgtcggcgaggagctcatggccaagagaccatgccgttgggtgtacaggatcgacagactgccctatctgtgtgcataatcaggttatgaagcacgaattgtacatcagctttcaggtgccaagttcagttaccttgaatattttaagtaatggtatgttgattccacttttattagttctttgagttccatttccagcgctgatcttgatgcctaatcaactattgagagcagatagccatgagcctgagacaaatggaaagtacaaattattgcatggattattaatcatcacatgccatagataaattcttgttgaactcatgtgatatttatgttctgaaagatgctttagctttcagtttgtatacctgagcagatacttcctgattaacttttcccatgaaatcttcaccagctctatactttaccttttatatcaaagaacttcagttgtgatatcggaaac

SEQ ID NO: 65386 - DNA, 2794 bp, Zea Mays
atgtgccccatgtgcggtgccaatccttcttcctcgttccttcccctggccaggcttggtggagtgaggggggcgatgcgaggcggaaccgctccaaacgtgcgcggagcctggccatcgcggccgtccatcctcccacacgtgtcgctcccacgcgaccaccgtgcgtccgtgccaacaatatcactcgcccagtaccaggttcagcagcagcacgccgccgcacgcctcgcacgcgcgagcggccctactgctcctactcctcccacccgttcccctcttccgcatctgcacccgcggcacgagatcgagatcccggcagaccggtgggatgcagcaggcggggctggccgatgacgacgacgaggagatatgggtaaaggaggaggatgacgaggaggaggaggacgggtactatatggacccccggagcccggccgtgtggacgcccggcggcagggcgggagggacctcaaaccggcggcgcgcgcgcgaggagaaggagcggaccaagatgcgggagcggcagcggcgcgcgatcacggggcggatcctggcgggcctgcgccagcacggcaactacaggctgcgggcgcgcgccgacatcaacgaggtgatcgccgcgctcgcaagggaggccggctgggttgtcctccccgacggcaccactttcccctcttcatcctccttcgccgccgtggctgcacagccgccccgccccgtgatggtcgccgccgcgtcgccctccgccaccccgctcgcgctcccggcctcctcggcgctccccctccgcggcatcgcgcccgtcgccgcgcgccctatctcccaccgccccgcgcccgcgttcgctctcctgttgcccccgcgggccgccgcggcctcgcgatccccggccgacgacgttcccgacgggaattcctcgcacctcctcgccgtccccgtccctgtccccatggaccccgccgccgctgaagacgtccccgttgccaagcagctgcaggtgcccgatgtgtcgccgcgcccgcctgagcgggacttcgccggcacgccctacgtgccggtctacgtcatgctccctcttggggtagtgaatggtaacggtgaggtggtggacgctgacgagttggtcgggcagctgcgggtgctcaaggcatctggagtggatggtgtcatggtcgattgctggtgggggaacgttgaggctcacaagccgcaggagtacaactggactggctacaggcgcctcttccagatgatcagggaactcaagctcaagttgcaggtcgttatgtcatttcatgaatgtggtggcaatgttggagacgatatatccattcccctcccacattgggtaatagagattggaaggagcaatccagatatctactttactgacagggcaggaagacgtaatacagagtgcttatcatggggagttgataaagaaagggttttgcaaggcagaacagcagtggaggtatattttgatttcatgagaagcttccgagtagaattcgatgagtattttgaggatgggatcatctcagaaattgagattggactaggggcttgtggagagctgcgatatccatcttatccagcaaaacatggctggaaataccctggcattggagaatttcagtgctatgacaggtacttacagaaaagtttgagaaaggctgcagaagcacgagggcataccatatgggcaagaggacctgacaatgctggccattataattctgaaccaaatctcactggatttttttgtgatggaggagattatgatagctactatggccgttttttcctcagctggtactcccaggcattggtggatcacgcggaccgtgtactgatgttagcaaggctggcttttgagggtacaaacattgctgttaaggtctccggggtgcactggtggtataaaactgccagtcatgctgctgaattgactgccggattttacaacccgtgtaaccgtgatggctatgctccaattgctgcagtattaaagaaatacgatgctgctttgaactttacatgtgttgaattgcgcaccatggaccagcatgaggtataccctgaggcatttgcagatccagagggcctagtatggcaggtgctaaatgctgcgtgggatgctggtatacaagtggctagtgagaacgctctaccttgctatgatagggatggattcaacaagattttggagaatgccaaacctctgaatgacccagacggacggcatttgttaggtttcacctacctaaggcttggcaaagatctgtttgagagacccaacttttttgaatttgagcgcttcatcaagagaatgcatggcggtaatatcagctgatttttgagctgttaaatagagaactcgctgctcaatttttaactctagtcttcaagaaggaagacgagttgagttccgtataatcggtgaattcacatccttttgtcgccggcggctccacatgtgccatcatctcatggccatggcgcaatgttatgcagatgtagtgtgaaatccgaagaacctaggcattctgctcatctccatctccatatcagcgtcaaatgctcaaattttttagttcaagtgactgctgatacgcatggaacaaaacgggaataagtgtctcgatcctactgtcttgcgtgtaatgatgttcaacaatgcagattgtgagtttggatctgttgagcacagaaaaggtgttgagcacagaaaaggtcctcgcggaccctgctgatttttttgtttttagccaattttgtgacaaaaaat

SEQ ID NO: 65387 - DNA, 2859 bp, Zea Mays
atgtgccccatgtgcggtgccaatccttcttcctcgttccttcccctggccaggcttggtggagtgaggggggcgatgcgaggcggaaccgctccaaacgtgcgcggagcctggccatcgcggccgtccatcctcccacacgtgtcgctcccacgcgaccaccgtgcgtccgtgccaacaatatcactcgcccagtaccaggttcagcagcagcacgccgccgcacgcctcgcacgcgcgagcggccctactgctcctactcctcccacccgttcccctcttccgcatctgcacccgcggcacgagatcgagatcccggcagaccggtgggatgcagcaggcggggctggccgatgacgacgacgaggagatatgggtaaaggaggaggatgacgaggaggaggaggacgggtactatatggacccccggagcccggccgtgtggacgcccggcggcagggcgggagggacctcaaaccggcggcgcgcgcgcgaggagaaggagcggaccaagatgcgggagcggcagcggcgcgcgatcacggggcggatcctggcgggcctgcgccagcacggcaactacaggctgcgggcgcgcgccgacatcaacgaggtgatcgccgcgctcgcaagggaggccggctgggttgtcctccccgacggcaccactttcccctcttcatcctccttcgccgccgtggctgcacagccgccccgccccgtgatggtcgccgccgcgtcgccctccgccaccccgctcgcgctcccggcctcctcggcgctccccctccgcggcatcgcgcccgtcgccgcgcgccctatctcccaccgccccgcgcccgcgttcgctctcctgttgcccccgcgggccgccgcggcctcgcgatccccggccgacgacgttcccgacgggaattcctcgcacctcctcgccgtccccgtccctgtccccatggaccccgccgccgctgaagacgtccccgttgccaagcagctgcaggtgcccgatgtgtcgccgcgcccgcctgagcgggacttcgccggcacgccctacgtgccggtctacgtcatgctccctctgcgggtgctcaaggcatctggagtggatggtgtcatggtcgattgctggtgggggaacgttgaggctcacaagccgcaggagtacaactggactggctacaggcgcctcttccagatgatcagggaactcaagctcaagttgcaggtcgttatgtcatttcatgaatgtggtggcaatgttggagacgatatatccattcccctcccacattgggtaatagagattggaaggagcaatccagatatctactttactgacagggcaggaagacgtaatacagagtgcttatcatggggagttgataaagaaagggttttgcaaggcagaacagcagtggaggtatattttgatttcatgagaagcttccgagtagaattcgatgagtattttgaggatgggatcatctcagaaattgagattggactaggggcttgtggagagctgcgatatccatcttatccagcaaaacatggctggaaataccctggcattggagaatttcagtgctatgacaggtacttacagaaaagtttgagaaaggctgcagaagcacgagggcataccatatgggcaagaggacctgacaatgctggccattataattctgaaccaaatctcactggatttttttgtgatggaggagattatgatagctactatggccgttttttcctcagctggtactcccaggcattggtggatcacgcggaccgtgtactgatgttagcaaggctggcttttgagggtacaaacattgctgttaaggtctccggggtgcactggtggtataaaactgccagtcatgctgctgaattgactgccggattttacaacccgtgtaaccgtgatggctatgctccaattgctgcagtattaaagaaatacgatgctgctttgaactttacatgtgttgaattgcgcaccatggaccagcatgaggtataccctgaggcatttgcagatccagagggcctagtatggcaggtgctaaatgctgcgtgggatgctggtatacaagtggctagtgagaacgctctaccttgctatgatagggatggattcaacaagattttggagaatgccaaacctctgaatgacccagacggacggcatttgttaggtttcacctacctaaggcttggcaaagatctgtttgagagacccaacttttttgaatttgagcgcttcatcaagagaatgcatggtgaggcggttcttgatctgcaagtataagattggtagcatattgcatacacgtatacaagtgactgattggctcaggccttatggcttacatttttttcttcttttgctttgtgtttttaggcggtaatatcagctgatttttgagctgttaaatagagaactcgctgctcaatttttaactctagtcttcaagaaggaagacgagttgagttccgtataatcggtgaattcacatccttttgtcgccggcggctccacatgtgccatcatctcatggccatggcgcaatgttatgcagatgtagtgtgaaatccgaagaacctaggcattctgctcatctccatctccatatcagcgtcaaatgctcaaattttttagttcaagtgactgctgatacgcatggaacaaaacgggaataagtgtctcgatcctactgtcttgcgtgtaatgatgttcaacaatgcagattgtgagtttggatctgttgagcacagaaaaggtgttgagcacagaaaaggtcctcgcggaccctgctgatttttttgtttttagccaattttgtgacaaaaaat

SEQ ID NO: 65388 - DNA, 3220 bp, Zea Mays
caccagctagcgctgttcatcccatcccatttccaatccgcgccaccacaaacaaagcctcaaaggcgaagagtcgccatgaaaggccgcgtggtcaagctccgtgaggcgcacaaggctggctcgccagccctctgttccgcctcctggggccccagcggacaacacgtcgtcaccgcttccgccgcggacactgccgtcctgatccacgacgccgccacggtgctcgccggcggtcggggctcgggttcgtcggcgctggctactatccgtctccacaaagacggcgtcacggcacttgcagtcgcgccgggccccagcggctcgctggcatcgggatccatcgaccactccgtcaagttttacaccttcccagaggggcagttccagagcaatgtcgcccgattcaccctgcctatccgatcactcgcttttaacaagaaaggcaccctactggcggccgcaggtgaagatgatggcatcaagctgatttcaaccattgacaacacgatatcgaaggtgctcaaaggacacaagggctccgtcactgggctggatttcgacccgagaaacgattacctagcatctgtggacagcttcggtaccgtcatctattgggatctttgcattggtgctgaggcccgtaccttgacacgtattgctcccacgtttcggtcggataactctgtcaggaatgttctgtgctggagccctgatgggcagacccttgctgtgcccgggttgaggaacaatgtggtgctgtatgatagggacacgggtgaggaggtgtgcacgctatatggagatcatgaacaaccagtgagcagcctttgctggtctcccaatgggaggtatctggccagtgctggcttggataggcaggtgctcatctgggatgtgaagtcaaggcaggacattgagaggcagaagtttgatgagcggatatgcagcttggcttggaaaccaaatggaaatgctttacttctgattgatgtcatgggcagggttggcatttgggaatcagtcgtaccttcgactatgaagtcgcctaatgagggcatacctgatctcaactccaatatggttcctctatttgatgacaatgacgatgagccagacacctcagttggcttggaggatgatgttgatgatactttcagcgattcaataactttcaaccacaagagaccaaggaggaagtctacgtttgatggagatagtgagaatgaagatttaatacatcaattggaatataccaaaagaatgaaagataagcaaaataaaaatgaggatgctgggaaggcaagaggtgattctgccacaccagtgacgttggttacatcaacaatgcaagctgctttccagcctggatcaacgccaccacagcctggcatgcgaaatttcctcgcatacaacatgcttggaagtatcactactattcaaaatgaggggtattcacatgtggaggttgacttccatgacacaggaagaggacctagagttccttccatgacagactattttggtttcacaatggctgcaatgaatggatcaggaagtgtgtttgcaaatccgtgtaagggtgacaagaatatgagcactctaatgtaccgcccttttggtagctgggctggtaacagcgagtggtcaatgagatttgaaggtgaagaagtgaaggctctggctcttggtgctggatgggttgctgcagtcacaagcttaaattttttgcgcattttcaccgaaggaggcttgcagatgcatatcctctcagttagtggcccggttgttacagcagcaggttatgaagaccagctagctattgtgtcacatgcttctgattgtttgccctctggagatcaggtgctggatgttaaagtattcaacatatctgaggggacacaatcaatgtccggtcgccttgttttgacaccattgtctcgattatcttggtttggattcagtgagaatggccaacttagttcatatgattccaagggaattctgagggttttttccaatcagtttggtggaagttggcttccattatttagttcggtcaaggcaagaaaatctgaagatgaaagccattgggtggtcggtttggatgcaaataatatattctgcattttatgcaaaacccctcaatcttatccacaggtgatgcccaagcctgtgctaagcatacttgagctgtcatttccacttgcgtcatcagatcttggggctaatagtttggaaaatgagttcttgatgaggaagttacagctatcccagattcaaaataaaatggaagaaatggctgcattgggccttgacaccacttcatatgatgatgaatcgttcaacatggaggcaggacttgaccggtgataagctcgttcgagcttctgagcttgcaagattattgaaactagagaagtcaatgaagggagctctatcactagtgacacgcctgaaacttcccatgctgcaagagaagttcagctccataattgaggagagggtgttaaatgataaaataatagctggagcaggaggattttgctctaatgctacaatcatgacgaacacaccagtgctgaccactcaggcaactctaccttctatgtttatgcaagatgggaaccgttcgcttgaatcttcattacccaaactcaatattgtcaatcaacaatgcaattcaactgaaccaaagaagccagcaggagaacgagggattgaaattaaggatagaactcaaaaagattcatctgcctctgttccatttgccaaggtacctaaaaacagtgaaaatcagaatcaggaaggaggcattgatcatactggtgcaaaaaaagagagcactaaatattgcaatcgagcagagcctcagaggccagttaacccttttgcaaaatcatcatcaagcaaagaacagtcatcatctcttttagattccataaaaaaaatgaaagttgaaaaacccaacgcaagaatttgaaatgaattattcttacttatgtcatggcctgtagggggacaaattgttagacctccactgacatctgcaggatctatttttttagttttcttctgctagcatatgtaataaccatttacttgtaaatttgtttctcatgtttggtggattattgtgccgttgggatgtcaacattatctgatatattacccctatttatgaaattagttgcctttgaattgctgtcatataatattg

SEQ ID NO: 65389 - DNA, 1637 bp, Zea Mays
gtacgttatctgaatgtcacacttagtggtcaatgagatttgaaggtgaagaagtgaaggctctggctcttggtgctggatgggttgctgcagtcacaagcttaaattttttgcgcattttcaccgaaggaggcttgcagatgcatatcctctcagttagtggcccggttgttacagcagcaggttatgaagaccagctagctattgtgtcacatgcttctgattgtttgccctctggagatcaggtgctggatgttaaagtattcaacatatctgaggggacacaatcaatgtccggtcgccttgttttgacaccattgtctcgattatcttggtttggattcagtgagaatggccaacttagttcatatgattccaagggaattctgagggttttttccaatcagtttggtggaagttggcttccattatttagttcggtcaaggcaagaaaatctgaagatgaaagccattgggtggtcggtttggatgcaaataatatattctgcattttatgcaaaacccctcaatcttatccacaggtgatgcccaagcctgtgctaagcatacttgagctgtcatttccacttgcgtcatcagatcttggggctaatagtttggaaaatgagttcttgatgaggaagttacagctatcccagattcaaaataaaatggaagaaatggctgcattgggccttgacaccacttcatatgatgatgaatcgttcaacatggaggcaggacttgaccggtgcattttgaggcttatctctagttgctgcagtggtgataagctcgttcgagcttctgagcttgcaagattattgaaactagagaagtcaatgaagggagctctatcactagtgacacgcctgaaacttcccatgctgcaagagaagttcagctccataattgaggagagggtgttaaatgataaaataatagctggagcaggaggattttgctctaatgctacaatcatgacgaacacaccagtgctgaccactcaggcaactctaccttctatgtttatgcaagatgggaaccgttcgcttgaatcttcattacccaaactcaatattgtcaatcaacaatgcaattcaactgaaccaaagaagccagcaggagaacgagggattgaaattaaggatagaactcaaaaagattcatctgcctctgttccatttgccaaggtacctaaaaacagtgaaaatcagaatcaggaaggaggcattgatcatactggtgcaaaaaaagagagcactaaatattgcaatcgagcagagcctcagaggccagttaacccttttgcaaaatcatcatcaagcaaagaacagtcatcatctcttttagattccataaaaaaaatgaaagttgaaaaacccaacgcaagaatttgaaatgaattattcttacttatgtcatggcctgtagggggacaaattgttagacctccactgacatctgcaggatctatttttttagttttcttctgctagcatatgtaataaccatttacttgtaaatttgtttctcatgtttggtggattattgtgccgttgggatgtcaacattatctgatatattacccctatttatgaaattagttgcctttgaattgctgtcatataatattg

SEQ ID NO: 65390 - DNA, 3525 bp, Zea Mays
ctcggagaagcccaaacagctccttcccgatcacctgcatgccaatgcagtgtctgctggtgattagcctcttgtgcaccaccaaagacttgatgggcccacatggatatataggagagatggatcctgcagggtgtcctatggtccaatttctgtgtcctatggtctaggcgcgtgaaactgaaacgtcagaaactgaaaatttccggtgccataagcagtggtggaagatgaataaaaaaaggaaacaaattgaaaaaccaaaacacaacatcaaacgtttaaagtaccaaaaaaaacgaaaataaattaaaatgacattgcaatgccttacctgtcgtttgaactcatgttttgaacacaatgtcactactactaagttgcgaatgcacctctatttataaagaaacaattttatatctacaaaaatattttgcaccaaaatatagtgggcgccataacaggtgcttcgcccgtggttataagttcgtgtatagtagacagacacagatgacggatctgttggtccacagtgacacagatcgagcattcaactttggccgaccgctacctagcgggcccccccttgcattggtgacttgcatggttctttctgcacacgcaaacagttccttttatggttacgacttacgacactgttctaccacgacgggggtttataatgcagttgcctttaatggggggtgcttatatatatatatatatatatatatatatatatatatatatatatcactgtctagatttataaaaaatgttagcaacatatttatatctccaaacaaatttattataaaatatatatttatagatttatctaataaactaattttgtactacaaatattttttatacatatatttggtcgacatcggaagagtctgtgacactctttagtactgatttggtggaccgaaaatagaggggatcaatgagggatagctaggggattcctcccccatgctccaccaaaatagcccttacttgacggagggaatacatctatcccaattaaaacgaaacaaacaacacattcagttttgcaatacttctcgtgcacatccgaggagcaaacatttttaaatttcactagacatttaagagaataatattagcatttatatctttaaattgatatactataaaggcttgtttatgagccagtggatgggatgtgctaaaatcattttactattcaattttaaatagcaagacgattattttagctctctattccccttgctctcaaacgtgcctaaaaaatacaatatgattcatctagtgatattgatttggtatcataaatattaatatatattatatatatttgatcaaacataaaatctgttgactccttgatatgtatttttgaaacgggataagtatatatgcgtcaactttaaataaaattgagaaatattacaaaccttgtttgaagcaaatttaagatacatgtcttgagtttttatatttactctattagacacactgaaatatacagctcaatacataaattatacatgccctaaattatacatgctttaatagctactgtacctagtaggatgggcttcgcttccccagcagaccagcacaccgttttcccggcaagcacgcgtcaagcagcaggctgcggcagcaggcagtgcatgatgctgcacattgattgggcatgcagtgcaagtgccgaggcatgcaattactcgttgctcctggccaaacctaccaccagcccactctctactcacgccataactctactagcgctccagcagtggtaaacaacacttttagaagcatacagctgcagcactcaggttctctcaggtgtataaggtcataaaaaacaatatttttttaatgtaagcaacattgtttataaagtctattttaaaatagaaggtaagataacaggtaagacgagaaaggtgctgaagacagcttcaaaaggccctggctgatctgtagtaacttgattcatgcttgattgcaggtttctaggtaggctatacttcatttcttgtctctaaggagtagtataataagagactattaactgactaaatactgagatcgaatacagaaaagaggagagaaaagagaaacagagctatgaacttacaagccggcttgacaaagaacagaaacaagtgaggtcctacattaatattgaaaatctaaccactatacgaatagactaaataacagactacaagaatcaatggttgactctattattaaacttgctctaaattaaccgaactttcttttttaacaatgctaacttttagtacatagctcgtaatatgaatagtctcatatgacactcatgtgattctgagacgtgtataagcttacctcttgatttagagttcattaaaatacgaaataatacgcaatgaacttgctaataggtacctttggagctgccctaaggaatattgtagagttgttatcggaattggcagcctaatactgatctaactttgatatataccattaccagtagtcagccatcacaaaatacgcacctttgcacatagatcagagcacgaaatcctaatgaccacttttaaaaactgtatataacaccttaactttatagcattcaaaatttattgtaaaacaattatcattctcactttctaatacaaatttctcttctaatacaacatcttttttttctcaatatatatacaacatttttttctcaatatctctatatatatgtacttttctatttttctaagggcattttgttcctttaccttttgcgttggtgtgcgtgtgtattatctatgttacagtgacacaaatgatttgaatatgctttcattaacagtagcagaaacagccgcataaataatgattgattgtcaatagtttgttctgactttcagcagtaatgctttggtcacctttttatgccatggttagtgcgtcaacactgctacaccaaaatacaaagtaaagtgtccatagaatataaaacatacaagaatatatgtgttatgttcactaggtagctgtgaacatgcattataggccaacaactatggttagaatctcattatatataattttagaatttttactatttaaatatgggtgagcacgatcaagccattcggctgccacgtgaagagacaatgaagaggcaaatatactgtacaaacagcggcggctgcagtactagctagcatcgtgaaatgaggaaaatttgtaatttaatacagtagaggtagagaatagaagagatatacacaagctagtgttttttttcgttcaaaaaaatcagataggtcacctaataaatatgtttgcgatgtatcggatgggagtagcaacatgcgagcgaaagcttgcatatgcatgtggacaggtacccgatatatcgccgcaaatgtaccaattatcctgtacatagtacacacatctggagtagcatttataatgttaattagactgtaccacatgtagactagaacgcatcttactttattg

SEQ ID NO: 65391 - DNA, 409 bp, Zea Mays
gctcattcatattatagttctgacatattataatttcttcgtctgtagacatatagagaaagataaaaatatttgacacaagcatagactttgtccgagctaaaagacctaggacatcccaaaatctagaataaaatttaatatcctagcacacactaattgccaccatcctatcatagtgacccaatatccatgtgggtcaccattttcatgaccaagatccatataggtcagcaacgcttccaccatcaacttctacagtaaagacaatcaaaaagcataattttagaaggtatgtatagaataaatatagcatgtgaaaggtgaaaaaaatatattcaactagagacaacttactctagtctttactcggcatcgctatcatcatcatcatcctcgacaagaattg

SEQ ID NO: 65392 - DNA, 834 bp, Zea Mays
agccgtttggtggggctgtctgtcgtatggtgcaccggacagtccggtgtacaccggacatgtccggtgcgccagtcacgtcaccaaagccgtcgggttccgaccgttagacctctgtcttctgggcccgcctggatgtccggtggcgcaccagacatgtaccgtagagtgtccggtgcgctagtatgggcgtgcctgcattctgcgcgcgctagcgcgcattcaatgcactgcaggtagccgttggcgccgaagtatccgttgcttcgatgtcacaccggatagtccggtgtacaccggacatgtccggtgaattatagtggactagccgttgcgaattcccgaagctggcgagttccagagccgctcttccttggagcaccggacactgtccggtgtacaccggacagtccggtgaattatagcggagcgcctctggattttcccgaaggtgacgagtttgaattggagtcctctggtgcaccggacactgtccggtgatgcaccggacagtccggtgcgccagaccagaggtgccttcggttgtccctttgctcttttgttgaacccaatactttgtctttttatttgctaagtgtgaacctctggcacctgtataacttatacactagagcaaactagttagtccgattatttgtgttgggcaattcaaccaccaaaaacaattagggactaggtgtacgcctaatttccttttacttaccatgatcaaaacaacacgaattcacgaaaacgacaacgaatcctagttcgagcaatccaccgaatacttggcgaacgtcacatggatcttacttcatcatccacaaaatc

SEQ ID NO: 65393 - DNA, 700 bp, Zea Mays
tcggcgagcacctcccagttgtagcaccaaggaatatccctgcacacaccaaactctggctcaaaccacaaccacggatgtaccaccacaacctgcgctatcacagtggaccagcgatgagggagaagagagaagcataaacaaagaaaggaggcgagggcacagggagctagagaccagcccgacggcgaagatgagcaaagaggggcggccgggcgccatgggagatggagcgcgcgccaccatgacgggcaggacagccagctcgccagagacggcgagcaggaagcaccagggagcagggcgagctcagcgacggcacccaaggctgagcagcagtaggcgccgtgagctccatggcggggtcgggctcagaaacggcgaggttgctgtgcgtcgtccgatggccagccatggcgagcaggagggcaggggcgtcggctatggagatgagcttggctgcggcttggctggagaagacgtaggtcaccgacgagcagagaggggacaagctccatggttgaagctcgggagccagggaggagagggtgtggtgagctatcgacggcgcagcaggggcaaggtccaacgagtggcagcggaggaggaccgccagagctcgacgccgggtcaagctcgccagagagaggggctgggcggggagatgaaggctgtgcggcggcttcaacccaggagatga

SEQ ID NO: 65394 - DNA, 2954 bp, Zea Mays
cgcaatggcaaattcgtaaaacacgtgaaatcaggaaaggaaaacagcaatcccctcatcatcgcttcctccaaaccctagcctgcctcttaccccgcccgacgacctgtttctgccagtcatatttcccgggcagcgcgcgatctcaacgctcccgtcgcgccctgcccctgcgcttcaaccgctccatccaggcgagatcctgcggatggaacccccggcggcaaaggaggcgccgtcaccgccgctccagcctgcggcggaggaggacgcgatgctctctgcgacggcggtcatggcgaaggaagcctctgtagcgttccagggacgtcgctacgccgactgcgcagaagtgctcacgaggctgctggacatgaaagagggcgatcccaaggtccaccataacatggccatcaccaaagccttcttggatggttgtcctgattcaaacaggctgcttaaaattctttgtgatgctaagagaagaagtgaagagcttgcatgtgcaactagagaacaagctgattctgcaaatggggtaggaaatagtgctccttcaggatcaagagggagtggcgttgcactacctttttctgctacacataatgtgtcgacttatggggatgagtttgacacgaccataattacattcaacatggctgtcatcctgtatcatcttcatgactatgaatctgcactatctgttttggacccattgtaccgaaacattgaaccaatggatgagacaactgctcttcatgtatgctttttattattggatatcacattagctttgcaagatgcaacaaaggctgcggacataatacagtacatggaaagggcatttggagtagctaacataacgagcccgaatgaaaatccaagcatagctcagcagcaattagctcaaccgaagcctcctgtgaaaattagcgtgcctccagattctgaattaaatgcttatgctggtggatatgagaacctttcggctggaattttaccagatgatcaaatagaatttgaatctctatactctagttttgatggacatcagaatttgggcaggcgtatctttaatgatttctcaagggcatctgctgatcttgctgctactgctgctgatttgaaagttagacttcagatttacaagggattcatctacagagcttctcttgaaatctcagctggagtatgcccgggggaattataggaaagctgtgaagctattgagcacaccacataatcgggctgaaccagcaatgctagccattttctacaacaacctgggctgtatactccaccgacagagatcgtatcacacctctatatggtgctttagcaaagcgctgaaatacactttatcacttcgttcagagaaaccaatgaagctgtctacattatcacaagacaagtcttgccttatttcatacaactgtggtgtccaacatttgatgtgtgggaagcctttgttagcagcttcttgttttcgtgaagctatgccgctcttctacaagcgacctcttttctggcttcgtttttctgagtgtagtctgctagctctagaaaagggtctcctgtgtgcaaaaggtgcttcttcatgcaacgatgagattgaagtcattgttgtggggtcaggacaatggaggcagttgattgtcaaccatgtgagcttgagaagtaatttaggttgtgcaggtgtgacttcaggtgaacataaaaagttggtttcacttggatttgctagacagtgtctactcaatgcgctgctactattgaatgctactgaacaggaaaattgggtaaccacatctaatgcagaggattacatccaaggaacattacaaggatataaaaactcaggtcagaagaacactacaagtacggattctaaaacaccttctgccccaactctagctaatgtaaatggtgaacaaaagggaacgagcttgaatgctaccttgcagagttctcttgctttctataatgagatctgtcgaaaagagaacctgaaaatgagacaggccatcctggggaacttggcgtttgttgaattgtgtcttgagaaccccttgaaagctttgtcttatgcaaagtcagtaatgcaggttaaagactgttccaggatgtatatattcctcagccatgtatacgcagctgaagctttgtgtactttgaacagaccaacggatgctgctgagaagctatcagtttatataagagatggcaatgatatcgagttgccgtataatatggagaactctgaaaaggccttggttgagaaagacagtgacagtgaagacttggctgctgctacagtgacaaaagtagccacagaagaatctgagtactcagagggcctcaggcctgaggaggcccgtggtgtcttgtatatcaaccttgccatgactgctgcagtgcagggaaaagttgagcaagccaactacatggtcagccgtggcctggcgatgttgcccaacaaccctcgagcagtgctagcatcggtttacatagacctcttgcaagggaagtcccaggaggctgtcgtgaagttgagacactgtaggaatgtgagatttagacccggtagcatagcagccagcagctgagcatagagaagcctcacttttcatggtttctgtagtttacaattaccatcatgatatttttggacgctgaccccaatgtggatgatcaaagatggtaatgttcctcctgtgtaccatacataagaaatgaactgtagcactgcccttttagcttcaggggtcaaatctcaaatgtgttgtaactgtaccggtttaatttgcctctctttggactgaagagaggtcaagtgatcaaaaacgtttcctatgttacgccaatattttggaaaataatgcttaaaagctgaggggtctgatcgatatacatttagggcttgttcggttagctctcaatccatgtggattaag

SEQ ID NO: 65395 - DNA, 2934 bp, Zea Mays
ctcatcatcgcttcctccaaaccctagcctgcctcttaccccgcccgacgacctgtttctgccagtcatatttcccgggcagcgcgcgatctcaacgctcccgtcgcgccctgcccctgcgcttcaaccgctccatccaggcgagatcctgcggatggaacccccggcggcaaaggaggcgccgtcaccgccgctccagcctgcggcggaggaggacgcgatgctctctgcgacggcggtcatggcgaaggaagcctctgtagcgttccagggacgtcgctacgccgactgcgcagaagtgctcacgaggctgctggacatgaaagagggcgatcccaaggtccaccataacatggccatcaccaaagccttcttggatggttgtcctgattcaaacaggctgcttaaaattctttgtgatgctaagagaagaagtgaagagcttgcatgtgcaactagagaacaagctgattctgcaaatggggtaggaaatagtgctccttcaggatcaagagggagtggcgttgcactacctttttctgctacacataatgtgtcgacttatggggatgagtttgacacgaccataattacattcaacatggctgtcatcctgtatcatcttcatgactatgaatctgcactatctgttttggacccattgtaccgaaacattgaaccaatggatgagctttgcaagatgcaacaaaggctgcggacataatacagtacatggaaagggcatttggagtagctaacataacgagcccgaatgaaaatccaagcatagctcagcagcaattagctcaaccgaagcctcctgtgaaaattagcgtgcctccagattctgaattaaatgcttatgctggtggatatgagaacctttcggctggaattttaccagatgatcaaatagaatttgaatctctatactctagttttgatggacatcagaatttgggcaggcgtatctttaatgatttctcaagggcatctgctgatcttgctgctactgctgctgatttgaaagttagacttcagatttacaaggttcgccttctactgctcactaggaaccttaaggttgcgaagcgagaactcaaagtactaatgaacatggcacgtggtagggattcatctacagagcttctcttgaaatctcagctggagtatgcccgggggaattataggaaagctgtgaagctattgagcacaccacataatcgggctgaaccagcaatgctagccattttctacaacaacctgggctgtatactccaccgacagagatcgtatcacacctctatatggtgctttagcaaagcgctgaaatacactttatcacttcgttcagagaaaccaatgaagctgtctacattatcacaagacaagtcttgccttatttcatacaactgtggtgtccaacatttgatgtgtgggaagcctttgttagcagcttcttgttttcgtgaagctatgccgctcttctacaagcgacctcttttctggcttcgtttttctgagtgtagtctgctagctctagaaaagggtctcctgtgtgcaaaaggtgcttcttcatgcaacgatgagattgaagtcattgttgtggggtcaggacaatggaggcagttgattgtcaaccatgtgagcttgagaagtaatttaggttgtgcaggtgtgacttcaggtgaacataaaaagttggtttcacttggatttgctagacagtgtctactcaatgcgctgctactattgaatgctactgaacaggaaaattgggtaaccacatctaatgcagaggattacatccaaggaacattacaaggatataaaaactcaggtcagaagaacactacaagtacggattctaaaacaccttctgccccaactctagctaatgtaaatggtgaacaaaagggaacgagcttgaatgctaccttgcagagttctcttgctttctataatgagatctgtcgaaaagagaacctgaaaatgagacaggccatcctggggaacttggcgtttgttgaattgtgtcttgagaaccccttgaaagctttgtcttatgcaaagtcagtaatgcaggttaaagactgttccaggatgtatatattcctcagccatgtatacgcagctgaagctttgtgtactttgaacagaccaacggatgctgctgagaagctatcagtttatataagagatggcaatgatatcgagttgccgtataatatggagaactctgaaaaggccttggttgagaaagacagtgacagtgaagacttggctgctgctacagtgacaaaagtagccacagaagaatctgagtactcagagggcctcaggcctgaggaggcccgtggtgtcttgtatatcaaccttgccatgactgctgcagtgcagggaaaagttgagcaagccaactacatggtcagccgtggcctggcgatgttgcccaacaaccctcgagcagtgctagcatcggtttacatagacctcttgcaagggaagtcccaggaggctgtcgtgaagttgagacactgtaggaatgtgagatttagacccggtagcatagcagccagcagctgagcatagagaagcctcacttttcatggtttctgtagtttacaattaccatcatgatatttttggacgctgaccccaatgtggatgatcaaagatggtaatgttcctcctgtgtaccatacataagaaatgaactgtagcactgcccttttagcttcaggggtcaaatctcaaatgtgttgtaactgtaccggtttaatttgcctctctttggactgaagagaggtcaagtgatcaaaaacgtttcctatgttacgccaatattttggaaaataatgcttaaaagctgaggggtctgatcgatatacatttagggcttgttcggttagctctcaatccatgtggattaag

SEQ ID NO: 65396 - DNA, 1084 bp, Zea Mays
agattgttcacaggcggtcacatctctcactaaataaggtttcaatacggtttaaatacggttgagcatattagtttttcttcttaaaaaagtggcgcgagattacagcttttggagagcagacgcggtaaaaagcccgctgtccgtgggtgacccacatgtcaacgagaataagattttcttcactggactgatccgagtcgttccccaaatccactgcttgaggaggtgagcactcggatccggcgaggtgccgcgagcgaggcgcgatgagagaccggcacttcggacaggccaccaatcaaatctcatttgtttcatgatgagtcactaccatctttcttccggaggttggtatggtcaccaaattgatgttttctagtattgccagcaggcctattttcagcaaatgccatgtcctctcaagtatgacaaaatggagatgtgaagcgtggacaatcagttggcactgcagccattggtggtccattcaagcctctgaatcatgatggaaaattagaaactaatttgatggtacaaaatggcattctagagaaggaaacaccttgccgcggtgatagcgccagaacagccgtcgacggcttcaagctcctgcgtgtgtttatttgggcaacagaactagacgtggatcacaagtagccgcattgtttatttgggcaacagaactagacgacattgggcgatgttgcctgggttcccaggttcgacggcttcaagctcctgcgggatacctgacgtttgggcaacagaactacccgcattgtttatggacctggacgtccatgcacctggacacgtcttgccattgggccttgttgcctgggtcgcttctaaaggcagtaaaatcattcaccaaggagtcgacgacacagctagctgatttgtctgctctgacgtgtgtgtaagcaaatgttgtatcaggtcatgtttgtaaggtgtgggaaatgaagtctaggcttatgtagtgccacaagtgttacaacaaaaaacgtagcatgcgctcctctgattcgtcgacattatattatatattatatttattcatcgtcgttatatttattgg

SEQ ID NO: 65397 - DNA, 757 bp, Zea Mays
gagcatattagtttttcttcttaaaaaagtggcgcgagattacagcttttggagagcagacgcggtaaaaagcccgctgtccgtgggtgacccacatgtcaacgagaataagattttcttcactggactgatccgagtcgttccccaaatccactgcttgaggaggtgagcactcggatccggcgaggtgccgcgagcgaggcgcgatgagagaccggcacttcggacagggaaacaccttgccgcggtgatagcgccagaacagccgtcgacggcttcaagctcctgcgtgtgtttatttgggcaacagaactagacgtggatcacaagtagccgcattgtttatttgggcaacagaactagacgacattgggcgatgttgcctgggttcccaggttcgacggcttcaagctcctgcgggatacctgacgtttgggcaacagaactacccgcattgtttatggacctggacgtccatgcacctggacacgtcttgccattgggccttgttgcctgggtcgcttctaaaggcagtaaaatcattcaccaaggagtcgacgacacagctagctgatttgtctgctctgacgtgtgtgtaagcaaatgttgtatcaggtcatgtttgtaaggtgtgggaaatgaagtctaggcttatgtagtgccacaagtgttacaacaaaaaacgtagcatgcgctcctctgattcgtcgacattatattatatattatatttattcatcgtcgttatatttattgg

SEQ ID NO: 65398 - DNA, 526 bp, Zea Mays
agcatattagtttttcttcttaaaaaagtggcgcgagattacagcttttggagagcagacgcggtaaaaagcccgctgtccgtgggtgacccacatgtcaacgagaataagattttcttcactggactgatccgagtcgttccccaaatccactgcttgaggaggtgagcactcggatccggcgaggtgccgcgagcgaggcgcgatgagagaccggcacttcggacaggccaccaatcaaatctcatttgtttcatgatgagtcactaccatctttcttccggaggttggtatggtcaccaaattgatgttttctagtattgccagcaggcctattttcagcaaatgccatgtcctctcaagtatgacaaaatggagatgtgaagcgtggacaatcagttggcactgcagccattggtggtccattcaagcctctgaatcatgatggaaaattaaaagttgattcaagcactgtcgacatgggcataggatatcctcagcatcaggaaaccgctcttcaacaaac

SEQ ID NO: 65399 - DNA, 844 bp, Zea Mays
gggaaatgtctgcattagttgacaacaatagcataatttgggaagctagtaaagccaccaatcaaatctcatttgtttcatgatgagtcactaccatctttcttccggaggttggtatggtcaccaaattgatgttttctagtattgccagcaggcctattttcagcaaatgccatgtcctctcaagtatgacaaaatggagatgtgaagcgtggacaatcagttggcactgcagccattggtggtccattcaagcctctgaatcatgatggaaaattagaaactaatttgatggtacaaaatggcattctagagaaggaaacaccttgccgcggtgatagcgccagaacagccgtcgacggcttcaagctcctgcgtgtgtttatttgggcaacagaactagacgtggatcacaagtagccgcattgtttatttgggcaacagaactagacgacattgggcgatgttgcctgggttcccaggttcgacggcttcaagctcctgcgggatacctgacgtttgggcaacagaactacccgcattgtttatggacctggacgtccatgcacctggacacgtcttgccattgggccttgttgcctgggtcgcttctaaaggcagtaaaatcattcaccaaggagtcgacgacacagctagctgatttgtctgctctgacgtgtgtgtaagcaaatgttgtatcaggtcatgtttgtaaggtgtgggaaatgaagtctaggcttatgtagtgccacaagtgttacaacaaaaaacgtagcatgcgctcctctgattcgtcgacattatattatatattatatttattcatcgtcgttatatttattgg

SEQ ID NO: 65400 - DNA, 337 bp, Zea Mays
attagttgacaacaatagcataatttgggaagctagtaaagccaccaatcaaatctcatttgtttcatgatgagtcactaccatctttcttccggaggttggtatggtcaccaaattgatgttttctagtattgccagcaggcctattttcagcaaatgccatgtcctctcaagtatgacaaaatggagatgtgaagcgtggacaatcagttggcactgcagccattggtggtccattcaagcctctgaatcatgatggaaaattaaaagttgattcaagcactgtcgacatgggcataggatatcctcagcatcaggaaaccgctcttcaacaaac

SEQ ID NO: 65401 - DNA, 1233 bp, Zea Mays
agcgatacttgccgggccccacgcgttctctccacttcctcctgacctttttgagtctcttcttccacccggcggcagcgggcagcgcaggcgagcagaccaagtcgcctgcagagtgcagactgcagatacagtccgtgctctgacggagcaacaggagaagcagagcgagccgaggcggagtcgacagcttggtgccttatcatggaggaagcggggaggggctgcggcttgctcaaggtggttgtgacgcacggccggaacctagccgtccgggatttcacgtccagcgacccctacgtcatcgtccacgttgccgacaaggtgagttcaattaaaagaagagcgaaatgaaggatttatgctgcctgcgcctgaatcgctagcaaagaaactagtatcaattatgctgacacagcaataatgttaatgtctgtcttggggtgctgattttggaaagtcagcttgatctactggtccaggtggttattcatacttaaataaattgtaccaaattaagtgtcttaattgtcatttcttctaggagtagtataatatataacacctgtctgtctcttccttcgctcctttcttttcttgtaccatgcagaccacaaaaacaaaagttatcaacagttgcctcaatccagtttggaatgaagagatgacattctccatgaaagaaccagtaggaataatcaaatttgaggtgttcgactgggaccggttcaagtacgacgacaagatgggccaggctttcctggacctgcagcctgtggcggcggcaaccaagctgcggagggcgctgcggctcacagctggcgagaccaacctgcggaaagtgaacccggacgccgacaactgtctgctctcagatagcttcgtgacgtacgccaacggggaggtcgcgatagatgctaggctgcggctgcgtgaggtcgagtccggcgagctgttcgtcactataaagtggattgaacctgacagcgccaacactggaaagcaagcggatcactagctagcgatgcattttgcttgcagcactgcaaatatgtaatatgacctgatgtgggctgatttatgaggattttttttaaatcgtatatttttattatcaattacaatgtagaaggtgttgtatgagaatttgagatgcatcatgtcggtcatccagtgcccgacgtgtcacctattagcagcggctatcctataacaacgcatgttttagacatt

SEQ ID NO: 65402 - DNA, 1366 bp, Zea Mays
acttcctcctgacctttttgagtctcttcttccacccggcggcagcgggcagcgcaggcgagcagaccaagtcgcctgcagagtgcagactgcagatacagtccgtgctctgacggagcaacaggagaagcagagcgagccgaggcggagtcgacaggcgagtggttccaccgaccgtctcccctgccgcaagcgaacggcggggaggggctgcggcttgctcaaggtggttgtgacgcacggccggaacctagccgtccgggatttcacgtccagcgacccctacgtcatcgtccacgttgccgacaagaccacaaaaacaaaagttatcaacagttgcctcaatccagtttggaatgaagagatgacattctccatgaaagaaccagtaggaataatcaaatttgtaagtttctatgccgacgaattctactctcgtcaaaaaagcaggattcaggacctgtttggatcagtacactaactgtccatgaatatggatcaatacactagcattgacaatctgaaatctgtggtgaattttcttgttcctttttctcagttttcggtctctctgaattcaatacattaactgtccatggactgaaatctagatctctaaacttgccaaattaatacactgcctatgttatgtgtttgcttacgtgaccaacatggacaccgatcagtgggctcaatattgtgatagcaattgttctcacagcgatcgaaggaaatgtttgcagttaaagtgaaaaaataatagtatgacacttctattacttaacaatattaagcccacggatctgtttcctgaacagaacgaccatcacctttggcaggaggtgttcgactgggaccggttcaagtacgacgacaagatgggccaggctttcctggacctgcagcctgtggcggcggcaaccaagctgcggagggcgctgcggctcacagctggcgagaccaacctgcggaaagtgaacccggacgccgacaactgtctgctctcagatagcttcgtgacgtacgccaacggggaggtcgcgatagatgctaggctgcggctgcgtgaggtcgagtccggcgagctgttcgtcactataaagtggattgaacctgacagcgccaacactggaaagcaagcggatcactagctagcgatgcattttgcttgcagcactgcaaatatgtaatatgacctgatgtgggctgatttatgaggattttttttaaatcgtatatttttattatcaattacaatgtagaaggtgttgtatgagaatttgagatgcatcatgtcggtcatccagtgcccgacgtgtcacctattagcagcggctatcctataacaacgcatgttttagacatt

SEQ ID NO: 65403 - DNA, 1493 bp, Zea Mays
acttcctcctgacctttttgagtctcttcttccacccggcggcagcgggcagcgcaggcgagcagaccaagtcgcctgcagagtgcagactgcagatacagtccgtgctctgacggagcaacaggagaagcagagcgagccgaggcggagtcgacagcttggtgccttatcatggaggaagcggggaggggctgcggcttgctcaaggtggttgtgacgcacggccggaacctagccgtccgggatttcacgtccagcgacccctacgtcatcgtccacgttgccgacaagcttgatctactggtccaggtggttattcatacttaaataaattgtaccaaattaagtgtcttaattgtcatttcttctaggagtagtataatatataacacctgtctgtctcttccttcgctcctttcttttcttgtaccatgcagaccacaaaaacaaaagttatcaacagttgcctcaatccagtttggaatgaagagatgacattctccatgaaagaaccagtaggaataatcaaatttgtaagtttctatgccgacgaattctactctcgtcaaaaaagcaggattcaggacctgtttggatcagtacactaactgtccatgaatatggatcaatacactagcattgacaatctgaaatctgtggtgaattttcttgttcctttttctcagttttcggtctctctgaattcaatacattaactgtccatggactgaaatctagatctctaaacttgccaaattaatacactgcctatgttatgtgtttgcttacgtgaccaacatggacaccgatcagtgggctcaatattgtgatagcaattgttctcacagcgatcgaaggaaatgtttgcagttaaagtgaaaaaataatagtatgacacttctattacttaacaatattaagcccacggatctgtttcctgaacagaacgaccatcacctttggcaggaggtgttcgactgggaccggttcaagtacgacgacaagatgggccaggctttcctggacctgcagcctgtggcggcggcaaccaagctgcggagggcgctgcggctcacagctggcgagaccaacctgcggaaagtgaacccggacgccgacaactgtctgctctcagatagcttcgtgacgtacgccaacggggaggtcgcgatagatgctaggctgcggctgcgtgaggtcgagtccggcgagctgttcgtcactataaagtggattgaacctgacagcgccaacactggaaagcaagcggatcactagctagcgatgcattttgcttgcagcactgcaaatatgtaatatgacctgatgtgggctgatttatgaggattttttttaaatcgtatatttttattatcaattacaatgtagaaggtgttgtatgagaatttgagatgcatcatgtcggtcatccagtgcccgacgtgtcacctattagcagcggctatcctataacaacgcatgttttagacatt

SEQ ID NO: 65404 - DNA, 2588 bp, Zea Mays
gttcactagcgtccgtgtccgatccgatggccttcggggcgacgagggttttgcctcaggcagtacaaatagcgcgcctcatccgcgccgcccccgcgctttttctctctgctgacgccgccgccgccgggagccgtaccccgggagagccccccagcccttatcaaaccctaaatcaaaaactatccaaaaaaatccgcaaaaaactagaaaaaatcccaaaaatcaccacttgattggagatggcggcgcaagggcaggcggcggctggatccgcgtccgagtctggcggctcaccggctgcctcagctgctgcagcggcggcggctgcgttcccggcgacttctctctacgtgggtgacctgcacgagagcgttcaggacgcacagctcttcgacgtcttcagccaggtcggcggcgtcgtctccgtgcgcgtctgcagagacatcaactcccgcaagtcgctcggctacgcctacgtcaactacaacaacactagcgacgctgcacgggcacttgaactgcttaacttcactcctatcaatggaaagcctatcaggatcatgtattctaaccgtgaccccagctcgcgcaaaagcggtgcaggaaatatatttattaagaatcttgataagtcaatagacaacaaagctttatatgacacgttctgtgcatttgggaatatcctttcatgtaaaattgcaacagacccctcaggagaatcaaggggatatggttttgttcagtttgagatggatgaatccgctcagtctgccattgataaactcaatggtatgcttatcaatgacaagaaagtgtatgttggaccttttgttcgtaagcaggacagggaaaatgtctcgaacaatatcaaattcagtaatgtgtatgtgaagaatctgtccgatactgttactgatgatgagttgaaggagatgtttggaaaatatggaaccataacaagtgctgttgttatgcgggatagtgatggaaattctaggtgttttggatttgtcaattttgaaaatgcagatgctgctgctcaggctgttcaagagttgaatggcaagatattcaatgataaggaactgtatgttggaagagcacaaaagaagtctgaaagagagatggagttgaaggagaaatttgaaaagaatattcaagaggtagctgagaagttccaaaacactaacttgtatctgaagaacttagatgataacattgatgatgaaaagttgcgtgaaatctttgctgagtatggcaatattacttcttgcaaggttatgcgggattcttatggtgttagcagagggtctggatttgtttctttcaaatctgctgaagatgctaaccgagctcttaccgagatgaatggcaaaatggttggaagcaagcccctttatgtagctcttgcacagcgtaaagatgacagaaaggcaaagctacaggcacagttttcacaaatgcgtcctgttgcaatggcaccttcagtaggtcctcgcatgcccatgtttccacctagtgttcctggagttggtcagcagctgttttatggtcagccacctccagccttcatcaaccctcaggctggatttgctttccagcaacctatgatgcctggtatgaggcctggtggtccaatgccgaactttatgatgcctatggttcagcagggacagcaaccgcaacgtcctgctggtaggcgtgctgggtctggtggaatgcagcagcccatgccaatgggtagtcagcaacagatattccctagaggtggtcgtggctaccgctatgctactggacgtggaatgcctgatcctggcatgcataatgttggtgctgtgatgccatctccatatgagatgggagggatggcaatgagagatgctggtgtctcacaacctgttccaattggggcactagccactgcgcttgctaacgcctcaccagatcagcaaagactgatgcttggtgagaacctgtatcctcttgttgaacagctggagcgtgagcaggctgccaaggtcactggcatgcttttggagatggaccagacggaggttcttcacctgctggagtcgccagatgctctcaaggctaaggttgctgaagccatggaggttctccgctcagcccagcatctccagcagagcaatgcctccaccgagcagcagctggctaatctatcactgaatgatggcgtcctctccagctgaatgtttctgatgattcagaaattgctggcaatttttgcttgatacctatctctagaatgcaattactttgtttactttattggaattttaggtgctgctctataattagctgaactagggggtggatttaattgccttgaattggttattttggttatatgaatatgttatgtcggagctcaggtctgtcattttggtatatggttatgttagcccttgtccgtttatcacccgaattatcacagattgaattttagagcgtcattgcttttctagctgatattttgttaagcaactcgttgcctcgagatgatcgattaggctatgatttttttctagcagcgtactaatttttatcttttatttcaaacccta

SEQ ID NO: 65405 - DNA, 2556 bp, Zea Mays
gttttgcctcaggcagtacaaatagcgcgcctcatccgcgccgcccccgcgctttttctctctgctgacgccgccgccgccgggagccgtaccccgggagagccccccagcccttatcaaaccctaaatcaaaaactatccaaaaaaatccgcaaaaaactagaaaaaatcccaaaaatcaccacttgattggagatggcggcgcaagggcaggcggcggctggatccgcgtccgagtctggcggctcaccggctgcctcagctgctgcagcggcggcggctgcgttcccggcgacttctctctacgtgggtgacctgcacgagagcgttcaggacgcacagctcttcgacgtcttcagccaggtcggcggcgtcgtctccgtgcgcgtctgcagagacatcaactcccgcaagtcgctcggctacgcctacgtcaactacaacaacactagcgacgctgcacgggcacttgaactgcttaacttcactcctatcaatggaaagcctatcaggatcatgtattctaaccgtgaccccagctcgcgcaaaagcggtgcaggaaatatatttattaagaatcttgataagtcaatagacaacaaagctttatatgacacgttctgtgcatttgggaatatcctttcatgtaaaattgcaacagacccctcaggagaatcaaggggatatggttttgttcagtttgagatggatgaatccgctcagtctgccattgataaactcaatggtatgcttatcaatgacaagaaagtgtatgttggaccttttgttcgtaagcaggacagggaaaatgtctcgaacaatatcaaattcagtaatgtgtatgtgaagaatctgtccgatactgttactgatgatgagttgaaggagatgtttggaaaatatggaaccataacaagtgctgttgttatgcgggatagtgatggaaattctaggtgttttggatttgtcaattttgaaaatgcagatgctgctgctcaggctgttcaagagttgaatggcaagatattcaatgataaggaactgtatgttggaagagcacaaaagaagtctgaaagagagatggagttgaaggagaaatttgaaaagaatattcaagaggtagctgagaagttccaaaacactaacttgtatctgaagaacttagatgataacattgatgatgaaaagttgcgtgaaatctttgctgagtatggcaatattacttcttgcaaggttatgcgggattcttatggtgttagcagagggtctggatttgtttctttcaaatctgctgaagatgctaaccgagctatttctcccatttagcttaccgagatgaatggcaaaatggttggaagcaagcccctttatgtagctcttgcacagcgtaaagatgacagaaaggcaaagctacaggcacagttttcacaaatgcgtcctgttgcaatggcaccttcagtaggtcctcgcatgcccatgtttccacctagtgttcctggagttggtcagcagctgttttatggtcagccacctccagccttcatcaaccctcaggctggatttgctttccagcaacctatgatgcctggtatgaggcctggtggtccaatgccgaactttatgatgcctatggttcagcagggacagcaaccgcaacgtcctgctggtaggcgtgctgggtctggtggaatgcagcagcccatgccaatgggtagtcagcaacagatattccctagaggtggtcgtggctaccgctatgctactggacgtggaatgcctgatcctggcatgcataatgttggtgctgtgatgccatctccatatgagatgggagggatggcaatgagagatgctggtgtctcacaacctgttccaattggggcactagccactgcgcttgctaacgcctcaccagatcagcaaagactgatgcttggtgagaacctgtatcctcttgttgaacagctggagcgtgagcaggctgccaaggtcactggcatgcttttggagatggaccagacggaggttcttcacctgctggagtcgccagatgctctcaaggctaaggttgctgaagccatggaggttctccgctcagcccagcatctccagcagagcaatgcctccaccgagcagcagctggctaatctatcactgaatgatggcgtcctctccagctgaatgtttctgatgattcagaaattgctggcaatttttgcttgatacctatctctagaatgcaattactttgtttactttattggaattttaggtgctgctctataattagctgaactagggggtggatttaattgccttgaattggttattttggttatatgaatatgttatgtcggagctcaggtctgtcattttggtatatggttatgttagcccttgtccgtttatcacccgaattatcacagattgaattttagagcgtcattgcttttctagctgatattttgttaagcaactcgttgcctcgagatgatcgattaggctatgatttttttctagcagcgtactaatttttatcttttatttcaaacccta

SEQ ID NO: 65406 - DNA, 2423 bp, Zea Mays
ccgcgctttttctctctgctgacgccgccgccgccgggagccgtaccccgggagagccccccagcccttatcaaaccctaaatcaaaaactatccaaaaaaatccgcaaaaaactagaaaaaatcccaaaaatcaccacttgattggagatggcggcgcaagggcaggcggcggctggatccgcgtccgagtctggcggctcaccggctgcctcagctgctgcagcggcggcggctgcgttcccggcgacttctctctacgtgggtgacctgcacgagagcgttcaggacgcacagctcttcgacgtcttcagccaggtcggcggcgtcgtctccgtgcgcgtctgcagagacatcaactcccgcaagtcgctcggctacgcctacgtcaactacaacaacactagcgacgctgcacgggcacttgaactgcttaacttcactcctatcaatggaaagcctatcaggatcatgtattctaaccgtgaccccagctcgcgcaaaagcggtgcaggaaatatatttattaagaatcttgataagtcaatagacaacaaagctttatatgacacgttctgtgcatttgggaatatcctttcatgtaaaattgcaacagacccctcaggagaatcaaggggatatggttttgttcagtttgagatggatgaatccgctcagtctgccattgataaactcaatggtatgcttatcaatgacaagaaagtgtatgttggaccttttgttcgtaagcaggacagggaaaatgtctcgaacaatatcaaattcagtaatgtgtatgtgaagaatctgtccgatactgttactgatgatgagttgaaggagatgtttggaaaatatggaaccataacaagtgctgttgttatgcgggatagtgatggaaattctaggtgttttggatttgtcaattttgaaaatgcagatgctgctgctcaggctgttcaagagttgaatggcaagatattcaatgataaggaactgtatgttggaagagcacaaaagaagtctgaaagagagatggagttgaaggagaaatttgaaaagaatattcaagaggtagctgagaagttccaaaacactaacttgtatctgaagaacttagatgataacattgatgatgaaaagttgcgtgaaatctttgctgagtatggcaatattacttcttgcaaggttatgcgggattcttatggtgttagcagagggtctggatttgtttctttcaaatctgctgaagatgctaaccgagctatttctcccatttagcttaccgagatgaatggcaaaatggttggaagcaagcccctttatgtagctcttgcacagcgtaaagatgacagaaaggcaaagctacaggcacagttttcacaaatgcgtcctgttgcaatggcaccttcagtaggtcctcgcatgcccatgtttccacctagtgttcctggagttggtcagcagctgttttatggtcagccacctccagccttcatcaaccctcagggacagcaaccgcaacgtcctgctggtaggcgtgctgggtctggtggaatgcagcagcccatgccaatgggtagtcagcaacagatattccctagaggtggtcgtggctaccgctatgctactggacgtggaatgcctgatcctggcatgcataatgttggtgctgtgatgccatctccatatgagatgggagggatggcaatgagagatgctggtgtctcacaacctgttccaattggggcactagccactgcgcttgctaacgcctcaccagatcagcaaagactgatgcttggtgagaacctgtatcctcttgttgaacagctggagcgtgagcaggctgccaaggtcactggcatgcttttggagatggaccagacggaggttcttcacctgctggagtcgccagatgctctcaaggctaaggttgctgaagccatggaggttctccgctcagcccagcatctccagcagagcaatgcctccaccgagcagcagctggctaatctatcactgaatgatggcgtcctctccagctgaatgtttctgatgattcagaaattgctggcaatttttgcttgatacctatctctagaatgcaattactttgtttactttattggaattttaggtgctgctctataattagctgaactagggggtggatttaattgccttgaattggttattttggttatatgaatatgttatgtcggagctcaggtctgtcattttggtatatggttatgttagcccttgtccgtttatcacccgaattatcacagattgaattttagagcgtcattgcttttctagctgatattttgttaagcaactcgttgcctcgagatgatcgattaggctatgatttttttctagcagcgtactaatttttatcttttatttcaaacccta

SEQ ID NO: 65407 - DNA, 586 bp, Zea Mays
cttcttataagtctaaaatgaggactcgttctggattggttcatggtgagggcacatcccaaaataaggctaacacgtcaaatccacagtcaacatctgtggttgggaatgcaattgcacaactcatcaatgtaggcattgatcatactcaccttctccatgagttggttcagcgtggtcagtgggatccaaaatgctgccagtacttataaggaatttctggacacgcaaccactagttttcactagagctgaagatttgcttgaggctgaggattggcttcgaactattgagcagaagtttggactcatccattgtgatggcgttcagaaaacccagtttgctgctcaacaacccagggtcaagctggagcctggtgggcaaaatattgtgcgacctagcctgagggatatcaagttccttgggttgagttctgtgaggcctttcaggcacattatatttcgaagggtatcatgggtataaaagttgatgacttctttaacctaaagcaaggtgaaggggagagtgttatggagtatttgtagaggtttaataagttatcttagtatgttgtagactatgtcgg

SEQ ID NO: 65408 - DNA, 1138 bp, Zea Mays
ttttctttttcacctttttataggttcagctcaagcagagcagactggttgtaggcttcagtcgaaactatctcgcccgccgcgctcctttccatcctcgattcctccttccttctatgtccaccgctgccgcaatggaaggtcgtctgtaccgtgctgtggatccgccacccagtaccgcgccgtggatggcggacctcccaaccctgccgatgtgtggattgctgtatcatacgcctacaggctggttatggccaagtcatttgtgaatgtggaattggtattgtttcttaagcactcatatagattccccgagcgtgaacgcctacaggctgagttcgatgacttggaaggttctgcattgtgcgactctagcaaaaatggcctgctcaacttcataatagctggtgcggcgtcccctccatctcaactccgccggctaccgctcttcttgctctgcaccggaggcctccttccaggtaaaatcagcctattctcgttggttcgatttgcccactactggtgtcctgatgggatgggggtggattgcttttaaaaatttcttgtgatgcagttgcaggtgtaggtgcagcggcttgtcactggagtttaggtccaaagtaagttgtcgtctcccacctctccctcacacctgtttataggaattacttctagctgtagtggtgatatttagcttagagtgagaatcgtgctggtgccgtgtggaactcgactcacctcgaaatgttgatggcgatgttgtctttggattaataaatagatgaatataataatcgccttgacaacttcttgtaatgtactggtatttttcggtaaaaaaagaaaaaaatcattagctcgttcaatcttgatgattaaacaacctggagtacctaatggtgcatgctttcttttttctctctctaggctagtgttccctgattttgcattgatttctgtgtggatgggcagattcatgttcgtgattgagttagcattatgtattgtgcacacatcaagccatggacgaatgtaaatattttgttgattttgtacgaacaaaagttttgtttcacctaaataccttgacccttactcattgcagttaccactagctaatttaccaaatgacccttac

SEQ ID NO: 65409 - DNA, 325 bp, Zea Mays
aataggtaggacattttatatggaagctaacaaaacaagtcttactattttaggagctcccaaactcgagttatagattttagaagaaagtgcaagaatctgaaatttcagcacacaagttcttgacccggagctcacctacaccttgttgtcgtagaggagggggtgatgccatgggagagctgccaaggtgagggaggagcatgggagggctcggtcgctagctccaagggagggggggctgctgctgcatggggagctagagagagggagatagagagagagggagggagtagggagagtggcgtggggagagggagggaga

SEQ ID NO: 65410 - DNA, 475 bp, Zea Mays
atgcattccaaaaatagaaactaatacaaggaaaagtatcacgacagtgtaagaaatgttcaacactttccaaacattgtcacatatatacaaccagcggcctccaaaagtaatgtacaaatagcaaccaagccgcctaccacctatgggtcgattaattaggacgatagaaacctccaaaggcgtggtgtacaactaaaggcctcaggtacacacacaggtaattaacactctccaacgcacaccaggaactgctctcctctagccgcccctcgtgcctttttctatagccgccacgagcacctgctcaatttattttccaacaacagtaggacctgttgtcctcttactgcccctcatgtgccttttctcaatgctctctgcatacgtcaggacccctcactgcttagtttaccttccaacacagcaaggacctactctgctaccatcaagacccctcactgctcagtttatc

SEQ ID NO: 65411 - DNA, 1169 bp, Zea Mays
cttatccccagtcatcttctccttccctgcagcggcgtgctcctatgctcctccccagcgtccctcaccgagcaccctctggcccagctcctcgccattttgcgccctcggagtcgtccggtccagtgtgcttcggtggatgggcgtcgactccccggcgtcggcttcgagctccctccctcaacgccgtcctcccagcagcgagtgtctctcttcctcgacgtctcttccatggttgcggctccctctctctttctggcctccactgccgcgtcactggatcggtcctgctcgcccccatggcgcctgggtggatctccctcctccctgaagcttttccccatggcgcccagtcttggttgctccctgtgccgtggagtctcctgcgcgcccagccatttctttcttctccctcagctcgctccctgttcgccgcgtgctctggagtcctctctgcaccgcaccgtgaagctcccatggcgccctgcttctctccctactggcgcgccgtggagcccttgctttctttcatgcagcgcctgctttccttgccgcgtgttgcctcagctccctcgtcgcggatcctgctcgcgagcatgctccttccctgaagattttcccccatggcgtccctgttttttcttcttccctgcgcgcagctcgttctttctctgtttgccgcgtgcgtctctctctgcgcgcttctctctcccgccccttctctcccatggtgcgccctggtccttgcttctttctctctctgctcatccccaagctgcgtcctggagtttgagttcgtcatcttcaaccttggtccaagccactcgctctctgccacgcgccatggaactctctgcgtcgcgcgtggtcctgctcttctcaccgcgctcggattccgtctccctgcgcgcactctcggattccgtctccctcacgcaccccttgccgaacccgtggtcacggtctcgccttgctgccacagccgcgcctactaccgcgaccgacctgctcccttgtgcgcgctctgcttccttgccgagctcatccctgtgcactgaggtcgcgtgcagctcgtgccctgctcggttgctgcttcctgttccccgtgtctgagctcgtcctcgacctcgtcgtacgtcgttctttggtcccggattggtggtcgtgcg

SEQ ID NO: 65412 - DNA, 2281 bp, Zea Mays
gtctagccttattcgcttcgccgtagcaccatcgtcatctgccagctccatcacccgtcatttttggtattttccccaacaccgcgcctttctgatctcgtcgttcgtcgatgcaatttatgtgtgcggatgaagaaagtgaagccagtgtatatagctcgcgggtgttcagctgaaggtcgtcgtcgtcgttccgtgcgtcgtcaagaaatcccaagcatcgggtgaagatgaagctagcagcgtgatgttcaccaagtgcgcgacaaaaagctcgaacatgtcgtcgatcgtcatcctcgtctacaccaagatctgagaagattaggcgcagaagaaaataaatcagtacgcggccgaagaattctcgatgtggacaaagaagcgcgatttgacgtagcactcaccctatttccggtgaaatgctgagctgaaaggcgtcgatttcgtggtttcaagtcggatgtcataagggtaagttaattcgtattccagtcaattaagtttataaatagattaaatagaattattggtcacaataaatgttattaatttagcatgcgtatattttgatgatcgatttagataaatatgtaaatcaagtaattaagatacacagtttaaagagttaataaaaagctaggaataaaaatagatgttttagtgttattatgtcaatttggttaatggatgtagtcgatgccctgctgtgatatccatgatgcttaatgcttggttttaagtgtttcatcttttttagtgtagattatctatattatacttgttatacatgtgctcatacatgtgcatcgtgcatctcatgaggtacgataaataatcacgtgatgcggaaaacgacccaagtcgaccccaagcgcgggctactccgcatggtgatgctgatggacgaaccgaaagatggataatcagaaggagtgccaagcaaaaggatgcttgccatgtggtcgccacttaacaaacactaacctagtgttatttaggcaagccccggtgcatttgctacctccttgatgttttaaaaatctttatcaccttgtttgatgcattaggtgataggagttgtgtgctaaaccattgatgcatttccttccttgaaaaattgattacccttccttgataccctttttgaaaagaattttatgatgcttagcttttctttagcaaacaaaattgttttgttttaaaacaaaggtgatgcttcagtggatgggaatgttttcaaaaataaaacttgatattgaatccatcaaggccttgatgggttcaacatcggaaaatatgtacctctgccaagtaccaaactttgggttgaaattaataaagctgagaccaggcggttgacttgcacgagaagggagtctcggtgtagtgtctccgtctgagtcgattaaggaccgtctcgatgtaggcttgctgatcgaggaccctttaactggtcacatgcctcaacatgggtaagctttgcctcgggcagactaataccagaataagataacacgcaatgggagtggagagatggcgagagtagcgtgtaccctccgtggcaagaggctggacggtggtgtatctgtgctctcggttggcgtgaacctgatctggtcttaagagccctattggcgagttgacatatgcaagggtcaagtgctacatatgtcgtgtgattggagatccttagctgagtataatcaattcggatcgccataacttcgcggacatgaagacttggtaactgccctacacgtagcaatccagggaagaaaaagggtgataaaagacggctagtataggccaagtgcttgaactagggtagaaagaactctagatgcaggtaattttacttaacttgacaagtaaaaatggatttttaaggatccacttttagtaagcatttttgcaaagcagagtctttgattcttgataagccataccttgaatccctctagccagcatacccttgaaagtcttttctttagtcaggtaagtctttgctgagtaattccgtactcagggttttattccctgttgtttttcaggttatagttttgtgctgctgatgatggtgttaagtgccggtgggctcgaccttcttataagtctaaataactctcctatacttcttattgaggatggtcacttgagctagcatatatatcaaacttatacttttgtaatcactccgatgaatataatgtaaaacttttgtaacttgtaaaatttgataataagatttccgttgcaaaaatattggtgtgtgtgattt

SEQ ID NO: 65413 - DNA, 1020 bp, Zea Mays
  misc_feature (1020)..(1020): n is a, c, g, or t
atcctgacctccctcgccttggcatctcgcctccttggtcgacggccgcggtcttgttgctcgcctggagcaagtagacccaacagttgtggagattgtggagagatctttggaattctgtctcttacatctagaaaaatcatcatatgtgtgtgatgactttggcttactgaatgaggttgcctgttttgtggaatctgtgttgcttaaaggtaccctcaataaggtatcctcattggaacccagcattataaatgacatcattgagcagtggacatctgtccaagctgaaactgagcgcatgagcccacaagggaaatatttctgctatctaaaaggcttcaactgctcgaaaagtgaagatgaccttaaacagtttcatttggccttattaccagaatacttgcagcgagattatgttattttagagaattcccaatcatgcagtgcagtatctccaaatgccatggtgccattagcacagcattttgcggttgctcacttatgttgtatgccacgccttcttacactggttcagaagctttgccagtctcccgctttggaaatggttgaagatgtaaacattggcttgaggttgtctttcgcccaaaggattttgaaattagtctgtggtctcactattgagtttcctcctgatgcctctgatgccatgatgttatcctcagtagcgagatgtgctgatagtcttccagccttgtttagactgaggttcaatttctctaatcatgacagagtcttttctgtagatggtgttggcactatcttgctgcagatactggaagaatttttacaggtagtgcaaaatattagtgtttgcaacagtgatatctgttgtacagttaaagcatgcattctttcatccatgctggaaatcttcagtcctaatatatggagatatgaaaaatcgggtgcttgcttggtgcctcctttatcttattctcctcacgttgttcaatttgtgctgcaactttttaaagacaccaaacgatggacaagtcn

SEQ ID NO: 65414 - DNA, 1307 bp, Zea Mays
  misc_feature (1307)..(1307): n is a, c, g, or t
ctcccgtcctgcacatctctctcctttctcctttccttctcttatttctctcacacaaaaccctttctatcacaaggcgatcgatccgacgcctgctcctctctcttcaggggccgccgccgatagtagatccctcaccatggcggcggcggagatctcggcgatgctggaccttctagttgcctccggggagacggagccgccggtacgccgcctccggtcgcccgcggcgcgcccggggctcgaggccctagcgggggccctcgccgccggccagtcggctgacccaggcgccgcacgcaccgttctcgctgccgcccgagccgtcgtgtttcccgtcctccctgcctcagtggagcaagtagacccaacagttgtggagattgtggagagatctttggaattctgtctcttacatctagaaaaatcatcatatgtgtgtgatgactttggcttactgatgaggttgcctgttttgtggaatctgtgttgcttaaaggtaccctcaataaggtatcctcattggaacccagcattataaatgacatcattgagcagtggacatctgtccaagctgaaactgagcgcatgagcccacaagggaaatatttctgctatctaaaaggcttcaactgctcgaaaagtgaagatgaccttaaacagtttcatttggccttattaccagaatacttgcagcgagattatgttattttagagaattcccaatcatgcagtgcagtatctccaaatgccatggtgccattagcacagcattttgcggttgctcacttatgttgtatgccacgccttcttacactggttcagaagctttgccagtctcccgctttggaaatggttgaagatgtaaacattggcttgaggttgtctttcgcccaaaggattttgaaattagtctgtggtctcactattgagtttcctcctgatgcctctgatgccatgatgttatcctcagtagcgagatgtgctgatagtcttccagccttgtttagactgaggttcaatttctctaatcatgacagagtcttttctgtagatggtgttggcactatcttgctgcagatactggaagaatttttacaggtagtgcaaaatattagtgtttgcaacagtgatatctgttgtacagttaaagcatgcattctttcatccatgctggaaatcttcagtcctaatatatggagatatgaaaaatcgggtgcttgcttggtgcctcctttatcttattctcctcacgttgttcaatttgtgctgcaactttttaaagacaccaaacgatggacaagtcn

SEQ ID NO: 65415 - DNA, 1259 bp, Zea Mays
  misc_feature (1259)..(1259): n is a, c, g, or t
tgcacatctctctcctttctcctttccttctcttatttctctcacacaaaaccctttctatcacaaggcgatcgatccgacgcctgctcctctctcttcaggggccgccgccgatagtagatccctcaccatggcggcggcggagatctcggcgatgctggaccttctagttgcctccggggagacggagccgccggtacgccgcctccggtcgcccgcggcgcgcccggggctcgaggccctagcgggggccctcgccgccggccagtcggctgacccaggcgccgcacgcaccgttctcgctgccgcccgagccgtcgtgtttcccgtcctccctgcctcagtggagcaagtagacccaacagttgtggagattgtggagagatctttggaattctgtctcttacatctagaaaaatcatcatatgtgtgtgatgactttggcttactggtaccctcaataaggtatcctcattggaacccagcattataaatgacatcattgagcagtggacatctgtccaagctgaaactgagcgcatgagcccacaagggaaatatttctgctatctaaaaggcttcaactgctcgaaaagtgaagatgaccttaaacagtttcatttggccttattaccagaatacttgcagcgagattatgttattttagagaattcccaatcatgcagtgcagtatctccaaatgccatggtgccattagcacagcattttgcggttgctcacttatgttgtatgccacgccttcttacactggttcagaagctttgccagtctcccgctttggaaatggttgaagatgtaaacattggcttgaggttgtctttcgcccaaaggattttgaaattagtctgtggtctcactattgagtttcctcctgatgcctctgatgccatgatgttatcctcagtagcgagatgtgctgatagtcttccagccttgtttagactgaggttcaatttctctaatcatgacagagtcttttctgtagatggtgttggcactatcttgctgcagatactggaagaatttttacaggtagtgcaaaatattagtgtttgcaacagtgatatctgttgtacagttaaagcatgcattctttcatccatgctggaaatcttcagtcctaatatatggagatatgaaaaatcgggtgcttgcttggtgcctcctttatcttattctcctcacgttgttcaatttgtgctgcaactttttaaagacaccaaacgatggacaagtcn

SEQ ID NO: 65416 - DNA, 8430 bp, Zea Mays
  misc_feature (1)..(2): n is a, c, g, or t
nncagcactcggggtaagcttgctgttggagaaggtgataaagttgctataaaggatgtgggacaaatcattggacagcctactgcagcacctattacagcagacaaaaccaatatgaagcccctttccaggaatattgtccgctttgaaattgtccatttagtttacaatccattggtggaccattaccttgctgttgctggatatgaggattgccaagtgttaacattaaatagtcgtggtgaagtaactgatcgccttgccatagaacttgctctgcaaggaccatatattcgtcgtttggaatgggttcagggttctcaggtacaactcatggtagtaacaaacctgtttgtgaagatatatgatctctcacaggataatattagccccatgcattattttaccgtagctgatgatgtgatagttgatgcaaccctcgtcccctcctcaatggggaaattggtgctacttgttctttctgaaagcggtgttttatataggctgaatgttacattggagggtgatattggtgccaagatattgactgaaacagtcttggtcgaagatgtcatatccatgcatagagggttatcattgtacttctcatcaacctacaggcttctttttgtatctcaccaagatggtacaaccttcatgggacgtttgaatgctgattcttcatcaataacggaattgtcatatataaatgaggatcatgatggtaaatctaagccagctggactctactgttggagagagctagtagctggcagtggtatccttacttgcctatcgaaatctaaatcaaatgctcctcttgtggcgttgttgagtcctcatcaattggttgcacaaaacatgaggcacaatactggtgcaaattcctcagtggttggtgttgctgcctataagcctttatccaaagataaaacacattgtcttcttttgtatgatgatggaagccttcatatttactctcatacacctagtggaggtgacggttcgatgaaccttacagcagagcaaacaaagaagctgggcagcagcatactcagcagtagagcttacactggcacaaaaccagaatttccacttgatttctttgagaagacaacttgccttacatgcgatgttaagttcaatagtgaaacaacaaagagtggcgattctgaaagcattaagcaaagattgacatcagatgatgggtatttagagagtttgacacctgctggcttcaaggtggctatttcaaatcctaaccctgatatagtcatggttggttgccggattcacgttggcaacacatctgctagcaatattccttctgagatcacaatttttcatagagtcattaagcttgatgaaggcatgagatcatggatagattgtattgaaatttatggccgagccaaagatgaatttggatggaaggaaaaaatggatgcagcgcttgatatggaagcattgggtggtaatgctactggtggtagatctggaaagagactccaaatcgtgaaggctgctcctatccaggagcaagttctggcagatgcccttaggattctctcacgaatatacctgctatgccaaccaagttgctttactgacatggttgatggaggcatggaacttgataatatgaaatgccgagctttactggaaaccatttttcaaagtgacagggaacctctgctacattccgccgcatgtcgtgtccttcaggctgtgttcccaaagaaggacatgtaccatcatgttaaggacaccatgcgtctccttggggtaataaaatcactcccagcaataacttcaagaattggagttggaggtgccgcatcgagttgggtgataaaagaatttattgcccagatccatacagtttcaaaagttgcattgcacaggaaatcaaacctagcctcttttcttgaaagtcacggtacagaactagtcgatggtcttatgcaggtattctggtgtatattagatttagacaggccggacacacagacaataaatagtcttgttgtgccttgtgtggaatttatttatagctatgctgaatgcctggctttgcattccaatgaaaaaactagtgtgtcagtgggacctgcagttgctctgctgaaggagctgctctttgcaccatatgaagcagtacagacatctagcagtttggctatctcatcccgatttcttcaagtccctttccccaagcagacaatgatagctaatgatgatgctcctgaaaaccaagctaaagcaagtgcttctgctatgaattcaaccagtgcaaactctcaggttatgattgaagaagatcctgtcacatcatcagtgcaatattgttgtgatggctgttccaccgttcctatacttcggcaaaggtggcactgtagcatatgtccagattttgacctatgtgaaacttgctatgagatacttgatgcagatcgtttaccagcaccccattctaaagatcatccaatgtcagcaatacctattgaagttgatacatttggaggtgaaggcagtgaaatccatttctctgtcgatgagctaacagattcaggtgttcttcatgctgataggagtgttcagacctccccatcatcaattcatatatttgatgcaagtgagtctgcagacttacctgagactattacagaccaggcaactgtttcgatttctgcatcaaaacgtgccattaactccctggtacttaaccacctaattgaagagcttagaggctggatggggaccactgctggtactcgagccatacctttaatgcagttattctacaggctttcttctgctgttggtggtcctttcatggatagttcaaagccagaaaattttgatttggagaagtttgtgaagtggctaatggatgaagtcaacataaataaacagttccctgccaaaacacgatgcacatttggtgaagtattgatccttgttttcatgttcttcacacttatgttccgcaactggcatcaacctgggagtgataattctcattcaaagtcaagtgggagctctgatttgacagataaaggtcctgctcaggttctgggatcaacaacaataactcttccgtcatctagtgctgacctggataaaaatgagtttgcttcccagttagtccgtgcctgttctgccctcaggcagcagaaatttttgaattatcttatggatattctgcagcaacttgttcatattttcaagtcatcatccataaatggagaagctggttcttctggttcaggctgtggatccctattgacaataagaagagagctgccagctggaaatttctctccctttttttcagattcatatgctaaatctcatccaactgatctgttcatggactactacaaattattgttggagaatactttccggcttgtatatagtatggttagaccagaaaaggagaagtctgctgagaaggatagatgctacaaggttcccaacactaaggatctaaagttggatggatatcaagatgtgctttgcagctatattagcaatcctcatactgcatttgtccggagatatgcaaggaggctcttccttcatttatgtggcagcaagactcactattacagtgtgagggattcgtggcaatgttcccatgaagttaagaaacttaataagatcataaacaagtctgggggtttcagaaatcctgtgccttacgagagaagtgtcaagctcataaaatgtttatctactctttgtgatgtggctacggcaagaccaaaaaattggcaaaagttctgtttgaagcacatggatcttcttccatttctcatggacaatgtttatcatttcagtgaagagtgtgttattcagactctcaagcttctaaatctggctttctattcaggaaaagatgctaatcataatgcacaaaaagcagagactactgatctaggaggttctacgaggactagctcacagtctccagatatgaaaaagaaccggaaggctgatgatggttctgaaggttcctcagaaaagtcgtgcatggacatggaacaggttgtagagatgttcagtgataaggaaggtgacatgttgaaaaactttatcaacatattcttactagaatggaactcagcaggtgtccgtcatgaggctaaatgtgttctatttggagtgtggtaccatgcaaaaaaccgacttagggagacaatgctatcgattctgctacagaaggtaatacatcttcctttatatggacaaaacattgttgagtacactgacctcatcacctgtttacttgggaaagtgaacgacttcagtgcaaagcagaatcactctgaacttgtgaataaatgtttgacatctgaggtcataagctgcatctttgacacactccattctcagaatgagctattggcaaatcatccaaattcacgtatatacaacacattgagttgcttagtggagtttgatggctattacttagagagtgagccttgtgttacctgcagctgccctgatgttccgtattcaaggacgaagcttgaaaccctcaagtctgagacaaaatttactgacaacagaattataataaaatgcactggaagctttactatacagtcagttacaatgaacgtttatgatgctcgtaagtctaaatcggtcaaagtacttaacctgtattacaacaacaggcctgtgactgacttatcagaattgaagaataattggactctttggaagcgtgctaagagctgccatcttacatttaatcagacagaattgaaggttgaatttcccattccgattacagcatgcaatttcatgattgaacttgattcattttatgagaatcttcaagcttcttcccttgagtcactgcaatgcccacggtgtagcaggtctgtcactgataaacatggcatatgtagtaattgccatgaaaatgcatatcagtgccggcagtgtagaaatattaactatgaaaatcttgactcttttctctgcaatgagtgtggatacagcaaatatggtcgttttgaattccacttcatggcaaaacctagtttttcatttgacaacatggaaaatgatgatgacatgagaaaaggattggcagcaatagagtcagagtcagaaaatgctcataggcggtaccagcaactgatgggatttaaaaagcctctcatcaaacttgtgtcaagcataggtgaacaggaggtagactcgcagcagaaggatgctgtccagcagatgatggtgtccttgcctgggcccacatgcaaggtaaatcgcaagattgcacttcttggtgttctatatggtgaaaaatgcaaagccgcttttgattctgtgagcaaaagtgttcagacattgcaagggctccgccgtgttttaatgacatatctacaccaaaaaagttctagtgacaccaatgcattaccagcattttcaataccaaggtctccaaatagttgttatgggtgtagcaccacgtttgttacacaatgcttagagttattacaagtgctttcaaaacatgaaaactgcaggaagcagcttataagtgctggagttttgtcagagttatttgaaaacaacattcatcagggccctaggacagcacgcactcttgctagggctgtgctatcttcgttttctgaaagtgatgaagatgcagttcatgaattgaacaacttgattcagaagaaagtgatgtattgccttgagcaccatcgttccatggacattgcacaatcaacacgagaagacttactgctgctatcagagacttgtgctcttgtggatgagttttgggaggcacgattacgtgtcacctttcaactgttgttctcttctattaaggttggagcaaaacatcctgcaatttcggaacatattattcttccttgtttgaggataatttctcaggcttgcacgcctccaaaatctgattgtggggacaaagagtcaggtttgggagtatctagcttgacgttgcactctaagaatgatgatacaactggtaacacagcatctaataaccccaatactaagattcagtcagatatatctggaaaaatttatgatggaagtcgaagagaccaggatattccacttttgagctattctgaatgggagggcggtgcgtcatatttagatttcgtccggaggcagtacaaagtatcccaggcagtgaaaggatctgctcagaagacacgccatgattcatataagtctgactatctggttctcaaatatggactcagatggaagcgtcgtgcatgtttgaagtcaagtaagagtgacttctcaaaatttgccttgggctactgggtatcagacttgatcttgagttcgtgttcccagtcaataagatctgagatttgcactctcataagcttgctatgcccatctaactctcctagacaatttcagttattgaacttgctcatgtcactacttcctcgaacactctcagctggtgaaagtgcagcagagtactttgagttactagggacaatgattgattcagagtcttctcgtctattcctaactgttcgtggttgtttgacaacattatgttctttgataacaaaagaagtgtccaatgttgaatcacaggagagaagcctaagcattgatatctcacagggattcattctccataagcttgttgagctcctgaacaagtttcttgaagttcccaatatcagagcaaggtttatgagtgataggttactatctgaggtgttggaagcttttttggtgatccgtgggcttgtcgtgcaaaagacaaagttaattaatgactgcaatcatcttttgaaagaccttcttgatagcttgcttcttgagagtactgaaaacaaacgtcaatttattcgtgcttgcatctctggattgcagaggcatgtgaaggaaaaaaagagacggacgtctttgtttattttggagcaactctgcaatctgatttgcccagtgaaaccagagcctgtttatcttttgatactgaacaaggcacatactcaagaagagttcatcaggggttctatgacaaagaacccatactccagtgtggatgttggccctctaatgcgggatgtgaaaaataaaatatgtaaccagcttgatttaattggacttttggaggatgattatggtatggaattattagttggtggtagtataatctcacttgatctgagcatttcccaagtctatgagcaagtatggaggaagcaccatggtcaaactcaacattgtttgtccaatgtcagcgcaataactggtgcttcatctatcagagattgcccaccaatgacagtgacctacagactgcagggtttagatggtgaagctactgagcctatgattaaagagctggaagaggaaagggaggaatcacaagatcctgaaatcgagtttgctatagcaggtgctgttagggaatgtggaggccttgagattattttgagcatgattcagagcctgcatgatgatgagttcaggtctaatcaagaagagttgacttctgttcttaaccttctaaaatattgttgcaaaatccgtgaaaataggtgtgcactgttatgtctgggtgctttgggtttgcttcttgagacagctagacgcgcattttctgcggacgcaatggaacctgctgaagtactgaagcgattggcgctggtgaggaggccaggaaaattgttctcatgtttttggagagaatatgtcatccttcaggtgccaaaaaatcaaacaagcaacaaaggaatgaggagatggtggcaaggatcctgccgtacttgacctatggggaaccaacagctatggaagctcttattcaacattttgagccctaccttagggactggtctgaatttgatcaattgcagaagcaacatgaagataatccaaaagatgataatataagccaaaagctgtcaacacagcgatctgctatcgacaactttgttcgtgtatcagagtcactcaagactagttcatgtggtgagaggctaaaggatattattctggagaagggcatcacaaaagctgctgttgagcatgtaaaggaaagctttgcttctgctggacagactggcttcagaacaagtgaagaatggacaacaggcttaaaactgccatctattccacccattctgtcaatgttgaaggggctggctaagggccatctgcctacacagaaatgcattgatgaagaaggcatattaccactgctccatgctctggaaggggtgcctggtgaaaatgaaattggtgcaagagcagaaaatcttttggatacactagccaataatgaaaataatggtgatggcttccttggagagaagattcaagagctgcggcacgctacaagggatgagatgcgtcgccgtgctctttgagaaagagtgatgctacttcagg

SEQ ID NO: 65417 - DNA, 8424 bp, Zea Mays
agcactcggggtaagcttgctgttggagaaggtgataaagttgctataaaggatgtgggacaaatcattggacagcctactgcagcacctattacagcagacaaaaccaatatgaagcccctttccaggaatattgtccgctttgaaattgtccatttagtttacaatccattggtggaccattaccttgctgttgctggatatgaggattgccaagtgttaacattaaatagtcgtggtgaagtaactgatcgccttgccatagaacttgctctgcaaggaccatatattcgtcgtttggaatgggttcagggttctcaggtacaactcatggtagtaacaaacctgtttgtgaagatatatgatctctcacaggataatattagccccatgcattattttaccgtagctgatgatgtgatagttgatgcaaccctcgtcccctcctcaatggggaaattggtgctacttgttctttctgaaagcggtgttttatataggctgaatgttacattggagggtgatattggtgccaagatattgactgaaacagtcttggtcgaagatgtcatatccatgcatagagggttatcattgtacttctcatcaacctacaggcttctttttgtatctcaccaagatggtacaaccttcatgggacgtttgaatgctgattcttcatcaataacggaattgtcatatataaatgaggatcatgatggtaaatctaagccagctggactctactgttggagagagctagtagctggcagtggtatccttacttgcctatcgaaatctaaatcaaatgctcctcttgtggcgttgttgagtcctcatcaattggttgcacaaaacatgaggcacaatactggtgcaaattcctcagtggttggtgttgctgcctataagcctttatccaaagataaaacacattgtcttcttttgtatgatgatggaagccttcatatttactctcatacacctagtggaggtgacggttcgatgaaccttacagcagagcaaacaaagaagctgggcagcagcatactcagcagtagagcttacactggcacaaaaccagaatttccacttgatttctttgagaagacaacttgccttacatgcgatgttaagttcaatagtgaaacaacaaagagtggcgattctgaaagcattaagcaaagattgacatcagatgatgggtatttagagagtttgacacctgctggcttcaagatgaagagttcacaattactgttggcccaacattcgatggttcatctatacctaggatagattgtattgaaatttatggccgagccaaagatgaatttggatggaaggaaaaaatggatgcagcgcttgatatggaagcattgggtggtaatgctactggtggtagatctggaaagagactccaaatcgtgaaggctgctcctatccaggagcaagttctggcagatgcccttaggattctctcacgaatatacctgctatgccaaccaagttgctttactgacatggttgatggaggcatggaacttgataatatgaaatgccgagctttactggaaaccatttttcaaagtgacagggaacctctgctacattccgccgcatgtcgtgtccttcaggctgtgttcccaaagaaggacatgtaccatcatgttaaggacaccatgcgtctccttggggtaataaaatcactcccagcaataacttcaagaattggagttggaggtgccgcatcgagttgggtgataaaagaatttattgcccagatccatacagtttcaaaagttgcattgcacaggaaatcaaacctagcctcttttcttgaaagtcacggtacagaactagtcgatggtcttatgcaggtattctggtgtatattagatttagacaggccggacacacagacaataaatagtcttgttgtgccttgtgtggaatttatttatagctatgctgaatgcctggctttgcattccaatgaaaaaactagtgtgtcagtgggacctgcagttgctctgctgaaggagctgctctttgcaccatatgaagcagtacagacatctagcagtttggctatctcatcccgatttcttcaagtccctttccccaagcagacaatgatagctaatgatgatgctcctgaaaaccaagctaaagcaagtgcttctgctatgaattcaaccagtgcaaactctcaggttatgattgaagaagatcctgtcacatcatcagtgcaatattgttgtgatggctgttccaccgttcctatacttcggcaaaggtggcactgtagcatatgtccagattttgacctatgtgaaacttgctatgagatacttgatgcagatcgtttaccagcaccccattctaaagatcatccaatgtcagcaatacctattgaagttgatacatttggaggtgaaggcagtgaaatccatttctctgtcgatgagctaacagattcaggtgttcttcatgctgataggagtgttcagacctccccatcatcaattcatatatttgatgcaagtgagtctgcagacttacctgagactattacagaccaggcaactgtttcgatttctgcatcaaaacgtgccattaactccctggtacttaaccacctaattgaagagcttagaggctggatggggaccactgctggtactcgagccatacctttaatgcagttattctacaggctttcttctgctgttggtggtcctttcatggatagttcaaagccagaaaattttgatttggagaagtttgtgaagtggctaatggatgaagtcaacataaataaacagttccctgccaaaacacgatgcacatttggtgaagtattgatccttgttttcatgttcttcacacttatgttccgcaactggcatcaacctgggagtgataattctcattcaaagtcaagtgggagctctgatttgacagataaaggtcctgctcaggttctgggatcaacaacaataactcttccgtcatctagtgctgacctggataaaaatgagtttgcttcccagttagtccgtgcctgttctgccctcaggcagcagaaatttttgaattatcttatggatattctgcagcaacttgttcatattttcaagtcatcatccataaatggagaagctggttcttctggttcaggctgtggatccctattgacaataagaagagagctgccagctggaaatttctctccctttttttcagattcatatgctaaatctcatccaactgatctgttcatggactactacaaattattgttggagaatactttccggcttgtatatagtatggttagaccagaaaaggagaagtctgctgagaaggatagatgctacaaggttcccaacactaaggatctaaagttggatggatatcaagatgtgctttgcagctatattagcaatcctcatactgcatttgtccggagatatgcaaggaggctcttccttcatttatgtggcagcaagactcactattacagtgtgagggattcgtggcaatgttcccatgaagttaagaaacttaataagatcataaacaagtctgggggtttcagaaatcctgtgccttacgagagaagtgtcaagctcataaaatgtttatctactctttgtgatgtggctacggcaagaccaaaaaattggcaaaagttctgtttgaagcacatggatcttcttccatttctcatggacaatgtttatcatttcagtgaagagtgtgttattcagactctcaagcttctaaatctggctttctattcaggaaaagatgctaatcataatgcacaaaaagcagagactactgatctaggaggttctacgaggactagctcacagtctccagatatgaaaaagaaccggaaggctgatgatggttctgaaggttcctcagaaaagtcgtgcatggacatggaacaggttgtagagatgttcagtgataaggaaggtgacatgttgaaaaactttatcaacatattcttactagaatggaactcagcaggtgtccgtcatgaggctaaatgtgttctatttggagtgtggtaccatgcaaaaaaccgacttagggagacaatgctatcgattctgctacagaaggtaatacatcttcctttatatggacaaaacattgttgagtacactgacctcatcacctgtttacttgggaaagtgaacgacttcagtgcaaagcagaatcactctgaacttgtgaataaatgtttgacatctgaggtcataagctgcatctttgacacactccattctcagaatgagctattggcaaatcatccaaattcacgtatatacaacacattgagttgcttagtggagtttgatggctattacttagagagtgagccttgtgttacctgcagctgccctgatgttccgtattcaaggacgaagcttgaaaccctcaagtctgagacaaaatttactgacaacagaattataataaaatgcactggaagctttactatacagtcagttacaatgaacgtttatgatgctcgtaagtctaaatcggtcaaagtacttaacctgtattacaacaacaggcctgtgactgacttatcagaattgaagaataattggactctttggaagcgtgctaagagctgccatcttacatttaatcagacagaattgaaggttgaatttcccattccgattacagcatgcaatttcatgattgaacttgattcattttatgagaatcttcaagcttcttcccttgagtcactgcaatgcccacggtgtagcaggtctgtcactgataaacatggcatatgtagtaattgccatgaaaatgcatatcagtgccggcagtgtagaaatattaactatgaaaatcttgactcttttctctgcaatgagtgtggatacagcaaatatggtcgttttgaattccacttcatggcaaaacctagtttttcatttgacaacatggaaaatgatgatgacatgagaaaaggattggcagcaatagagtcagagtcagaaaatgctcataggcggtaccagcaactgatgggatttaaaaagcctctcatcaaacttgtgtcaagcataggtgaacaggaggtagactcgcagcagaaggatgctgtccagcagatgatggtgtccttgcctgggcccacatgcaaggtaaatcgcaagattgcacttcttggtgttctatatggtgaaaaatgcaaagccgcttttgattctgtgagcaaaagtgttcagacattgcaagggctccgccgtgttttaatgacatatctacaccaaaaaagttctagtgacaccaatgcattaccagcattttcaataccaaggtctccaaatagttgttatgggtgtagcaccacgtttgttacacaatgcttagagttattacaagtgctttcaaaacatgaaaactgcaggaagcagcttataagtgctggagttttgtcagagttatttgaaaacaacattcatcagggccctaggacagcacgcactcttgctagggctgtgctatcttcgttttctgaaagtgatgaagatgcagttcatgaattgaacaacttgattcagaagaaagtgatgtattgccttgagcaccatcgttccatggacattgcacaatcaacacgagaagacttactgctgctatcagagacttgtgctcttgtggatgagttttgggaggcacgattacgtgtcacctttcaactgttgttctcttctattaaggttggagcaaaacatcctgcaatttcggaacatattattcttccttgtttgaggataatttctcaggcttgcacgcctccaaaatctgattgtggggacaaagagtcaggtttgggagtatctagcttgacgttgcactctaagaatgatgatacaactggtaacacagcatctaataaccccaatactaagattcagtcagatatatctggaaaaatttatgatggaagtcgaagagaccaggatattccacttttgagctattctgaatgggagggcggtgcgtcatatttagatttcgtccggaggcagtacaaagtatcccaggcagtgaaaggatctgctcagaagacacgccatgattcatataagtctgactatctggttctcaaatatggactcagatggaagcgtcgtgcatgtttgaagtcaagtaagagtgacttctcaaaatttgccttgggctactgggtatcagacttgatcttgagttcgtgttcccagtcaataagatctgagatttgcactctcataagcttgctatgcccatctaactctcctagacaatttcagttattgaacttgctcatgtcactacttcctcgaacactctcagctggtgaaagtgcagcagagtactttgagttactagggacaatgattgattcagagtcttctcgtctattcctaactgttcgtggttgtttgacaacattatgttctttgataacaaaagaagtgtccaatgttgaatcacaggagagaagcctaagcattgatatctcacagggattcattctccataagcttgttgagctcctgaacaagtttcttgaagttcccaatatcagagcaaggtttatgagtgataggttactatctgaggtgttggaagcttttttggtgatccgtgggcttgtcgtgcaaaagacaaagttaattaatgactgcaatcatcttttgaaagaccttcttgatagcttgcttcttgagagtactgaaaacaaacgtcaatttattcgtgcttgcatctctggattgcagaggcatgtgaaggaaaaaaagagacggacgtctttgtttattttggagcaactctgcaatctgatttgcccagtgaaaccagagcctgtttatcttttgatactgaacaaggcacatactcaagaagagttcatcaggggttctatgacaaagaacccatactccagtgtggatgttggccctctaatgcgggatgtgaaaaataaaatatgtaaccagcttgatttaattggacttttggaggatgattatggtatggaattattagttggtggtagtataatctcacttgatctgagcatttcccaagtctatgagcaagtatggaggaagcaccatggtcaaactcaacattgtttgtccaatgtcagcgcaataactggtgcttcatctatcagagattgcccaccaatgacagtgacctacagactgcagggtttagatggtgaagctactgagcctatgattaaagagctggaagaggaaagggaggaatcacaagatcctgaaatcgagtttgctatagcaggtgctgttagggaatgtggaggccttgagattattttgagcatgattcagagcctgcatgatgatgagttcaggtctaatcaagaagagttgacttctgttcttaaccttctaaaatattgttgcaaaatccgtgaaaataggtgtgcactgttatgtctgggtgctttgggtttgcttcttgagacagctagacgcgcattttctgcggacgcaatggaacctgctgaaggtattctactaattgtagaaagtcttactatggaagctaatgagagtgacataagcattgcccaaagtgtttttacaactagtactgaagcgattggcgctggtgaggaggccaggaaaattgttctcatgtttttggagagaatatgtcatccttcaggtgccaaaaaatcaaacaagcaacaaaggaatgaggagatggtggcaaggatcctgccgtacttgacctatggggaaccaacagctatggaagctcttattcaacattttgagccctaccttagggactggtctgaatttgatcaattgcagaagcaacatgaagataatccaaaagatgataatataagccaaaagctgtcaacacagcgatctgctatcgacaactttgttcgtgtatcagagtcactcaagactagttcatgtggtgagaggctaaaggatattattctggagaagggcatcacaaaagctgctgttgagcatgtaaaggaaagctttgcttctgctggacagactggcttcagaacaagtgaagaatggacaacaggcttaaaactgccatctattccacccattctgtcaatgttgaaggggctggctaagggccatctgcctacacagaaatgcattgatgaagaaggcatattaccactgctccatgctctggaaggggtgcctggtgaaaatgaaattggtgcaagagcagaaaatcttttggatacactagccaataatgaaaataatggtgatggcttccttggagagaagattcaagagctgcggcacgctacaagggatgagatgcgtcgccgtgctctttgagaaagagtgatgctacttcagg

SEQ ID NO: 65418 - DNA, 1572 bp, Zea Mays
ttgttattttggagcaactctgcaatctgatttgcccagtgaaaccagagcctgtttatcttttgatactgaacaaggcacatactcaagaagagttcatcaggggttctatgacaaagaacccatactccagtgtggatgttggccctctaatgcgggatgtgaaaaataaaatatgtaaccagcttgatttaattggacttttggaggatgattatggtatggaattattagttggtggtagtataatctcacttgatctgagcatttcccaagtctatgagcaagtatggaggaagcaccatggtcaaactcaacattgtttgtccaatgtcagcgcaataactggtgcttcatctatcagagattgcccaccaatgacagtgacctacagactgcagggtttagatggtgaagctactgagcctatgattaaagagctggaagaggaaagggaggaatcacaagatcctgaaatcgagtttgctatagcaggtgctgttagggaatgtggaggccttgagattattttgagcatgattcagagcctgcatgatgatgagttcaggtctaatcaagaagagttgacttctgttcttaaccttctaaaatattgttgcaaaatccgtgaaaataggtgtgcactgttatgtctgggtgctttgggtttgcttcttgagacagctagacgcgcattttctgcggacgcaatggaacctgctgaaggtattctactaattgtagaaagtcttactatggaagctaatgagagtgacataagcattgcccaaagtgtttttacaactagtactgaagcgattggcgctggtgaggaggccaggaaaattgttctcatgtttttggagagaatatgtcatccttcaggtgccaaaaaatcaaacaagcaacaaaggaatgaggagatggtggcaaggatcctgccgtacttgacctatggggaaccaacagctatggaagctcttattcaacattttgagccctaccttagggactggtctgaatttgatcaattgcagaagcaacatgaagataatccaaaagatgataatataagccaaaagctgtcaacacagcgatctgctatcgacaactttgttcgtgtatcagagtcactcaagactagttcatgtggtgagaggctaaaggatattattctggagaagggcatcacaaaagctgctgttgagcatgtaaaggaaagctttgcttctgctggacagactggcttcagaacaagtgaagaatggacaacaggcttaaaactgccatctattccacccattctgtcaatgttgaaggggctggctaagggccatctgcctacacagaaatgcattgatgaagaaggcatattaccactgctccatgctctggaaggggtgcctggtgaaaatgaaattggtgcaagagcagaaaatcttttggatacactagccaataatgaaaataatggtgatggcttccttggagagaagattcaagagctgcggcacgctacaagggatgagatgcgtcgccgtgctctttgagaaagagtgatgctacttcagg

SEQ ID NO: 65419 - DNA, 2157 bp, Zea Mays
gacatgcaagataaaggcttttttattttgaaagttggaaaacatattgctttttcttgtttctttttttattgttgtctttttttctatattaataaaaagaagaaagatacaaggtccatctagacccaggtacaaaggtccacctcacagcggccagaatctagcatacacaaaatgatccatctaccaacaagagaacttaatcaccactgggagggggctgcaaggattaccccttttcccagaaaactcccatatccgacactcctccccagcatgagttataactacaacaatactaggagagaggccgtcaaaaacacatctatttctataattccacaacacccagacacccaaaataataagggaattgagacgatccctgagaggacctttaagggcttgttcggttagctctccatccatgtggattgagtggaattgtgtgagtttaaatcccaagcaagtcaaacttcttaattttccaatcccatccaatccatgggtaacgggattaatcgaacaaggcctaacagtttcactgacttcttcccaccaagccatgaaactacgagtggttggttgcggtgctttggagaccaaattgcctaagaatgaggaaccaacattctctcgagaagacacaagccacaagaagatgatcaattgtctccccctattgatcacaaagaggacatctttctgggtgatcaaggcgtccagcacttcttaagggcagccaaccacatgaagaaacgacattttggcggtgcccaggatttccaaatcctctcataaggttcaaattgcacagatctaagagaccctcataggccgctttagccgagtatttgccattagcagccaaacgaaaaatatgcttgtcatatttatctagatgaagcacaacctgtgcaacaatgtcccagaggtgaaggaaatctgctgactccaacttacaatcccccacgtatgtcatttatccatagattctctgattgcctcttgcactgtcctcttgttaaccattcttctaggaataatctccataaggcgaggggcaacatcagctacacgctgccctccaatccatcgatcactccaaaagagggtagaggccccattgccgacctcagaatgcatggccatttttaaaaattctcgaatttttctcggaacatgaaaaggtagagaggcccatggacggtttggctcagttttttgcagccaagcccatctcattttaatagcccatcccagatgctgaaaatacccaatcctccgagatcaaggggtctacaaacttttcccaagcgacaagacaatgtcctcctctaacctcttttcgaccatgccaaagaaacccttttctgattctatcaatgtccttgacagttgaagatggcaaatccacaaccatggcaatttaaattaacatccctgtcataacagactacaccaaaacacgtcttcctgcttttgtcaacagatcagctttccatccaggaagttgatttgcaattttgtccacaatagtctgagcttgctccctcttcaacttatgaagagagaggggcaaaccatgatatttgcaaggaaaaccagctatctggcaaggccaaaaatgattacaacctcgagatcatcgtcttgatacctgatgggatagacattagatttctggttgttattgtagagcccagaagcctcgccaaaaagttgaaggatgtctaaagtaacattaatatcctcagccactggatgtatgaaaagaaccacatcatcagcaaaaagggagatacgatgttgcaaaagcctagatgaaagaggctgcaacaaaccttcatctgctttagaaaaagccgatcaagcacatcaatcactaggacaaaaagaatcgaagaaagtgggtcaccttgccgaagccctctctgatgtgtgatggtgctcccagggtggccattaagcagcacacgagtggaggaggtaaggagctgcccagacaagatgtctctccacacttgaccaaaacccagtctctgcatgacctcaaggaggaagggctaggataccgaatcaaaggctttagttatatctagcttgagcatcaatgttgttgtcattccattccattctgtgctaacaatatac

SEQ ID NO: 65420 - DNA, 1029 bp, Zea Mays
accaaacccactcgcaacaacggataacgctctcttccttcggctcctcccctctcgctcctatcctctcccctccaatggcgaccgccatttcctctctagtaactcctccgaccctccaccgccgctgcctgggccctgcctgcgtctccgtctccgtgtgcacccctatccgcatctccttccggcccgccgccgcgcctcaggtgtcgcgccggggctcggcgctgcgggtgtccgcctcctcggcggtgctcgaggcgccagaggcggtggcggcgcggaagctctacgtggggaatatccccaggaccgttacaaacgacgagctccgcgacatgttcgctgcgcacggcaccgtcgagcgggccgaggttatgtacgacaagtatacgaatcgcagccggcggtttgggtttgtcacgatgagcacagcggaagaggccaatgctgcagttgaggctctcaatgggactgaggttggtgatagaaaaattaaagtgaacgtcacagagagcttcttaccgaacattgaccgatcagcaccagaaccagaggctctgtttgtagatagggaatatcctcagtgcaacagtctcccacattccggggacctccaagtcaaaggggtatggctttgtcacattctcttctgaggaagaagttgaagctgctgttgctactttcaataacgcggaattggaaggacaactcattcgtgtgaatagagcttagattagcagaaatttgcaggggcaccggaggagggggaatatcttggcgaatacatgtagtaggagggatgttttgaggctagattttgataacaaagtgatcaagaccttcaatgtgatttcgatatgtcatacaatttttgtaccataacagtatatttttcttaacggcacttctaaatgataacataaaggcagtatggtttcagttatatagtatgtttgtttatttgaaacgaattctacaccatgtacattccaacattaatgttgtcagttcaatccctgactttgt

SEQ ID NO: 65421 - DNA, 2014 bp, Zea Mays
atgccgccgccggttaggaggaagcgggatcgcgggccaccaccgctcgtcctagtcgtgccacccaacgctgtatctcactgttcgtatcgtgatgcggtgattgctacgcctgatgtgcaaccggctgaagcggtccctaaggtggcagacgctccctccgtgcggacaagtcacgcccaaagggagagtgcgggcggattgtcggttaggttgtgtggggcgtctcaggacgttcaaacatcaggagagaaggatggcgcctggaaggcagttcatctccctgtagggcagagactagctccagaggtggcgcctgtcaggagtgccagtaatggggatccttctcgacctgaagctccggctcggtctgaaggaggatcaaatggccagcacttgacgacagcatgtcgtggtgatccttctcgacctgaggaaattgcctcggtctggacaaggatcaaacttccgaagaatgacatgatcaatgttggtggtggaagcattcattctcgacccgaggctcgtgactcagtctggagaaggatcagttcgacatctgtgtctacggaccaggacacggcacctgtggtcaaggcaagagataagacccacggttccaaaaggtgcatcgtgttggacgtctggccaacacccttgttcttgttccaacgcttgtcaccattggcccatttggctgtaccgtcgtcaccactcttggtagtctaccgccgcctgaactgctcctgtcaccctgcacgagggctgcagtgcaaattggcacctatccgaggaggtgcaggaactggtagcaatgaggtcagtaccagcgatgactttgtcgtcgttggtgaggtgtagctcctttaggagcagcatgtcgcaagcccaagcaaagtcaaggagcacgatggcgttggtgatgtcgtcggcagtgttggagaagcgagggttgttgtcacgcaacaggttgagaacaagttgatcgtcattcacatggtggccaacgtggctgatgtcacaaaggacattggcggagaccttcatgcgctgatagtagtcggcgatgacggagccaccctgttgcaagaagtggaactcggtggcgaggaagatggtgtttgacgccaggttggcatggaagatgtgtttgatgaccgtccataggtcacgagcgatctaatcatcatcctcgatgactaggttgaggacaaagtcgctgacagaaccagagatctagctatggatgcatcagtccacctgatcccaggacagatcatcgggacgagggagaatagagtcgtcgatgtgcgacctgaggccaaacttgtcgcaagtagatttgaagcgggaagcccactttgagtagttggagtgtgccaagtccagggtgactgagacgtgagacttgacgcaggcggtgccataaagatgaatagccaccagttatgtcaaggaaggaagagggtcgttggtgtccatctccgtggagccagaggtggcagagatggtagtgtggtagagggggcggccgacatggcgctgcaggagagatggggaagggtcaacacatgaagggaaggtggcgatcggcatagattaagattggatctaatcagagggagaaggggggcaatggccaagggggccatggcttaggtttgggttgcggaagggatgggagcacgggagtggggtcgaactcatgataccatttagagaacagggaacacctcacatccatgaatgggggtgctttcacatatatagtggtgttggcttgttgtgcaaggaagttacggaagcaaatctaatctaatagatattatggttatcctttcctaataacagaaacagatctaatctaacagatcttatccttatcctttcctattagcctacacatattccctaataaaaatgaatccatgaaaatcaggccaagagcaattatagaactgtgtctggtggtcctcggatcgaaccagcctacctagaaacttccttctcaaat

SEQ ID NO: 65422 - DNA, 956 bp, Zea Mays
ctcatcgagtcccctgcgcgtcagcaagagctccaaggtccgagatgttcggcatggcgacgaagagacgacgacgagcaccatgaagggatcgacgacgttgatgcacatcatggtgaggcggcgtacagcgagggaaacaagaacaggcggacaaccggtcacgaactcgacgaggaggcgcgcggaggtggatcgacgaagttgttgctcacgatgcggagccggaggacggcaacgcagcaccaactagtggaaacggacggtgttgtgccaacggcggggcagagaacgacgctggccgggagcgcgcgccacgcgcggctggagaagtggcatgcgtatggcggctgactgccaagccggaccgagcagggagaaggcaacggcacatggcccagaggagacgcacagactggccataataaggccgtcggagaacgtggctaggacgctggcatccatgtccatggcgtggtcgagcaccacagcgaagttgaggaggagatccgccacccataaagtcgaggaggtggtgagcaacccacacaacacgaaggagtcgcaacgaggagagagctcgagctggaggaagagggtgtagtgaatggcgacgctggcctgcgtgccgagctgggaggagacactggcgtgctagggggaagccgagcaagagcgcgaccaagcctgcggcgaccaacaactaggcgcaatggcgagggagagacgagtgtgcgtgaaataagatcaaatcccagttgtgcagcccctatgagcgagacacatgcgtatggaggtggcatgaggaagggagtctccacaaaaatttgtgtgatctcgtactttggataagagaaaggaacgatgagataaaggagagaattttccttatttttttagaaaaacatacgaatgtatataatgctttggggattaaggttctgtgtggatgtaaa

SEQ ID NO: 65423 - DNA, 986 bp, Zea Mays
cttttaggcactcgtctccctggaaaaaaatctcgccgccgccgccgaagactccgtccatccccagccgcgactctctcttcctcatcttcctccctacgtgcgccgttttccccagcagcgagctgcagctgagcagctcgccctctccagccgcggtgcgcatctgcatggcggtcgagctccccttccatggtttccgcgccctctactcctcccagctggccgaggtccttcccatggcgctcgactttccccagtttctctgtgtcgtcgttcgcgccagaagacgaaaggaaaccgccaatgcaacgcttgtcaggtgttggtgttgtgcgcggaccggatagcgccatcgatttcgtagtttcaagtcagataattttaggattaggtacgctagttgagaatcatacgaagcaaaggacaaggaccaaagctgagttgaccacaagatgtcgctacacgtaagcttctccacaagataatgctgatggacgaaccagaagatggataatctaacaagtgtcagacaaagagctgatcgtcaagtgatcgacgtctaacaaacactaacgtagtgtttattccaagaaagccctagtgcattatccttttccttgtattttaaaatctttatcaccttatatgatgcattaggtgataggagttgtgtgccaaacaattgatgcatttccttccttggaaaattgattacccttccatgatacccttttatggaaaggatttttatgatgtttagtgtgacagaacctcccaagtcattaggcctacctacagttctccttgtccaacggacctcagacaaccctgcaggtgcacctgatcacttgacaagttcggtatctgaattccttaccttgcccaagagcgtttcacccgtcatgtagacattacaatacatcgaaggtacgaaaatgtggaagcaattacaataacttaccttatattaaagtaagaaagag

SEQ ID NO: 65424 - DNA, 1796 bp, Zea Mays
gtctccctggaaaaaaatctcgccgccgccgccgaagactccgtccatccccagccgcgactctctcttcctcatcttcctccctacgtgcgccgttttccccagcagcgagctgcagctgagcagctcgccctctccagccgcggtgcgcatctgcatggcggtcgagctccccttccatggtttccgcgccctctactcctcccagctggccgaggtccttcccatggcgctcgactttccccaggtccgaccggtgctcctccctgctccctggtgcttcctgctcgccatcacgcatggccgcgacctcgccttggctctctgctgtagctcgcttccatggacaccgttaaatgtcccttgtgtcgtcgtggtgccgtgagccatggccggctggccctgcttccttgcgtgtgctctggtagccccgtcgacctcagcaaactcgtcttctccaagcactatcgtgcctgggtgccggtccgacgacagggctcagtcctggtcccagtgcggacgtgagcttgccctgcagttgcacttcttccccagcgtcagccacagtcactgcgctcggccttaggtgtccaagctccctagccgacctccttcattagtctcaagctccgccccttcgtgctcgtcgctgaaattcgcccaggccacgacctcgtcgaactgcgcagctccctcctgccctcagttcccatggccaccgcgccgtcaaagctccctcgccatgcactctggcgtcggctgccgccgattctgccatagagctcacgagcgctcctttgtctgttcgttttgccgtgggcaatttctccacgcttcaaatccgtgctgctcgcacccacgtgcgctcaccaatttccttggtcgcatctgccgagctcaccaatgctccagctcgtcgttgtcgcctggtctaattgtcctagctcgtcctagtggccgtcgatttggagctctgcacggatttggccacacccaacactatccatgtcgccatcgtacatctctgcgtcatgtacagcaacgtcgccgaccatgccttcgccttcttcgacgctttctctgtgtcgtcgttcgcgccagaagacgaaaggaaaccgccaatgcaacgcttgtcaggtgttggtgttgtgcgcggaccggatagcgccatcgatttcgtagtttcaagtcagataattttagggtacgctagttgagaatcatacgaagcaaaggacaaggaccaaagctgagttgaccacaagatgtcgctacacgtaagcttctccacaagataatgctgatggacgaaccagaagatggataatctaacaagtgtcagacaaagagctgatcgtcaagtgatcgacgtctaacaaacactaacgtagtgtttattccaagaaagccctagtgcattatccttttccttgtattttaaaatctttatcaccttatatgatgcattaggtgataggagttgtgtgccaaacaattgatgcatttccttccttggaaaattgattacccttccatgatacccttttatggaaaggatttttatgatgtttagtgtgacagaacctcccaagtcattaggcctacctacagttctccttgtccaacggacctcagacaaccctgcaggtgcacctgatcacttgacaagttcggtatctgaattccttaccttgcccaagagcgtttcacccgtcatgtagacattacaatacatcgaaggtacgaaaatgtggaagcaattacaataacttaccttatattaaagtaagaaagag

SEQ ID NO: 65425 - DNA, 7254 bp, Zea Mays
aagaaaacagaacttataatttcttataatttaaaaacggatgaagaacaagatattgagtcaaatcaaagatgtttgtatgtaacacttagggttggtccatacaattacagagaacaatatagccatataggagccacacaattaccatgacaaactgttccaaacatttaattgcaacttacaacctgatacattgttcccaaagcgaaggagcaagtagacgcagtaatttatacttgagaaactactcggcaacatgctcgttgatcctcactttttactctctggatggcataggccaactgaaaactgacatccacacggcatgttttagttgcggcagcaaccgtccgcttcttgtggtagcaatatgtccagtgagagatgaatcatgtggtccgtgcggagtgcctataatcactggattcaagtttgtttcattaaccctttctgtcagcattgaagacctcgtattaattcatcgccatcagactgccgacagatcaatcatcctctaccccatctttggcccaaaagatggcggcactccctgtaaattgcaaaccaaccaagcaagtgtttgtatgtatgtatgtataagatttcacagagtgtgtatgttgtatatataagattttacaagatagatgttaaccaacaaaagaggacatatcgattgaattttgcaaatatacagcaatattatctaaatatatctaggcctagctaggcaagccctgtagtcaaaaaaaatgtctataaaagtctaagggctgatttggtgaatagtgatcacgagaggatccacggaggaggaattgaatagcaaggggattccgccaccatggatcccctcgtgatccctgtccaccaaatcagtcctaaatggacgcaccatccccctgcacagtagcccgcccaattggggcaagtataaatacggtttattatacaaatataacaatacaccatctaagaattatgtccatctcatttcttcctagtatacctctgtaaatgatgttccaactccataaataaatgcagtcgctatctaatcctactgaataagggagaagcagattaagctcaggaacaaaaagaagaaacaaccacaaagcattttcccaagcaaattgtgtcaaggacctcggggcccaaggtagcagggcctcgactacgaagatcgtagtcgcggcccgtggccaccggctgggttatgccccctggccgtcggcttagatgagagagaaggaagggattggataggtaatttcttccttattcctctccctgcggtacagggtatatatggcccttggcccaacaatctttcctaaacttaaggactaataggaggcaacaatcaaatctcctaatttctctcctagcccaactatctttcctaaacttaaggaactaataatagaaggtagcaatcaaatctcctagccactttcggtggtcctttccttaaccaagcgctcggcgcgctcagcagcccggcgcacgtcacgcgccctacggcgtctagtgtccgtgcgcccccacatgataaattgggatatactagagtaaccgggacacactagaagccttttcccaaacaaattaggatatagtgtaattgagatagactagagttgaaacccaacagaagccacaaggttaagacatgcggatagctattttccatacacctattcaaagcgctaaatatttggatatatttcatcatttcaaatctcctttttattgtctcttcccatgcaacttcagtcttgcttctcttcccgttactatcgcagcttacaatcccagtcttctgttatggattcttttattggaaagaagtacagtagacgccaaaagagacagataagtcattaggaggtaggttggttctattatttaggagatgcagcttttaggcaccaggataaggtgcagtttgttaggagatgttagtgctattatttagaagatggagttgttcgtttgttagagaggtgccatgatataaggtgccttagagtgtattaggaaatcatcgaaggaataagatctcccaacagtgggcgatcaccttcggccatcctggccccccagggtgatcgcacatctgctcctccatatttgttgtgttccctccccaactcctctctactgctctctccttggcacactccaagaagaaggcaggggcccccacaacaattggtatcgttgacggtcatggtattatgttctagaacgagaccacggcatattgtcctgggctcgctttgcagattttgttaacctgcattttggaccaccacttcgcaccaatggcctcgcagagtaaaggatctctgcaggacaactacagttgatgactacattacgcagttctccttagtgctatgttgttcatattgctcatattgttcatattttgagccaatttgtatcaacaccaacctcagttcattatggtcatttgcttcgtgtgcttagatacttacgtcggacaagatacaaatgtttactctatgcttctgatagcccacttcagcttcatgcatattccgatgccacttgggcatgtgatcctgttgatctttcttctactacaggtcactgtattcttcttggatcctcacctattgcctggaaatccaagaagcaagcggccatatctcgttctagtgctgaagccgaagcttcaggctcttgctactacaactgctgaaattatttggctgcgctagctcttgaatgatcttgttgtctcttgtgacactcctacacctctgttatgtgatagataacatgagtgctaaacagatttctcatgatccagtgaagcatgaacttactaaacacattggtgtcgatgcatcatttactcaatctcattgtcagcagaagactattgatcttcaatatgcgccctcagaatctcaattggcagatttcttcaccaaagcacaaacaagagcacaacatcactttcacttgatcaaactcaaagtttcagatcctccatttccaccttgagtttgaggaggggtgttaaggcccattaggccccactgcctatatatataatagtccgtagcaatgtttataagtcgttcgactaatcgcgattagtcgagctggtcgccagttagttggcgattagaaggatgacgcaaccagatttccaagtcgtccaagtcatccgactagtcaccgacctaggcgattaattgtccgatcgttaggaaactggtcgcccattgacgtctgcgcgtttatactgggctaatgggcttaactcattttttcatcccatctacagtagcaacatatatgtagcccctggtcagccgaaaccctacccctggctaacacaaaacctgccagccgccagcctttgttcaggcgtaaaccctactgctctctggcgtcgtccagctccagtcatcggcatccagtggtccagtcaccggcggctgctccaagctccagtcatcttctctggcagcgtctgtagcccaccggcggcatgccggcgtctccactctccagtccagcggaccaacatcagtcaccctgagtcgagatgagctcgtcttctgaacttctgctttcagttctgcacttctgctgctactaagttcagtaactactgttatcagttttagttttatgcctatattactttcagtttcagtatgttactactttttaagagtaaagacttatataatgtcactctattgcagtattgcagaaatgcagactaacattattgcttatatatagttatatacatatacatatgtccataaatctataggacgactaatagacgaccagaggtcgaccaggaccgattaggcgtcctaatcgtcgccctaatcgcgattaggcgcctggtcgctgctctagctcgaccagctggtcgcccgaattgtaaacattggtccttagggactgataatcaaccgttactcctaaggttagtaacagccatgaagggtcaagaagaccttgcatcgctggcaagcatccttttgcagtcctcgcagtatagctagggtaaaagagtatgtccgtgggtcttccacatgccaacgtaacaaatcagtgcatctgcacccagccggcctgctgcagccacttcaagtgccgtcagacatttggagcaatatagctatggattttattgaaggctttccaaaagttggtggcaaaactgttgtccttactgtggttgaccgcttctccaaatccgcacatttcattcctcttggtcatccatatacagcggcatccgttgctagagcattctttgactgcattgttctcgccttcatggatttccttgttctatagtaagcgatcgggacactgtgttcacaagcacattttggacagaactgtttcgtttggccggagttaaactttgtttaagttcggcattccatccacagtctgatgggcagtcggaggtcgttaacagaatcattgtgatgtatctcagatgcttggcaggggattggccaaagacctagctgcaatggttaccctgggcgaagttttgctataacacctctctgatgtgttctcctttcagagtcgtctatggccgctagccccctacattgctctcttatgataaaggcacctcgaaggtggaagcagtggatcgacaactgagagatagagatgaatatctggaacaaatcaaagacagattggtgcagtctcaagttacaatgaaacagtttcaggataaatccagaagagaagtatcctttgaggtagggaactgtgtatgggttcgattgcaacagctcagcagtaggtgtggcaactgcagcccacactaagctgagtcctaagtactatgggccctaccaaatcactcaaaagattgatgctgtttcatatggtgaggtgccttagattgtattaggaaatcatcgaaggaataagatctcctaacagtgggcgatcaccttcggccatcctggcctcccagggtgatcgcacctctgctgctccatatttgttgcattccctccccaactcctccctactgctctctccttgtcgcactccaagaagaaggcaagggccccacatcttcctaatattatcgtggcttagaatcccactacgcattagtgcttcttgatgtatccgttgatgatatgcaaaccaatctcaaaccggtgtcaggtaagctttttgcaattggtgttacccctaacctatcacgtaaatcattgttacgaactcgatcccttcttgtatggacattacctgttgaacatgttgtctttttataggccaacattcagcaccatgcaatatagcagctttgatcaccgtcctatgaaaacttgcgttttagcttccatgttaccatcttgtcacatagaatgtcggattcttgatgccacttcatcaacatggcaggtctaatcgttgttctataaaactttccttttagcttttgcggtaccctcttgtcacatagaaccccatatgcttgactccactttcatccaccccgctttgaatctatggctaacatcttcaacaatttccctatctccctatagcattgagtctaaactagtacaatgcccgtgtgttgcaatggtacataatcctatttgatgagtgacactggcaattcatttgacgaagagttgtatccttgctaccttctatgtactcatttccacttgcatacaggagagttcacgaactcatacctgatgtcattgtcatgatagtgttgccgctcgctgcgctcgagctccggctccctcactatctcctcttcctcgacacaaaggtccccgccgagacaggagagcgcagacagcaagcggtgggtcgtcagggcgaggacgttacgggggtagtcggacgggccaacggccaggcgggagtagcactcacggaggcaggcaatgtcggcggtgatgtccatggcggctgcgttgtcattgtgggagaggggagggagccaagatggggaggcttggaccgcgggttgattacaaagaaatataagggtttttttgcaaaagagttgacgcacgacgacagtggaaactagtgctttatagtagtagagatagagatagagaagagaagggatagagatattcaaagatatctttcccaaacactacttaccttttaaactaacatctacttcctcgtgtatagtagtgccaaagtcacatctcatatattcggttctagttctacagtttgaaatcattggactagcactacatcgttcccgggttttatcaactagcactacacgtctacaccgtttgcaaaagaaatacaccaaaagatatatacactaaggccttgttcggttattctcattccacgtggattggatgggattgggaaaaaattaggaagaattttgacttgctatggattaaaactcactcaatcacgtccaatccacatggattgagaagtaaacgaacatgccctaagggaattcccttgtatgtctcttgaccgcattcgtcactaagataaaaaggtaagtgttcaaagttgaccttgatgtctccatcatttgttaacactaatcacaacattgttgtacatgtacttaatgagcccaacattcttcgttggaacgctatgtttgtctaaagcccaccatagaatattccatgatattttgtcataagtcttctctaagtcaatgaaaaccatgtgtagaacaaaagaagaaaaccaactctaatttaatcactcttgactcctatactccagcgcacccagtacatataaaatcaaggacataggttgtactttgtatagatgttaactactagaaattaatgtcatttataaatttcgtaattagaactaattaccatgctcccgaagaaccgaacaatcccataaatgggatcgaactaaaataatccagtgtaatataccacaaaactgtcaatagcaatataatgggatggattactctttttggcactaaaggaaagtagactaaaagatcttagtccaatttacagctagaagcaatcatccagataaataactgcagaagtacttcaagcgattttatgatcttaagtcatctcccatcaaatacatcaaaattgaaagaacaaaaaaaagagggaatggattgaaagagtgcaggctaaccagaggcatcaaacttaccaaacttaacagcagccattgtcatgcttgaaagac

SEQ ID NO: 65426 - DNA, 640 bp, Zea Mays
cactagtttgtttctgggagggtgttttgcctcgcagttatgtaataataagtgctgcactcgaacaccctttatgtaataaatactctctctatatttggtatgaatgtgtcacacccgggtttcgggggcaccaagacccgagtgcgaaataatcaccaggtgtgctaggaccaagtctcacacatatgatgaatcatggtacagaaatgaatgtcacatctttactatataataggagttctatacagaataaatgaataattacatcataaggagacaacgatccagcaacttaaagttgtctgggagacgacggtctagacctctcatgaactcatcacagcatcctccatgcgcctcatcctgtggtacctctccttgacctgtggggggtgtgagacagcaagagtgagctcacatatgttcatcgctcaacaagttgtggggaataatatggatgaactcgccaaaggtgagagctcatgtgaagtgtaaggcttaccaaagaggatggttagagctgagcattggttttaaagttggttaaaattttattagcaattactaagtataagtaaataccaacccaattaagtagtagaccaaaatgataacgacaccagcgatgcaatgcata

SEQ ID NO: 65427 - DNA, 1205 bp, Zea Mays
cacaattgcataggcggtcgggtcgtcgatccctttatatatatatatatatacgtagcagatggcacattaccatctcagctgagacaagaactctgagcatgagccgcagaaagaacactgtcctcgcccttgtggcatggatcatgttgcttgcactcttcatcacaacggcgacggcctcactcccatgccaatgctgctggctggtgcagcatccgaaggtgacatgcggccacgcctgctgcggcgacaactgttgcccgcccacgccaccaccgtccacccgctgaattcgagatagatcataaatacagtatcatgatgatacataataaactccgccggaaagttgttatagtatcccgccacttttctgtgagcatatgatatatatgctgcagcatgcatgacaataaaacatctctttggttccatcaggtgctacaacaaaaggagaatttaccatagctttaatatagtatattatctcagttcttgaatatttatcgaccactagatcatttttgaactaaaacacgacaaataaaaatgaacggatgtagtatatagttcccgggaactaatggaaaacagattcagagatgggcataattttcaacaataaattaaattatatatataaatcctggtttcctaatctcatgtggcgacagtgcagtccattccttcctagacctagaagtcaattgtacaatctttctaaacattggcacaaaggtatatcaatttgagaatcaagcggaacccatcattctaaggtacgtgagcacccacaaagctaaaacccagagtccacagcagaccccgcagcatccaccgccacaagaggcgactgcagagctcttgctatcatcaacaccaacaagaaagcggcattcgcccatagatgggtcaagcatgaacctccgtagtacagagtggtacaatccgccatgctgcacgcaagcttcatgtgatctgaaacactgtcaagatcccgagcagggtttgcgacacaccaacgtgatggaaggagaagattccccagtgccgctcaaagtttcctggtagtatgctcttcccctcttcatcgagaaggctgaaaagatatacatcagctggtggcacaccaggtcggagtggagttcccttgttgcttgtaatacgattgataagcccttgattgaatgcccttgctgcag

SEQ ID NO: 65428 - DNA, 1422 bp, Zea Mays
cttatctgcgcgcgcaggcttcttctccagcgagcgttttgctcctcctctctcctccagcgtcgcgcgctcctcctctgtctcccatggcgcgcgcctgccccctggccggtgttcggctcccaccacgcctttggtgctcgcccagaccagcggccccctcctctctctccctcagctcgcctcccacaagctctctgcacgccgtggagtccctgcgcaccgcggtccccccagctccctctccatggccggcatcctctgcttggccttgccctcgacttcttcctcgcgtgacctgtcgaagcccctttccatggccgcgcccagctctagctcagtttcttcccatggtgctcggctctcccccaacgcccaggattgtgtatccttctctgttcggccacaacaaaaacgctggacgctcggacctcaccgtggagcttcctcgccagtgcgccctctcggctcgctcggccttaatccccatcacgccacgctcctccctctgtccctgctgcgtcatcggtagccggttgcctggtttgtgtcgtgtgtgcctgggcgctgcccctgttggtcgcctcggtgtgaaatcaccgtcgcgtccaggattttggcatgtctcctcgctcgctgtcacctcaagcaccgcatcggacttaccctttatgatgttcaccaagtgctcgacaaaaagctcaaatgagtcatactgtcatcgtcttcgtcgaatggaaatcgtcgagctggcacgtcgatgtcgtcgatcgccatcctcatctacgccatgtcccaagccgtgaaacactcttgtgctggccacgcgccaccagctcaacgaaatgaatcccctgagtatctggtctagaatagaaattgtgtgcatcgctcgtcagacgtgtgtgatcaagggcgtcaagcgaaaaccatcgtcgttcctccgactatcgtgtcggattggtcagggtaagccaatttgttattcgtgttagtggattgatgaatggtctaactaggtatattaatcgtgatgattctgtggtgagtcggattgctatttctattattagttcgatgaagggatttgttagatatactaattatatcggtcctatcgcctgtggtatatgtgtgtcgtggtggtagatataatatttattatgatgcccgagtcatttacggtgatgtggtcgatgtcgtgtagtaaaagaggtctcaataggtctcagtgtttgcgggactataggtgttacaattgtaattttgtggaaattctatgatagttgtcatactatgctgactaggtaaaaaatgtgatgttttattaatatgtgtgatacacagattagctaggaaattagttagaaagttaatgaaagtccttctatccagtgtataagtgttaggtgtccaagaatt

SEQ ID NO: 65429 - DNA, 3742 bp, Zea Mays
cccggctcgcaactcccctccaaagccagcacgagagcaaggtcccctgatcgccgccgcttccctcgccccaccgccccagcaccacctgctgacctgcacatctccaccacccgtcctcctctgcgggttctccgcaggacgcgacccttggccgcggcattcgcccgaggaatcgccgctcccgcgaggcctccgtctctcgccgtgcccggatcccccgagctgccttcagggtgcaagatctcttccgtgatccggagccttcaccgtttcctcctctctgatcttagctcgatatcggagcgactggcccgagcttctcttaccccatgggcggcggcggcgggttccggggcagctgcagggttggtgccgtgctgcttttctccgcctgggtcgctcttgcagctctcagccgcttgctgcgtccggtgcccaatggctgcgtcatgacctacatgtacccgacctacattcccatcgccgccacgccccggaacatctcctcagatagatatggcttgttcctgtaccatgagggctggaagcagatcgacttcgccaagcacattaggggactcaggggcgtgcccgtgctctttattcccggcaacggaggaagttacaagcaggttcggtcattggctgcagaatcttttcgagcttatcagaatggtccacttgagcccaccttttatcaggaagcatctagtagtttaccaggagatggactcaacaatttttctattccttcacggtatggccgcatgttggactggtttgctgttgaccttgaaggagagcactctgctatggatggtcagatacttgaggagcatactgaatatgttgtctacgcgattcataggatccttgaccaatacaaagaatcacatttggagagatcaaagggtggtgctcaatcctctcctgacctgccatccagtgttatacttgttggccattcgatgggtggttttgtggctcgagcagctgtagtccacccaaacctgaggaaatcagcggtggaaactatactgacactttccagcccacaccagtaccctcccatcgcacttcagccatccttgggtcattttttctcccatgtcaatgaagaatggagaaagggatacaagactggtgtatcacatgcaatcagttcaaaattatctaatgtagttgttgtctctgtatcaggtggcattcatgattatcagattaggtcaaggttggcatcattggatggaattgtgccttctactcacggctttatggtaggaagctccagtatgaagaatgtttggttatccatggaacatcaatctatcctatggtgtaatcaattagctgtacaggttgcacacactcttcttagcataatagatcctgttgacaggcagccattttcaagcacacaaaaaagagtttttgtgttcacaaaaatgctccaaagtgcagttcctcagtctctgagttcaatgactcatgttcctgcttctctgtcacgaaatttacctgccaatgagaatcaggatgctggcgaactacacaaaaaagattcactttcttgcccatcatccactgaatggactagtgatggccttgaaaaggacctgtatattcaatcaaattctgttactgttttagccatggatggcaggagaagatggttagatattaaaaagctgggatcaaatggcagaggacactttgtttttgtaacaaatcttgccccttgttctggagtaaggattcacttgtggccagaaaaacatcattcgcctgtgcaaaatgaattacctgccagtaaaaagatagtggaagttacatcaaagatggtccaaattcctgcaggacctgctccaaaacaggttgagcctggcagtcaaactgagcaaccacctccttctgcatttcttctactgagtccaggagaaatgagtggtttcagattcatgactatatcagtagcacctcgaccgacaatttcaggtaggcctcccccagcagcctctatggcagtggggcagttcttcagtcctgaggaaggggcaagttcattttctattggtacaataatccgctccagctttgctcccaaagaaatatttctgttggaggatcacccattggctctaaacttgtcattttctgcaagccttggccttctaccagtaactttatcactgaaaactgccggatgtggaataaaaaatcctggtgatcaaatggaagctgagagaaatagctgatccacactgctcatacgaagtcacttctcgtgcttcactaagtgatgcggcaagcagattctttttgttgtactcatcagagattcttggtttcatggtggccataatgttttttggaattatgcgacagacttcagcatgggaatgtgattcttctatgccatccattttgtcagccatagagtctaatcttggactcccaaaggcattcatgtttctttgcttcatgccaatacttgtattttgtgcctttttcattttcacggcggagcaaaaaccaccatttgggaccttcttattggttactctgatctgctacatagttgctaatggtttcacaattttgttgatactaagttcgaaattgcttctgtatgtggttgccattctacatgtctttactaaaagacgatggcaatcatgggggaatggtgttcaatcagcatttcttggtcaattcctcagtttctcctcgtttcagtcagtgaagatgcttaggaacaatccaaatataattgtagcagttgctacattaccactcgtctgtttggttcatccagccattggccttggtctgctacttctctctcatgctttccatgctcattcaaatctatgcagttttttagcagcttcttttcgtagcatcactcagaaaaaggacctgtacaagtccaagatgggcgatggttcagttctgctatccaaaagtaaatccgatgggctgcagcaacttctgccaatggatgatagcccaacagcttcaaaaagttttaccgacagccaactagaactgtttgattatcggcatggcgtcatgatcttgcatcttctaagcacactcatgtttgtgccttcacttgttgcctggctacagagaattggtatgggacaaaattttccctggttcattgattctgctatttgcgttggtgttatactgcatggactttttggatcccaaccaaatgtcagctgctgcatatttttcaagttacctggcaggagaggccgtgaaattggtctgagtttcctctacctcgtgggtggctattattcctttgtcagctccatggcgttggcaccttatagggccttgtatgccatggcgaccattggttatatatgtttcatttccagaattctcgagagaagaaatatggtaaggggtgacattaactctaggaggactcggaagcactcacacagacactgacacaccacagaaagtgtgatttctttaaaattatttgtaagagatagagaatagggttgaggaacctttcctccaacctaagttatctccttttttgtttttttccaaatcttgcttatgtgcatgtgattgtgtacggccatggttttgaaagttgttatcggatatggttatcctcggtgtgtggggtcttcataaattgcatcaagaatagcaaatttctaggtgttgagagcatcgcattgagagcttgattattgagttggtg

SEQ ID NO: 65430 - DNA, 3819 bp, Zea Mays
cccggctcgcaactcccctccaaagccagcacgagagcaaggtcccctgatcgccgccgcttccctcgccccaccgccccagcaccacctgctgacctgcacatctccaccacccgtcctcctctgcgggttctccgcaggacgcgacccttggccgcggcattcgcccgaggaatcgccgctcccgcgaggcctccgtctctcgccgtgcccggatcccccgagctgccttcagggtgcaagatctcttccgtgatccggagccttcaccgtttcctcctctctgatcttagctcgatatcggagcgactggcccgagcttctcttaccccatgggcggcggcggcgggttccggggcagctgcagggttggtgccgtgctgcttttctccgcctgggtcgctcttgcagctctcagccgcttgctgcgtccggtgcccaatggctgcgtcatgacctacatgtacccgacctacattcccatcgccgccacgccccggaacatctcctcagatagatatggcttgttcctgtaccatgagggctggaagcagatcgacttcgccaagcacattaggggactcaggggcgtgcccgtgctctttattcccggcaacggaggaagttacaagcaggttcggtcattggctgcagaatcttttcgagcttatcagaatggtccacttgagcccaccttttatcaggaagcatctagtagtttaccaggagatggactcaacaatttttctattccttcacggtatggccgcatgttggactggtttgctgttgaccttgaaggagagcactctgctatggatggtcagatacttgaggagcatactgaatatgttgtctacgcgattcataggatccttgaccaatacaaagaatcacatttggagagatcaaagggtggtgctcaatcctctcctgacctgccatccagtgttatacttgttggccattcgatgggtggttttgtggctcgagcagctgtagtccacccaaacctgaggaaatcagcggtggaaactatactgacactttccagcccacaccagtaccctcccatcgcacttcagccatccttgggtcattttttctcccatgtcaatgaagaatggagaaagggatacaagactggtgtatcacatgcaatcagttcaaaattatctaatgtagttgttgtctctgtatcaggtggcattcatgattatcagattaggtcaaggttggcatcattggatggaattgtgccttctactcacggctttatggtaggaagctccagtatgaagaatgtttggttatccatggaacatcaatctatcctatggtgtaatcaattagctgtacaggttgcacacactcttcttagcataatagatcctgttgacaggcagccattttcaagcacacaaaaaagagtttttgtgttcacaaaaatgctccaaagtgcagttcctcagtctctgagttcaatgactcatgttcctgcttctctgtcacgaaatttacctgccaatgagaatcaggatgctggcgaactacacaaaaaagattcactttcttgcccatcatccactgaatggactagtgatggccttgaaaaggacctgtatattcaatcaaattctgttactgttttagccatggatggcaggagaagatggttagatattaaaaagctgggatcaaatggcagaggacactttgtttttgtaacaaatcttgccccttgttctggagtaaggattcacttgtggccagaaaaacatcattcgcctgtgcaaaatgaattacctgccagtaaaaagatagtggaagttacatcaaagatggtccaaattcctgcaggacctgctccaaaacaggttgagcctggcagtcaaactgagcaaccacctccttctgcatttcttctactgagtccaggagaaatgagtggtttcagattcatgactatatcagtagcacctcgaccgacaatttcaggtaggcctcccccagcagcctctatggcagtggggcagttcttcagtcctgaggaaggggcaagttcattttctattggtacaataatccgctccagctttgctcccaaagaaatatttctgttggaggatcacccattggctctaaacttgtcattttctgcaagccttggccttctaccagtaactttatcactgaaaactgccggatgtggaataaaaaatcctggtgatcaaatggaagctgagagaaataacctttgtaaattgcggtgctttccgcctgttgccttggcatgggattctgtatctggcctgcacatcattccaaatatatactcagagactgtagtggttgattcatcacctgccttttgggattcacctgaggggactgacaaaactacagtactgattctgattcttggtttcatggtggccataatgttttttggaattatgcgacagacttcagcatgggaatgtgattcttctatgccatccattttgtcagccatagagtctaatcttggactcccaaaggcattcatgtttctttgcttcatgccaatacttgtattttgtgcctttttcattttcacggcggagcaaaaaccaccatttgggaccttcttattggttactctgatctgctacatagttgctaatggtttcacaattttgttgatactaagttcgaaattgcttctgtatgtggttgccattctacatgtctttactaaaagacgatggcaatcatgggggaatggtgttcaatcagcatttcttggtcaattcctcagtttctcctcgtttcagtcagtgaagatgcttaggaacaatccaaatataattgtagcagttgctacattaccactcgtctgtttggttcatccagccattggccttggtctgctacttctctctcatgctttccatgctcattcaaatctatgcagttttttagcagcttcttttcgtagcatcactcagaaaaaggacctgtacaagtccaagatgggcgatggttcagttctgctatccaaaagtaaatccgatgggctgcagcaacttctgccaatggatgatagcccaacagcttcaaaaagttttaccgacagccaactagaactgtttgattatcggcatggcgtcatgatcttgcatcttctaagcacactcatgtttgtgccttcacttgttgcctggctacagagaattggtatgggacaaaattttccctggttcattgattctgctatttgcgttggtgttatactgcatggactttttggatcccaaccaaatgtcagctgctgcatatttttcaagttacctggcaggagaggccgtgaaattggtctgagtttcctctacctcgtgggtggctattattcctttgtcagctccatggcgttggcaccttatagggccttgtatgccatggcgaccattggttatatatgtttcatttccagaattctcgagagaagaaatatggtaaggggtgacattaactctaggaggactcggaagcactcacacagacactgacacaccacagaaagtgtgatttctttaaaattatttgtaagagatagagaatagggttgaggaacctttcctccaacctaagttatctccttttttgtttttttccaaatcttgcttatgtgcatgtgattgtgtacggccatggttttgaaagttgttatcggatatggttatcctcggtgtgtggggtcttcataaattgcatcaagaatagcaaatttctaggtgttgagagcatcgcattgagagcttgattattgagttggtg

SEQ ID NO: 65431 - DNA, 3795 bp, Zea Mays
cccggctcgcaactcccctccaaagccagcacgagagcaaggtcccctgatcgccgccgcttccctcgccccaccgccccagcaccacctgctgacctgcacatctccaccacccgtcctcctctgcgggttctccgcaggacgcgacccttggccgcggcattcgcccgaggaatcgccgctcccgcgaggcctccgtctctcgccgtgcccggatcccccgagctgccttcagggtgcaagatctcttccgtgatccggagccttcaccgtttcctcctctctgatcttagctcgatatcggagcgactggcccgagcttctcttaccccatgggcggcggcggcgggttccggggcagctgcagggttggtgccgtgctgcttttctccgcctgggtcgctcttgcagctctcagccgcttgctgcgtccggtgcccaatggctgcgtcatgacctacatgtacccgacctacattcccatcgccgccacgccccggaacatctcctcagatagatatggcttgttcctgtaccatgagggctggaagcagatcgacttcgccaagcacattaggggactcaggggcgtgcccgtgctctttattcccggcaacggaggaagttacaagcaggttcggtcattggctgcagaatcttttcgagcttatcagaatggtccacttgagcccaccttttatcaggaagcatctagtagtttaccaggagatggactcaacaatttttctattccttcacggtatggccgcatgttggactggtttgctgttgaccttgaaggagagcactctgctatggatggtcagatacttgaggagcatactgaatatgttgtctacgcgattcataggatccttgaccaatacaaagaatcacatttggagagatcaaagggtggtgctcaatcctctcctgacctgccatccagtgttatacttgttggccattcgatgggtggttttgtggctcgagcagctgtagtccacccaaacctgaggaaatcagcggtggaaactatactgacactttccagcccacaccagtaccctcccatcgcacttcagccatccttgggtcattttttctcccatgtcaatgaagaatggagaaagggatacaagactggtgtatcacatgcaatcagttcaaaattatctaatgtagttgttgtctctgtatcaggtggcattcatgattatcagattaggtcaaggttggcatcattggatggaattgtgccttctactcacggctttatggtaggaagctccagtatgaagaatgtttggttatccatggaacatcaatctatcctatggtgtaatcaattagctgtacaggttgcacacactcttcttagcataatagatcctgttgacaggcagccattttcaagcacacaaaaaagagtttttgtgttcacaaaaatgctccaaagtgcagttcctcagtctctgagttcaatgactcatgttcctgcttctctgtcacgaaatttacctgccaatgagaatcaggatgctggcgaactacacaaaaaagattcactttcttgcccatcatccactgaatggactagtgatggccttgaaaaggacctgtatattcaatcaaattctgttactgttttagccatggatggcaggagaagatggttagatattaaaaagctgggatcaaatggcagaggacactttgtttttgtaacaaatcttgccccttgttctggagtaaggattcacttgtggccagaaaaacatcattcgcctgtgcaaaatgaattacctgccagtaaaaagatagtggaagttacatcaaagatggtccaaattcctgcaggacctgctccaaaacagacaatttcaggtaggcctcccccagcagcctctatggcagtggggcagttcttcagtcctgaggaaggggcaagttcattttctattggtacaataatccgctccagctttgctcccaaagaaatatttctgttggaggatcacccattggctctaaacttgtcattttctgcaagccttggccttctaccagtaactttatcactgaaaactgccggatgtggaataaaaaatcctggtgatcaaatggaagctgagagaaataacctttgtaaattgcggtgctttccgcctgttgccttggcatgggattctgtatctggcctgcacatcattccaaatatatactcagagactgtagtggttgattcatcacctgccttttgggattcacctgaggggactgacaaaactacagtactgattctggctgatccacactgctcatacgaagtcacttctcgtgcttcactaagtgatgcggcaagcagattctttttgttgtactcatcagagattcttggtttcatggtggccataatgttttttggaattatgcgacagacttcagcatgggaatgtgattcttctatgccatccattttgtcagccatagagtctaatcttggactcccaaaggcattcatgtttctttgcttcatgccaatacttgtattttgtgcctttttcattttcacggcggagcaaaaaccaccatttgggaccttcttattggttactctgatctgctacatagttgctaatggtttcacaattttgttgatactaagttcgaaattgcttctgtatgtggttgccattctacatgtctttactaaaagacgatggcaatcatgggggaatggtgttcaatcagcatttcttggtcaattcctcagtttctcctcgtttcagtcagtgaagatgcttaggaacaatccaaatataattgtagcagttgctacattaccactcgtctgtttggttcatccagccattggccttggtctgctacttctctctcatgctttccatgctcattcaaatctatgcagttttttagcagcttcttttcgtagcatcactcagaaaaaggacctgtacaagtccaagatgggcgatggttcagttctgctatccaaaagtaaatccgatgggctgcagcaacttctgccaatggatgatagcccaacagcttcaaaaagttttaccgacagccaactagaactgtttgattatcggcatggcgtcatgatcttgcatcttctaagcacactcatgtttgtgccttcacttgttgcctggctacagagaattggtatgggacaaaattttccctggttcattgattctgctatttgcgttggtgttatactgcatggactttttggatcccaaccaaatgtcagctgctgcatatttttcaagttacctggcaggagaggccgtgaaattggtctgagtttcctctacctcgtgggtggctattattcctttgtcagctccatggcgttggcaccttatagggccttgtatgccatggcgaccattggttatatatgtttcatttccagaattctcgagagaagaaatatggtaaggggtgacattaactctaggaggactcggaagcactcacacagacactgacacaccacagaaagtgtgatttctttaaaattatttgtaagagatagagaatagggttgaggaacctttcctccaacctaagttatctccttttttgtttttttccaaatcttgcttatgtgcatgtgattgtgtacggccatggttttgaaagttgttatcggatatggttatcctcggtgtgtggggtcttcataaattgcatcaagaatagcaaatttctaggtgttgagagcatcgcattgagagcttgattattgagttggtg

SEQ ID NO: 65432 - DNA, 4160 bp, Zea Mays
cccggctcgcaactcccctccaaagccagcacgagagcaaggtcccctgatcgccgccgcttccctcgccccaccgccccagcaccacctgctgacctgcacatctccaccacccgtcctcctctgcgggttctccgcaggacgcgacccttggccgcggcattcgcccgaggaatcgccgctcccgcgaggcctccgtctctcgccgtgcccggatcccccgagctgccttcagggtgcaagatctcttccgtgatccggagccttcaccgtttcctcctctctgatcttagctcgatatcggagcgactggcccgagcttctcttaccccatgggcggcggcggcgggttccggggcagctgcagggttggtgccgtgctgcttttctccgcctgggtcgctcttgcagctctcagccgcttgctgcgtccggtgcccaatggctgcgtcatgacctacatgtacccgacctacattcccatcgccgccacgccccggaacatctcctcagatagatatggcttgttcctgtaccatgagggctggaagcagatcgacttcgccaagcacattaggggactcaggggcgtgcccgtgctctttattcccggcaacggaggaagttacaagcaggttcggtcattggctgcagaatcttttcgagcttatcagaatggtccacttgagcccaccttttatcaggaagcatctagtagtttaccaggagatggactcaacaatttttctattccttcacggtatggccgcatgttggactggtttgctgttgaccttgaaggagagcactctgctatggatggtcagatacttgaggagcatactgaatatgttgtctacgcgattcataggatccttgaccaatacaaagaatcacatttggagagatcaaagggtggtgctcaatcctctcctgacctgccatccagtgttatacttgttggccattcgatgggtggttttgtggctcgagcagctgtagtccacccaaacctgaggaaatcagcggtggaaactatactgacactttccagcccacaccagtaccctcccatcgcacttcagccatccttgggtcattttttctcccatgtcaatgaagaatggagaaagggatacaagactggtgtatcacatgcaatcagttcaaaattatctaatgtagttgttgtctctgtatcaggtggcattcatgattatcagattaggtcaaggttggcatcattggatggaattgtgccttctactcacggctttatggtaggaagctccagtatgaagaatgtttggttatccatggaacatcaatctatcctatggtgtaatcaattagctgtacaggttgcacacactcttcttagcataatagatcctgttgacaggcagccattttcaagcacacaaaaaagagtttttgtgttcacaaaaatgctccaaagtgcagttcctcagtctctgagttcaatgactcatgttcctgcttctctgtcacgaaatttacctgccaatgagaatcaggatgctggcgaactacacaaaaaagattcactttcttgcccatcatccactgaatggactagtgatggccttgaaaaggacctgtatattcaatcaaattctgttactgttttagccatggatggcaggagaagatggttagatattaaaaagctgggatcaaatggcagaggacactttgtttttgtaacaaatcttgccccttgttctggagtaaggattcacttgtggccagaaaaacatcattcgcctgtgcaaaatgaattacctgccagtaaaaagatagtggaagttacatcaaagatggtccaaattcctgcaggacctgctccaaaacaggttgagcctggcagtcaaactgagcaaccacctccttctgcatttcttctactgagtccaggagaaatgagtggtttcagattcatgactatatcagtagcacctcgaccgacaatttcaggtaggcctcccccagcagcctctatggcagtggggcagttcttcagtcctgaggaaggggcaagttcattttctattggtacaataatccgctccagctttgctcccaaagaaatatttctgttggaggatcacccattggctctaaacttgtcattttctgcaagccttggccttctaccagtaactttatcactgaaaactgccggatgtggaataaaaaatcctggtgatcaaatggaagctgagagaaatagtgagctgctacttctcgtctgtcaatcttttttttgagagcagcataagttttgcaagtgtcttagtctttggtaactttgggataatataactgctaatagcaaatgtagatttctatactactatgtggagtgatatcaacaattgctagatgtccaataacataggatagcatgtaatgctctgtatcttggctgcacatttacactcaataaccttttgtatgttgtatttgtatattagacctttgtaaattgcggtgctttccgcctgttgccttggcatgggattctgtatctggcctgcacatcattccaaatatatactcagagactgtagtggttgattcatcacctgccttttgggattcacctgaggggactgacaaaactacagtactgattctggctgatccacactgctcatacgaagtcacttctcgtgcttcactaagtgatgcggcaagcagattctttttgttgtactcatcagagattcttggtttcatggtggccataatgttttttggaattatgcgacagacttcagcatgggaatgtgattcttctatgccatccattttgtcagccatagagtctaatcttggactcccaaaggcattcatgtttctttgcttcatgccaatacttgtattttgtgcctttttcattttcacggcggagcaaaaaccaccatttgggaccttcttattggttactctgatctgctacatagttgctaatggtttcacaattttgttgatactaagttcgaaattgcttctgtatgtggttgccattctacatgtctttactaaaagacgatggcaatcatgggggaatggtgttcaatcagcatttcttggtcaattcctcagtttctcctcgtttcagtcagtgaagattgtgcagatgcttaggaacaatccaaatataattgtagcagttgctacattaccactcgtctgtttggttcatccagccattggccttggtctgctacttctctctcatgctttccatgctcattcaaatctatgcagttttttagcagcttcttttcgtagcatcactcagaaaaaggacctgtacaagtccaagatgggcgatggttcagttctgctatccaaaagtaaatccgatgggctgcagcaacttctgccaatggatgatagcccaacagcttcaaaaagttttaccgacagccaactagaactgtttgattatcggcatggcgtcatgatcttgcatcttctaagcacactcatgtttgtgccttcacttgttgcctggctacagagaattggtatgggacaaaattttccctggttcattgattctgctatttgcgttggtgttatactgcatggactttttggatcccaaccaaatgtcagctgctgcatatttttcaagttacctggcaggagaggccgtgaaattggtctgagtttcctctacctcgtgggtggctattattcctttgtcagctccatggcgttggcaccttatagggccttgtatgccatggcgaccattggttatatatgtttcatttccagaattctcgagagaagaaatatggtaaggggtgacattaactctaggaggactcggaagcactcacacagacactgacacaccacagaaagtgtgatttctttaaaattatttgtaagagatagagaatagggttgaggaacctttcctccaacctaagttatctccttttttgtttttttccaaatcttgcttatgtgcatgtgattgtgtacggccatggttttgaaagttgttatcggatatggttatcctcggtgtgtggggtcttcataaattgcatcaagaatagcaaatttctaggtgttgagagcatcgcattgagagcttgattattgagttggtg

SEQ ID NO: 65433 - DNA, 3751 bp, Zea Mays
cccggctcgcaactcccctccaaagccagcacgagagcaaggtcccctgatcgccgccgcttccctcgccccaccgccccagcaccacctgctgacctgcacatctccaccacccgtcctcctctgcgggttctccgcaggacgcgacccttggccgcggcattcgcccgaggaatcgccgctcccgcgaggcctccgtctctcgccgtgcccggatcccccgagctgccttcagggtgcaagatctcttccgtgatccggagccttcaccgtttcctcctctctgatcttagctcgatatcggagcgactggcccgagcttctcttaccccatgggcggcggcggcgggttccggggcagctgcagggttggtgccgtgctgcttttctccgcctgggtcgctcttgcagctctcagccgcttgctgcgtccggtgcccaatggctgcgtcatgacctacatgtacccgacctacattcccatcgccgccacgccccggaacatctcctcagatagatatggcttgttcctgtaccatgagggctggaagcagatcgacttcgccaagcacattaggggactcaggggcgtgcccgtgctctttattcccggcaacggaggaagttacaagcaggttcggtcattggctgcagaatcttttcgagcttatcagaatggtccacttgagcccaccttttatcaggaagcatctagtagtttaccaggagatggactcaacaatttttctattccttcacggtatggccgcatgttggactggtttgctgttgaccttgaaggagagcactctgctatggatggtcagatacttgaggagcatactgaatatgttgtctacgcgattcataggatccttgaccaatacaaagaatcacatttggagagatcaaagggtggtgctcaatcctctcctgacctgccatccagtgttatacttgttggccattcgatgggtggttttgtggctcgagcagctgtagtccacccaaacctgaggaaatcagcggtggaaactatactgacactttccagcccacaccagtaccctcccatcgcacttcagccatccttgggtcattttttctcccatgtcaatgaagaatggagaaagggatacaagactggtgtatcacatgcaatcagttcaaaattatctaatgtagttgttgtctctgtatcaggtggcattcatgattatcagattaggtcaaggttggcatcattggatggaattgtgccttctactcacggctttatggtaggaagctccagtatgaagaatgtttggttatccatggaacatcaatctatcctatggtgtaatcaattagctgtacaggttgcacacactcttcttagcataatagatcctgttgacaggcagccattttcaagcacacaaaaaagagtttttgtgttcacaaaaatgctccaaagtgcagttcctcagtctctgagttcaatgactcatgttcctgcttctctgtcacgaaatttacctgccaatgagaatcaggatgctggcgaactacacaaaaaagattcactttcttgcccatcatccactgaatggactagtgatggccttgaaaaggacctgtatattcaatcaaattctgttactgttttagccatggatggcaggagaagatggttagatattaaaaagctgggatcaaatggcagaggacactttgtttttgtaacaaatcttgccccttgttctggagtaaggattcacttgtggccagaaaaacatcattcgcctgtgcaaaatgaattacctgccagtaaaaagatagtggaagttacatcaaagatggtccaaattcctgcaggacctgctccaaaacaggttgagcctggcagtcaaactgagcaaccacctccttctgcatttcttctactgagtccaggagaaatgagtggtttcagattcatgactatatcagtagcacctcgaccgacaatttcaggtaggcctcccccagcagcctctatggcagtggggcagttcttcagtcctgaggaaggggcaagttcattttctattggtacaataatccgctccagctttgctcccaaagaaatatttctgttggaggatcacccattggctctaaacttgtcattttctgcaagccttggccttctaccagtaactttatcactgaaaactgccggatgtggaataaaaaatcctggtgatcaaatggaagctgagagaaatagctgatccacactgctcatacgaagtcacttctcgtgcttcactaagtgatgcggcaagcagattctttttgttgtactcatcagagattcttggtttcatggtggccataatgttttttggaattatgcgacagacttcagcatgggaatgtgattcttctatgccatccattttgtcagccatagagtctaatcttggactcccaaaggcattcatgtttctttgcttcatgccaatacttgtattttgtgcctttttcattttcacggcggagcaaaaaccaccatttgggaccttcttattggttactctgatctgctacatagttgctaatggtttcacaattttgttgatactaagttcgaaattgcttctgtatgtggttgccattctacatgtctttactaaaagacgatggcaatcatgggggaatggtgttcaatcagcatttcttggtcaattcctcagtttctcctcgtttcagtcagtgaagattgtgcagatgcttaggaacaatccaaatataattgtagcagttgctacattaccactcgtctgtttggttcatccagccattggccttggtctgctacttctctctcatgctttccatgctcattcaaatctatgcagttttttagcagcttcttttcgtagcatcactcagaaaaaggacctgtacaagtccaagatgggcgatggttcagttctgctatccaaaagtaaatccgatgggctgcagcaacttctgccaatggatgatagcccaacagcttcaaaaagttttaccgacagccaactagaactgtttgattatcggcatggcgtcatgatcttgcatcttctaagcacactcatgtttgtgccttcacttgttgcctggctacagagaattggtatgggacaaaattttccctggttcattgattctgctatttgcgttggtgttatactgcatggactttttggatcccaaccaaatgtcagctgctgcatatttttcaagttacctggcaggagaggccgtgaaattggtctgagtttcctctacctcgtgggtggctattattcctttgtcagctccatggcgttggcaccttatagggccttgtatgccatggcgaccattggttatatatgtttcatttccagaattctcgagagaagaaatatggtaaggggtgacattaactctaggaggactcggaagcactcacacagacactgacacaccacagaaagtgtgatttctttaaaattatttgtaagagatagagaatagggttgaggaacctttcctccaacctaagttatctccttttttgtttttttccaaatcttgcttatgtgcatgtgattgtgtacggccatggttttgaaagttgttatcggatatggttatcctcggtgtgtggggtcttcataaattgcatcaagaatagcaaatttctaggtgttgagagcatcgcattgagagcttgattattgagttggtg

SEQ ID NO: 65434 - DNA, 2625 bp, Zea Mays
aaacaactcgtgctcgacctagaagatccttgaccaatacaaagaatcacatttggagagatcaaagggtggtgctcaatcctctcctgacctgccatccagtgttatacttgttggccattcgatgggtggttttgtggctcgagcagctgtagtccacccaaacctgaggaaatcagcggtggaaactatactgacactttccagcccacaccagtaccctcccatcgcacttcagccatccttgggtcattttttctcccatgtcaatgaagaatggagaaagggatacaagactggtgtatcacatgcaatcagttcaaaattatctaatgtagttgttgtctctgtatcaggtggcattcatgattatcaggtcaaggttggcatcattggatggaattgtgccttctactcacggctttatggtaggaagctccagtatgaagaatgtttggttatccatggaacatcaatctatcctatggtgtaatcaattagctgtacaggttgcacacactcttcttagcataatagatcctgttgacaggcagccattttcaagcacacaaaaaagagtttttgtgttcacaaaaatgctccaaagtgcagttcctcagtctctgagttcaatgactcatgttcctgcttctctgtcacgaaatttacctgccaatgagaatcaggatgctggcgaactacacaaaaaagattcactttcttgcccatcatccactgaatggactagtgatggccttgaaaaggacctgtatattcaatcaaattctgttactgttttagccatggatggcaggagaagatggttagatattaaaaagctgggatcaaatggcagaggacactttgtttttgtaacaaatcttgccccttgttctggagtaaggattcacttgtggccagaaaaacatcattcgcctgtgcaaaatgaattacctgccagtaaaaagatagtggaagttacatcaaagatggtccaaattcctgcaggacctgctccaaaacaggttgagcctggcagtcaaactgagcaaccacctccttctgcatttcttctactgagtccaggagaaatgagtggtttcagattcatgactatatcagtagcacctcgaccggctgatccacactgctcatacgaagtcacttctcgtgcttcactaagtgatgcggcaagcagattctttttgttgtactcatcagagattcttggtttcatggtggccataatgttttttggaattatgcgacagacttcagcatgggaatgtgattcttctatgccatccattttgtcagccatagagtctaatcttggactcccaaaggcattcatgtttctttgcttcatgccaatacttgtattttgtgcctttttcattttcacggcggagcaaaaaccaccatttgggaccttcttattggttactctgatctgctacatagttgctaatggtttcacaattttgttgatactaagttcgaaattgcttctgtatgtggttgccattctacatgtctttactaaaagacgatggcaatcatgggggaatggtgttcaatcagcatttcttggtcaattcctcagtttctcctcgtttcagtcagtgaagatgcttaggaacaatccaaatataattgtagcagttgctacattaccactcgtctgtttggttcatccagccattggccttggtctgctacttctctctcatgctttccatgctcattcaaatctatgcagttttttagcagcttcttttcgtagcatcactcagaaaaaggacctgtacaagtccaagatgggcgatggttcagttctgctatccaaaagtaaatccgatgggctgcagcaacttctgccaatggatgatagcccaacagcttcaaaaagttttaccgacagccaactagaactgtttgattatcggcatggcgtcatgatcttgcatcttctaagcacactcatgtttgtgccttcacttgttgcctggctacagagaattggtatgggacaaaattttccctggttcattgattctgctatttgcgttggtgttatactgcatggactttttggatcccaaccaaatgtcagctgctgcatatttttcaagttacctggcaggagaggccgtgaaattggtctgagtttcctctacctcgtgggtggctattattcctttgtcagctccatggcgttggcaccttatagggccttgtatgccatggcgaccattggttatatatgtttcatttccagaattctcgagagaagaaatatggtaaggggtgacattaactctaggaggactcggaagcactcacacagacactgacacaccacagaaagtgtgatttctttaaaattatttgtaagagatagagaatagggttgaggaacctttcctccaacctaagttatctccttttttgtttttttccaaatcttgcttatgtgcatgtgattgtgtacggccatggttttgaaagttgttatcggatatggttatcctcggtgtgtggggtcttcataaattgcatcaagaatagcaaatttctaggtgttgagagcatcgcattgagagcttgattattgagttggtg

SEQ ID NO: 65435 - DNA, 2066 bp, Zea Mays
ggaatttgtaaagggagagaggaccaaggttgagcctggcagtcaaactgagcaaccacctccttctgcatttcttctactgagtccaggagaaatgagtggtttcagattcatgactatatcagtagcacctcgaccgacaatttcaggtaggcctcccccagcagcctctatggcagtggggcagttcttcagtcctgaggaaggggcaagttcattttctattggtacaataatccgctccagctttgctcccaaagaaatatttctgttggaggatcacccattggctctaaacttgtcattttctgcaagccttggccttctaccagtaactttatcactgaaaactgccggatgtggaataaaaaatcctggtgatcaaatggaagctgagagaaataacctttgtaaattgcggtgctttccgcctgttgccttggcatgggattctgtatctggcctgcacatcattccaaatatatactcagagactgtagtggttgattcatcacctgccttttgggattcacctgaggggactgacaaaactacagtactgattctggctgatccacactgctcatacgaagtcacttctcgtgcttcactaagtgatgcggcaagcagattctttttgttgtactcatcagagattcttggtttcatggtggccataatgttttttggaattatgcgacagacttcagcatgggaatgtgattcttctatgccatccattttgtcagccatagagtctaatcttggactcccaaaggcattcatgtttctttgcttcatgccaatacttgtattttgtgcctttttcattttcacggcggagcaaaaaccaccatttgggaccttcttattggttactctgatctgctacatagttgctaatggtttcacaattttgttgatactaagttcgaaattgcttctgtatgtggttgccattctacatgtctttactaaaagacgatggcaatcatgggggaatggtgttcaatcagcatttcttggtcaattcctcagtttctcctcgtttcagtcagtgaagattgtgcagatgcttaggaacaatccaaatataattgtagcagttgctacattaccactcgtctgtttggttcatccagccattggccttggtctgctacttctctctcatgctttccatgctcattcaaatctatgcagttttttagcagcttcttttcgtagcatcactcagaaaaaggacctgtacaagtccaagatgggcgatggttcagttctgctatccaaaagtaaatccgatgggctgcagcaacttctgccaatggatgatagcccaacagcttcaaaaagttttaccgacagccaactagaactgtttgattatcggcatggcgtcatgatcttgcatcttctaagcacactcatgtttgtgccttcacttgttgcctggctacagagaattggtatgggacaaaattttccctggttcattgattctgctatttgcgttggtgttatactgcatggactttttggatcccaaccaaatgtcagctgctgcatatttttcaagttacctggcaggagaggccgtgaaattggtctgagtttcctctacctcgtgggtggctattattcctttgtcagctccatggcgttggcaccttatagggccttgtatgccatggcgaccattggttatatatgtttcatttccagaattctcgagagaagaaatatggtaaggggtgacattaactctaggaggactcggaagcactcacacagacactgacacaccacagaaagtgtgatttctttaaaattatttgtaagagatagagaatagggttgaggaacctttcctccaacctaagttatctccttttttgtttttttccaaatcttgcttatgtgcatgtgattgtgtacggccatggttttgaaagttgttatcggatatggttatcctcggtgtgtggggtcttcataaattgcatcaagaatagcaaatttctaggtgttgagagcatcgcattgagagcttgattattgagttggtg

SEQ ID NO: 65436 - DNA, 775 bp, Zea Mays
ccaccgcctgctagcgcagccagcaagccgcttgccacgcgcgcgacgtcgtgtttggcccccaccgccgttcggccgccttccccgccgccggtccgcctactcttcttcgctagactgctccccttctccattgatcacttgctccactacacgcaagacgcaaccgtgcatgcggcctgctagtgcctagcttcctccccctctctatgcgcgccactccaggcgtcgagctcgcctctgcgggaccgtagcccccacccctcattggctctctgcgcgagcgtgatcgcgcttccgcatcccatgttcaatggagccctaaaggttgtgcttctacgaagatccaaaattccttggaccaaaagcttcagcttccaatagttgttaagggccttgtactgcgaactctggacaaagtttcatgctgctacaaagtgctctgcatacctcgtgagtgtttaatcaatctcggtgctgatttgttagttgtctttgagagggagttgccgagctttctcaacaatagcgatcgtggaaggcgtcaaccagattgtggatgttgaaactattctatctacttttggatctaagttataggatatttaaacatttttaatgtttgatacctggatgctttatgctttagttatatgtggatgctagaaaaagttgtgtacacatgtttttgacaaaattgtacacacgatttggattgcattcaattgaatgatcgttttattaactgacggtgaattaaatacgttataaacaa

SEQ ID NO: 65437 - DNA, 480 bp, Zea Mays
caagcgtcctgacaagtgggtacctatatcctgttgtgcttctacgaagatccaaaattccttggaccaaaagcttcagcttccaatagttgttaagggccttgtactgcgaactctggacaaagtttcatgctgctacaaagtgctctgcatacctcgtgagtgtttaatcaatctcggtgctgatttgttagttgtctttgagagggagttgccgagctttctcaacaatagcgatcgtggaaggcgtcaaccagattgtggatgttgaaactattctatctacttttggatctaagttataggatatttaaacatttttaatgtttgatacctggatgctttatgctttagttatatgtggatgctagaaaaagttgtgtacacatgtttttgacaaaattgtacacacgatttggattgcattcaattgaatgatcgttttattaactgacggtgaattaaatacgttataaacaa

SEQ ID NO: 65438 - DNA, 4883 bp, Zea Mays
cttttttataatgggatgattccagatttctctatgttttataacctttggccccgtctggcagcaacacagaagcgtcgctcacatcaacatcacatgttcacatccatcttcgaaccccttcttcctctcttcagcgccgcacccgcgcccgcgccgtcgaaggcggcgcctagtctcgaggcttgcacgctgccgcggaggatcgcctcgctactgcgcgccatcgcctccgatctcctctatctccaatctgctccctcatcgccgtgcagtggaaactaggggaccgattcctcttctcgtttgtcgcatatttctcgctgcgtgccgcgtgctgcggtgagtgattctccaagaattctggggacgctgatctgagtccgcacagaacgcagcggcagcaatgatgatgtcggacgatgacgatgctgagccccagctcaacgcggtggagggctactacttcgttgactccaagaacgagaaggagcctgtctgcttctccaccctgcctttctggttcggggacactgatgatcttcctgacggcaagaagaagctggtgctgcgcgggactggtgacccgggcgtcaaggtgtacgatgaggtggtggcctgcaggctgggtctcgaggggaaacaacccgagtttgcagtgctcacagcaaaaggcagacgttggatacgtctcattaggcccttgaacagctacgaggaaatgatcaggactgtgttgatcacagcgcagatgctgcattttctaaggaggaagcctcatgagccagaaaaaaccttgtggaaccacctttgcaaagtttttaacaagtttgacgttccaccctcagaggacgatttcaggaaccactgctcactgatgaagcagtttgcggcaaaagatcctgtcttagcaaaatcagagattttgcgagtatttattgaaggaaaatctagaaaaaaattcactgaggttggtgcagaccatattgatgtcaagcagccgttcatcactgatgatgagggcatagatgaaatgaatgtggaagatgtcgataatgaatctgatgaagatgacgatgaatatttgtttgattcaatatgtgctatttgtgacgatggaggagacatattatgctgtgatggcccatgtatgcgctctttccatgcaaaagaaggaagtggtgaagactcctgttgtgttacccttggatacactgaggcagaagttgaggcaatgaaattatttctttgcaagaattgtgagtataagcaacaccagtgtttcatctgcggagtgttggaaccttcagatggagaagcagccaaggtgtttttatgtaacaatgctacatgtgggcacttttaccacccgaaatgtgttgcccaacaacttcaccccatcaacattgatgaagcctcagaattggagaagaagataacagaagggttttcatttacatgcccaattcactggtgctttcattgcaaaggtttggaggatagaacacaagaacctttgcaatttgctgtttgcagacgctgtccaaagtcatatcacagaaagtgtttaccaagcgaaatttcctttgacgaaaatgaagaggacgatatcatcatacgggcttgggaattatcaaaaagaattttgatatactgcctggaccatgagattgatagtgaacttgagacacctgtcagagatcatatcaagtttccaaagattgaaaaaccacttcaatttgtaaagaagggatctagcttgttgcctaagaagaaaaagaggacttacagtgagacagttcttgagcaatctcccaaagatactgtgaaaaggaaaagcaaggttcacatgctagaaagggaacaaaacaaacaagacaccagagaagtttctgcaaagagtttcactcaaaaccttgttgacacacctgtaaagaaaaaagccaagttgaaagagaaaatacagttgccgtatgtggccaaggatcattttataagcagtccaaaatctgtgaaagagcaagaacaagagttggtacctttgcccttatctgccatcaggaagagttcatttcctaaagtggacagtgaaactgaaaagagggtgattaccatattgggaaataaagtgtcttcattgacaataaaagatgtaacgaggaattgcagtttgccatcaactcatgtatactctggcagattgactgacaagataccactgggaaagattgaacgttctgttcaggctgtagaagcagctttaaaaaagctggaaaatggaggtagtgtcaatgatgctaaagcagtatgtgaacctgaagttttaaggcagcttgcaaggtggcatagtaaactcagagtgtatatatcaccttttattcatggcacaaggtacagttcctttggtagacattttacaaaggtggagaaacttgttgagattgttgatagacttcactggtatgtggaaactggtgacatgatagtagatttctgctgtggggcaaatgattttagccgtcttatgaaagaaaaactcgacaaagttcagaagaagtgccatttcaagaattatgatcttatccaaccacagaatcgcttctgctttgaaaagagggattggatgactgtgcagccaaacgagctgcctcatggatcccaactaattatgggtcttaatcctccttttggagtcaaagcaagtcttgcgaacaaatttattgacaaagcattgacattcaagcctaagctcattgtactaattgtccctaaagaaactaaaaggttagatcagaggagaacaccttatgatttgatttgggaggacagtgagtgtctttctggcaagtccttctatttgcctggttctgtggatcttaatgataaaatagttgaagggtggaatgcatctgcgccacccctctatttgtggagtcatcctggttggacaaagaagcacatgcaagtggctgaagagcatggtcatacttgtatggggaagatagcttgccatgttgaagagagtaatctatcagatgacctgtccgtgaggaaacaatctgatgctacaaacaaactgaactcgagatcagggaaagagactccattcaatgacagaatgtccaatctacttgatgatggttctgctaggaagcaagcaagatctgaagaagagaagagaactctagggaagatagaacaccatgtgaaaaaggctaatataccagataacctcccagtgaagaaagaacctgaagcttccagcaaagtcatgtcgcattctggaaaagatagaaagattggcagatacaacaggaggagacatgacaacaggagcagcaaggggacacctgatcacacagagagcctcccccctgaaaagcaagtggaagttgcatatgaggaaacaagagttattcctagcaaaaagattgctcataatgaaaaaaagagcgcgcagtacaactacgagcaaactgcagcagggatgccaaacatgaggtctagaggaggggattctgacatgagtatctcacccccagtcagttgcaatgctcgaagcaaacccatgagctattccctgacgagaccaattgaacacttggatacgaatgctcaccttttggcagaagaacctagtgactctgtgctcaatagggttccaaatcatgacagttatttggcaatcaaagaggaatactgtgatggatttaagaggaaaaatgatcctatcttcagtcacattgatgatagctcaaggatgaggggctccagcatcgaagaagtgaccaagccgtatattactgctccaaacagtgatccgtggtctaaaggagatggcagcttttacaggcatccgagctcagaagatttaaacgctaatgctgatgtgcttatgccaggatacagtgcaagatatggacaaattggtggtgacagtaacccacaagctagtatggtcccactagcaacagattcaagactgcatggtggaacggttgctgataattacctctcggcaagatactcccttggatcttcaggtgctcgcgttagccaaccagctccaactgttcccccttttgggctctcaggtgcaagttcacaacgaggctcagtaatggacaggtattcgtatgggctttcgggtccgactggaacacagcgctcagttattgacaggtatgcgccgtccctcgatggaacgaacacaacaagatcgaggagctccttgcctgagcagtacccgttcggacaacctggctcttccggtggcgggtggcctcatcactgatcgctggaacttggtcctcagatttgaccagcaaaagtgcaaccgatttcttgagtccggtggagcctacaacctatctacggcctaactttttggatcctactagtcgtttcttcctggcgccttcgacgaagacatcacctgtgtctaccaatacagaagtgtagacttcaattcctacaaatacagaagtgtaggcttcaatcctattgtttgctctggatttctgtttatgagcgtatttacaagagtatgtttggtctatgttagtatattaggaatacaattccaaaaccgttgtaccgtgccaaagtttaatactatacgtttgggtctgtcgatgagaaaaaaggacgagtgggtgagaagatgctgccctccgcagaactcgatcaggccggttcctctgcgcgtcctgctatgagaggctaacctgagcccgacagaaccggcttggtcgatttgggacctggtaggccggtatttttttattgaagtgtaactttctaaattaggtcttgttggtttgcgttggattgcgtccggaatcgtttcaagtttatataaattagagaagcaatccggttag

SEQ ID NO: 65439 - DNA, 4774 bp, Zea Mays
cacagaagcgtcgctcacatcaacatcacatgttcacatccatcttcgaaccccttcttcctctcttcagcgccgcacccgcgcccgcgccgtcgaaggcggcgcctagtctcgaggcttgcacgctgccgcggaggatcgcctcgctactgcgcgccatcgcctccgatctcctctatctccaatctgctccctcatcgccgtgcagtggaaactaggggaccgattcctcttctcgtttgtcgcatatttctcgctgcgtgccgcgtgctgcggtgagtgattctccaagaattctggggacgctgatctgagtccgcacagaacgcagcggcagcaatgatgatgtcggacgatgacgatgctgagccccagctcaacgcggtggagggctactacttcgttgactccaagaacgagaaggagcctgtctgcttctccaccctgcctttctggttcggggacactgatgatcttcctgacggcaagaagaagctggtgctgcgcgggactggtgacccgggcgtcaaggtgtacgatgaggtggtggcctgcaggctgggtctcgaggggaaacaacccgagtttgcagtgctcacagcaaaaggcagacgttggatacgtctcattaggcccttgaacagctacgaggaaatgatcaggactgtgttgatcacagcgcagatgctgcattttctaaggaggaagcctcatgagccagaaaaaaccttgtggaaccacctttgcaaagtttttaacaagtttgacgttccaccctcagaggacgatttcaggaaccactgctcactgatgaagcagtttgcggcaaaagatcctgtcttagcaaaatcagagattttgcgagtatttattgaaggaaaatctagaaaaaaattcactgaggttggtgcagaccatattgatgtcaagcagccgttcatcactgatgatgagggcatagatgaaatgaatgtggaagatgtcgataatgaatctgatgaagatgacgatgaatatttgtttgattcaatatgtgctatttgtgacgatggaggagacatattatgctgtgatggcccatgtatgcgctctttccatgcaaaagaaggaagtggtgaagactcctgttgtgttacccttggatacactgaggcagaagttgaggcaatgaaattatttctttgcaagaattgtgagtataagcaacaccagtgtttcatctgcggagtgttggaaccttcagatggagaagcagccaaggtgtttttatgtaacaatgctacatgtgggcacttttaccacccgaaatgtgttgcccaacaacttcaccccatcaacattgatgaagcctcagaattggagaagaagataacagaagggttttcatttacatgcccaattcactggtgctttcattgcaaaggtttggaggatagaacacaagaacctttgcaatttgctgtttgcagacgctgtccaaagtcatatcacagaaagtgtttaccaagcgaaatttcctttgacgaaaatgaagaggacgatatcatcatacgggcttgggaattatcaaaaagaattttgatatactgcctggaccatgagattgatagtgaacttgagacacctgtcagagatcatatcaagtttccaaagattgaaaaaccacttcaatttgtaaagaagggatctagcttgttgcctaagaagaaaaagaggacttacagtgagacagttcttgagcaatctcccaaagatactgtgaaaaggaaaagcaaggttcacatgctagaaagggaacaaaacaaacaagacaccagagaagtttctgcaaagagtttcactcaaaaccttgttgacacacctgtaaagaaaaaagccaagttgaaagagaaaatacagttgccgtatgtggccaaggatcattttataagcagtccaaaatctgtgaaagagcaagaacaagagttggtacctttgcccttatctgccatcaggaagagttcatttcctaaagtggacagtgaaactgaaaagagggtgattaccatattgggaaataaagtgtcttcattgacaataaaagatgtaacgaggaattgcagtttgccatcaactcatgtatactctggcagattgactgacaagataccactgggaaagattgaacgttctgttcaggctgtagaagcagctttaaaaaagctggaaaatggaggtagtgtcaatgatgctaaagcagtatgtgaacctgaagttttaaggcagcttgcaaggtggcatagtaaactcagagtgtatatatcaccttttattcatggcacaaggtacagttcctttggtagacattttacaaaggtggagaaacttgttgagatagtagatttctgctgtggggcaaatgattttagccgtcttatgaaagaaaaactcgacaaagttcagaagaagtgccatttcaagaattatgatcttatccaaccacagaatcgcttctgctttgaaaagagggattggatgactgtgcagccaaacgagctgcctcatggatcccaactaattatgggtcttaatcctccttttggagtcaaagcaagtcttgcgaacaaatttattgacaaagcattgacattcaagcctaagctcattgtactaattgtccctaaagaaactaaaaggttagatcagaggagaacaccttatgatttgatttgggaggacagtgagtgtctttctggcaagtccttctatttgcctggttctgtggatcttaatgataaaatagttgaagggtggaatgcatctgcgccacccctctatttgtggagtcatcctggttggacaaagaagcacatgcaagtggctgaagagcatggtcatacttgtatggggaagatagcttgccatgttgaagagagtaatctatcagatgacctgtccgtgaggaaacaatctgatgctacaaacaaactgaactcgagatcagggaaagagactccattcaatgacagaatgtccaatctacttgatgatggttctgctaggaagcaagcaagatctgaagaagagaagagaactctagggaagatagaacaccatgtgaaaaaggctaatataccagataacctcccagtgaagaaagaacctgaagcttccagcaaagtcatgtcgcattctggaaaagatagaaagattggcagatacaacaggaggagacatgacaacaggagcagcaaggggacacctgatcacacagagagcctcccccctgaaaagcaagtggaagttgcatatgaggaaacaagagttattcctagcaaaaagattgctcataatgaaaaaaagagcgcgcagtacaactacgagcaaactgcagcagggatgccaaacatgaggtctagaggaggggattctgacatgagtatctcacccccagtcagttgcaatgctcgaagcaaacccatgagctattccctgacgagaccaattgaacacttggatacgaatgctcaccttttggcagaagaacctagtgactctgtgctcaatagggttccaaatcatgacagttatttggcaatcaaagaggaatactgtgatggatttaagaggaaaaatgatcctatcttcagtcacattgatgatagctcaaggatgaggggctccagcatcgaagaagtgaccaagccgtatattactgctccaaacagtgatccgtggtctaaaggagatggcagcttttacaggcatccgagctcagaagatttaaacgctaatgctgatgtgcttatgccaggatacagtgcaagatatggacaaattggtggtgacagtaacccacaagctagtatggtcccactagcaacagattcaagactgcatggtggaacggttgctgataattacctctcggcaagatactcccttggatcttcaggtgctcgcgttagccaaccagctccaactgttcccccttttgggctctcaggtgcaagttcacaacgaggctcagtaatggacaggtattcgtatgggctttcgggtccgactggaacacagcgctcagttattgacaggtatgcgccgtccctcgatggaacgaacacaacaagatcgaggagctccttgcctgagcagtacccgttcggacaacctggctcttccggtggcgggtggcctcatcactgatcgctggaacttggtcctcagatttgaccagcaaaagtgcaaccgatttcttgagtccggtggagcctacaacctatctacggcctaactttttggatcctactagtcgtttcttcctggcgccttcgacgaagacatcacctgtgtctaccaatacagaagtgtagacttcaattcctacaaatacagaagtgtaggcttcaatcctattgtttgctctggatttctgtttatgagcgtatttacaagagtatgtttggtctatgttagtatattaggaatacaattccaaaaccgttgtaccgtgccaaagtttaatactatacgtttgggtctgtcgatgagaaaaaaggacgagtgggtgagaagatgctgccctccgcagaactcgatcaggccggttcctctgcgcgtcctgctatgagaggctaacctgagcccgacagaaccggcttggtcgatttgggacctggtaggccggtatttttttattgaagtgtaactttctaaattaggtcttgttggtttgcgttggattgcgtccggaatcgtttcaagtttatataaattagagaagcaatccggttag

SEQ ID NO: 65440 - DNA, 1175 bp, Zea Mays
ctcacatcaacatcacatgttcacatccatcttcgaaccccttcttcctctcttcagcgccgcacccgcgcccgcgccgtcgaaggcggcgcctagtctcgaggcttgcacgctgccgcggaggatcgcctcgctactgcgcgccatcgcctccgatctcctctatctccaatctgctccctcatcgccgtgcagtggaaactaggggaccgattcctcttctcgtttgtcgcatatttctcgctgcgtgccgcgtgctgcggtgagtgattctccaagaattctggggacgctgatctgagtccgcacagaacgcagcggcagcaatgatgatgtcggacgatgacgatgctgagccccagctcaacgcggtggagggctactacttcgttgactccaagaacgagaaggagcctgtctgcttctccaccctgcctttctggttcggggacactgatgatcttcctgacggcaagaagaagctggtgctgcgcgggactggtgacccgggcgtcaaggtgtacgatgaggtggtggcctgcaggctgggtctcgaggggaaacaacccgagtttgcagtgctcacagcaaaaggcagacgttggatacgtctcattaggcccttgaacagctacgaggaaatgatcaggactgtgttgatcacagcgcagatgctgcattttctaaggaggaagcctcatgagccagaaaaaaccttgtggaaccacctttgcaaagtttttaacaagtttgacgttccaccctcagaggacgatttcaggaaccactgctcactgatgaagcagtttgcggcaaaagatcctgtcttagcaaaatcagagattttgcgagtatttattgaaggaaaatctagaaaaaaattcactgaggttggtgcagaccatattgatgtcaagcagccgttcatcactgatgatgagggcatagatgaaatgaatgtggaagatgtcgataatgaatctgatgaagatgacgatgaatatttgtttgattcaatatgtgctatttgtgacgatggaggagacatattatgggcactgacatgctggttatacatgagcccactggccactcacttgcccaatctcagcggaatgtatatcaatcatctgtctggaatctgtggttgtgaattcattgcttacatgtttatc

SEQ ID NO: 65441 - DNA, 5158 bp, Zea Mays
ctcacatcaacatcacatgttcacatccatcttcgaaccccttcttcctctcttcagcgccgcacccgcgcccgcgccgtcgaaggcggcgcctagtctcgaggcttgcacgctgccgcggaggatcgcctcgctactgcgcgccatcgcctccgatctcctctatctccaatctgctccctcatcgccgtgcagtggaaactaggggaccgattcctcttctcgtttgtcgcatatttctcgctgcgtgccgcgtgctgcggtgagtgattctccaagaattctggggacgctgatctgagtccgcacagaacgcagcggcagcaatgatgatgtcggacgatgacgatgctgagccccagctcaacgcggtggagggctactacttcgttgactccaagaacgagaaggagcctgtctgcttctccaccctgcctttctggttcggggacactgatgatcttcctgacggcaagaagaagctggtgctgcgcgggactggtgacccgggcgtcaaggtgtacgatgaggtggtggcctgcaggctgggtctcgaggggaaacaacccgagtttgcagtgctcacagcaaaaggcagacgttggatacgtctcattaggcccttgaacagctacgaggaaatgatcaggactgtgttgatcacagcgcagatgctgcattttctaaggaggaagcctcatgagccagaaaaaaccttgtggaaccacctttgcaaagtttttaacaagtttgacgttccaccctcagaggacgatttcaggaaccactgctcactgatgaagcagtttgcggcaaaagatcctgtcttagcaaaatcagagattttgcgagtatttattgaaggaaaatctagaaaaaaattcactgaggttggtgcagaccatattgatgtcaagcagccgttcatcactgatgatgagggcatagatgaaatgaatgtggaagatgtcgataatgaatctgatgaagatgacgatgaatatttgtttgattcaatatgtgctatttgtgacgatggaggagacatattatgctgtgatggcccatgtatgcgctctttccatgcaaaagaaggaagtggtgaagactcctgttgtgttacccttggatacactgaggcagaagttgaggcaatgaaattatttctttgcaagaattgtgagtataagcaacaccagtgtttcatctgcggagtgttggaaccttcagatggagaagcagccaaggtgtttttatgtaacaatgctacatgtgggcacttttaccacccgaaatgtgttgcccaacaacttcaccccatcaacattgatgaagcctcagaattggagaagaagataacagaagggttttcatttacatgcccaattcactggtgctttcattgcaaaggtttggaggatagaacacaagaacctttgcaatttgctgtttgcagacgctgtccaaagtcatatcacagaaagtgtttaccaaggttctgttttagaacaagctatttttcttgtttttttaaatactttaagtgtataatctcttattcttcaaatatttggaattatttcacagcgaaatttcctttgacgaaaatgaagaggacgatatcatcatacgggcttgggaattatcaaaaagaattttgatatactgcctggaccatgagattgatagtgaacttgagacacctgtcagagatcatatcaagtttccaaagattgaaaaaccacttcaatttgtaaagaagggatctagcttgttgcctaagaagaaaaagaggacttacagtgagacagttcttgagcaatctcccaaagatactgtgaaaaggaaaagcaaggttcacatgctagaaagggaacaaaacaaacaagacaccagagaagtttctgcaaagagtttcactcaaaaccttgttgacacacctgtaaagaaaaaagccaagttgaaagagaaaatacagttgccgtatgtggccaaggatcattttataagcagtccaaaatctgtgaaagagcaagaacaagagttggtacctttgcccttatctgccatcaggaagagttcatttcctaaagtggacagtgaaactgaaaagaggtgagtcacttgtgtataaagtacttggggaatgaaatctccagatcatatggtatgtaactttatgtgcaaaaattgctagcattcatgaatttcctacaaccagacctgatgaggcattgaaattttgtttgtttgtcaggtctgatgaggcattggattttttttgtttatcatgttgcagaatcctctcctatactcatgttttaatcttaatgccatgtatccacattctgtatgataatgtaaacgatgtttgaagtccgcatactgttatatgactatatgagatcttctatttgcagggtgattaccatattgggaaataaagtgtcttcattgacaataaaagatgtaacgaggaattgcagtttgccatcaactcatgtatactctggcagattgactgacaagataccactgggaaagattgaacgttctgttcaggctgtagaagcagctttaaaaaagctggaaaatggaggtagtgtcaatgatgctaaagcagtatgtgaacctgaagttttaaggcagcttgcaaggtggcatagtaaactcagagtgtatatatcaccttttattcatggcacaaggtacagttcctttggtagacattttacaaaggtggagaaacttgttgagatagtagatttctgctgtggggcaaatgattttagccgtcttatgaaagaaaaactcgacaaagttcagaagaagtgccatttcaagaattatgatcttatccaaccacagaatcgcttctgctttgaaaagagggattggatgactgtgcagccaaacgagctgcctcatggatcccaactaattatgggtcttaatcctccttttggagtcaaagcaagtcttgcgaacaaatttattgacaaagcattgacattcaagcctaagctcattgtactaattgtccctaaagaaactaaaaggttagatcagaggagaacaccttatgatttgatttgggaggacagtgagtgtctttctggcaagtccttctatttgcctggttctgtggatcttaatgataaaatagttgaagggtggaatgcatctgcgccacccctctatttgtggagtcatcctggttggacaaagaagcacatgcaagtggctgaagagcatggtcatacttgtatggggaagatagcttgccatgttgaagagagtaatctatcagatgacctgtccgtgaggaaacaatctgatgctacaaacaaactgaactcgagatcagggaaagagactccattcaatgacagaatgtccaatctacttgatgatggttctgctaggaagcaagcaagatctgaagaagagaagagaactctagggaagatagaacaccatgtgaaaaaggctaatataccagataacctcccagtgaagaaagaacctgaagcttccagcaaagtcatgtcgcattctggaaaagatagaaagattggcagatacaacaggaggagacatgacaacaggagcagcaaggggacacctgatcacacagagagcctcccccctgaaaagcaagtggaagttgcatatgaggaaacaagagttattcctagcaaaaagattgctcataatgaaaaaaagagcgcgcagtacaactacgagcaaactgcagcagggatgccaaacatgaggtctagaggaggggattctgacatgagtatctcacccccagtcagttgcaatgctcgaagcaaacccatgagctattccctgacgagaccaattgaacacttggatacgaatgctcaccttttggcagaagaacctagtgactctgtgctcaatagggttccaaatcatgacagttatttggcaatcaaagaggaatactgtgatggatttaagaggaaaaatgatcctatcttcagtcacattgatgatagctcaaggatgaggggctccagcatcgaagaagtgaccaagccgtatattactgctccaaacagtgatccgtggtctaaaggagatggcagcttttacaggcatccgagctcagaagatttaaacgctaatgctgatgtgcttatgccaggatacagtgcaagatatggacaaattggtggtgacagtaacccacaagctagtatggtcccactagcaacagattcaagactgcatggtggaacggttgctgataattacctctcggcaagatactcccttggatcttcaggtgctcgcgttagccaaccagctccaactgttcccccttttgggctctcaggtgcaagttcacaacgaggctcagtaatggacaggtattcgtatgggctttcgggtccgactggaacacagcgctcagttattgacaggtatgcgccgtccctcgatggaacgaacacaacaagatcgaggagctccttgcctgagcagtacccgttcggacaacctggctcttccggtggcgggtggcctcatcactgatcgctggaacttggtcctcagatttgaccagcaaaagtgcaaccgatttcttgagtccggtggagcctacaacctatctacggcctaactttttggatcctactagtcgtttcttcctggcgccttcgacgaagacatcacctgtgtctaccaatacagaagtgtagacttcaattcctacaaatacagaagtgtaggcttcaatcctattgtttgctctggatttctgtttatgagcgtatttacaagagtatgtttggtctatgttagtatattaggaatacaattccaaaaccgttgtaccgtgccaaagtttaatactatacgtttgggtctgtcgatgagaaaaaaggacgagtgggtgagaagatgctgccctccgcagaactcgatcaggccggttcctctgcgcgtcctgctatgagaggctaacctgagcccgacagaaccggcttggtcgatttgggacctggtaggccggtatttttttattgaagtgtaactttctaaattaggtcttgttggtttgcgttggattgcgtccggaatcgtttcaagtttatataaattagagaagcaatccggttag

SEQ ID NO: 65442 - DNA, 5015 bp, Zea Mays
ctcacatcaacatcacatgttcacatccatcttcgaaccccttcttcctctcttcagcgccgcacccgcgcccgcgccgtcgaaggcggcgcctagtctcgaggcttgcacgctgccgcggaggatcgcctcgctactgcgcgccatcgcctccgatctcctctatctccaatctgctccctcatcgccgtgcagtggaaactaggggaccgattcctcttctcgtttgtcgcatatttctcgctgcgtgccgcgtgctgcggtgagtgattctccaagaattctggggacgctgatctgagtccgcacagaacgcagcggcagcaatgatgatgtcggacgatgacgatgctgagccccagctcaacgcggtggagggctactacttcgttgactccaagaacgagaaggagcctgtctgcttctccaccctgcctttctggttcggggacactgatgatcttcctgacggcaagaagaagctggtgctgcgcgggactggtgacccgggcgtcaaggtgtacgatgaggtggtggcctgcaggctgggtctcgaggggaaacaacccgagtttgcagtgctcacagcaaaaggcagacgttggatacgtctcattaggcccttgaacagctacgaggaaatgatcaggactgtgttgatcacagcgcagatgctgcattttctaaggaggaagcctcatgagccagaaaaaaccttgtggaaccacctttgcaaagtttttaacaagtttgacgttccaccctcagaggacgatttcaggaaccactgctcactgatgaagcagtttgcggcaaaagatcctgtcttagcaaaatcagagattttgcgagtatttattgaaggaaaatctagaaaaaaattcactgaggttggtgcagaccatattgatgtcaagcagccgttcatcactgatgatgagggcatagatgaaatgaatgtggaagatgtcgataatgaatctgatgaagatgacgatgaatatttgtttgattcaatatgtgctatttgtgacgatggaggagacatattatgctgtgatggcccatgtatgcgctctttccatgcaaaagaaggaagtggtgaagactcctgttgtgttacccttggatacactgaggcagaagttgaggcaatgaaattatttctttgcaagaattgtgagtataagcaacaccagtgtttcatctgcggagtgttggaaccttcagatggagaagcagccaaggtgtttttatgtaacaatgctacatgtgggcacttttaccacccgaaatgtgttgcccaacaacttcaccccatcaacattgatgaagcctcagaattggagaagaagataacagaagggttttcatttacatgcccaattcactggtgctttcattgcaaaggtttggaggatagaacacaagaacctttgcaatttgctgtttgcagacgctgtccaaagtcatatcacagaaagtgtttaccaagcgaaatttcctttgacgaaaatgaagaggacgatatcatcatacgggcttgggaattatcaaaaagaattttgatatactgcctggaccatgagattgatagtgaacttgagacacctgtcagagatcatatcaagtttccaaagattgaaaaaccacttcaatttgtaaagaagggatctagcttgttgcctaagaagaaaaagaggacttacagtgagacagttcttgagcaatctcccaaagatactgtgaaaaggaaaagcaaggttcacatgctagaaagggaacaaaacaaacaagacaccagagaagtttctgcaaagagtttcactcaaaaccttgttgacacacctgtaaagaaaaaagccaagttgaaagagaaaatacagttgccgtatgtggccaaggatcattttataagcagtccaaaatctgtgaaagagcaagaacaagagttggtacctttgcccttatctgccatcaggaagagttcatttcctaaagtggacagtgaaactgaaaagaggtgagtcacttgtgtataaagtacttggggaatgaaatctccagatcatatggtatgtaactttatgtgcaaaaattgctagcattcatgaatttcctacaaccagacctgatgaggcattgaaattttgtttgtttgtcaggtctgatgaggcattggattttttttgtttatcatgttgcagaatcctctcctatactcatgttttaatcttaatgccatgtatccacattctgtatgataatgtaaacgatgtttgaagtccgcatactgttatatgactatatgagatcttctatttgcagggtgattaccatattgggaaataaagtgtcttcattgacaataaaagatgtaacgaggaattgcagtttgccatcaactcatgtatactctggcagattgactgacaagataccactgggaaagattgaacgttctgttcaggctgtagaagcagctttaaaaaagctggaaaatggaggtagtgtcaatgatgctaaagcagtatgtgaacctgaagttttaaggcagcttgcaaggtggcatattgttgatagacttcactggtatgtggaaactggtgacatgatagtagatttctgctgtggggcaaatgattttagccgtcttatgaaagaaaaactcgacaaagttcagaagaagtgccatttcaagaattatgatcttatccaaccacagaatcgcttctgctttgaaaagagggattggatgactgtgcagccaaacgagctgcctcatggatcccaactaattatgggtcttaatcctccttttggagtcaaagcaagtcttgcgaacaaatttattgacaaagcattgacattcaagcctaagctcattgtactaattgtccctaaagaaactaaaaggttagatcagaggagaacaccttatgatttgatttgggaggacagtgagtgtctttctggcaagtccttctatttgcctggttctgtggatcttaatgataaaatagttgaagggtggaatgcatctgcgccacccctctatttgtggagtcatcctggttggacaaagaagcacatgcaagtggctgaagagcatggtcatacttgtatggggaagatagcttgccatgttgaagagagtaatctatcagatgacctgtccgtgaggaaacaatctgatgctacaaacaaactgaactcgagatcagggaaagagactccattcaatgacagaatgtccaatctacttgatgatggttctgctaggaagcaagcaagatctgaagaagagaagagaactctagggaagatagaacaccatgtgaaaaaggctaatataccagataacctcccagtgaagaaagaacctgaagcttccagcaaagtcatgtcgcattctggaaaagatagaaagattggcagatacaacaggaggagacatgacaacaggagcagcaaggggacacctgatcacacagagagcctcccccctgaaaagcaagtggaagttgcatatgaggaaacaagagttattcctagcaaaaagattgctcataatgaaaaaaagagcgcgcagtacaactacgagcaaactgcagcagggatgccaaacatgaggtctagaggaggggattctgacatgagtatctcacccccagtcagttgcaatgctcgaagcaaacccatgagctattccctgacgagaccaattgaacacttggatacgaatgctcaccttttggcagaagaacctagtgactctgtgctcaatagggttccaaatcatgacagttatttggcaatcaaagaggaatactgtgatggatttaagaggaaaaatgatcctatcttcagtcacattgatgatagctcaaggatgaggggctccagcatcgaagaagtgaccaagccgtatattactgctccaaacagtgatccgtggtctaaaggagatggcagcttttacaggcatccgagctcagaagatttaaacgctaatgctgatgtgcttatgccaggatacagtgcaagatatggacaaattggtggtgacagtaacccacaagctagtatggtcccactagcaacagattcaagactgcatggtggaacggttgctgataattacctctcggcaagatactcccttggatcttcaggtgctcgcgttagccaaccagctccaactgttcccccttttgggctctcaggtgcaagttcacaacgaggctcagtaatggacaggtattcgtatgggctttcgggtccgactggaacacagcgctcagttattgacaggtatgcgccgtccctcgatggaacgaacacaacaagatcgaggagctccttgcctgagcagtacccgttcggacaacctggctcttccggtggcgggtggcctcatcactgatcgctggaacttggtcctcagatttgaccagcaaaagtgcaaccgatttcttgagtccggtggagcctacaacctatctacggcctaactttttggatcctactagtcgtttcttcctggcgccttcgacgaagacatcacctgtgtctaccaatacagaagtgtagacttcaattcctacaaatacagaagtgtaggcttcaatcctattgtttgctctggatttctgtttatgagcgtatttacaagagtatgtttggtctatgttagtatattaggaatacaattccaaaaccgttgtaccgtgccaaagtttaatactatacgtttgggtctgtcgatgagaaaaaaggacgagtgggtgagaagatgctgccctccgcagaactcgatcaggccggttcctctgcgcgtcctgctatgagaggctaacctgagcccgacagaaccggcttggtcgatttgggacctggtaggccggtatttttttattgaagtgtaactttctaaattaggtcttgttggtttgcgttggattgcgtccggaatcgtttcaagtttatataaattagagaagcaatccggttag

SEQ ID NO: 65443 - DNA, 5108 bp, Zea Mays
ctcacatcaacatcacatgttcacatccatcttcgaaccccttcttcctctcttcagcgccgcacccgcgcccgcgccgtcgaaggcggcgcctagtctcgaggcttgcacgctgccgcggaggatcgcctcgctactgcgcgccatcgcctccgatctcctctatctccaatctgctccctcatcgccgtgcagtggaaactaggggaccgattcctcttctcgtttgtcgcatatttctcgctgcgtgccgcgtgctgcggtgagtgattctccaagaattctggggacgctgatctgagtccgcacagaacgcagcggcagcaatgatgatgtcggacgatgacgatgctgagccccagctcaacgcggtggagggctactacttcgttgactccaagaacgagaaggagcctgtctgcttctccaccctgcctttctggttcggggacactgatgatcttcctgacggcaagaagaagctggtgctgcgcgggactggtgacccgggcgtcaaggtgtacgatgaggtggtggcctgcaggctgggtctcgaggggaaacaacccgagtttgcagtgctcacagcaaaaggcagacgttggatacgtctcattaggcccttgaacagctacgaggaaatgatcaggactgtgttgatcacagcgcagatgctgcattttctaaggaggaagcctcatgagccagaaaaaaccttgtggaaccacctttgcaaagtttttaacaagtttgacgttccaccctcagaggacgatttcaggaaccactgctcactgatgaagcagtttgcggcaaaagatcctgtcttagcaaaatcagagattttgcgagtatttattgaaggaaaatctagaaaaaaattcactgaggttggtgcagaccatattgatgtcaagcagccgttcatcactgatgatgagggcatagatgaaatgaatgtggaagatgtcgataatgaatctgatgaagatgacgatgaatatttgtttgattcaatatgtgctatttgtgacgatggaggagacatattatgctgtgatggcccatgtatgcgctctttccatgcaaaagaaggaagtggtgaagactcctgttgtgttacccttggatacactgaggcagaagttgaggcaatgaaattatttctttgcaagaattgtgagtataagcaacaccagtgtttcatctgcggagtgttggaaccttcagatggagaagcagccaaggtgtttttatgtaacaatgctacatgtgggcacttttaccacccgaaatgtgttgcccaacaacttcaccccatcaacattgatgaagcctcagaattggagaagaagataacagaagggttttcatttacatgcccaattcactggtgctttcattgcaaaggtttggaggatagaacacaagaacctttgcaatttgctgtttgcagacgctgtccaaagtcatatcacagaaagtgtttaccaagcgaaatttcctttgacgaaaatgaagaggacgatatcatcatacgggcttgggaattatcaaaaagaattttgatatactgcctggaccatgagattgatagtgaacttgagacacctgtcagagatcatatcaagtttccaaagattgaaaaaccacttcaatttgtaaagaagggatctagcttgttgcctaagaagaaaaagaggacttacagtgagacagttcttgagcaatctcccaaagatactgtgaaaaggaaaagcaaggttcacatgctagaaagggaacaaaacaaacaagacaccagagaagtttctgcaaagagtttcactcaaaaccttgttgacacacctgtaaagaaaaaagccaagttgaaagagaaaatacagttgccgtatgtggccaaggatcattttataagcagtccaaaatctgtgaaagagcaagaacaagagttggtacctttgcccttatctgccatcaggaagagttcatttcctaaagtggacagtgaaactgaaaagaggtgagtcacttgtgtataaagtacttggggaatgaaatctccagatcatatggtatgtaactttatgtgcaaaaattgctagcattcatgaatttcctacaaccagacctgatgaggcattgaaattttgtttgtttgtcaggtctgatgaggcattggattttttttgtttatcatgttgcagaatcctctcctatactcatgttttaatcttaatgccatgtatccacattctgtatgataatgtaaacgatgtttgaagtccgcatactgttatatgactatatgagatcttctatttgcagggtgattaccatattgggaaataaagtgtcttcattgacaataaaagatgtaacgaggaattgcagtttgccatcaactcatgtatactctggcagattgactgacaagataccactgggaaagattgaacgttctgttcaggctgtagaagcagctttaaaaaagctggaaaatggaggtagtgtcaatgatgctaaagcagtatgtgaacctgaagttttaaggcagcttgcaaggtggcatagtaaactcagagtgtatatatcaccttttattcatggcacaaggtacagttcctttggtagacattttacaaaggtggagaaacttgttgagattgttgatagacttcactggtatgtggaaactggtgacatgatagtagatttctgctgtggggcaaatgattttagccgtcttatgaaagaaaaactcgacaaagttcagaagaagtgccatttcaagaattatgatcttatccaaccacagaatcgcttctgctttgaaaagagggattggatgactgtgcagccaaacgagctgcctcatggatcccaactaattatgggtcttaatcctccttttggagtcaaagcaagtcttgcgaacaaatttattgacaaagcattgacattcaagcctaagctcattgtactaattgtccctaaagaaactaaaaggttagatcagaggagaacaccttatgatttgatttgggaggacagtgagtgtctttctggcaagtccttctatttgcctggttctgtggatcttaatgataaaatagttgaagggtggaatgcatctgcgccacccctctatttgtggagtcatcctggttggacaaagaagcacatgcaagtggctgaagagcatggtcatacttgtatggggaagatagcttgccatgttgaagagagtaatctatcagatgacctgtccgtgaggaaacaatctgatgctacaaacaaactgaactcgagatcagggaaagagactccattcaatgacagaatgtccaatctacttgatgatggttctgctaggaagcaagcaagatctgaagaagagaagagaactctagggaagatagaacaccatgtgaaaaaggctaatataccagataacctcccagtgaagaaagaacctgaagcttccagcaaagtcatgtcgcattctggaaaagatagaaagattggcagatacaacaggaggagacatgacaacaggagcagcaaggggacacctgatcacacagagagcctcccccctgaaaagcaagtggaagttgcatatgaggaaacaagagttattcctagcaaaaagattgctcataatgaaaaaaagagcgcgcagtacaactacgagcaaactgcagcagggatgccaaacatgaggtctagaggaggggattctgacatgagtatctcacccccagtcagttgcaatgctcgaagcaaacccatgagctattccctgacgagaccaattgaacacttggatacgaatgctcaccttttggcagaagaacctagtgactctgtgctcaatagggttccaaatcatgacagttatttggcaatcaaagaggaatactgtgatggatttaagaggaaaaatgatcctatcttcagtcacattgatgatagctcaaggatgaggggctccagcatcgaagaagtgaccaagccgtatattactgctccaaacagtgatccgtggtctaaaggagatggcagcttttacaggcatccgagctcagaagatttaaacgctaatgctgatgtgcttatgccaggatacagtgcaagatatggacaaattggtggtgacagtaacccacaagctagtatggtcccactagcaacagattcaagactgcatggtggaacggttgctgataattacctctcggcaagatactcccttggatcttcaggtgctcgcgttagccaaccagctccaactgttcccccttttgggctctcaggtgcaagttcacaacgaggctcagtaatggacaggtattcgtatgggctttcgggtccgactggaacacagcgctcagttattgacaggtatgcgccgtccctcgatggaacgaacacaacaagatcgaggagctccttgcctgagcagtacccgttcggacaacctggctcttccggtggcgggtggcctcatcactgatcgctggaacttggtcctcagatttgaccagcaaaagtgcaaccgatttcttgagtccggtggagcctacaacctatctacggcctaactttttggatcctactagtcgtttcttcctggcgccttcgacgaagacatcacctgtgtctaccaatacagaagtgtagacttcaattcctacaaatacagaagtgtaggcttcaatcctattgtttgctctggatttctgtttatgagcgtatttacaagagtatgtttggtctatgttagtatattaggaatacaattccaaaaccgttgtaccgtgccaaagtttaatactatacgtttgggtctgtcgatgagaaaaaaggacgagtgggtgagaagatgctgccctccgcagaactcgatcaggccggttcctctgcgcgtcctgctatgagaggctaacctgagcccgacagaaccggcttggtcgatttgggacctggtaggccggtatttttttattgaagtgtaactttctaaattaggtcttgttggtttgcgttggattgcgtccggaatcgtttcaagtttatataaattagagaagcaatccggttag

SEQ ID NO: 65444 - DNA, 6875 bp, Zea Mays
ctcacatcaacatcacatgttcacatccatcttcgaaccccttcttcctctcttcagcgccgcacccgcgcccgcgccgtcgaaggcggcgcctagtctcgaggcttgcacgctgccgcggaggatcgcctcgctactgcgcgccatcgcctccgatctcctctatctccaatctgctccctcatcgccgtgcagtggaaactaggggaccgattcctcttctcgtttgtcgcatatttctcgctgcgtgccgcgtgctgcggtgagtgattctccaagaattctggggacgctgatctgagtccgcacagaacgcagcggcagcaatgatgatgtcggacgatgacgatgctgagccccagctcaacgcggtggagggctactacttcgttgactccaagaacgagaaggagcctgtctgcttctccaccctgcctttctggttcggggacactgatgatcttcctgacggcaagaagaagctggtgctgcgcgggactggtgacccgggcgtcaaggtgtacgatgaggtggtggcctgcaggctgggtctcgaggggaaacaacccgagtttgcagtgctcacagcaaaaggcagacgttggatacgtctcattaggcccttgaacagctacgaggaaatgatcaggactgtgttgatcacagcgcagatgctgcattttctaaggaggaagcctcatgagccagaaaaaaccttgtggaaccacctttgcaaagtttttaacaagtttgacgttccaccctcagaggacgatttcaggaaccactgctcactgatgaagcagtttgcggcaaaagatcctgtcttagcaaaatcagagattttgcgagtatttattgaaggaaaatctagaaaaaaattcactgaggttggtgcagaccatattgatgtcaagcagccgttcatcactgatgatgagggcatagatgaaatgaatgtggaagatgtcgataatgaatctgatgaagatgacgatgaatatttgtttgattcaatatgtgctatttgtgacgatggaggagacatattatggtaggtggattcccttatgtgattgagtaggctacctgagagtcttttctcttgagaatctaggcagcttgatgtttagttagtatttaattgttcttttcttcagttgagcaaacacaacaaaaccattacatatatattttacatggtgattagcccaatatcgtcgcgccaagcccctaggattgtttttataagcactatttatattatgtactaaacttaggaaggccccatatgacatgacttaatggctggctacctgtagagagatcacttgctaacgttaggctgtgaagtttgaacttagttaactctatcatcataaaatcaaaacagaagttgaagaagtatagtgtttacaaagatgctgctcattccaccgatggaaattgcatcgtacgggaaaataatatacatggtcagagctatatgcattcctatgaagtaggtcatcgagttactctatatcctgaaaagctttgttatgaaaattccagtagactgttgttgatatagaataaagtgtgacattgatgcacagaaagctcctaaatttgatattattttttcacagctggatcaagagatttagtgttttctattgtgacacatgagccataactaaaagatagggttgatggattatattttgcataatctatagttctatacacaaattcattctcttttgagatcaagtttagttgtaaaggtgcttcagcgcagagagccgcagaccatgttccgaggagcaattgcgagcttatgcatcctctcacatctacatgctgagagtatgtttcttttttcatcaattagaacagtttgtagtttcccttaataggtgttgtattaggaagaagtccatgatagtagatgtcaaaggtccaggcatccaacttctatctataatctgattctctagttcttagctcctgcttttgctatcagggcactgacatgctggttatacatgagcccactggccactcacttgcccaatctcagcggaatgtatatcaatcatctgtctggaatctgtggttgtgaattcattgcttacatgtttatccctggttatacatgagcccactggccactcacttgcatttttgatggctgcaacccaagtatgtcttcaagtctcagagctgctaatgaggaaagaagaagatgggaagtggctggtgcaaaaggcctcacacatctggctgcacccttggtagaaccttaggaagatttgagtagtttgattttttgatccccttatggatctatatttgtatgcctgtttctggcctccgtaaggagggctgtaaacctttttgttttgttttgttttttctattttctctgcttaatatataatggggcgtagttctcctgcgcgttcgagaaaaaaaatacatgtttatcccttgtaaatattttgaaaaaaatacgaaatttctggagtgaagttgttatagactatagtttctttcattgttaacacataatggaaaccaccttgcataatctggtttattgtgcagtataattaccaattttcttatttctcttttttttcatgctgagcttcttatgtttattaattttctagccatcgaaatgtcatgtcaatatctaattttctccagtatatacttgttctatctgtcgatgtggtcatattcttgtgcttatcaacatgttggtcatccattctccatattctaatctttttctttctgtggtgtacttgttgcgtttttctactatagctgtgatggcccatgtatgcgctctttccatgcaaaagaaggaagtggtgaagactcctgttgtgttacccttggatacactgaggcagaagttgaggcaatgaaattatttctttgcaagaattgtgagtataagcaacaccagtgtttcatctgcggagtgttggaaccttcagatggagaagcagccaaggtgtttttatgtaacaatgctacatgtgggcacttttaccacccgaaatgtgttgcccaacaacttcaccccatcaacattgatgaagcctcagaattggagaagaagataacagaagggttttcatttacatgcccaattcactggtgctttcattgcaaaggtttggaggatagaacacaagaacctttgcaatttgctgtttgcagacgctgtccaaagtcatatcacagaaagtgtttaccaagcgaaatttcctttgacgaaaatgaagaggacgatatcatcatacgggcttgggaattatcaaaaagaattttgatatactgcctggaccatgagattgatagtgaacttgagacacctgtcagagatcatatcaagtttccaaagattgaaaaaccacttcaatttgtaaagaagggatctagcttgttgcctaagaagaaaaagaggacttacagtgagacagttcttgagcaatctcccaaagatactgtgaaaaggaaaagcaaggttcacatgctagaaagggaacaaaacaaacaagacaccagagaagtttctgcaaagagtttcactcaaaaccttgttgacacacctgtaaagaaaaaagccaagttgaaagagaaaatacagttgccgtatgtggccaaggatcattttataagcagtccaaaatctgtgaaagagcaagaacaagagttggtacctttgcccttatctgccatcaggaagagttcatttcctaaagtggacagtgaaactgaaaagaggtgagtcacttgtgtataaagtacttggggaatgaaatctccagatcatatggtatgtaactttatgtgcaaaaattgctagcattcatgaatttcctacaaccagacctgatgaggcattgaaattttgtttgtttgtcaggtctgatgaggcattggattttttttgtttatcatgttgcagaatcctctcctatactcatgttttaatcttaatgccatgtatccacattctgtatgataatgtaaacgatgtttgaagtccgcatactgttatatgactatatgagatcttctatttgcagggtgattaccatattgggaaataaagtgtcttcattgacaataaaagatgtaacgaggaattgcagtttgccatcaactcatgtatactctggcagattgactgacaagataccactgggaaagattgaacgttctgttcaggctgtagaagcagctttaaaaaagctggaaaatggaggtagtgtcaatgatgctaaagcagtatgtgaacctgaagttttaaggcagcttgcaaggtggcatagtaaactcagagtgtatatatcaccttttattcatggcacaaggtacagttcctttggtagacattttacaaaggtggagaaacttgttgaggattgttgatagacttcactggtatgtggaaactggtgacatgatagtagatttctgctgtggggcaaatgattttagccgtcttatgaaagaaaaactcgacaaagttcagaagaagtgccatttcaagaattatgatcttatccaaccacagaatcgcttctgctttgaaaagagggattggatgactgtgcagccaaacgagctgcctcatggatcccaactaattatgggtcttaatcctccttttggagtcaaagcaagtcttgcgaacaaatttattgacaaagcattgacattcaagcctaagctcattgtactaattgtccctaaagaaactaaaaggttagatcagaggagaacaccttatgatttgatttgggaggacagtgagtgtctttctggcaagtccttctatttgcctggttctgtggatcttaatgataaaatagttgaagggtggaatgcatctgcgccacccctctatttgtggagtcatcctggttggacaaagaagcacatgcaagtggctgaagagcatggtcatacttgtatggggaagatagcttgccatgttgaagagagtaatctatcagatgacctgtccgtgaggaaacaatctgatgctacaaacaaactgaactcgagatcagggaaagagactccattcaatgacagaatgtccaatctacttgatgatggttctgctaggaagcaagcaagatctgaagaagagaagagaactctagggaagatagaacaccatgtgaaaaaggctaatataccagataacctcccagtgaagaaagaacctgaagcttccagcaaagtcatgtcgcattctggaaaagatagaaagattggcagatacaacaggaggagacatgacaacaggagcagcaaggggacacctgatcacacagagagcctcccccctgaaaagcaagtggaagttgcatatgaggaaacaagagttattcctagcaaaaagattgctcataatgaaaaaaagagcgcgcagtacaactacgagcaaactgcagcagggatgccaaacatgaggtctagaggaggggattctgacatgagtatctcacccccagtcagttgcaatgctcgaagcaaacccatgagctattccctgacgagaccaattgaacacttggatacgaatgctcaccttttggcagaagaacctagtgactctgtgctcaatagggttccaaatcatgacagttatttggcaatcaaagaggaatactgtgatggatttaagaggaaaaatgatcctatcttcagtcacattgatgatagctcaaggatgaggggctccagcatcgaagaagtgaccaagccgtatattactgctccaaacagtgatccgtggtctaaaggagatggcagcttttacaggcatccgagctcagaagatttaaacgctaatgctgatgtgcttatgccaggatacagtgcaagatatggacaaattggtggtgacagtaacccacaagctagtatggtcccactagcaacagattcaagactgcatggtggaacggttgctgataattacctctcggcaagatactcccttggatcttcaggtgctcgcgttagccaaccagctccaactgttcccccttttgggctctcaggtgcaagttcacaacgaggctcagtaatggacaggtattcgtatgggctttcgggtccgactggaacacagcgctcagttattgacaggtatgcgccgtccctcgatggaacgaacacaacaagatcgaggagctccttgcctgagcagtacccgttcggacaacctggctcttccggtggcgggtggcctcatcactgatcgctggaacttggtcctcagatttgaccagcaaaagtgcaaccgatttcttgagtccggtggagcctacaacctatctacggcctaactttttggatcctactagtcgtttcttcctggcgccttcgacgaagacatcacctgtgtctaccaatacagaagtgtagacttcaattcctacaaatacagaagtgtaggcttcaatcctattgtttgctctggatttctgtttatgagcgtatttacaagagtatgtttggtctatgttagtatattaggaatacaattccaaaaccgttgtaccgtgccaaagtttaatactatacgtttgggtctgtcgatgagaaaaaaggacgagtgggtgagaagatgctgccctccgcagaactcgatcaggccggttcctctgcgcgtcctgctatgagaggctaacctgagcccgacagaaccggcttggtcgatttgggacctggtaggccggtatttttttattgaagtgtaactttctaaattaggtcttgttggtttgcgttggattgcgtccggaatcgtttcaagtttatataaattagagaagcaatccggttag

SEQ ID NO: 65445 - DNA, 3902 bp, Zea Mays
attatattttgcataatctatagttctatacacaaattcattctcttttgagatcaagtttagttgtaaaggtgcttcagcgcagagagccgcagaccatgttccgaggagcaattgcgagcttatgcatcctctcacatctacatgctgagactgtgatggcccatgtatgcgctctttccatgcaaaagaaggaagtggtgaagactcctgttgtgttacccttggatacactgaggcagaagttgaggcaatgaaattatttctttgcaagaattgtgagtataagcaacaccagtgtttcatctgcggagtgttggaaccttcagatggagaagcagccaaggtgtttttatgtaacaatgctacatgtgggcacttttaccacccgaaatgtgttgcccaacaacttcaccccatcaacattgatgaagcctcagaattggagaagaagataacagaagggttttcatttacatgcccaattcactggtgctttcattgcaaaggtttggaggatagaacacaagaacctttgcaatttgctgtttgcagacgctgtccaaagtcatatcacagaaagtgtttaccaagcgaaatttcctttgacgaaaatgaagaggacgatatcatcatacgggcttgggaattatcaaaaagaattttgatatactgcctggaccatgagattgatagtgaacttgagacacctgtcagagatcatatcaagtttccaaagattgaaaaaccacttcaatttgtaaagaagggatctagcttgttgcctaagaagaaaaagaggacttacagtgagacagttcttgagcaatctcccaaagatactgtgaaaaggaaaagcaaggttcacatgctagaaagggaacaaaacaaacaagacaccagagaagtttctgcaaagagtttcactcaaaaccttgttgacacacctgtaaagaaaaaagccaagttgaaagagaaaatacagttgccgtatgtggccaaggatcattttataagcagtccaaaatctgtgaaagagcaagaacaagagttggtacctttgcccttatctgccatcaggaagagttcatttcctaaagtggacagtgaaactgaaaagagggtgattaccatattgggaaataaagtgtcttcattgacaataaaagatgtaacgaggaattgcagtttgccatcaactcatgtatactctggcagattgactgacaagataccactgggaaagattgaacgttctgttcaggctgtagaagcagctttaaaaaagctggaaaatggaggtagtgtcaatgatgctaaagcagtatgtgaacctgaagttttaaggcagcttgcaaggtggcatagtaaactcagagtgtatatatcaccttttattcatggcacaaggtacagttcctttggtagacattttacaaaggtggagaaacttgttgagattgttgatagacttcactggtatgtggaaactggtgacatgatagtagatttctgctgtggggcaaatgattttagccgtcttatgaaagaaaaactcgacaaagttcagaagaagtgccatttcaagaattatgatcttatccaaccacagaatcgcttctgctttgaaaagagggattggatgactgtgcagccaaacgagctgcctcatggatcccaactaattatgggtcttaatcctccttttggagtcaaagcaagtcttgcgaacaaatttattgacaaagcattgacattcaagcctaagctcattgtactaattgtccctaaagaaactaaaaggttagatcagaggagaacaccttatgatttgatttgggaggacagtgagtgtctttctggcaagtccttctatttgcctggttctgtggatcttaatgataaaatagttgaagggtggaatgcatctgcgccacccctctatttgtggagtcatcctggttggacaaagaagcacatgcaagtggctgaagagcatggtcatacttgtatggggaagatagcttgccatgttgaagagagtaatctatcagatgacctgtccgtgaggaaacaatctgatgctacaaacaaactgaactcgagatcagggaaagagactccattcaatgacagaatgtccaatctacttgatgatggttctgctaggaagcaagcaagatctgaagaagagaagagaactctagggaagatagaacaccatgtgaaaaaggctaatataccagataacctcccagtgaagaaagaacctgaagcttccagcaaagtcatgtcgcattctggaaaagatagaaagattggcagatacaacaggaggagacatgacaacaggagcagcaaggggacacctgatcacacagagagcctcccccctgaaaagcaagtggaagttgcatatgaggaaacaagagttattcctagcaaaaagattgctcataatgaaaaaaagagcgcgcagtacaactacgagcaaactgcagcagggatgccaaacatgaggtctagaggaggggattctgacatgagtatctcacccccagtcagttgcaatgctcgaagcaaacccatgagctattccctgacgagaccaattgaacacttggatacgaatgctcaccttttggcagaagaacctagtgactctgtgctcaatagggttccaaatcatgacagttatttggcaatcaaagaggaatactgtgatggatttaagaggaaaaatgatcctatcttcagtcacattgatgatagctcaaggatgaggggctccagcatcgaagaagtgaccaagccgtatattactgctccaaacagtgatccgtggtctaaaggagatggcagcttttacaggcatccgagctcagaagatttaaacgctaatgctgatgtgcttatgccaggatacagtgcaagatatggacaaattggtggtgacagtaacccacaagctagtatggtcccactagcaacagattcaagactgcatggtggaacggttgctgataattacctctcggcaagatactcccttggatcttcaggtgctcgcgttagccaaccagctccaactgttcccccttttgggctctcaggtgcaagttcacaacgaggctcagtaatggacaggtattcgtatgggctttcgggtccgactggaacacagcgctcagttattgacaggtatgcgccgtccctcgatggaacgaacacaacaagatcgaggagctccttgcctgagcagtacccgttcggacaacctggctcttccggtggcgggtggcctcatcactgatcgctggaacttggtcctcagatttgaccagcaaaagtgcaaccgatttcttgagtccggtggagcctacaacctatctacggcctaactttttggatcctactagtcgtttcttcctggcgccttcgacgaagacatcacctgtgtctaccaatacagaagtgtagacttcaattcctacaaatacagaagtgtaggcttcaatcctattgtttgctctggatttctgtttatgagcgtatttacaagagtatgtttggtctatgttagtatattaggaatacaattccaaaaccgttgtaccgtgccaaagtttaatactatacgtttgggtctgtcgatgagaaaaaaggacgagtgggtgagaagatgctgccctccgcagaactcgatcaggccggttcctctgcgcgtcctgctatgagaggctaacctgagcccgacagaaccggcttggtcgatttgggacctggtaggccggtatttttttattgaagtgtaactttctaaattaggtcttgttggtttgcgttggattgcgtccggaatcgtttcaagtttatataaattagagaagcaatccggttag

SEQ ID NO: 65446 - DNA, 3782 bp, Zea Mays
gcaaaaggcctcacacatctggctgcacccttgctgtgatggcccatgtatgcgctctttccatgcaaaagaaggaagtggtgaagactcctgttgtgttacccttggatacactgaggcagaagttgaggcaatgaaattatttctttgcaagaattgtgagtataagcaacaccagtgtttcatctgcggagtgttggaaccttcagatggagaagcagccaaggtgtttttatgtaacaatgctacatgtgggcacttttaccacccgaaatgtgttgcccaacaacttcaccccatcaacattgatgaagcctcagaattggagaagaagataacagaagggttttcatttacatgcccaattcactggtgctttcattgcaaaggtttggaggatagaacacaagaacctttgcaatttgctgtttgcagacgctgtccaaagtcatatcacagaaagtgtttaccaagcgaaatttcctttgacgaaaatgaagaggacgatatcatcatacgggcttgggaattatcaaaaagaattttgatatactgcctggaccatgagattgatagtgaacttgagacacctgtcagagatcatatcaagtttccaaagattgaaaaaccacttcaatttgtaaagaagggatctagcttgttgcctaagaagaaaaagaggacttacagtgagacagttcttgagcaatctcccaaagatactgtgaaaaggaaaagcaaggttcacatgctagaaagggaacaaaacaaacaagacaccagagaagtttctgcaaagagtttcactcaaaaccttgttgacacacctgtaaagaaaaaagccaagttgaaagagaaaatacagttgccgtatgtggccaaggatcattttataagcagtccaaaatctgtgaaagagcaagaacaagagttggtacctttgcccttatctgccatcaggaagagttcatttcctaaagtggacagtgaaactgaaaagagggtgattaccatattgggaaataaagtgtcttcattgacaataaaagatgtaacgaggaattgcagtttgccatcaactcatgtatactctggcagattgactgacaagataccactgggaaagattgaacgttctgttcaggctgtagaagcagctttaaaaaagctggaaaatggaggtagtgtcaatgatgctaaagcagtatgtgaacctgaagttttaaggcagcttgcaaggtggcatagtaaactcagagtgtatatatcaccttttattcatggcacaaggtacagttcctttggtagacattttacaaaggtggagaaacttgttgagattgttgatagacttcactggtatgtggaaactggtgacatgatagtagatttctgctgtggggcaaatgattttagccgtcttatgaaagaaaaactcgacaaagttcagaagaagtgccatttcaagaattatgatcttatccaaccacagaatcgcttctgctttgaaaagagggattggatgactgtgcagccaaacgagctgcctcatggatcccaactaattatgggtcttaatcctccttttggagtcaaagcaagtcttgcgaacaaatttattgacaaagcattgacattcaagcctaagctcattgtactaattgtccctaaagaaactaaaaggttagatcagaggagaacaccttatgatttgatttgggaggacagtgagtgtctttctggcaagtccttctatttgcctggttctgtggatcttaatgataaaatagttgaagggtggaatgcatctgcgccacccctctatttgtggagtcatcctggttggacaaagaagcacatgcaagtggctgaagagcatggtcatacttgtatggggaagatagcttgccatgttgaagagagtaatctatcagatgacctgtccgtgaggaaacaatctgatgctacaaacaaactgaactcgagatcagggaaagagactccattcaatgacagaatgtccaatctacttgatgatggttctgctaggaagcaagcaagatctgaagaagagaagagaactctagggaagatagaacaccatgtgaaaaaggctaatataccagataacctcccagtgaagaaagaacctgaagcttccagcaaagtcatgtcgcattctggaaaagatagaaagattggcagatacaacaggaggagacatgacaacaggagcagcaaggggacacctgatcacacagagagcctcccccctgaaaagcaagtggaagttgcatatgaggaaacaagagttattcctagcaaaaagattgctcataatgaaaaaaagagcgcgcagtacaactacgagcaaactgcagcagggatgccaaacatgaggtctagaggaggggattctgacatgagtatctcacccccagtcagttgcaatgctcgaagcaaacccatgagctattccctgacgagaccaattgaacacttggatacgaatgctcaccttttggcagaagaacctagtgactctgtgctcaatagggttccaaatcatgacagttatttggcaatcaaagaggaatactgtgatggatttaagaggaaaaatgatcctatcttcagtcacattgatgatagctcaaggatgaggggctccagcatcgaagaagtgaccaagccgtatattactgctccaaacagtgatccgtggtctaaaggagatggcagcttttacaggcatccgagctcagaagatttaaacgctaatgctgatgtgcttatgccaggatacagtgcaagatatggacaaattggtggtgacagtaacccacaagctagtatggtcccactagcaacagattcaagactgcatggtggaacggttgctgataattacctctcggcaagatactcccttggatcttcaggtgctcgcgttagccaaccagctccaactgttcccccttttgggctctcaggtgcaagttcacaacgaggctcagtaatggacaggtattcgtatgggctttcgggtccgactggaacacagcgctcagttattgacaggtatgcgccgtccctcgatggaacgaacacaacaagatcgaggagctccttgcctgagcagtacccgttcggacaacctggctcttccggtggcgggtggcctcatcactgatcgctggaacttggtcctcagatttgaccagcaaaagtgcaaccgatttcttgagtccggtggagcctacaacctatctacggcctaactttttggatcctactagtcgtttcttcctggcgccttcgacgaagacatcacctgtgtctaccaatacagaagtgtagacttcaattcctacaaatacagaagtgtaggcttcaatcctattgtttgctctggatttctgtttatgagcgtatttacaagagtatgtttggtctatgttagtatattaggaatacaattccaaaaccgttgtaccgtgccaaagtttaatactatacgtttgggtctgtcgatgagaaaaaaggacgagtgggtgagaagatgctgccctccgcagaactcgatcaggccggttcctctgcgcgtcctgctatgagaggctaacctgagcccgacagaaccggcttggtcgatttgggacctggtaggccggtatttttttattgaagtgtaactttctaaattaggtcttgttggtttgcgttggattgcgtccggaatcgtttcaagtttatataaattagagaagcaatccggttag

SEQ ID NO: 65447 - DNA, 3729 bp, Zea Mays
cacacatctggctgcacccttgctgtgatggcccatgtatgcgctctttccatgcaaaagaaggaagtggtgaagactcctgttgtgttacccttggatacactgaggcagaagttgaggcaatgaaattatttctttgcaagaattgtgagtataagcaacaccagtgtttcatctgcggagtgttggaaccttcagatggagaagcagccaaggtgtttttatgtaacaatgctacatgtgggcacttttaccacccgaaatgtgttgcccaacaacttcaccccatcaacattgatgaagcctcagaattggagaagaagataacagaagggttttcatttacatgcccaattcactggtgctttcattgcaaaggtttggaggatagaacacaagaacctttgcaatttgctgtttgcagacgctgtccaaagtcatatcacagaaagtgtttaccaagcgaaatttcctttgacgaaaatgaagaggacgatatcatcatacgggcttgggaattatcaaaaagaattttgatatactgcctggaccatgagattgatagtgaacttgagacacctgtcagagatcatatcaagtttccaaagattgaaaaaccacttcaatttgtaaagaagggatctagcttgttgcctaagaagaaaaagaggacttacagtgagacagttcttgagcaatctcccaaagatactgtgaaaaggaaaagcaaggttcacatgctagaaagggaacaaaacaaacaagacaccagagaagtttctgcaaagagtttcactcaaaaccttgttgacacacctgtaaagaaaaaagccaagttgaaagagaaaatacagttgccgtatgtggccaaggatcattttataagcagtccaaaatctgtgaaagagcaagaacaagagttggtacctttgcccttatctgccatcaggaagagttcatttcctaaagtggacagtgaaactgaaaagagggtgattaccatattgggaaataaagtgtcttcattgacaataaaagatgtaacgaggaattgcagtttgccatcaactcatgtatactctggcagattgactgacaagataccactgggaaagattgaacgttctgttcaggctgtagaagcagctttaaaaaagctggaaaatggaggtagtgtcaatgatgctaaagcagtatgtgaacctgaagttttaaggcagcttgcaaggtggcatagtaaactcagagtgtatatatcaccttttattcatggcacaaggtacagttcctttggtagacattttacaaaggtggagaaacttgttgagatagtagatttctgctgtggggcaaatgattttagccgtcttatgaaagaaaaactcgacaaagttcagaagaagtgccatttcaagaattatgatcttatccaaccacagaatcgcttctgctttgaaaagagggattggatgactgtgcagccaaacgagctgcctcatggatcccaactaattatgggtcttaatcctccttttggagtcaaagcaagtcttgcgaacaaatttattgacaaagcattgacattcaagcctaagctcattgtactaattgtccctaaagaaactaaaaggttagatcagaggagaacaccttatgatttgatttgggaggacagtgagtgtctttctggcaagtccttctatttgcctggttctgtggatcttaatgataaaatagttgaagggtggaatgcatctgcgccacccctctatttgtggagtcatcctggttggacaaagaagcacatgcaagtggctgaagagcatggtcatacttgtatggggaagatagcttgccatgttgaagagagtaatctatcagatgacctgtccgtgaggaaacaatctgatgctacaaacaaactgaactcgagatcagggaaagagactccattcaatgacagaatgtccaatctacttgatgatggttctgctaggaagcaagcaagatctgaagaagagaagagaactctagggaagatagaacaccatgtgaaaaaggctaatataccagataacctcccagtgaagaaagaacctgaagcttccagcaaagtcatgtcgcattctggaaaagatagaaagattggcagatacaacaggaggagacatgacaacaggagcagcaaggggacacctgatcacacagagagcctcccccctgaaaagcaagtggaagttgcatatgaggaaacaagagttattcctagcaaaaagattgctcataatgaaaaaaagagcgcgcagtacaactacgagcaaactgcagcagggatgccaaacatgaggtctagaggaggggattctgacatgagtatctcacccccagtcagttgcaatgctcgaagcaaacccatgagctattccctgacgagaccaattgaacacttggatacgaatgctcaccttttggcagaagaacctagtgactctgtgctcaatagggttccaaatcatgacagttatttggcaatcaaagaggaatactgtgatggatttaagaggaaaaatgatcctatcttcagtcacattgatgatagctcaaggatgaggggctccagcatcgaagaagtgaccaagccgtatattactgctccaaacagtgatccgtggtctaaaggagatggcagcttttacaggcatccgagctcagaagatttaaacgctaatgctgatgtgcttatgccaggatacagtgcaagatatggacaaattggtggtgacagtaacccacaagctagtatggtcccactagcaacagattcaagactgcatggtggaacggttgctgataattacctctcggcaagatactcccttggatcttcaggtgctcgcgttagccaaccagctccaactgttcccccttttgggctctcaggtgcaagttcacaacgaggctcagtaatggacaggtattcgtatgggctttcgggtccgactggaacacagcgctcagttattgacaggtatgcgccgtccctcgatggaacgaacacaacaagatcgaggagctccttgcctgagcagtacccgttcggacaacctggctcttccggtggcgggtggcctcatcactgatcgctggaacttggtcctcagatttgaccagcaaaagtgcaaccgatttcttgagtccggtggagcctacaacctatctacggcctaactttttggatcctactagtcgtttcttcctggcgccttcgacgaagacatcacctgtgtctaccaatacagaagtgtagacttcaattcctacaaatacagaagtgtaggcttcaatcctattgtttgctctggatttctgtttatgagcgtatttacaagagtatgtttggtctatgttagtatattaggaatacaattccaaaaccgttgtaccgtgccaaagtttaatactatacgtttgggtctgtcgatgagaaaaaaggacgagtgggtgagaagatgctgccctccgcagaactcgatcaggccggttcctctgcgcgtcctgctatgagaggctaacctgagcccgacagaaccggcttggtcgatttgggacctggtaggccggtatttttttattgaagtgtaactttctaaattaggtcttgttggtttgcgttggattgcgtccggaatcgtttcaagtttatataaattagagaagcaatccggttag

SEQ ID NO: 65448 - DNA, 4054 bp, Zea Mays
cgtagttctcctgcgcgttcgagaaaaaaaatacatgtttatcccttgtaaatattttgaaaaaaatacgaaatttctggagtgaagttgttatagactatagtttctttcattgttaacacataatggaaaccaccttgcataatctggtttattgtgcagtataattaccaattttcttatttctcttttttttcatgctgagcttcttatgtttattaattttctagccatcgaaatgtcatgtcaatatctaattttctccagtatatacttgttctatctgtcgatgtggtcatattcttctgtgatggcccatgtatgcgctctttccatgcaaaagaaggaagtggtgaagactcctgttgtgttacccttggatacactgaggcagaagttgaggcaatgaaattatttctttgcaagaattgtgagtataagcaacaccagtgtttcatctgcggagtgttggaaccttcagatggagaagcagccaaggtgtttttatgtaacaatgctacatgtgggcacttttaccacccgaaatgtgttgcccaacaacttcaccccatcaacattgatgaagcctcagaattggagaagaagataacagaagggttttcatttacatgcccaattcactggtgctttcattgcaaaggtttggaggatagaacacaagaacctttgcaatttgctgtttgcagacgctgtccaaagtcatatcacagaaagtgtttaccaagcgaaatttcctttgacgaaaatgaagaggacgatatcatcatacgggcttgggaattatcaaaaagaattttgatatactgcctggaccatgagattgatagtgaacttgagacacctgtcagagatcatatcaagtttccaaagattgaaaaaccacttcaatttgtaaagaagggatctagcttgttgcctaagaagaaaaagaggacttacagtgagacagttcttgagcaatctcccaaagatactgtgaaaaggaaaagcaaggttcacatgctagaaagggaacaaaacaaacaagacaccagagaagtttctgcaaagagtttcactcaaaaccttgttgacacacctgtaaagaaaaaagccaagttgaaagagaaaatacagttgccgtatgtggccaaggatcattttataagcagtccaaaatctgtgaaagagcaagaacaagagttggtacctttgcccttatctgccatcaggaagagttcatttcctaaagtggacagtgaaactgaaaagagggtgattaccatattgggaaataaagtgtcttcattgacaataaaagatgtaacgaggaattgcagtttgccatcaactcatgtatactctggcagattgactgacaagataccactgggaaagattgaacgttctgttcaggctgtagaagcagctttaaaaaagctggaaaatggaggtagtgtcaatgatgctaaagcagtatgtgaacctgaagttttaaggcagcttgcaaggtggcatagtaaactcagagtgtatatatcaccttttattcatggcacaaggtacagttcctttggtagacattttacaaaggtggagaaacttgttgagattgttgatagacttcactggtatgtggaaactggtgacatgatagtagatttctgctgtggggcaaatgattttagccgtcttatgaaagaaaaactcgacaaagttcagaagaagtgccatttcaagaattatgatcttatccaaccacagaatcgcttctgctttgaaaagagggattggatgactgtgcagccaaacgagctgcctcatggatcccaactaattatgggtcttaatcctccttttggagtcaaagcaagtcttgcgaacaaatttattgacaaagcattgacattcaagcctaagctcattgtactaattgtccctaaagaaactaaaaggttagatcagaggagaacaccttatgatttgatttgggaggacagtgagtgtctttctggcaagtccttctatttgcctggttctgtggatcttaatgataaaatagttgaagggtggaatgcatctgcgccacccctctatttgtggagtcatcctggttggacaaagaagcacatgcaagtggctgaagagcatggtcatacttgtatggggaagatagcttgccatgttgaagagagtaatctatcagatgacctgtccgtgaggaaacaatctgatgctacaaacaaactgaactcgagatcagggaaagagactccattcaatgacagaatgtccaatctacttgatgatggttctgctaggaagcaagcaagatctgaagaagagaagagaactctagggaagatagaacaccatgtgaaaaaggctaatataccagataacctcccagtgaagaaagaacctgaagcttccagcaaagtcatgtcgcattctggaaaagatagaaagattggcagatacaacaggaggagacatgacaacaggagcagcaaggggacacctgatcacacagagagcctcccccctgaaaagcaagtggaagttgcatatgaggaaacaagagttattcctagcaaaaagattgctcataatgaaaaaaagagcgcgcagtacaactacgagcaaactgcagcagggatgccaaacatgaggtctagaggaggggattctgacatgagtatctcacccccagtcagttgcaatgctcgaagcaaacccatgagctattccctgacgagaccaattgaacacttggatacgaatgctcaccttttggcagaagaacctagtgactctgtgctcaatagggttccaaatcatgacagttatttggcaatcaaagaggaatactgtgatggatttaagaggaaaaatgatcctatcttcagtcacattgatgatagctcaaggatgaggggctccagcatcgaagaagtgaccaagccgtatattactgctccaaacagtgatccgtggtctaaaggagatggcagcttttacaggcatccgagctcagaagatttaaacgctaatgctgatgtgcttatgccaggatacagtgcaagatatggacaaattggtggtgacagtaacccacaagctagtatggtcccactagcaacagattcaagactgcatggtggaacggttgctgataattacctctcggcaagatactcccttggatcttcaggtgctcgcgttagccaaccagctccaactgttcccccttttgggctctcaggtgcaagttcacaacgaggctcagtaatggacaggtattcgtatgggctttcgggtccgactggaacacagcgctcagttattgacaggtatgcgccgtccctcgatggaacgaacacaacaagatcgaggagctccttgcctgagcagtacccgttcggacaacctggctcttccggtggcgggtggcctcatcactgatcgctggaacttggtcctcagatttgaccagcaaaagtgcaaccgatttcttgagtccggtggagcctacaacctatctacggcctaactttttggatcctactagtcgtttcttcctggcgccttcgacgaagacatcacctgtgtctaccaatacagaagtgtagacttcaattcctacaaatacagaagtgtaggcttcaatcctattgtttgctctggatttctgtttatgagcgtatttacaagagtatgtttggtctatgttagtatattaggaatacaattccaaaaccgttgtaccgtgccaaagtttaatactatacgtttgggtctgtcgatgagaaaaaaggacgagtgggtgagaagatgctgccctccgcagaactcgatcaggccggttcctctgcgcgtcctgctatgagaggctaacctgagcccgacagaaccggcttggtcgatttgggacctggtaggccggtatttttttattgaagtgtaactttctaaattaggtcttgttggtttgcgttggattgcgtccggaatcgtttcaagtttatataaattagagaagcaatccggttag

SEQ ID NO: 65449 - DNA, 1574 bp, Zea Mays
catgtcaatatctaattttctccagtatatacttgttctatctgtcgatgtggtcatattcttctgtgatggcccatgtatgcgctctttccatgcaaaagaaggaagtggtgaagactcctgttgtgttacccttggatacactgaggcagaagttgaggcaatgaaattatttctttgcaagaattgtgagtataagcaacaccagtgtttcatctgcggagtgttggaaccttcagatggagaagcagccaaggtgtttttatgtaacaatgctacatgtgggcacttttaccacccgaaatgtgttgcccaacaacttcaccccatcaacattgatgaagcctcagaattggagaagaagataacagaagggttttcatttacatgcccaattcactggtgctttcattgcaaaggtttggaggatagaacacaagaacctttgcaatttgctgtttgcagacgctgtccaaagtcatatcacagaaagtgtttaccaagcgaaatttcctttgacgaaaatgaagaggacgatatcatcatacgggcttgggaattatcaaaaagaattttgatatactgcctggaccatgagattgatagtgaacttgagacacctgtcagagatcatatcaagtttccaaagattgaaaaaccacttcaatttgtaaagaagggatctagcttgttgcctaagaagaaaaagaggacttacagtgagacagttcttgagcaatctcccaaagatactgtgaaaaggaaaagcaaggttcacatgctagaaagggaacaaaacaaacaagacaccagagaagtttctgcaaagagtttcactcaaaaccttgttgacacacctgtaaagaaaaaagccaagttgaaagagaaaatacagttgccgtatgtggccaaggatcattttataagcagtccaaaatctgtgaaagagcaagaacaagagttggtacctttgcccttatctgccatcaggaagagttcatttcctaaagtggacagtgaaactgaaaagagggtgattaccatattgggaaataaagtgtcttcattgacaataaaagatgtaacgaggaattgcagtttgccatcaactcatgtatactctggcagattgactgacaagataccactgggaaagattgaacgttctgttcaggctgtagaagcagctttaaaaaagctggaaaatggaggtagtgtcaatgatgctaaagcagtatgtgaacctgaagttttaaggcagcttgcaaggtggcatagtaaactcagagtgtatatatcaccttttattcatggcacaaggtacagttcctttggtagacattttacaaaggtggagaaacttgttgagatagtagatttctgctgtggggcaaatgattttagccgtcttatgaaagaaaaactcgacaaagttcagaagaagtgccatttcaagaattatgatcttatccaaccacagaatcgcttctgctttgaaaagagggattggatgactgtgcagccaaacgagctgcctcatggatcccaactagtttccttttgggaaattgtgt

SEQ ID NO: 65450 - DNA, 4075 bp, Zea Mays
catgtcaatatctaattttctccagtatatacttgttctatctgtcgatgtggtcatattcttctgtgatggcccatgtatgcgctctttccatgcaaaagaaggaagtggtgaagactcctgttgtgttacccttggatacactgaggcagaagttgaggcaatgaaattatttctttgcaagaattgtgagtataagcaacaccagtgtttcatctgcggagtgttggaaccttcagatggagaagcagccaaggtgtttttatgtaacaatgctacatgtgggcacttttaccacccgaaatgtgttgcccaacaacttcaccccatcaacattgatgaagcctcagaattggagaagaagataacagaagggttttcatttacatgcccaattcactggtgctttcattgcaaaggtttggaggatagaacacaagaacctttgcaatttgctgtttgcagacgctgtccaaagtcatatcacagaaagtgtttaccaagcgaaatttcctttgacgaaaatgaagaggacgatatcatcatacgggcttgggaattatcaaaaagaattttgatatactgcctggaccatgagattgatagtgaacttgagacacctgtcagagatcatatcaagtttccaaagattgaaaaaccacttcaatttgtaaagaagggatctagcttgttgcctaagaagaaaaagaggacttacagtgagacagttcttgagcaatctcccaaagatactgtgaaaaggaaaagcaaggttcacatgctagaaagggaacaaaacaaacaagacaccagagaagtttctgcaaagagtttcactcaaaaccttgttgacacacctgtaaagaaaaaagccaagttgaaagagaaaatacagttgccgtatgtggccaaggatcattttataagcagtccaaaatctgtgaaagagcaagaacaagagttggtacctttgcccttatctgccatcaggaagagttcatttcctaaagtggacagtgaaactgaaaagaggtgagtcacttgtgtataaagtacttggggaatgaaatctccagatcatatggtatgtaactttatgtgcaaaaattgctagcattcatgaatttcctacaaccagacctgatgaggcattgaaattttgtttgtttgtcaggtctgatgaggcattggattttttttgtttatcatgttgcagaatcctctcctatactcatgttttaatcttaatgccatgtatccacattctgtatgataatgtaaacgatgtttgaagtccgcatactgttatatgactatatgagatcttctatttgcagggtgattaccatattgggaaataaagtgtcttcattgacaataaaagatgtaacgaggaattgcagtttgccatcaactcatgtatactctggcagattgactgacaagataccactgggaaagattgaacgttctgttcaggctgtagaagcagctttaaaaaagctggaaaatggaggtagtgtcaatgatgctaaagcagtatgtgaacctgaagttttaaggcagcttgcaaggtggcatagtaaactcagagtgtatatatcaccttttattcatggcacaaggtacagttcctttggtagacattttacaaaggtggagaaacttgttgagatagtagatttctgctgtggggcaaatgattttagccgtcttatgaaagaaaaactcgacaaagttcagaagaagtgccatttcaagaattatgatcttatccaaccacagaatcgcttctgctttgaaaagagggattggatgactgtgcagccaaacgagctgcctcatggatcccaactaattatgggtcttaatcctccttttggagtcaaagcaagtcttgcgaacaaatttattgacaaagcattgacattcaagcctaagctcattgtactaattgtccctaaagaaactaaaaggttagatcagaggagaacaccttatgatttgatttgggaggacagtgagtgtctttctggcaagtccttctatttgcctggttctgtggatcttaatgataaaatagttgaagggtggaatgcatctgcgccacccctctatttgtggagtcatcctggttggacaaagaagcacatgcaagtggctgaagagcatggtcatacttgtatggggaagatagcttgccatgttgaagagagtaatctatcagatgacctgtccgtgaggaaacaatctgatgctacaaacaaactgaactcgagatcagggaaagagactccattcaatgacagaatgtccaatctacttgatgatggttctgctaggaagcaagcaagatctgaagaagagaagagaactctagggaagatagaacaccatgtgaaaaaggctaatataccagataacctcccagtgaagaaagaacctgaagcttccagcaaagtcatgtcgcattctggaaaagatagaaagattggcagatacaacaggaggagacatgacaacaggagcagcaaggggacacctgatcacacagagagcctcccccctgaaaagcaagtggaagttgcatatgaggaaacaagagttattcctagcaaaaagattgctcataatgaaaaaaagagcgcgcagtacaactacgagcaaactgcagcagggatgccaaacatgaggtctagaggaggggattctgacatgagtatctcacccccagtcagttgcaatgctcgaagcaaacccatgagctattccctgacgagaccaattgaacacttggatacgaatgctcaccttttggcagaagaacctagtgactctgtgctcaatagggttccaaatcatgacagttatttggcaatcaaagaggaatactgtgatggatttaagaggaaaaatgatcctatcttcagtcacattgatgatagctcaaggatgaggggctccagcatcgaagaagtgaccaagccgtatattactgctccaaacagtgatccgtggtctaaaggagatggcagcttttacaggcatccgagctcagaagatttaaacgctaatgctgatgtgcttatgccaggatacagtgcaagatatggacaaattggtggtgacagtaacccacaagctagtatggtcccactagcaacagattcaagactgcatggtggaacggttgctgataattacctctcggcaagatactcccttggatcttcaggtgctcgcgttagccaaccagctccaactgttcccccttttgggctctcaggtgcaagttcacaacgaggctcagtaatggacaggtattcgtatgggctttcgggtccgactggaacacagcgctcagttattgacaggtatgcgccgtccctcgatggaacgaacacaacaagatcgaggagctccttgcctgagcagtacccgttcggacaacctggctcttccggtggcgggtggcctcatcactgatcgctggaacttggtcctcagatttgaccagcaaaagtgcaaccgatttcttgagtccggtggagcctacaacctatctacggcctaactttttggatcctactagtcgtttcttcctggcgccttcgacgaagacatcacctgtgtctaccaatacagaagtgtagacttcaattcctacaaatacagaagtgtaggcttcaatcctattgtttgctctggatttctgtttatgagcgtatttacaagagtatgtttggtctatgttagtatattaggaatacaattccaaaaccgttgtaccgtgccaaagtttaatactatacgtttgggtctgtcgatgagaaaaaaggacgagtgggtgagaagatgctgccctccgcagaactcgatcaggccggttcctctgcgcgtcctgctatgagaggctaacctgagcccgacagaaccggcttggtcgatttgggacctggtaggccggtatttttttattgaagtgtaactttctaaattaggtcttgttggtttgcgttggattgcgtccggaatcgtttcaagtttatataaattagagaagcaatccggttag

SEQ ID NO: 65451 - DNA, 3701 bp, Zea Mays
catgtcaatatctaattttctccagtatatacttgttctatctgtcgatgtggtcatattcttctgtgatggcccatgtatgcgctctttccatgcaaaagaaggaagtggtgaagactcctgttgtgttacccttggatacactgaggcagaagttgaggcaatgaaattatttctttgcaagaattgtgagtataagcaacaccagtgtttcatctgcggagtgttggaaccttcagatggagaagcagccaaggtgtttttatgtaacaatgctacatgtgggcacttttaccacccgaaatgtgttgcccaacaacttcaccccatcaacattgatgaagcctcagaattggagaagaagataacagaagggttttcatttacatgcccaattcactggtgctttcattgcaaaggtttggaggatagaacacaagaacctttgcaatttgctgtttgcagacgctgtccaaagtcatatcacagaaagtgtttaccaagcgaaatttcctttgacgaaaatgaagaggacgatatcatcatacgggcttgggaattatcaaaaagaattttgatatactgcctggaccatgagattgatagtgaacttgagacacctgtcagagatcatatcaagtttccaaagattgaaaaaccacttcaatttgtaaagaagggatctagcttgttgcctaagaagaaaaagaggacttacagtgagacagttcttgagcaatctcccaaagatactgtgaaaaggaaaagcaaggttcacatgctagaaagggaacaaaacaaacaagacaccagagaagtttctgcaaagagtttcactcaaaaccttgttgacacacctgtaaagaaaaaagccaagttgaaagagaaaatacagttgccgtatgtggccaaggatcattttataagcagtccaaaatctgtgaaagagcaagaacaagagttggtacctttgcccttatctgccatcaggaagagttcatttcctaaagtggacagtgaaactgaaaagagggtgattaccatattgggaaataaagtgtcttcattgacaataaaagatgtaacgaggaattgcagtttgccatcaactcatgtatactctggcagattgactgacaagataccactgggaaagattgaacgttctgttcaggctgtagaagcagctttaaaaaagctggaaaatggaggtagtgtcaatgatgctaaagcagtatgtgaacctgaagttttaaggcagcttgcaaggtggcatagtaaactcagagtgtatatatcaccttttattcatggcacaaggtacagttcctttggtagacattttacaaaggtggagaaacttgttgagattgttgatagacttcactggtatgtggaaactggtgacatgaatcgcttctgctttgaaaagagggattggatgactgtgcagccaaacgagctgcctcatggatcccaactaattatgggtcttaatcctccttttggagtcaaagcaagtcttgcgaacaaatttattgacaaagcattgacattcaagcctaagctcattgtactaattgtccctaaagaaactaaaaggttagatcagaggagaacaccttatgatttgatttgggaggacagtgagtgtctttctggcaagtccttctatttgcctggttctgtggatcttaatgataaaatagttgaagggtggaatgcatctgcgccacccctctatttgtggagtcatcctggttggacaaagaagcacatgcaagtggctgaagagcatggtcatacttgtatggggaagatagcttgccatgttgaagagagtaatctatcagatgacctgtccgtgaggaaacaatctgatgctacaaacaaactgaactcgagatcagggaaagagactccattcaatgacagaatgtccaatctacttgatgatggttctgctaggaagcaagcaagatctgaagaagagaagagaactctagggaagatagaacaccatgtgaaaaaggctaatataccagataacctcccagtgaagaaagaacctgaagcttccagcaaagtcatgtcgcattctggaaaagatagaaagattggcagatacaacaggaggagacatgacaacaggagcagcaaggggacacctgatcacacagagagcctcccccctgaaaagcaagtggaagttgcatatgaggaaacaagagttattcctagcaaaaagattgctcataatgaaaaaaagagcgcgcagtacaactacgagcaaactgcagcagggatgccaaacatgaggtctagaggaggggattctgacatgagtatctcacccccagtcagttgcaatgctcgaagcaaacccatgagctattccctgacgagaccaattgaacacttggatacgaatgctcaccttttggcagaagaacctagtgactctgtgctcaatagggttccaaatcatgacagttatttggcaatcaaagaggaatactgtgatggatttaagaggaaaaatgatcctatcttcagtcacattgatgatagctcaaggatgaggggctccagcatcgaagaagtgaccaagccgtatattactgctccaaacagtgatccgtggtctaaaggagatggcagcttttacaggcatccgagctcagaagatttaaacgctaatgctgatgtgcttatgccaggatacagtgcaagatatggacaaattggtggtgacagtaacccacaagctagtatggtcccactagcaacagattcaagactgcatggtggaacggttgctgataattacctctcggcaagatactcccttggatcttcaggtgctcgcgttagccaaccagctccaactgttcccccttttgggctctcaggtgcaagttcacaacgaggctcagtaatggacaggtattcgtatgggctttcgggtccgactggaacacagcgctcagttattgacaggtatgcgccgtccctcgatggaacgaacacaacaagatcgaggagctccttgcctgagcagtacccgttcggacaacctggctcttccggtggcgggtggcctcatcactgatcgctggaacttggtcctcagatttgaccagcaaaagtgcaaccgatttcttgagtccggtggagcctacaacctatctacggcctaactttttggatcctactagtcgtttcttcctggcgccttcgacgaagacatcacctgtgtctaccaatacagaagtgtagacttcaattcctacaaatacagaagtgtaggcttcaatcctattgtttgctctggatttctgtttatgagcgtatttacaagagtatgtttggtctatgttagtatattaggaatacaattccaaaaccgttgtaccgtgccaaagtttaatactatacgtttgggtctgtcgatgagaaaaaaggacgagtgggtgagaagatgctgccctccgcagaactcgatcaggccggttcctctgcgcgtcctgctatgagaggctaacctgagcccgacagaaccggcttggtcgatttgggacctggtaggccggtatttttttattgaagtgtaactttctaaattaggtcttgttggtttgcgttggattgcgtccggaatcgtttcaagtttatataaattagagaagcaatccggttag

SEQ ID NO: 65452 - DNA, 3719 bp, Zea Mays
catgtcaatatctaattttctccagtatatacttgttctatctgtcgatgtggtcatattcttctgtgatggcccatgtatgcgctctttccatgcaaaagaaggaagtggtgaagactcctgttgtgttacccttggatacactgaggcagaagttgaggcaatgaaattatttctttgcaagaattgtgagtataagcaacaccagtgtttcatctgcggagtgttggaaccttcagatggagaagcagccaaggtgtttttatgtaacaatgctacatgtgggcacttttaccacccgaaatgtgttgcccaacaacttcaccccatcaacattgatgaagcctcagaattggagaagaagataacagaagggttttcatttacatgcccaattcactggtgctttcattgcaaaggtttggaggatagaacacaagaacctttgcaatttgctgtttgcagacgctgtccaaagtcatatcacagaaagtgtttaccaagcgaaatttcctttgacgaaaatgaagaggacgatatcatcatacgggcttgggaattatcaaaaagaattttgatatactgcctggaccatgagattgatagtgaacttgagacacctgtcagagatcatatcaagtttccaaagattgaaaaaccacttcaatttgtaaagaagggatctagcttgttgcctaagaagaaaaagaggacttacagtgagacagttcttgagcaatctcccaaagatactgtgaaaaggaaaagcaaggttcacatgctagaaagggaacaaaacaaacaagacaccagagaagtttctgcaaagagtttcactcaaaaccttgttgacacacctgtaaagaaaaaagccaagttgaaagagaaaatacagttgccgtatgtggccaaggatcattttataagcagtccaaaatctgtgaaagagcaagaacaagagttggtacctttgcccttatctgccatcaggaagagttcatttcctaaagtggacagtgaaactgaaaagagggtgattaccatattgggaaataaagtgtcttcattgacaataaaagatgtaacgaggaattgcagtttgccatcaactcatgtatactctggcagattgactgacaagataccactgggaaagattgaacgttctgttcaggctgtagaagcagctttaaaaaagctggaaaatggaggtagtgtcaatgatgctaaagcagtatgtgaacctgaagttttaaggcagcttgcaaggtggcatattgttgatagacttcactggtatgtggaaactggtgacatgatagtagatttctgctgtggggcaaatgattttagccgtcttatgaaagaaaaactcgacaaagttcagaagaagtgccatttcaagaattatgatcttatccaaccacagaatcgcttctgctttgaaaagagggattggatgactgtgcagccaaacgagctgcctcatggatcccaactaattatgggtcttaatcctccttttggagtcaaagcaagtcttgcgaacaaatttattgacaaagcattgacattcaagcctaagctcattgtactaattgtccctaaagaaactaaaaggttagatcagaggagaacaccttatgatttgatttgggaggacagtgagtgtctttctggcaagtccttctatttgcctggttctgtggatcttaatgataaaatagttgaagggtggaatgcatctgcgccacccctctatttgtggagtcatcctggttggacaaagaagcacatgcaagtggctgaagagcatggtcatacttgtatggggaagatagcttgccatgttgaagagagtaatctatcagatgacctgtccgtgaggaaacaatctgatgctacaaacaaactgaactcgagatcagggaaagagactccattcaatgacagaatgtccaatctacttgatgatggttctgctaggaagcaagcaagatctgaagaagagaagagaactctagggaagatagaacaccatgtgaaaaaggctaatataccagataacctcccagtgaagaaagaacctgaagcttccagcaaagtcatgtcgcattctggaaaagatagaaagattggcagatacaacaggaggagacatgacaacaggagcagcaaggggacacctgatcacacagagagcctcccccctgaaaagcaagtggaagttgcatatgaggaaacaagagttattcctagcaaaaagattgctcataatgaaaaaaagagcgcgcagtacaactacgagcaaactgcagcagggatgccaaacatgaggtctagaggaggggattctgacatgagtatctcacccccagtcagttgcaatgctcgaagcaaacccatgagctattccctgacgagaccaattgaacacttggatacgaatgctcaccttttggcagaagaacctagtgactctgtgctcaatagggttccaaatcatgacagttatttggcaatcaaagaggaatactgtgatggatttaagaggaaaaatgatcctatcttcagtcacattgatgatagctcaaggatgaggggctccagcatcgaagaagtgaccaagccgtatattactgctccaaacagtgatccgtggtctaaaggagatggcagcttttacaggcatccgagctcagaagatttaaacgctaatgctgatgtgcttatgccaggatacagtgcaagatatggacaaattggtggtgacagtaacccacaagctagtatggtcccactagcaacagattcaagactgcatggtggaacggttgctgataattacctctcggcaagatactcccttggatcttcaggtgctcgcgttagccaaccagctccaactgttcccccttttgggctctcaggtgcaagttcacaacgaggctcagtaatggacaggtattcgtatgggctttcgggtccgactggaacacagcgctcagttattgacaggtatgcgccgtccctcgatggaacgaacacaacaagatcgaggagctccttgcctgagcagtacccgttcggacaacctggctcttccggtggcgggtggcctcatcactgatcgctggaacttggtcctcagatttgaccagcaaaagtgcaaccgatttcttgagtccggtggagcctacaacctatctacggcctaactttttggatcctactagtcgtttcttcctggcgccttcgacgaagacatcacctgtgtctaccaatacagaagtgtagacttcaattcctacaaatacagaagtgtaggcttcaatcctattgtttgctctggatttctgtttatgagcgtatttacaagagtatgtttggtctatgttagtatattaggaatacaattccaaaaccgttgtaccgtgccaaagtttaatactatacgtttgggtctgtcgatgagaaaaaaggacgagtgggtgagaagatgctgccctccgcagaactcgatcaggccggttcctctgcgcgtcctgctatgagaggctaacctgagcccgacagaaccggcttggtcgatttgggacctggtaggccggtatttttttattgaagtgtaactttctaaattaggtcttgttggtttgcgttggattgcgtccggaatcgtttcaagtttatataaattagagaagcaatccggttag

SEQ ID NO: 65453 - DNA, 774 bp, Zea Mays
tagaaaaatcactggacttctaccaagatccttaattagcatagcagctacccgacctagcatactagtatccatctcaaaaggaatcctgagttcatgcaactagggttcaagcaattactacacttaggtgcacaatacaaacctacaaacaataattgcaataaaatagcatatataacggttatgcataaaaccggtgcttgcctaaaatccaacactagttagtgttcgctagatgacactcgcttggcgagcatcttctatcttggcctttgtttcgtccgtccttcgggttgtccatcgacttcatcttgtggttagcaccacttcacttcgcacgatcaacatctctcggtccttgactcatgcaccacgtacacagacaaggaggaggtcgtgcatggcgctgagcatggcgagactgcaaggaactcggcgtcgctgggctggaaccttggcgcggcaaagggaatgtctgtcgatggaggaaggggtgaggtccggcctgccgatctcctgcgcgagctgggcgccggctatagcagccatggggagaaggaagcgtcatgggaggagaaagggctgctactcctggacttgtgttggcatggggatgaggagaggctgctgctgtgttttggaacagagagaagtggcgtgtgggggaagggaaggagagggggtggatggtgggatattttaaagaggagggctggttgcttaggagctaaggaatggggttccttagataagaagcaagaggtagcttag

SEQ ID NO: 65454 - DNA, 2428 bp, Zea Mays
catcaattgatctttccatcctctaaaatagtagatttctgctgtggggcaaatgattttagccgtcttatgaaagaaaaactcgacaaagttcagaagaagtgccatttcaagaattatgatcttatccaaccacagaatcgcttctgctttgaaaagagggattggatgactgtgcagccaaacgagctgcctcatggatcccaactaattatgggtcttaatcctccttttggagtcaaagcaagtcttgcgaacaaatttattgacaaagcattgacattcaagcctaagctcattgtactaattgtccctaaagaaactaaaaggttagatcagaggagaacaccttatgatttgatttgggaggacagtgagtgtctttctggcaagtccttctatttgcctggttctgtggatcttaatgataaaatagttgaagggtggaatgcatctgcgccacccctctatttgtggagtcatcctggttggacaaagaagcacatgcaagtggctgaagagcatggtcatacttgtatggggaagatagcttgccatgttgaagagagtaatctatcagatgacctgtccgtgaggaaacaatctgatgctacaaacaaactgaactcgagatcagggaaagagactccattcaatgacagaatgtccaatctacttgatgatggttctgctaggaagcaagcaagatctgaagaagagaagagaactctagggaagatagaacaccatgtgaaaaaggctaatataccagataacctcccagtgaagaaagaacctgaagcttccagcaaagtcatgtcgcattctggaaaagatagaaagattggcagatacaacaggaggagacatgacaacaggagcagcaaggggacacctgatcacacagagagcctcccccctgaaaagcaagtggaagttgcatatgaggaaacaagagttattcctagcaaaaagattgctcataatgaaaaaaagagcgcgcagtacaactacgagcaaactgcagcagggatgccaaacatgaggtctagaggaggggattctgacatgagtatctcacccccagtcagttgcaatgctcgaagcaaacccatgagctattccctgacgagaccaattgaacacttggatacgaatgctcaccttttggcagaagaacctagtgactctgtgctcaatagggttccaaatcatgacagttatttggcaatcaaagaggaatactgtgatggatttaagaggaaaaatgatcctatcttcagtcacattgatgatagctcaaggatgaggggctccagcatcgaagaagtgaccaagccgtatattactgctccaaacagtgatccgtggtctaaaggagatggcagcttttacaggcatccgagctcagaagatttaaacgctaatgctgatgtgcttatgccaggatacagtgcaagatatggacaaattggtggtgacagtaacccacaagctagtatggtcccactagcaacagattcaagactgcatggtggaacggttgctgataattacctctcggcaagatactcccttggatcttcaggtgctcgcgttagccaaccagctccaactgttcccccttttgggctctcaggtgcaagttcacaacgaggctcagtaatggacaggtattcgtatgggctttcgggtccgactggaacacagcgctcagttattgacaggtatgcgccgtccctcgatggaacgaacacaacaagatcgaggagctccttgcctgagcagtacccgttcggacaacctggctcttccggtggcgggtggcctcatcactgatcgctggaacttggtcctcagatttgaccagcaaaagtgcaaccgatttcttgagtccggtggagcctacaacctatctacggcctaactttttggatcctactagtcgtttcttcctggcgccttcgacgaagacatcacctgtgtctaccaatacagaagtgtagacttcaattcctacaaatacagaagtgtaggcttcaatcctattgtttgctctggatttctgtttatgagcgtatttacaagagtatgtttggtctatgttagtatattaggaatacaattccaaaaccgttgtaccgtgccaaagtttaatactatacgtttgggtctgtcgatgagaaaaaaggacgagtgggtgagaagatgctgccctccgcagaactcgatcaggccggttcctctgcgcgtcctgctatgagaggctaacctgagcccgacagaaccggcttggtcgatttgggacctggtaggccggtatttttttattgaagtgtaactttctaaattaggtcttgttggtttgcgttggattgcgtccggaatcgtttcaagtttatataaattagagaagcaatccggttag

SEQ ID NO: 65455 - DNA, 684 bp, Zea Mays
ctaactgaactcctgcgagtaatccatgttgtactgggcgattgagcaacacaaggaggagatgacggtgcccttgtgtggaggagggaaaggggactgctccggctggatcgagggggaatcgagagggcgactctgggaatgagaatgttgggcacaggaaactgatctcaagcgtgagccaccaaggaacacaactcctaagccctacccccaagacaaaatcaccaaagaaccctagatccacgagatgagagacatccaaacaagggtcgaggcacgcacataagcaccatggttgttctcctgagcgatcccgacggcaaggcgacgatggcagctcaggtccgtgcggggcaaagagattggaggtgcttcccgccgcctcagcccccacccctgccacgacagtgtcctccccggtctcccacgtcgtcttcaccattgccgcaacctccgttatgagcgcgcgagggaggaacagagcaaggcatgagaaaggtggagaagcttatcggagagatccgagcgatgcatgagggtgacatcgtcggagcagcagcggctcccgagggagagggggagaaggcgaggcgatggagcatgcggagggaagtggatgggagcgcaggtgcgaggcgagccgacgagagagacggcgtgcaggatgccaggaccactcag

SEQ ID NO: 65456 - DNA, 1059 bp, Zea Mays
actgacaggatatcgccacatgattctactggggttaaaattcttatattattatctctgtttcattcagggtctaaatatttttaggtttgcaaacagaataccacttctctttgaacaaggtgctgatgtcatcacaagaactgctgcaaaaaggatctcctacaaaatcaatcaacagcaagataagattggtgtctttgtgagcattgtaagtacaaagatacctttcaaaggaaccggaaaggagtacattggggatgacataactgaaatatcatctgctgttaagtcagccctgaagcagtgctgtcttcaactgaagtctaagattgtgaagaaacttcaggctcgtgagcggcaggacaggaaaaggaacctgaacagatatattcctgatgttgcaagagcggttatggaaactctagtagaaattgcagatcaatctcccccaaaacggccacgttatgataaggaagatgaggaactccttgagaaggtaaattctcaggaggtaacggagatgacatttagagactgcttgactcagcatgttgaacaggtcgactatgaaatggcgctggactacgccatgcagagtggagtaagcgaggagccccgagaagcaatatatttgaactcacttgaaggatcttataagtttgttgacttacagagtccagtcttcgtgttcagatttgttcattgagaagtgaaacttacagttgtacacgtccatcgataccaagttcccatagtacctgggatggaaactgtccatgaattatattgatgttgtacctgaattttatgcttaggctgttgtgactgagctgttcatgtagcataggcattagtacattacaagttgctaagtagcttgagccaaggattcctctgtatgttgcttttagggagaaaataatatttattacatgtaattcaaactgcattgggtccaaaagttcagtactcatgagtcagaacttgagacattagctatataattctgaaggagaaaatataaaagttgatgcggctgcttgccacatgctgtcg

SEQ ID NO: 65457 - DNA, 1064 bp, Zea Mays
actgacaggatatcgccacatgattctactggggttaaaattcttatattattatctctgtttcattcagggtctaaatatttttaggtttgcaaacagaataccacttctctttgaacaaggtgctgatgtcatcacaagaactgctgcaaaaaggatctcttggagcagctacaaaatcaatcaacagcaagataagattggtgtctttgtgagcattgtaagtacaaagatacctttcaaaggaaccggaaaggagtacattggggatgacataactgaaatatcatctgctgttaagccctgaagcagtgctgtcttcaactgaagtctaagattgtgaagaaacttcaggctcgtgagcggcaggacaggaaaaggaacctgaacagatatattcctgatgttgcaagagcggttatggaaactctagtagaaattgcagatcaatctcccccaaaacggccacgttatgataaggaagatgaggaactccttgagaaggtaaattctcaggaggtaacggagatgacatttagagactgcttgactcagcatgttgaacaggtcgactatgaaatggcgctggactacgccatgcagagtggagtaagcgaggagccccgagaagcaatatatttgaactcacttgaaggatcttataagtttgttgacttacagagtccagtcttcgtgttcagatttgttcattgagaagtgaaacttacagttgtacacgtccatcgataccaagttcccatagtacctgggatggaaactgtccatgaattatattgatgttgtacctgaattttatgcttaggctgttgtgactgagctgttcatgtagcataggcattagtacattacaagttgctaagtagcttgagccaaggattcctctgtatgttgcttttagggagaaaataatatttattacatgtaattcaaactgcattgggtccaaaagttcagtactcatgagtcagaacttgagacattagctatataattctgaaggagaaaatataaaagttgatgcggctgcttgccacatgctgtcg

SEQ ID NO: 65458 - DNA, 1018 bp, Zea Mays
gacgatatgagcccctcgcagatttggttccctcccttatcctattccctcgtgtcatggcgcttctcctgcgcctcgctgctccgtcggtgccgccccggcggagctccggcctcagagcattgccgcgcgtcgtccttccggaggtcgtttccaaacaatcatttcttcgtttactagttgacagcactgcaagtatgccctgtcctattaagtgttctgcggctcggtgtgccccatcattgactgaacacaacgattctaggaataatggcatccatgcatctagtgtatatggacatgatctcatgaagtccatgtctgatctccaggaagttgtattttcctcctttagcaaagcatgtcttctcagtagttgtatcatatatggtctaccacccagttgtatagcagaaccatgggcatccttgcaaagacaaggcaagtacaaggaagccataaattatcattccatggtgctaaacatctccaaggtgaccggagaggatgcgggtgtcactgaagcatacggagcaatagcggattgctacaccgagcttggtgagctcgagaaggcaggcaagttctacgacaagtacatagcaagattggagaacgaatgagaaaacagtgctgattggcaaatctgtgagagcagaaacaaagacaaggctaatcatatctctactcttgtcgtcatgtattctactatagatgtgcagttcccagctggaactgatgtttgttatcatgattcaagtttctttttggcagaattatcccagatgtttaggtacagatcagtatcatgctgtgcacgtagttgttttgttaattagggtctcaatggtccgtacaggcattcatgtcaatctgctagttgcgccggcttaattttatagttttgctatatcgtgcctaggtgaaaatctttcctccacatgtttttttttagtttttgttttcatgttttctttctaagtaacacgcatagaagggatttaaactaagattctcc

SEQ ID NO: 65459 - DNA, 1339 bp, Zea Mays
gacgatatgagcccctcgcagatttggttccctcccttatcctattccctcgtgtcatggcgcttctcctgcgcctcgctgctccgtcggtgccgccccggcggagctccggcctcagagcattgccgcgcgtcgtccttccggaggtcgtttccaaacaatcatttcttcgtttactagttgacagcactgcaagtatgccctgtcctattaagtgttctgcggctcggtgtgccccatcattgactgaacacaacgattctaggaataatggcatccatgcatctagtgtatatggacatgatctcatgaagtccatgtctgatctccaggaagttgtattttcctcctttagcaaagcatgtcttctcagtagttgtatcatatatggtctaccacccagttgtatagcagaaccatggctccttgcgagacagaggagaggggagcttgcacgtctaaatgatcaattgcgtcagataaatgctgcattgagaagacaagccaagattgaatcttatgctcctgccttgagctatgccccagttggtagcaagataccagaatcagaagttattgttgatcctcagaaacagcgcctaattgcatatctcaggaccggaaagaactatctgagaaaccaagctcctgacaaggcatttcctgagtttaaggcagctcttgatcttgcacgatctttaggtgatcatgttgaagagaagaaggcagcacgaggattaggggcatccttgcaaagacaaggcaagtacaaggaagccataaattatcattccatggtgctaaacatctccaaggtgaccggagaggatgcgggtgtcactgaagcatacggagcaatagcggattgctacaccgagcttggtgagctcgagaaggcaggcaagttctacgacaagtacatagcaagattggagaacgaatgagaaaacagtgctgattggcaaatctgtgagagcagaaacaaagacaaggctaatcatatctctactcttgtcgtcatgtattctactatagatgtgcagttcccagctggaactgatgtttgttatcatgattcaagtttctttttggcagaattatcccagatgtttaggtacagatcagtatcatgctgtgcacgtagttgttttgttaattagggtctcaatggtccgtacaggcattcatgtcaatctgctagttgcgccggcttaattttatagttttgctatatcgtgcctaggtgaaaatctttcctccacatgtttttttttagtttttgttttcatgttttctttctaagtaacacgcatagaagggatttaaactaagattctcc

SEQ ID NO: 65460 - DNA, 1422 bp, Zea Mays
gacgatatgagcccctcgcagatttggttccctcccttatcctattccctcgtgtcatggcgcttctcctgcgcctcgctgctccgtcggtgccgccccggcggagctccggcctcagagcattgccgcgcgtcgtccttccggaggtcgtttccaaacaatcatttcttcgtttactagttgacagcactgcaagtatgccctgtcctattaagtgttctgcggctcggtgtgccccatcattgactgaacacaacgattctaggaataatggcatccatgcatctagtgtatatggacatgatctcatgaagtccatgtctgatctccaggaagttgtattttcctcctttagcaaagcatgtcttctcagtagttgtatcatatatggtctaccacccagttgtatagcagaaccatgtgagcaagaatactttctccctaacatgcctttgctgttcgcaatagccatggttggtgctactgttggagatatcatgtagggctccttgcgagacagaggagaggggagcttgcacgtctaaatgatcaattgcgtcagataaatgctgcattgagaagacaagccaagattgaatcttatgctcctgccttgagctatgccccagttggtagcaagataccagaatcagaagttattgttgatcctcagaaacagcgcctaattgcatatctcaggaccggaaagaactatctgagaaaccaagctcctgacaaggcatttcctgagtttaaggcagctcttgatcttgcacgatctttaggtgatcatgttgaagagaagaaggcagcacgaggattaggggcatccttgcaaagacaaggcaagtacaaggaagccataaattatcattccatggtgctaaacatctccaaggtgaccggagaggatgcgggtgtcactgaagcatacggagcaatagcggattgctacaccgagcttggtgagctcgagaaggcaggcaagttctacgacaagtacatagcaagattggagaacgaatgagaaaacagtgctgattggcaaatctgtgagagcagaaacaaagacaaggctaatcatatctctactcttgtcgtcatgtattctactatagatgtgcagttcccagctggaactgatgtttgttatcatgattcaagtttctttttggcagaattatcccagatgtttaggtacagatcagtatcatgctgtgcacgtagttgttttgttaattagggtctcaatggtccgtacaggcattcatgtcaatctgctagttgcgccggcttaattttatagttttgctatatcgtgcctaggtgaaaatctttcctccacatgtttttttttagtttttgttttcatgttttctttctaagtaacacgcatagaagggatttaaactaagattctcc

SEQ ID NO: 65461 - DNA, 1319 bp, Zea Mays
gaatgttactgcaagttgccaggtctggtgctcactgctgtcgtcctcacattgagaacaatcatttcttcgtttactagttgacagcactgcaagtatgccctgtcctattaagtgttctgcggctcggtgtgccccatcattgactgaacacaacgattctaggaataatggcatccatgcatctagtgtatatggacatgatctcatgaagtccatgtctgatctccaggtatgatggaagttgtattttcctcctttagcaaagcatgtcttctcagtagttgtatcatatatggtctaccacccagttgtatagcagaaccatgtgagcaagaatactttctccctaacatgcctttgctgttcgcaatagccatggttggtgctactgttggagggctccttgcgagacagaggagaggggagcttgcacgtctaaatgatcaattgcgtcagataaatgctgcattgagaagacaagccaagattgaatcttatgctcctgccttgagctatgccccagttggtagcaagataccagaatcagaagttattgttgatcctcagaaacagcgcctaattgcatatctcaggaccggaaagaactatctgagaaaccaagctcctgacaaggcatttcctgagtttaaggcagctcttgatcttgcacgatctttaggtgatcatgttgaagagaagaaggcagcacgaggattaggggcatccttgcaaagacaaggcaagtacaaggaagccataaattatcattccatggtgctaaacatctccaaggtgaccggagaggatgcgggtgtcactgaagcatacggagcaatagcggattgctacaccgagcttggtgagctcgagaaggcaggcaagttctacgacaagtacatagcaagattggagaacgaatgagaaaacagtgctgattggcaaatctgtgagagcagaaacaaagacaaggctaatcatatctctactcttgtcgtcatgtattctactatagatgtgcagttcccagctggaactgatgtttgttatcatgattcaagtttctttttggcagaattatcccagatgtttaggtacagatcagtatcatgctgtgcacgtagttgttttgttaattagggtctcaatggtccgtacaggcattcatgtcaatctgctagttgcgccggcttaattttatagttttgctatatcgtgcctaggtgaaaatctttcctccacatgtttttttttagtttttgttttcatgttttctttctaagtaacacgcatagaagggatttaaactaagattctcc

SEQ ID NO: 65462 - DNA, 550 bp, Zea Mays
tttcaagttctggttgcctctccctgaccgctgctgctcatcttggttcgttccgcgccagctgccagtcgaacagccacgtccggtaccatgtcggatgcgcccccaacaagttctctactcgcacagcctccttgctgctcgccgccgccgatgtcaaagactgcctcggtgtccattctccacgtcgaagcttcgtcgctagtatcactatttccctgatggtctcgacgttgttcttgtgctgcagctgcttgtggtgctggtgctacgccgctcgctatgccgcttcaccaccgtgttccatgctgccgagatctccttcaccgtgtcccacgacaccgagagtccctgtccgaagctccctgcgctgcgccagtctccctcgccagtgccatcaaacccgccatcgttgccgtaccttgtcgccagttactgctcgcttgctacgccgtcgtgtgtcgtagccggagtcgtcgccatcgtcgttccgggcacctcttcggtgctcccttctcgccgcgaaaggagtgtggaagatagcagggtc

SEQ ID NO: 65463 - DNA, 1351 bp, Zea Mays
ataaaagattaattaggatattaattttaatgtggctttcatgtcaaaacagtggcactaattgtaattgataaacaataatattacaaaattataggactgaaatgggtcaatttggactaaatatggattttctaaggattaaataagttttctggatttatcttaatactaaaaatcaatttatatgtaattaattattcattttcattgttctctgaactgcgcgctaaatactggaaagtccaggggctctcgcgcaacttgcagtaagactcaggcaacaacaggacgtactgcgggttgatttggtgtaacagcgagggttcttatgtaaaatgggcacggccgagggaaccacttgatctgagctgtcagatcaaaatagacgacccagattatatcctcgacgaatgaaccggtactcgacagcagcagtcggatctatcacctacggtctagatttgatttcacgacgagttactctaacacccaatcttggtcgcacacagggatatccacggtccacatgcccccactgaaacgttatccactaaccctcatccccaccattgatctaaggatcaatggcaactgctcatcttcttccctaccatgacacctagcgcggctatggagtcgacgacgtggttgaccacgtcagatggcggatccgtggccaccgcatcagaccgacgagcaaattcggacgagtccgcccatcacctcgctcccgggagttacctctaggtttgctgcacaccggtagtccctcgccctcctcccgaggccggaccgtcagccaaggtaggatccgaacgcgacggcgacgagctcggcttgcagctgcccagcggcgaaccacggactccataggaaacaaacccaataccccgatgaacttctatgctcatcagcgaacctctctagcaggccctggtgccgcgaccttcgctccacatgatccgacgaactccccctttctctctcctcgagtgcggctccagatctcccctgttggtttcctgcgctcaccctctctctccaatggccacgacacaccatgggcgaacgcgctgccttacttctggttgactagggcggtgagttccagggccatgatcgctcctcttttatgcgcagcgaacgagtggtcaattcccctccggactgcaagggatccgcaccccacggatctctccgtccactgcgcgcgcgtctggtaggaggagtaacgtgaagctaggcagtgggtcccgccagcggccagccccatccatccgttggccgcgtgagcgagggacttcggtggatcctggcgcgattcagttgcgcagctgagcggatcttg

SEQ ID NO: 65464 - DNA, 1106 bp, Zea Mays
atggccttgatgttgtcgatgaccgaaattcgtttttcggttagtagcgaaaacgggaaaaattatcgagattcggtgattccaatgcgggatagtaaacagtggtccaggctgggatgtcaggatccggaggtggagatcatcttcgacagtgtaagcgtcgaagccgtggtgcctgtcggccgacggacaacgcccacgcttcccaacaccatcatcaactgtgggaaggctgtaatggattctgtgctcatgcgccgctccagggaagaaacgtttaaaatcatagatgcagtgagcgggacaataagatcatccaggtgcttttcttgtgtggccagaatgacacttcttcttggagcacccggatcaggaaagacgaccctgttaaaagcactggcaggaaaactagattcttctttgaagatccatggagatgtcaaatacaagtgtaatggggaaacaatgtcatctacatcgcagcacctctgtgcgtacgtcagccagaatgacctccatcatcccgaaatgacagtgagggagactattaatttcgcttcaaacatgcttggggccaacaatgaattcggtatgagtgcctgttggttttggtcaaaatcaaaatattaaattgatatcctcaagcgatagcaacatgcattcatactgatatatacatatacacacacgcgcgctaattatctcctgctggtgataactgctttagagacgctgagagatgcattacaaagaaaaatggaaacatgcaatgaactaaatcaggacctattttccaaggtgctatagccatatttgtttaagataagaaagcatcagtttattttagtagaataacagctaagttgttcccgtacaggcaactaaacctggaaacggaagcaatcttaaaacaaactacatcatcaaggtaaaatcttattttaatcaatgaagttatcattttttactgtcaacagggaggggggacatcctcacttgaatttcattgaaagcaacctcttttttagagaaacgaggcaaagcactatataaaattgtggtagaccatagattacaaacaagtgctagcacaacacagcaaatac

SEQ ID NO: 65465 - DNA, 3208 bp, Zea Mays
ttctctggcatgataactgggatggtattcccaaagcaacacagtatccagaactttggtccttctctgcttgcaaagacatcattgtactacaagcaagattggttgactcccaagaactgttccatgcaccgttgtccattgaggcctttgttcaactcttcaagagttgaatgattgcttggataatcttccacataataatcacaaagacaaatggagttgctctacttcttctagcttattttcctcgcaaaagatttatgctcatctgatgggtaaccagtggacacatcccattttctcttggttgtggaaatccaaatgtcaacccaagcacaaggtgttcttttggctactactgaaagacggactaaataccagagcttttctaaggcagcggtccatgtttctggactcttattcctgtgacaactatgtccttcaagttgaagagacgaccattcacctcttcttcagatgcaattttgctaagagatgttggtcactgattggaatctctccttcacattctgcggatttactcaacaccattttaagaatcagaagacgttggcaagtcccttggaaacttgaagctataatcctattgacctggggcatctggaaatgcagaaataattggatgttcaatgagattccgcccacggtggaaggttgtcgtgctatgttcaaatctgaaatgaaccttcttagtcatcaagttaagccagtaataggagataaaattagaacctggcttctttattctgttctgtaattctatttttttttgtactcaccctcctgtatcttcaccccctctctggtttccttaagcaataaaatactgtaggcttccctacagtaacttttacttcaaaaaaaattgtcggggtggaaggcccctctcttgaataaagcaggccggctggtgttggttaaatcagttctttcagcaacacttattcatttgatgcttgctcttgatttgcccaaatgggttattaaagcaattgataaaagaaggcggggttttctctggaaagggcaagagcaagcaaatggaggcaaccgtgtggtatcctgacagaaggtgtagcggccgtacaagtacgatggtctggtatccatgatctggaaaggatggggtgggctctacgcttaccgtggcgctggttcatgaaaacggacacctcgaaaccttggtttggtctccctattcaaatccctgcacgagcagcagccttgttcaaaatggcagttgaagttaccattggcaatggtgaggatactcttttttggacagacaaatggttgcagggcagatgtgtggctgatttagccctcgagatctaccatgcaatccccaagagagtagctaaaaggcgtacagtgagtcaggctctttcaaacagatgttggatctcagatatcaagggagccttaacagttcaggtgttggctggttaccttcatatttgggatctggtggagggtactgtccttcaacctaacacaccagataagcatgtttggaggctttcttctactgggtgctatagcagcaaatctgcctataacgcaatgttcgttggcaccatcaaattctccccttggaagcggatttggaaaacttgggccccagcgaactgcaagtttttatatggctggccatcaataaccgttgttggacctcagatcgcttggccaagcatggtttgccccatcatccggcatgccccttctgcgaccaagcaccggagacgatcaaccacttgctttcctcctgtgtgttggccaaggaggtatgggcttcagtgctgcatgggctaggcctgggcgtgttgctgcctgaccatgttgctcgactcaaatcatggtgtggtcgcgcagcaaactccctgcctaaggtgggaaggaagggctttaactctctggtcatccttgtttgctgggagttatggaagcatagaaatgcttgcgtctttgaaaaaatcaggtcggatgctcatgttgtggtccagtcagttgtggctgaggggcatttatggtgtctggctggggcaaaagctctccaggagttaatcggtaggatcagctcctacaggtcttagaggtcgtggtcgtgtgcctttgcctggtctataagtccgtgagtccgtgtactgctttaaccctaggggatcctaatctcccagaggtttttcctctcttagggctgatttggtgacaaggggatcacgagaggattggaggggattgagggggaaatgaactaatttccccctcaatcccctccaatccccccgtgatctctggtcactaaatcaacccttaatgaaatggcgcgtagttctcctgcgcggttcgatgaaaaaactgatggtggtgtagaagtgcaaccataccaatattcatatagtaagttaataaaaaggcatatgttgaaaatatgggctacaatgtggccattaattgatttttgtaaatggtttgtcgtatattcttcatcgatgtgattttgtaaggatatgggtttgtttttttttaagatctcttaagtgtcaagcatgctagcaaatcagaatcatgtcagatgattactacctgttaatgatgcctcaaagtaagctagtaactttttaaactttagcgaattgagctatgtcatcagatataacttttgcggtctacacaagcagcaacatttaattattttttattacaattgactgtgaggattgcaaatatcttgaataattagcaaaattaaatatttaaaacattggtgtaatttttagaagaatggaagaagggtttcaagtccctagttattcttgttgtctaggaactatggaagcataggaatgctgctatttttgaaggaatacatctgaatgaccaggttgttcttcaaacggtataagaggatttgtggtggttggcctgtgcttctgtccgtcaggagcttatcttgaggtcgattgccccaaacccttagtgtcctagtatcgcaatatggcaagcaggtcatgttcaggctgttactttttctgcaaatttctttctaattgtggctcagtgtgagtggggtgtgttgggaatgtttgttctttcccctctcatctgtatgactttttttcttaatggaatgacacaactctcgtgtgttgtccaaaaaagaaattaaagaatcacatacata

SEQ ID NO: 65466 - DNA, 3165 bp, Zea Mays
cttcatcgtatctaaaggtaagataacagcccctgaactgcagagctaacaacgaagttagcttctaaccatgtcgaaggtatgaacacgactcatgcttttttcaataaaaaatggtaaacagatgatctccagccatggcttcgctggggttgttgggcctccccattcacctattctctcaatgctgttgctctgaatgaattcctggacaaaagatgggctactgtaactactcatttactaaatttgaactcattttgagtgttataatacattcggtttcaaactctgattgttatgagacataaccaatggtgccacaggtattccactatgaaaatgctcataccacagggcaagctatactgaaggttagggggttaatatatgagtggcactggtattggatttgtgttggtgttttatttggtttctccctgctgttcaacatcctaagcatacttgcattggagtttctaagttgtatgtgcatcaaacaaaaccattctgtatttaagttgatcaattatttaggacacttattctttctaaattatttgtagctcccaaggaacatcatgtcaaaataaaatcacaaaaggaatgcgacatacggtacatagatcaaactgttggtggtcaggtttccccaattgatcaagtccaccttccattctatcctttgtccattgtcttcagtcaaatcaactattttgttgatatgcctcatgaattgagaaagaatggagtaactgaaaagaagcttcaactgttacgagatgttaatggtgcattcaggccaggggtgttaacagcattgatggggatcactggtgcagggaaaactacattgcttgatgttttggcaggaagaaaaacaggagggtacattgaaggcattatcaacataggtggttaccaaaagaagcaagatacattctcaaagatctctggttactgcgagcagactgacattcactctccatatctcacagtctatgagtccctgcagttttcagcataccttcgactgccttcagatgttagtcctcataaaagagatatgtttgtagaagaagttatgggactagtagagctaagagacttgaggtgtgctatagtgggcgctcctggggtaacaggcttatcatctgagcagcgaaaaagacttactatagcggtggaactagttgctagcccttctatcattttcatggatgagccaacaactggtttggatgctcgtgctgcagctattgtcatgcgaacagtacggaggacggtgaacactgggcgcactgtggtttgtacaattcatcagccaagcattgagatttttaaatctttcgatgaggtatataattaagaaaatgtatagaggcctaattctaccataaaaaataaatttcatttccaatctataaagacattctatataaaaatgttcttatcaaacatctcagtttattcagttaatgaatttatatagtttcaataaactacaacgagttccttcttaccaattccagctattacttatgaaaagaggaggtcagatcatttacagcggttcactaggcccattatctagaagtttgacagagtattttgaggctattcctggagtacctagcatcaaggatggccaaaacccagctgcatggatgcttgatatcacttcgcataccatggaatacacaattcgagtggactattctgaagtttaccgaaaatcgtcattgcacagggaaaacatggctctagttgatgaattaagcaagcgaagagtaaaccaaaaagatctacattttccacctggatattggccaaactttaaggcacagtgcatggcatgtctttggaagcagcattgctcattctggaaaaacccagagctaaatgttgcgcgctttcttaacacatttggcatctcaatgacttttggcattgtgttctggcaaatcggttcaacagtcaaggaggaacaagatgtgttcaacattcttggaattgcatatgcatcagcactgtttttaggccttgtgaactgtagcactttgcagcctattctagcaatggaaaaggttgtattctaccgagaaaaggcttctgacatgtactcttctatggcctatgtcatcactcagatcggaattgaaattccatatatgattatccaagtgttcatattctcagctattgtgtacccaatggctggattccagctaactgtgaccaagttcttctggttcgttctatacatgatattgagctttactgactatacgctctatgggatgatggctgttgcacttgcacctagcattgaaatagcttctggtttatcctttctgatcttcatgatatggaatgtcttctctggattcattgtgtcgagaaaggtattttttttccttttctaaccccctctcatcagtatatacccagtgcggggtctggaaaaggatatctttagatgccaaaccttacctgcataatatgcagaggctggggctcgaacccgggaccttctggttacagacggtaggctctaccgctgcaccaggcccgcccttcaaatggattcttctactatgtaacaaaaagttgcacatttgatgtgacacattgccattgacctgtagatgatgccaccatggtggaggtggatgtattgggctgaccccgcagcatggactgtgtatgggctcatgttctcacagcttggagactgcacggagttgatccatgtgccaggccaaccagaccaaccagtgaggttgtttttggaggaatacttaggcttgcaaggcgactacttcatcctggtcacagttttgcatatcgcacttagtatgctctttggcattgtgttttacatcagcatcaaataccttaagttccatagaaggtagacaaagaactgggaagaagataaattgagtatgggggagcttcactgcaattgtatatgtataataacgtatgaccccaagtttagaagtacaaaacaaaacatatagtgccccaaatgtgacaatatgtgtatctatgccttcagcaggtatacatagcaaacaataagcaatattacagtggcaaaaggctacaagaacaatcaaattaacacaataagttaagggctcgagaaatagttttttt

SEQ ID NO: 65467 - DNA, 487 bp, Zea Mays
ctacctacagagatatgcaaccagctcttgctctggtcaaggagtattgcatgacatgcgaagcactcttgcctggcttgaactcggatttttaagcaaaccaactgacgaagcgttcggggaaggacaatccgtgaagaaaggttattagtgtacagggaagaaagaaggttgttactgcacaggaaaaacagaggttcctagctgttactgacaggcaagaacggagattctagttcttagttgttgattcgattagatgccacagtggcacgggcaagataatgatgcatgagcatccgttcaaaaacctagagtgctgtgttttgcttttttctaaactgtggaacttgttcatgttttgaacggcagttgtgtgttagtacaaatgtacgcgtcatgagctataaatgcggtccaatgctgggcccaacatttagacttgatcaaacagttctggaataaaccagatggtaataatggtaac

SEQ ID NO: 65468 - DNA, 2314 bp, Zea Mays
cgtggcagattggcggcaccacagaattagctatcacacgcctccaccccacacgctctatcatcaagtccgcagcatcccgacgaactcctggtgtcctggcctgcacccaaaatatccatatccttccgccggctgccaaataatctctttcttgccgagatcggcgcgtatatcttttccggtgtccgatgattcatgcattagcaatttttgactcgtgcgtgcgtgactacagttgcatgctatggccatggtcaccacttcgccggcaactgtgcagccatcatcatgcaagcacacgagccgcggcgcggcgcggtgctgccctcctcctctgctgtcctggaagacacgaagctttgggcagcaggtgacgacaagggccacggcggcgagctcccgtgggcagcccgcgggcgtggcacaggcagggggagaagagggcgacagtatcaggcggctgcagaacgggtcggacgtgcggggcgtcgcgctggagggcgagaaaggccgggccgtggacctcacgccgctggcggtcgaggccatcgccgagagcttcggggagtggctgcgagaggaggagctccggctccggggccaggagcccgagcagctgcgtgtgtccgtcggccgcgacccgaggctgtcggggccgcggctcagcgcggcgctcttcgcggggctcgccagggcgggctgctccgtcttcgacatggggctcgccaccacgccggcctgcttcatgagcaccatactgccacgcttcaactatgacggctctattatgttgcatgcatgcagatgacggcgtcacacctcccctacacccgcaacggcctcaagttcttcaccaagcgcggcgggctcacctccggcgacgtcgagaacatctgcgaccgcgcagcgcacaagtacgtggcgcggaagacgggagtcggcggcggcggcaggggcacgccgccggtggtgatgcgcgtggacctgatgagcgcctacgcgcagcacctccgcgacatcatcaagcagcgcgtggcgcacccgacgcactacgacaccccactgaggggcttcaaggtggtggtgaacgcgggcaacggctgcggcgggttcttcacctgggacgtgctggagaagctgggggccgacaccacgggcagcctccacctggagcccgacggcaggttccccaaccacatacccaacccggaggacgccaccgccatgtcgctcacccgcggcgccgtgctggcgcagggcgcggacctgggcgtcgttttcgacaccgacgtggaccgcagcggcgtcgtggacgccgggggcgcggccatcaacggcgaccgcctcatcgcgctcatgtcggccatcgtgctgggcgagcacccgggcaccatggtggtcaccgacgcgcgcgccagcgacgggctcacgaggttcgtcgagtccaggggaggccgccactgcctgtaccgcgtcggctaccgcaacgtcatagacaagggcgtgcagctgaacgccgacggcgtggagacgcacctgatgatggagacgaccgggcacggcgcgctcaaggagaactacttcctcgacgacggcgcctacatggtggtgaagatcatcattgagatggtccggatgaagctagcaggggtggagggaggggtagggagccttatcagggatctgcaggagcccgccgagtccgtgctcctccggatggacgtcatgggtgagcccaaggatgccaaggaaagggccacacatgcagttgaggcttttaagaactacatccaggaggacaaacttttcggttgggtgctggacgactgcggggattgctcagttgccgagggatgccttatggacacaaacaatgatcccatcgatgttgatgcacacatgtacagagcaaaactatacgacgagaatcagagagcagtaggcatggtccacattcgtcaaagcgtgcataatcccaacatagcactaaacatgcagtcctatgctcctggtggctgcaaatccatggcaaaggatcttcttgagaggttcttgctggcaagcggactgaatgggtttcttgacataagccaagtagagaagtttgtccagtagttcttatgcttattataggatcttagatttacctactctgtatatgtaacagctcagaacctagctaggagttcactactgttgcgagtgtacatctattacattattctcctatcccatccatggtaaaccttgtatgtgtttagcaaatatacatagcattaccttttttgattttagcgtttttctaaaagta

SEQ ID NO: 65469 - DNA, 5821 bp, Zea Mays
gttgtttcaagaatgacattagaaataaagaaatgatttgttattgttaaaataactgatcgccctacttgaaacattaagacaaaactactccatgacactgcaaggttcagcagcttaacgtgatactgtcaatgttcaaatggatgttatttccaaaagtaaaggtgcaaataaatatcgtagaaagttaaaaatagaaatctgcccggggcagtttaaagaaagcgaacaagaacaatttgctccagtgctttaaaaatatgataatgtgactgttggagtataaaatgaattgcccacctctccctatgaacttaatcttttgggttaaactggttggtgcattccatggttttaaagtcatccgactaatcgcgattagtcggacttctgtaagggcgattagggcgactagaaacctggtcgtccgattagggttgtgtccgactaggttctctgttttgggctccagcagatgaagcaggtatctgctcttttccatttgggccggcccaccatgggagctgaaactgaacgccgctgcccttagccccttatacagtcgtttgccctagatggagctgagcgccgccaccttcatctgcttgctggactgctgactgctctgagtgccgccgccctcatctgcttgctggagctggactgctgactgctgagcgccgccgccctcatctaccgtcggcccgtcgccctcatctctgcttcgacctgtccctgctccagcaggaatcaaaaggttcaagcaacatcttgctggagggtttggtgatgtagggatgtgcccaagagcgcctgaattggttaggaaggagatggcaggctacttgaagaagaatgcaaggaataagaaattgttattagataatgaaggggagaatgtagaagagggacaagaagatagtgatgcaagagaagtaccaagttctggcacgacaggaaaacaagtgaagaggaaattagctcaagctgctattaactccttcatggtttctggtccagttaaaccacaaacccaaaagcaatgcaagtcagttagttccatgttgtgtaagacaccggaggaagttgttgcagaaaggaataactctaagtgttctcaaactactcttgagcatctcacaaagaaggataaggagtcaaaacagattgttgatgatcatgtggctgacttcttaattgagaatgggataccgttcaatgtcattaattcaagaagttgggaaatcatgcttgagtctattggtcagtatggtcctggttataggtcaccaacataccatgattgcagggacaaattgcttgacaggactgttggaaggacagctgaactcaggaagaaacatgaggaatcttggaaggagtatggttgctcaatcatgtctgatgggtggacctctacaaaccaccgtcatatcatcaatttccttgccaacagtccagcagggacctttttccttggttcggtggacgcttcaagcgaggtagcaaatgcaaacatgctagcaaatctgttggagcagcacataaatcaggttggcaaggaaaatgtggtgcaagttgttacgaacaatggggtaaatttcaaagcagcggtaagaatccttatggaaaggattccaactttattttggacaccgtgtgcagcccactgcttggatttgatgctagaggatattgggaagataaacaatttcaacacttgcattaatcatacaaagaaggtgaccagatttgtatacaagaatggccgagttcttgatatgatgagagcttcacaaccacttcttattgcattaagaatagtagatggagatgaaacaccagcaatgcctgacattatggcaaccatggaaaaagcaaagagcagcatcactaattctttgagtaagaagccacagttagtgaggatggaccgttccctactccctcctcccgccccttcccctcccgccccttcccctgccctccccgacggcgagtcccctgcccttcccggcgccatcctcccccacccatctctggcggccgccgtgcagccggcagtgcccttctccaccagccgcacgtcgtcccttaccccaagggcggcggccaccctccaggcgtcgggacgtcttcttcttcaccaggatctcgttcactcgtcccactcttctggtcgcggcaaggctctcaggtggagagactccagcccttcgtcggattcgttggatgttgggagcccttcttcgttcaaggatatcctgctcgcgggaacggtctcggcctcagtctcggtgacgtctggggacatagtttcccatggcgcccaggctaggaccttgcaggcctccgtgcagaattcctctggtgatggtggacggtttgtccgtcggtcttccccactgcgctctttggttcagcccaggcttcagaagcctctggtggatcgtgatggtttcacactcgtggagagtcgccgcacacagaagcagagacgccgcctggagaagtcgtttggtgttcaagctctggagacctttaaaggacggtgcttcaagtgcctctcacctcatcaccgggttgccctctgccgttccatcatccgctgcctcctttgccatacacctgggcatacttcctacacttgtccgcgtcgcctccagccttaccgacagcaaccttcctttccaccggtctgctcgcgcatggctggacgtctgtgtgctcctgttcatcggctgcctcctgtccatgcggcgcagtgctctgttgatgctgaggggccactcccagatgtgagtcgtggtagaaggcgtcgcctggagtccgacatcgctgttgatgctggtgatgatgtctgcacggagccacagtttgctcctacccggatcatcccttggtctccaagtttcaaccagaggactgaagtgcttgatcgtgccattgttctcacggtaactgtggctattaatgaagcagttgaggaagctattttggacagctttgcgcggcgactggcgcttgttcatgactcgctgtctatgtgtcgtctgggtcctgcatgtctgcttcttattcttccaagtttagaaatggcggaccgtgcttttgatgggggcagaattgtgaatctatcccccacaactaaaatccatgttatgcggtggagcagaacccttaactcatctgcggcggcgtctctgcctttccaagttgagattgaagtgtctggcatccctgcacatgcttgggagttggaaactgtgcatgctctcctcaatgagtggtgctggattgctgatcttcacccagattgtgagcgacagcgtgaggtgttcaaggttaccgcctggtgctccagcccgggctccatccccaaggagtttaaacttgaaattgttgatccggtcacaaccgatggtggtatgctgcgccgttcattggtctaccctatccgggtgtcggtgaaggtccttgatcgaccggacatgttgcagtccctacagccgtcacctcctccggcggaggatgatcccgatcagggcaggcggcggaggcgacgtcgatctaggaggtcgtcttttggtattaatgctcccggaaaaggttcgacgacagcggtcttgcctcgggtgtcggttcatcagcgacttgggccgcgcgtgcaagcctgtgggaaggaaggagtcagggtgcctcgcctggcggtccataaacggctaggccctctggggatatttaacgctgataaaggtgcagtcaagaagatgaagcgagtttggattcccaagagaaagttggagtcatctgtgtctatttggattcctaagacatcgtctgctcttgtgtctccactcccggttgcggttgatgatgcatttttggaagctactagttctactgtcgttactgaagatactttggctggctctccagaggttattccagtggatggtggaatctgttcggaagctgctattatttctgatgctccagcccggtttcccatggttgaatctgatctgcaggacgtaaatgttctctccgagggagtgggtcttcccttggttgaatctgatttgcagaacattcaccttatggagtcttccttatcaaggaagcatcttatgtcaccaagtctgttagtttattccaggaaaagacatcaaaagctacagctgattgacagtattgatgagaatggcaatgtcggggctgctgcagatgctataatttctccagcttcggcgactggtttggctgctgatgggacagatcacgttggtcagggcccagtcattatcggggatgtggcagatgctattgtgtctccagccacggcaataacttttacacgttctgaacctattttgagtttggttgagcctactgcggctgtggcagacattctgatgtctccagctggggtggctcccagtcttcttccttctccttctggcgagcaggagagtttggttgagcctactgcggctgtggcagacattctgatgtctccagctggggtggctcccagtcttcttccttctccttctggcgagcaggagacttcccagtctttgcagagagaagtgttcattaaatctgttactcggcaaccttctaaattgcttcctgctcctccagtcatcttgaagaagaaggacaacaaattgccctccagatcggtgccacgtcgcagccgcagagttgctggtgtaggcgttgaatttaatgcctctgaccttgacagacgtgctatcaagaaaatcatgaaggcagttggtataattgctgataatgtggggattgaccagagggctcaagaggagtatgctgatcttttcaagacatctttgtctgatattcatgtaaaagcccttgcagccttgtttggctggcagagatgggatgatcaaatggagcaaaagatatatggagcagccttgttcttaaacccaagcaagttttttactttgagggaaaaagataggaggagtgctgcaaggttgaggtctatgtttaatgatgttttatggaagatggtggttgatgaagatgagcaaattaactggtggggatcatatggtggtaatacatttgagctccaatgtctagcaaagaaaattgtgagcctttgttgttctgcttcagaccgtgagcgcagttggagtgcatttgctaatgtatgtgtaccttttgtttgcatattttgtcttctctaaattgcttaggtttcctttttttgtcgttatgtagatccataccaagaaaagaaaccgtttagaacataaaaggcaggacaaattggtgtatgttagctacaaccgaaagatggcaaatagatttcaaagaattagagagtttggctcaaagggaaagaaaagcaacccctagatcctacaagagttccaaagggaaaatgagtgggttcatgaaaatgatgaggacaataacgttgaaaattctctttagagggttgttgatgaagctgttggtgcaactgagcatctaaggggtagaaatctccctagagctgctgttggggctgttaacagaacatacactagaacaaggaagtgtattgctcgtcctccacagtttggtgaatctgattctgatgaagaaatgcaagaacagggagaagaacttgctgttgcatccactgaagtgtaatcctggagttgaaatcaatgtggcagtgtattgctgtatactccaatccaatgtaagtgtctaagtgatctttaccttttagtgaaaacatgatcattctacagtttaattgttggagcaacaattattatatatatatata

SEQ ID NO: 65470 - DNA, 5846 bp, Zea Mays
aaatagaaatctgcccggggcagtttaaagaaagcgaacaagaacaatttgctccagtgctttaaaaatatgataatgtgactgttggagtataaaatgaattgcccacctctccctatgaacttaatcttttgggttaaactggttggtgcattccatggttttaaagtcatccgactaatcgcgattagtcggacttctgtaagggcgattagggcgactagaaacctggtcgtccgattagggttgtgtccgactaggttctctgttttgggctccagcagatgaagcaggtatctgctcttttccatttgggccggcccaccatgggagctgaaactgaacgccgctgcccttagccccttatacagtcgtttgccctagatggagctgagcgccgccaccttcatctgcttgctggactgctgactgctctgagtgccgccgccctcatctgcttgctggagctggactgctgactgctgagcgccgccgccctcatctaccgtcggcccgtcgccctcatctctgcttcgacctgtccctgctccagcaggaatcaaaaggttcaagcaacatcttgctggagggtttggtgatgtagggatgtgcccaagagcgcctgaattggttaggaaggagatggcaggctacttgaagaagaatgcaaggaataagaaattgttattagataatgaaggggagaatgtagaagagggacaagaagatagtgatgcaagagaagtaccaagttctggcacgacaggaaaacaagtgaagaggaaattagctcaagctgctattaactccttcatggtttctggtccagttaaaccacaaacccaaaagcaatgcaagtcagttagttccatgttgtgtaagacaccggaggaagttgttgcagaaaggaataactctaagtgttctcaaactactcttgagcatctcacaaagaaggataaggagtcaaaacagattgttgatgatcatgtggctgacttcttaattgagaatgggataccgttcaatgtcattaattcaagaagttgggaaatcatgcttgagtctattggtcagtatggtcctggttataggtcaccaacataccatgattgcagggacaaattgcttgacaggactgttggaaggacagctgaactcaggaagaaacatgaggaatcttggaaggagtatggttgctcaatcatgtctgatgggtggacctctacaaaccaccgtcatatcatcaatttccttgccaacagtccagcagggacctttttccttggttcggtggacgcttcaagcgaggtagcaaatgcaaacatgctagcaaatctgttggagcagcacataaatcaggttggcaaggaaaatgtggtgcaagttgttacgaacaatggggtaaatttcaaagcagcggtaagaatccttatggaaaggattccaactttattttggacaccgtgtgcagcccactgcttggatttgatgctagaggatattgggaagataaacaatttcaacacttgcattaatcatacaaagaaggtgaccagatttgtatacaagaatggccgagttcttgatatgatgagaggtatgattggtggagatctagtgagacctgctgtgacccgttttgctactgcattcctcacattagcgagtatgcaaaagaataagcagggtcttaaaagtttgtttgtttgtgatgaagggcataatcacaaattggcgaaaactagagaaggagaactagttgaaagcattatccttcctgttccattttggacaaagttggaaaactgtctttgagcttcacaaccacttcttattgcattaagaatagtagatggagatgaaacaccagcaatgcctgacattatggcaaccatggaaaaagcaaagagcagcatcactaattctttgagtaagaagccacagttagtgaggatggaccgttccctactccctcctcccgccccttcccctcccgccccttcccctgccctccccgacggcgagtcccctgcccttcccggcgccatcctcccccacccatctctggcggccgccgtgcagccggcagtgcccttctccaccagccgcacgtcgtcccttaccccaagggcggcggccaccctccaggcgtcgggacgtcttcttcttcaccaggatctcgttcactcgtcccactcttctggtcgcggcaaggctctcaggtggagagactccagcccttcgtcggattcgttggatgttgggagcccttcttcgttcaaggatatcctgctcgcgggaacggtctcggcctcagtctcggtgacgtctggggacatagtttcccatggcgcccaggctaggaccttgcaggcctccgtgcagaattcctctggtgatggtggacggtttgtccgtcggtcttccccactgcgctctttggttcagcccaggcttcagaagcctctggtggatcgtgatggtttcacactcgtggagagtcgccgcacacagaagcagagacgccgcctggagaagtcgtttggtgttcaagctctggagacctttaaaggacggtgcttcaagtgcctctcacctcatcaccgggttgccctctgccgttccatcatccgctgcctcctttgccatacacctgggcatacttcctacacttgtccgcgtcgcctccagccttaccgacagcaaccttcctttccaccggtctgctcgcgcatggctggacgtctgtgtgctcctgttcatcggctgcctcctgtccatgcggcgcagtgctctgttgatgctgaggggccactcccagatgtgagtcgtggtagaaggcgtcgcctggagtccgacatcgctgttgatgctggtgatgatgtctgcacggagccacagtttgctcctacccggatcatcccttggtctccaagtttcaaccagaggactgaagtgcttgatcgtgccattgttctcacggtaactgtggctattaatgaagcagttgaggaagctattttggacagctttgcgcggcgactggcgcttgttcatgactcgctgtctatgtgtcgtctgggtcctgcatgtctgcttcttattcttccaagtttagaaatggcggaccgtgcttttgatgggggcagaattgtgaatctatcccccacaactaaaatccatgttatgcggtggagcagaacccttaactcatctgcggcggcgtctctgcctttccaagttgagattgaagtgtctggcatccctgcacatgcttgggagttggaaactgtgcatgctctcctcaatgagtggtgctggattgctgatcttcacccagattgtgagcgacagcgtgaggtgttcaaggttaccgcctggtgctccagcccgggctccatccccaaggagtttaaacttgaaattgttgatccggtcacaaccgatggtggtatgctgcgccgttcattggtctaccctatccgggtgtcggtgaaggtccttgatcgaccggacatgttgcagtccctacagccgtcacctcctccggcggaggatgatcccgatcagggcaggcggcggaggcgacgtcgatctaggaggtcgtcttttggtattaatgctcccggaaaaggttcgacgacagcggtcttgcctcgggtgtcggttcatcagcgacttgggccgcgcgtgcaagcctgtgggaaggaaggagtcagggtgcctcgcctggcggtccataaacggctaggccctctggggatatttaacgctgataaaggtgcagtcaagaagatgaagcgagtttggattcccaagagaaagttggagtcatctgtgtctatttggattcctaagacatcgtctgctcttgtgtctccactcccggttgcggttgatgatgcatttttggaagctactagttctactgtcgttactgaagatactttggctggctctccagaggttattccagtggatggtggaatctgttcggaagctgctattatttctgatgctccagcccggtttcccatggttgaatctgatctgcaggacgtaaatgttctctccgagggagtgggtcttcccttggttgaatctgatttgcagaacattcaccttatggagtcttccttatcaaggaagcatcttatgtcaccaagtctgttagtttattccaggaaaagacatcaaaagctacagctgattgacagtattgatgagaatggcaatgtcggggctgctgcagatgctataatttctccagcttcggcgactggtttggctgctgatgggacagatcacgttggtcagggcccagtcattatcggggatgtggcagatgctattgtgtctccagccacggcaataacttttacacgttctgaacctattttgagtttggttgagcctactgcggctgtggcagacattctgatgtctccagctggggtggctcccagtcttcttccttctccttctggcgagcaggagagtttggttgagcctactgcggctgtggcagacattctgatgtctccagctggggtggctcccagtcttcttccttctccttctggcgagcaggagacttcccagtctttgcagagagaagtgttcattaaatctgttactcggcaaccttctaaattgcttcctgctcctccagtcatcttgaagaagaaggacaacaaattgccctccagatcggtgccacgtcgcagccgcagagttgctggtgtaggcgttgaatttaatgcctctgaccttgacagacgtgctatcaagaaaatcatgaaggcagttggtataattgctgataatgtggggattgaccagagggctcaagaggagtatgctgatcttttcaagacatctttgtctgatattcatgtaaaagcccttgcagccttgtttggctggcagagatgggatgatcaaatggagcaaaagatatatggagcagccttgttcttaaacccaagcaagttttttactttgagggaaaaagataggaggagtgctgcaaggttgaggtctatgtttaatgatgttttatggaagatggtggttgatgaagatgagcaaattaactggtggggatcatatggtggtaatacatttgagctccaatgtctagcaaagaaaattgtgagcctttgttgttctgcttcagaccgtgagcgcagttggagtgcatttgctaatgtatgtgtaccttttgtttgcatattttgtcttctctaaattgcttaggtttcctttttttgtcgttatgtagatccataccaagaaaagaaaccgtttagaacataaaaggcaggacaaattggtgtatgttagctacaaccgaaagatggcaaatagatttcaaagaattagagagtttggctcaaagggaaagaaaagcaacccctagatcctacaagagttccaaagggaaaatgagtgggttcatgaaaatgatgaggacaataacgttgaaaattctctttagagggttgttgatgaagctgttggtgcaactgagcatctaaggggtagaaatctccctagagctgctgttggggctgttaacagaacatacactagaacaaggaagtgtattgctcgtcctccacagtttggtgaatctgattctgatgaagaaatgcaagaacagggagaagaacttgctgttgcatccactgaagtgtaatcctggagttgaaatcaatgtggcagtgtattgctgtatactccaatccaatgtaagtgtctaagtgatctttaccttttagtgaaaacatgatcattctacagtttaattgttggagcaacaattattatatatatatata

SEQ ID NO: 65471 - DNA, 1884 bp, Zea Mays
cgcacaaacacatgcttaaatatagtagagattagaaaatagtaaaatttactccactcattaaacttgtgttcaaatgactaggattgatctttactagacgactagccaacgactagccattaacacagagtagaccattaccctgacatattttgtagagctagtgaacctagcagaaatcgattaaaataatacgcagcagccgattgcactcgaccaagagaagcaacgactgcatctctggtctcccacgcctataatcccattcccctccttcaaagccctgcggcgatttcgattcttcccttctatctccaggtatacccatcggagcagcactgacaaaaattctccagatatggcaagcaaaaggattcagaaggaactcatggatctccaaaaggacccaccgacatcatgcagtgcagggcctgctggagaggatctattccactggcaggccacaatcatgggtcctagtgacagcccctatgcaggcggggttttctttattaatatccattttcctcctgactacccctttaagcctccaaaagtgaacttccaaacaaaagtttatcacccaaacatcaactctaatgggagcatttgccttgatatcctcaaggagcaatggagccctgcactgaccatatcaaaggtcctcctctccatcagctcgctcctcaccgaccccaacccggacgacccccttgtccctgagatcgcccacatgtacaaaaaccagaggcagcgctacgaggaaactgcacgggcctggacccagaagtacgcaatgggctgattctgtcccactggacagtacttcccctgcaaagatcgtcacggtgttgtaagaatcaagttgcaccgttttcctgtcgtgtgatggtattaagagcccagatggctgtgtcaattgtactcgcttctcagaacaaagtctctctgtgtgtacagtgcttttgaagctggatgatctgagttctgtgctaaaaccttggtttgcacttcactttgttccctgaaatgggtttgcgaccactgaatttgcatgtgtaacctttccaagaaaccagtagcagtttgtatgttgtcaagatgttaataattcagatgggtggcctgcatccatctgaaatggagcgctatttgttaaaaccgtgcagataacagttcagtgctcttgcatatggaacatgtcgtctgcaccacgtgattgaaatggagctttccttgttgcagccactgctttttgattttgaatggcagaagttattacagaagtggcttgcagatctgctgccttgcttcaacatttgctagtctcgtggaaactgtcaggtccatcgctgttggttgaatgtggccatactttctgcaacgctgctgtttaccctctcccagctttcatctgcacaagcagtagaaagtcatagcctgccctttcttcttcgagatggacaaaagaggttgcatctgatggccaaccggccagtttggtctttctgtaccaggtcacttgtgtccttgtgcctttacttccatgtctccatgataatattcatagctgttctttttttagtgtattaccgggcgaaaattttgaagtacaggtgctttctccccctttgctataaagtcatgtgcaggtcttcatttggtatacctgtagccacacgctgggaaaaagcctgacacttgtgtacatacttgtgtaaggttgtacatgcacatgtggcagttgttatctacacactacaggagatagctgctttgccgcgtggcaaagcccaaaaaaccgctaggcaagaaaacactcggcaaactctttatttagatgagggctggcaggatgcaggacaacatagcagaacctgc

SEQ ID NO: 65472 - DNA, 1764 bp, Zea Mays
ttaccctgacatattttgtagagctagtgaacctagcagaaatcgattaaaataatacgcagcagccgattgcactcgaccaagagaagcaacgactgcatctctggtctcccacgcctataatcccattcccctccttcaaagccctgcggcgatttcgattcttcccttctatctccaggtatacccatcggagcagcactgacaaaaattctccaggaactccaagaattcatctgatatggcaagcaaaaggattcagaaggaactcatggatctccaaaaggacccaccgacatcatgcagtgcagggcctgctggagaggatctattccactggcaggccacaatcatgggtcctagtgacagcccctatgcaggcggggttttctttattaatatccattttcctcctgactacccctttaagcctccaaaagtgaacttccaaacaaaagtttatcacccaaacatcaactctaatgggagcatttgccttgatatcctcaaggagcaatggagccctgcactgaccatatcaaaggtcctcctctccatcagctcgctcctcaccgaccccaacccggacgacccccttgtccctgagatcgcccacatgtacaaaaaccagaggcagcgctacgaggaaactgcacgggcctggacccagaagtacgcaatgggctgattctgtcccactggacagtacttcccctgcaaagatcgtcacggtgttgtaagaatcaagttgcaccgttttcctgtcgtgtgatggtattaagagcccagatggctgtgtcaattgtactcgcttctcagaacaaagtctctctgtgtgtacagtgcttttgaagctggatgatctgagttctgtgctaaaaccttggtttgcacttcactttgttccctgaaatgggtttgcgaccactgaatttgcatgtgtaacctttccaagaaaccagtagcagtttgtatgttgtcaagatgttaataattcagatgggtggcctgcatccatctgaaatggagcgctatttgttaaaaccgtgcagataacagttcagtgctcttgcatatggaacatgtcgtctgcaccacgtgattgaaatggagctttccttgttgcagccactgctttttgattttgaatggcagaagttattacagaagtggcttgcagatctgctgccttgcttcaacatttgctagtctcgtggaaactgtcaggtccatcgctgttggttgaatgtggccatactttctgcaacgctgctgtttaccctctcccagctttcatctgcacaagcagtagaaagtcatagcctgccctttcttcttcgagatggacaaaagaggttgcatctgatggccaaccggccagtttggtctttctgtaccaggtcacttgtgtccttgtgcctttacttccatgtctccatgataatattcatagctgttctttttttagtgtattaccgggcgaaaattttgaagtacaggtgctttctccccctttgctataaagtcatgtgcaggtcttcatttggtatacctgtagccacacgctgggaaaaagcctgacacttgtgtacatacttgtgtaaggttgtacatgcacatgtggcagttgttatctacacactacaggagatagctgctttgccgcgtggcaaagcccaaaaaaccgctaggcaagaaaacactcggcaaactctttatttagatgagggctggcaggatgcaggacaacatagcagaacctgc

SEQ ID NO: 65473 - DNA, 1917 bp, Zea Mays
ctggacatgtgtaaatctagctagatgtcaaagtgctaagtgataacagctacttacgagaatatgattcagtctatcttcaatatctagttagtacttcctctcttccaaatcataagttacttaggctttgtcgttagtcaaacttctctaacttggaccaagttttctgaaaaaagatgttcacatctacaagttcaaataaatgcaactatcaaaaactcggccaaggagggtaagaccatccttgtggtatttcattaatagaacgttgcggcaacggtcccgactgagaaacccccgaaccctgtcctcctatcactaatgggccgattcaagctactcactctgcaaaggcccacctaggcccgagggtggcgcacagccgagttatatggcaagcaaaaggattcagaaggaactcatggatctccaaaaggacccaccgacatcatgcagtgcagggcctgctggagaggatctattccactggcaggccacaatcatgggtcctagtgacagcccctatgcaggcggggttttctttattaatatccattttcctcctgactacccctttaagcctccaaaagtgaacttccaaacaaaagtttatcacccaaacatcaactctaatgggagcatttgccttgatatcctcaaggagcaatggagccctgcactgaccatatcaaaggtcctcctctccatcagctcgctcctcaccgaccccaacccggacgacccccttgtccctgagatcgcccacatgtacaaaaaccagaggcagcgctacgaggaaactgcacgggcctggacccagaagtacgcaatgggctgattctgtcccactggacagtacttcccctgcaaagatcgtcacggtgttgtaagaatcaagttgcaccgttttcctgtcgtgtgatggtattaagagcccagatggctgtgtcaattgtactcgcttctcagaacaaagtctctctgtgtgtacagtgcttttgaagctggatgatctgagttctgtgctaaaaccttggtttgcacttcactttgttccctgaaatgggtttgcgaccactgaatttgcatgtgtaacctttccaagaaaccagtagcagtttgtatgttgtcaagatgttaataattcagatgggtggcctgcatccatctgaaatggagcgctatttgttaaaaccgtgcagataacagttcagtgctcttgcatatggaacatgtcgtctgcaccacgtgattgaaatggagctttccttgttgcagccactgctttttgattttgaatggcagaagttattacagaagtggcttgcagatctgctgccttgcttcaacatttgctagtctcgtggaaactgtcaggtccatcgctgttggttgaatgtggccatactttctgcaacgctgctgtttaccctctcccagctttcatctgcacaagcagtagaaagtcatagcctgccctttcttcttcgagatggacaaaagaggttgcatctgatggccaaccggccagtttggtctttctgtaccaggtcacttgtgtccttgtgcctttacttccatgtctccatgataatattcatagctgttctttttttagtgtattaccgggcgaaaattttgaagtacaggtgctttctccccctttgctataaagtcatgtgcaggtcttcatttggtatacctgtagccacacgctgggaaaaagcctgacacttgtgtacatacttgtgtaaggttgtacatgcacatgtggcagttgttatctacacactacaggagatagctgctttgccgcgtggcaaagcccaaaaaaccgctaggcaagaaaacactcggcaaactctttatttagatgagggctggcaggatgcaggacaacatagcagaacctgc

SEQ ID NO: 65474 - DNA, 1968 bp, Zea Mays
aaccccttttctcctatccctgcactccccccccccccccccctgctgccccgcgccgaagcaggtgtggcggcgctgcgagcctgcaaccatctccgcagactccgctgcgactcatctgggctacgacccacgtcaaggctgctagttgcgttcgttggagttgcggcttccgcgaatcccccaatccatcccagtcatggcgttctggggggtggaagtgaagcccgggaagccctacacccacatccatcacgctgaccatggccgcctccgcatttgccaggctacactgggcaactgtgatgctgctgcaaggacggtgctgcaatgcaatgttggcaacaagattcccatcaaactttgtagtctaaatccgaaattggccgagacatgccatctagaggttgagtttgaggaggttgatgatgttatcttctcagtaattggtcatagttcgatacatctctctggatactatgtctgtgcaagcaacaggtctaatgtgggggatgatgaatcagaatcttatggggaagatattgggcactccagcaccgatgaggagcatgataccagtgaggacagctatgaatctgacttcattgatgatcgtgaagttccattatctgagaagtatgggtctggttctatagatgacagtgatgatgagtgcacccaacgatgccacagacaaaaagctgaaaaaacgactcaaaatgctgaaagacggcggcgcttgaagaagcaccaagcaaatggcatcaccaaaaaaaggattattgatgtcaagaaaagaaaacagtcttccatcagcgaggatcctgcatcgtcaatggatatgacagatgctaatgcaccatctgtttcaaaacaagttgatgaaataaaaaagaaatcaaagaaaaagatgagaaatcaatcaggggaaaataatgagaagcagtccaatataagaacattggatgacgggttggtggttgaatatttgtcaatgggaaacaatgatgcaaaagtggcttctgatggctgcaaggtctatatcaaatatgttggcatgttgaaggatgggaaaattgttgagtctaatgttagtgaaaagccttacaagttcaagcttggtgctggaaaagttatccgtggatgggatgttggtattcatggtatgcgtgttggcgagaaaagaaagcttacagttccaccttcaatgctctctggcggtaaatcagtgggagaagtacccgaaaattcttcagtcatatatgaaatcgagttagtgaaagtgaaataaagaaaaaatatgtcaggcttttgcatgtgccctatctcagcagctgcaacagttgcaggaattttgttgatatacagatgactcatgctcatgttttgcttccttctggaagaatttatatgtgccactcgtgccacaccataggacatcgagcagtgaactgcagcgggtgctttatccatgcatgccttgactggatacttggttttgcactatctggctacattactttgtaaactgcatacgatggttgaagcactattgtggtctggtgatttgccatatgtttgtgactacttcgcggttcactgctttgaatcatgtttgttttgccaatattgattgagttctgtaatagtttgatcagggtctcttggcttacgtgccagtcttttactgtagaagtggattttttttttccttgttacgtttggcagacgttgaactggtgcaaggcctttaaagtaatggctaatatatcgtccgtgcgtcacgaggatacaaattattcaaaagaatattagagcaaaatgattacttaaaaataaacaatatatattgtcattgatcttaatgtctcaaattctttgtcaacaatcaatagcatgtatatgtattggtgcaaatctcccctccattcccacgtacacgtacatgcctagctaaaattaaattaa

SEQ ID NO: 65475 - DNA, 2243 bp, Zea Mays
aaccccttttctcctatccctgcactccccccccccccccccctgctgccccgcgccgaagcaggtgtggcggcgctgcgagcctgcaaccatctccgcagactccgctgcgactcatctgggctacgacccacgtcaagcttaacatgtccttttcgtggattggctgcaggctgctagttgcgttcgttggagttgcggcttccgcgaatcccccaatccatcccagtcatggcgttctggggggtggaagtgaagcccgggaagccctacacccacatccatcacgctgaccatggccgcctccgcatttgccaggctacactgggcaactgtgatgctgctgcaaggacggtgctgcaatgcaatgttggcaacaagattcccatcaaactttgtagtctaaatccgaaattggccgagacatgccatctagaggttgagtttgaggaggttgatgatgttatcttctcagtaattggtcatagttcgatacatctctctggatactatgtctgtgcaagcaacaggtctaatgtgggggatgatgaatcagaatcttatggggaagatattgggcactccagcaccgatgaggagcatgataccagtgaggacagctatgaatctgacttcattgatgatcgtgaagttccattatctgagaagtatgggtctggttctatagatgacagtgatgatgagtgcacccaacgatgccacagacaaaaagctgaaaaaacgactcaaaatgctgaaagacggcggcgcttgaagaagcaccaagtaggtagcactgattacgatgatgatgatactccagtcatgaaacatgttgcgaagcgctgtgctcctaaaatatctgatagtggtgatgatgacactcctgtcacaaaacctgttgtcaaacgtagagcttcaatatttgatagtgacagtgatgaagatgataatgtacctatttctcttgcattgggtaagaaagacaatgctaaggttgctgaggaaactgaacatcaaaatggacaggcaaatggcatcaccaaaaaaaggattattgatgtcaagaaaagaaaacagtcttccatcagcgaggatcctgcatcgtcaatggatatgacagatgctaatgcaccatctgtttcaaaacaagttgatgaaataaaaaagaaatcaaagaaaaagatgagaaatcaatcaggggaaaataatgagaagcagtccaatataagaacattggatgacgggttggtggttgaatatttgtcaatgggaaacaatgatgcaaaagtggcttctgatggctgcaaggtctatatcaaatatgttggcatgttgaaggatgggaaaattgttgagtctaatgttagtgaaaagccttacaagttcaagcttggtgctggaaaagttatccgtggatgggatgttggtattcatggtatgcgtgttggcgagaaaagaaagcttacagttccaccttcaatgctctctggcggtaaatcagtgggagaagtacccgaaaattcttcagtcatatatgaaatcgagttagtgaaagtgaaataaagaaaaaatatgtcaggcttttgcatgtgccctatctcagcagctgcaacagttgcaggaattttgttgatatacagatgactcatgctcatgttttgcttccttctggaagaatttatatgtgccactcgtgccacaccataggacatcgagcagtgaactgcagcgggtgctttatccatgcatgccttgactggatacttggttttgcactatctggctacattactttgtaaactgcatacgatggttgaagcactattgtggtctggtgatttgccatatgtttgtgactacttcgcggttcactgctttgaatcatgtttgttttgccaatattgattgagttctgtaatagtttgatcagggtctcttggcttacgtgccagtcttttactgtagaagtggattttttttttccttgttacgtttggcagacgttgaactggtgcaaggcctttaaagtaatggctaatatatcgtccgtgcgtcacgaggatacaaattattcaaaagaatattagagcaaaatgattacttaaaaataaacaatatatattgtcattgatcttaatgtctcaaattctttgtcaacaatcaatagcatgtatatgtattggtgcaaatctcccctccattcccacgtacacgtacatgcctagctaaaattaaattaa

SEQ ID NO: 65476 - DNA, 2180 bp, Zea Mays
aaccccttttctcctatccctgcactccccccccccccccccctgctgccccgcgccgaagcaggtgtggcggcgctgcgagcctgcaaccatctccgcagactccgctgcgactcatctgggctacgacccacgtcaaggctgctagttgcgttcgttggagttgcggcttccgcgaatcccccaatccatcccagtcatggcgttctggggggtggaagtgaagcccgggaagccctacacccacatccatcacgctgaccatggccgcctccgcatttgccaggctacactgggcaactgtgatgctgctgcaaggacggtgctgcaatgcaatgttggcaacaagattcccatcaaactttgtagtctaaatccgaaattggccgagacatgccatctagaggttgagtttgaggaggttgatgatgttatcttctcagtaattggtcatagttcgatacatctctctggatactatgtctgtgcaagcaacaggtctaatgtgggggatgatgaatcagaatcttatggggaagatattgggcactccagcaccgatgaggagcatgataccagtgaggacagctatgaatctgacttcattgatgatcgtgaagttccattatctgagaagtatgggtctggttctatagatgacagtgatgatgagtgcacccaacgatgccacagacaaaaagctgaaaaaacgactcaaaatgctgaaagacggcggcgcttgaagaagcaccaagtaggtagcactgattacgatgatgatgatactccagtcatgaaacatgttgcgaagcgctgtgctcctaaaatatctgatagtggtgatgatgacactcctgtcacaaaacctgttgtcaaacgtagagcttcaatatttgatagtgacagtgatgaagatgataatgtacctatttctcttgcattgggtaagaaagacaatgctaaggttgctgaggaaactgaacatcaaaatggacaggcaaatggcatcaccaaaaaaaggattattgatgtcaagaaaagaaaacagtcttccatcagcgaggatcctgcatcgtcaatggatatgacagatgctaatgcaccatctgtttcaaaacaagttgatgaaataaaaaagaaatcaaagaaaaagatgagaaatcaatcaggggaaaataatgagaagcagtccaatataagaacattggatgacgggttggtggttgaatatttgtcaatgggaaacaatgatgcaaaagtggcttctgatggctgcaaggtctatatcaaatatgttggcatgttgaaggatgggaaaattgttgagtctaatgtgctggaaaagttatccgtggatgggatgttggtattcatggtatgcgtgttggcgagaaaagaaagcttacagttccaccttcaatgctctctggcggtaaatcagtgggagaagtacccgaaaattcttcagtcatatatgaaatcgagttagtgaaagtgaaataaagaaaaaatatgtcaggcttttgcatgtgccctatctcagcagctgcaacagttgcaggaattttgttgatatacagatgactcatgctcatgttttgcttccttctggaagaatttatatgtgccactcgtgccacaccataggacatcgagcagtgaactgcagcgggtgctttatccatgcatgccttgactggatacttggttttgcactatctggctacattactttgtaaactgcatacgatggttgaagcactattgtggtctggtgatttgccatatgtttgtgactacttcgcggttcactgctttgaatcatgtttgttttgccaatattgattgagttctgtaatagtttgatcagggtctcttggcttacgtgccagtcttttactgtagaagtggattttttttttccttgttacgtttggcagacgttgaactggtgcaaggcctttaaagtaatggctaatatatcgtccgtgcgtcacgaggatacaaattattcaaaagaatattagagcaaaatgattacttaaaaataaacaatatatattgtcattgatcttaatgtctcaaattctttgtcaacaatcaatagcatgtatatgtattggtgcaaatctcccctccattcccacgtacacgtacatgcctagctaaaattaaattaa

SEQ ID NO: 65477 - DNA, 2016 bp, Zea Mays
aaccccttttctcctatccctgcactccccccccccccccccctgctgccccgcgccgaagcaggtgtggcggcgctgcgagcctgcaaccatctccgcagactccgctgcgactcatctgggctacgacccacgtcaaggctgctagttgcgttcgttggagttgcggcttccgcgaatcccccaatccatcccagtcatggcgttctggggggtggaagtgaagcccgggaagccctacacccacatccatcacgctgaccatggccgcctccgcatttgccaggctacactgggcaactgtgatgctgctgcaaggacggtgctgcaatgcaatgttggcaacaagattcccatcaaactttgtagtctaaatccgaaattggccgagacatgccatctagaggttgagtttgaggaggttgatgatgttatcttctcagtaattggtcatagttcgatacatctctctggatactatgtctgtgcaagcaacaggtctaatgtgggggatgatgaatcagaatcttatggggaagatattgggcactccagcaccgatgaggagcatgataccagtgaggacagctatgaatctgacttcattgatgatcgtgaagttccattatctgagaagtatgggtctggttctatagatgacagtgatgatgagtgcacccaacgatgccacagacaaaaagctgaaaaaacgactcaaaatgctgaaagacggcggcgcttgaagaagcaccaaaaagacaatgctaaggttgctgaggaaactgaacatcaaaatggacaggcaaatggcatcaccaaaaaaaggattattgatgtcaagaaaagaaaacagtcttccatcagcgaggatcctgcatcgtcaatggatatgacagatgctaatgcaccatctgtttcaaaacaagttgatgaaataaaaaagaaatcaaagaaaaagatgagaaatcaatcaggggaaaataatgagaagcagtccaatataagaacattggatgacgggttggtggttgaatatttgtcaatgggaaacaatgatgcaaaagtggcttctgatggctgcaaggtctatatcaaatatgttggcatgttgaaggatgggaaaattgttgagtctaatgttagtgaaaagccttacaagttcaagcttggtgctggaaaagttatccgtggatgggatgttggtattcatggtatgcgtgttggcgagaaaagaaagcttacagttccaccttcaatgctctctggcggtaaatcagtgggagaagtacccgaaaattcttcagtcatatatgaaatcgagttagtgaaagtgaaataaagaaaaaatatgtcaggcttttgcatgtgccctatctcagcagctgcaacagttgcaggaattttgttgatatacagatgactcatgctcatgttttgcttccttctggaagaatttatatgtgccactcgtgccacaccataggacatcgagcagtgaactgcagcgggtgctttatccatgcatgccttgactggatacttggttttgcactatctggctacattactttgtaaactgcatacgatggttgaagcactattgtggtctggtgatttgccatatgtttgtgactacttcgcggttcactgctttgaatcatgtttgttttgccaatattgattgagttctgtaatagtttgatcagggtctcttggcttacgtgccagtcttttactgtagaagtggattttttttttccttgttacgtttggcagacgttgaactggtgcaaggcctttaaagtaatggctaatatatcgtccgtgcgtcacgaggatacaaattattcaaaagaatattagagcaaaatgattacttaaaaataaacaatatatattgtcattgatcttaatgtctcaaattctttgtcaacaatcaatagcatgtatatgtattggtgcaaatctcccctccattcccacgtacacgtacatgcctagctaaaattaaattaa

SEQ ID NO: 65478 - DNA, 2125 bp, Zea Mays
aaccccttttctcctatccctgcactccccccccccccccccctgctgccccgcgccgaagcaggtgtggcggcgctgcgagcctgcaaccatctccgcagactccgctgcgactcatctgggctacgacccacgtcaaggctgctagttgcgttcgttggagttgcggcttccgcgaatcccccaatccatcccagtcatggcgttctggggggtggaagtgaagcccgggaagccctacacccacatccatcacgctgaccatggccgcctccgcatttgccaggctacactgggcaactgtgatgctgctgcaaggacggtgctgcaatgcaatgttggcaacaagattcccatcaaactttgtagtctaaatccgaaattggccgagacatgccatctagagactgtgaagtcatccttaacatgtaactagagaatcttatggggaagatattgggcactccagcaccgatgaggagcatgataccagtgaggacagctatgaatctgacttcattgatgatcgtgaagttccattatctgagaagtatgggtctggttctatagatgacagtgatgatgagtgcacccaacgatgccacagacaaaaagctgaaaaaacgactcaaaatgctgaaagacggcggcgcttgaagaagcaccaagtaggtagcactgattacgatgatgatgatactccagtcatgaaacatgttgcgaagcgctgtgctcctaaaatatctgatagtggtgatgatgacactcctgtcacaaaacctgttgtcaaacgtagagcttcaatatttgatagtgacagtgatgaagatgataatgtacctatttctcttgcattgggtaagaaagacaatgctaaggttgctgaggaaactgaacatcaaaatggacaggcaaatggcatcaccaaaaaaaggattattgatgtcaagaaaagaaaacagtcttccatcagcgaggatcctgcatcgtcaatggatatgacagatgctaatgcaccatctgtttcaaaacaagttgatgaaataaaaaagaaatcaaagaaaaagatgagaaatcaatcaggggaaaataatgagaagcagtccaatataagaacattggatgacgggttggtggttgaatatttgtcaatgggaaacaatgatgcaaaagtggcttctgatggctgcaaggtctatatcaaatatgttggcatgttgaaggatgggaaaattgttgagtctaatgttagtgaaaagccttacaagttcaagcttggtgctggaaaagttatccgtggatgggatgttggtattcatggtatgcgtgttggcgagaaaagaaagcttacagttccaccttcaatgctctctggcggtaaatcagtgggagaagtacccgaaaattcttcagtcatatatgaaatcgagttagtgaaagtgaaataaagaaaaaatatgtcaggcttttgcatgtgccctatctcagcagctgcaacagttgcaggaattttgttgatatacagatgactcatgctcatgttttgcttccttctggaagaatttatatgtgccactcgtgccacaccataggacatcgagcagtgaactgcagcgggtgctttatccatgcatgccttgactggatacttggttttgcactatctggctacattactttgtaaactgcatacgatggttgaagcactattgtggtctggtgatttgccatatgtttgtgactacttcgcggttcactgctttgaatcatgtttgttttgccaatattgattgagttctgtaatagtttgatcagggtctcttggcttacgtgccagtcttttactgtagaagtggattttttttttccttgttacgtttggcagacgttgaactggtgcaaggcctttaaagtaatggctaatatatcgtccgtgcgtcacgaggatacaaattattcaaaagaatattagagcaaaatgattacttaaaaataaacaatatatattgtcattgatcttaatgtctcaaattctttgtcaacaatcaatagcatgtatatgtattggtgcaaatctcccctccattcccacgtacacgtacatgcctagctaaaattaaattaa

SEQ ID NO: 65479 - DNA, 1266 bp, Zea Mays
acaaaaagacaatgctaaggttgctgaggaaactgaacatcaaaatggacaggcaaatggcatcaccaaaaaaaggattattgatgtcaagaaaagaaaacagtcttccatcagcgaggatcctgcatcgtcaatggatatgacagatgctaatgcaccatctgtttcaaaacaagttgatgaaataaaaaagaaatcaaagaaaaagatgagaaatcaatcaggggaaaataatgagaagcagtccaatataagaacattggatgacgggttggtggttgaatatttgtcaatgggaaacaatgatgcaaaagtggcttctgatggctgcaaggtctatatcaaatatgttggcatgttgaaggatgggaaaattgttgagtctaatgttagtgaaaagccttacaagttcaagcttggtgctggaaaagttatccgtggatgggatgttggtattcatggtatgcgtgttggcgagaaaagaaagcttacagttccaccttcaatgctctctggcggtaaatcagtgggagaagtacccgaaaattcttcagtcatatatgaaatcgagttagtgaaagtgaaataaagaaaaaatatgtcaggcttttgcatgtgccctatctcagcagctgcaacagttgcaggaattttgttgatatacagatgactcatgctcatgttttgcttccttctggaagaatttatatgtgccactcgtgccacaccataggacatcgagcagtgaactgcagcgggtgctttatccatgcatgccttgactggatacttggttttgcactatctggctacattactttgtaaactgcatacgatggttgaagcactattgtggtctggtgatttgccatatgtttgtgactacttcgcggttcactgctttgaatcatgtttgttttgccaatattgattgagttctgtaatagtttgatcagggtctcttggcttacgtgccagtcttttactgtagaagtggattttttttttccttgttacgtttggcagacgttgaactggtgcaaggcctttaaagtaatggctaatatatcgtccgtgcgtcacgaggatacaaattattcaaaagaatattagagcaaaatgattacttaaaaataaacaatatatattgtcattgatcttaatgtctcaaattctttgtcaacaatcaatagcatgtatatgtattggtgcaaatctcccctccattcccacgtacacgtacatgcctagctaaaattaaattaa

SEQ ID NO: 65480 - DNA, 1120 bp, Zea Mays
catgccatccggtcccttgtggccttctcctcgcccgctcgttcccaccactctgctctgctctcctcactagtctgctctccccaaaccccacagaaccctaccgtccccgccgcgccgccatggccgccgccggccggccgtggcgcgtgataccgcgtcctctactggagaccgtacttcacaactatgcgctccacccgcgcgtgccacagccgctccttttccacgggccacgcggcgtcggcaagtccacgctactcctccaccgtctcctcccgcggtggtccgaccagccccacgccgtcgcattcatcaacttcctccacccctcgccgagttctcccgccgcagccccgtggtcccttctccccgccgacccagcgtctccccactcgctgcacgacctccgccttcgcctcgagtccgcgcttgagggcctcgcccgcgccgccgtcctctgcggtgctgtgggctctaaggacgtgctcgccgcgctctcccgcaaccacggcgtcagtaccgcgctctcccgcctcttgatccccccggccacacgctcctcggccacctctgtgccagcccgccgctcttcgtcgacctccgttccggcgctctggtcgagggccgtgctcgccgcggtgcacagggacgacaccgcgttctgcattggcgagggggaggcgactagctgctccatggaggagaaggcatacatgcaggaggcaatggcagccttgcgagtggctaaggaggtgcttgggatgcaggaggggtggaggaaggaggcaattagggagatgaacagaactgggcgattctcgcgctcattggccaattcggctactgactggccgtgcctgttgctggatgttctgtcacgtgcggcagaggaggaattcttccagccaaagctgatcctgaacaatgtggatgtgttgaggaaggcaatttgtgaggatgagacgatggtgcctgcagcgatgtaccatgatagcttcatttggagggtgattgcacttggcgccaatgaaaagtgcttgccagttattatgtcgacttcagatggttttacgggttatggaatttctaactgtaaaacaagtactctgctgcattg

SEQ ID NO: 65481 - DNA, 1603 bp, Zea Mays
catgccatccggtcccttgtggccttctcctcgcccgctcgttcccaccactctgctctgctctcctcactagtctgctctccccaaaccccacagaaccctaccgtccccgccgcgccgccatggccgccgccggccggccgtggcgcgtgataccgcgtcctctactggagaccgtacttcacaactatgcgctccacccgcgcgtgccacagccgctccttttccacgggccacgcggcgtcggcaagtccacgctactcctccaccgtctcctcccgcggtggtccgaccagccccacgccgtcgcattcatcaacttcctccacccctcgccgagttctcccgccgcagccccgtggtcccttctccccgccgacccagcgtctccccactcgctgcacgacctccgccttcgcctcgagtccgcgcttgagggcctcgcccgcgccgccgtcctctgcggtgctgtgggctctaaggacgtgctcgccgcgctctcccgcaaccacggcgtcagtaccgcgctctcccgcctcttgatccccccggccacacgctcctcggccacctctgtgccagcccgccgctcttcgtcgacctccgttccggcgctctggtcgagggccgtgctcgccgcggtgcacagggacgacaccgcgttctgcattggcgagggggaggcgactagctgctccatggaggagaaggcatacatgcaggaggcaatggcagccttgcgagtggctaaggaggtgcttgggatgcaggaggggtggaggaaggaggcaattagggagatgaacagaactgggcgattctcgcgctcattggccaattcggctactgactggccgtgcctgttgctggatgttctgtcacgtgcggcagaggaggaattcttccagccaaagctgatcctgaacaatgtggatgtgttgaggaaggcaatttgtgaggatgagacgatggtgcctgcagcgatgtaccatgatagcttcatttggagggtgattgcacttggcgccaatgaaaagtgcttgccagttattatgtcgacttcagatgggtactattcttctcaagcattcgttgattttggttttccgaacatatttatttctcgtgaggtatatataccagaattgaagttgatgcggctgcgctaacaggtagcccaagaaaatacactttcaggatggtctgcacaatgtctttttctctaataattttccatgtggagtactcctactcactctgtatggctgtatctgcagctaggaagggaaatgatgagtcgcggtgagctcatctggactcctgaacatcgctcatcccaatttcgtttccacctccgctgctccgagcacctgacttcaaacttccaagcaaccaactccccattaaacgaagtggcccacagtctaccttccctataataacgaagaaagaatattagaaaaaggacatttagtgacagatagccggccaacttcggtcgcagctcgtccagcctcaccacgagcctggcgttgtacccatggatcagctcgttcgccttctccacgcagcagtacgacacgtggcgcgcaccccaccagtg

SEQ ID NO: 65482 - DNA, 2459 bp, Zea Mays
catgccatccggtcccttgtggccttctcctcgcccgctcgttcccaccactctgctctgctctcctcactagtctgctctccccaaaccccacagaaccctaccgtccccgccgcgccgccatggccgccgccggccggccgtggcgcgtgataccgcgtcctctactggagaccgtacttcacaactatgcgctccacccgcgcgtgccacagccgctccttttccacgggccacgcggcgtcggcaagtccacgctactcctccaccgtctcctcccgcggtggtccgaccagccccacgccgtcgcattcatcaacttcctccacccctcgccgagttctcccgccgcagccccgtggtcccttctccccgccgacccagcgtctccccactcgctgcacgacctccgccttcgcctcgagtccgcgcttgagggcctcgcccgcgccgccgtcctctgcggtgctgtgggctctaaggacgtgctcgccgcgctctcccgcaaccacggcgtcagtaccgcgctctcccgcctcttgatccccccggccacacgctcctcggccacctctgtgccagcccgccgctcttcgtcgacctccgttccggcgctctggtcgagggccgtgctcgccgcggtgcacagggacgacaccgcgttctgcattggcgagggggaggcgactagctgctccatggaggagaaggcatacatgcaggaggcaatggcagccttgcgagtggctaaggaggtgcttgggatgcaggaggggtggaggaaggaggcaattagggagatgaacagaactgggcgattctcgcgctcattggccaattcggctactgactggccgtgcctgttgctggatgttctgtcacgtgcggcagaggaggaattcttccagccaaagctgatcctgaacaatgtggatgtgttgaggaaggcaatttgtgaggatgagacgatggtgcctgcagcgatgtaccatgatagcttcatttggagggtgattgcacttggcgccaatgaaaagtgcttgccagttattatgtcgacttcagatgggtactattcttctcaagcattcgttgattttggttttccgaacatatttatttctcgtgagacatttggttggacgccacaagaagctaagctgcatatggtttctgaattcttcagtgaacaggagttgtagtggaaagttgtcgatgaggttcttgggccaaacccacggcagttatctgagatatatatgctgaagcaaaaggcgaatagcccagaagttcttcatgacagaaatattgaggaaattattgatacatacctggcacacttgcaagtctctgtcgttaatccagccatggagaaggcattaaaaatgctgcaggagtttgcctcagatgtccgtgagggtaaagtaccaaagatcagatcgtcctttggtgcaccctggagacatccacctcgtgatgacaatcctgacttgtcctataaatgggcgaagattcagctaatggattttatccaatcttttgtaaacactgagtttggggtgaactacctagcagatgacagcttggaaatattggatgatcctgctgctgttgccatgatggaggttggtttactgtatcaacaaagagaaccatcctttatgcgaccaatcactcgagggattcagcgttgtcttgccagatgagattacaattgaacattcaagaaacactagcattcttttggcaacgtttgatacggggtcgaagctaccgccacttgatgaaagaagttggctacaaataaagaggtgatttccatggactaacattttgacatgatatctgcataagaatgtttcaagggtacaataattttctggccactcattttctcatctgtttaatacagccagcgtggtctggaagtttggaatcaaatcaatctcagatagaggtggatgaccagttttacatgttctgttgctgacgaaaagaatcaatcattttcttaattaataagcgaggaatgcaaatgtttattgtttggactagagtgaagttgcatcagaagttgatgctgaagcctgaaggcactcgaaaaatgttgcagatgcatttctacctgtatggcaatatttagggagtcgaatatctgctgtatgtcaatgagaaaatgggttttcacgtattgcaactgcatgagttaatcttctgggtttccatgtctctggtaaccaacccgtacattggatagtggcccggcaccgcgtctcatacttgctcttccgatcaactgtacatttgtactggaccttgctctgtgattcaacagcacgggtcatgcacggtcgattcgagctgaattatttaaggatccaaacggggccttactttttttttggagagtaataattcaattgaatcagccaatcaaaagcgcttattcagattccagt

SEQ ID NO: 65483 - DNA, 2459 bp, Zea Mays
catgccatccggtcccttgtggccttctcctcgcccgctcgttcccaccactctgctctgctctcctcactagtctgctctccccaaaccccacagaaccctaccgtccccgccgcgccgccatggccgccgccggccggccgtggcgcgtgataccgcgtcctctactggagaccgtacttcacaactatgcgctccacccgcgcgtgccacagccgctccttttccacgggccacgcggcgtcggcaagtccacgctactcctccaccgtctcctcccgcggtggtccgaccagccccacgccgtcgcattcatcaacttcctccacccctcgccgagttctcccgccgcagccccgtggtcccttctccccgccgacccagcgtctccccactcgctgcacgacctccgccttcgcctcgagtccgcgcttgagggcctcgcccgcgccgccgtcctctgcggtgctgtgggctctaaggacgtgctcgccgcgctctcccgcaaccacggcgtcagtaccgcgctctcccgcctcttgatccccccggccacacgctcctcggccacctctgtgccagcccgccgctcttcgtcgacctccgttccggcgctctggtcgagggccgtgctcgccgcggtgcacagggacgacaccgcgttctgcattggcgagggggaggcgactagctgctccatggaggagaaggcatacatgcaggaggcaatggcagccttgcgagtggctaaggaggtgcttgggatgcaggaggggtggaggaaggaggcaattagggagatgaacagaactgggcgattctcgcgctcattggccaattcggctactgactggccgtgcctgttgctggatgttctgtcacgtgcggcagaggaggaattcttccagccaaagctgatcctgaacaatgtggatgtgttgaggaaggcaatttgtgaggatgagacgatggtgcctgcagcgatgtaccatgatagcttcatttggagggtgattgcacttggcgccaatgaaaagtgcttgccagttattatgtcgacttcagatgggtactattcttctcaagcattcgttgattttggttttccgaacatatttatttctcgtgagacatttggttggacgccacaagaagctaagctgcatatggtttctgaattcttcagtgaacaggagttgtagtggaaagttgtcgatgaggttcttgggccaaacccacggcagttatctgagatatatatgctgaagcaaaaggcgaatagcccagaagttcttcatgacagaaatattgaggaaattattgatacatacctggcacacttgcaagtctctgtcgttaatccagccatggagaaggcattaaaaatgctgcaggagtttgcctcagatgtccgtgagggtaaagtaccaaagatcagatcgtcctttggtgcaccctggagacatccacctcgtgatgacaatcctgacttgtcctataaatgggcgaagattcagctaatggattttatccaatcttttgtaaacactgagtttggggtgaactacctagcagatgacagcttggaaatattggatgatcctgctgctgttgccatgatggaggttggtttactgtatcaacaaagagaaccatcctttatgcgaccaatcactcgagggattcagcgttgtcttgccagatggcttgctgaacagagattacaattgaacattcaagaaacactagcattcttttggcaacgtttgatacggggtcgaagctaccgccacttgatgaaagaagttggctacaaataaagaggtgatttccatggactaacattttgacatgatatctgcataagaatgtttcaagggtacaataattttctggccactcattttctcatccagcgtggtctggaagtttggaatcaaatcaatctcagatagaggtggatgaccagttttacatgttctgttgctgacgaaaagaatcaatcattttcttaattaataagcgaggaatgcaaatgtttattgtttggactagagtgaagttgcatcagaagttgatgctgaagcctgaaggcactcgaaaaatgttgcagatgcatttctacctgtatggcaatatttagggagtcgaatatctgctgtatgtcaatgagaaaatgggttttcacgtattgcaactgcatgagttaatcttctgggtttccatgtctctggtaaccaacccgtacattggatagtggcccggcaccgcgtctcatacttgctcttccgatcaactgtacatttgtactggaccttgctctgtgattcaacagcacgggtcatgcacggtcgattcgagctgaattatttaaggatccaaacggggccttactttttttttggagagtaataattcaattgaatcagccaatcaaaagcgcttattcagattccagt

SEQ ID NO: 65484 - DNA, 3046 bp, Zea Mays
catgccatccggtcccttgtggccttctcctcgcccgctcgttcccaccactctgctctgctctcctcactagtctgctctccccaaaccccacagaaccctaccgtccccgccgcgccgccatggccgccgccggccggccgtggcgcgtgataccgcgtcctctactggagaccgtacttcacaactatgcgctccacccgcgcgtgccacagccgctccttttccacgggccacgcggcgtcggcaagtccacgctactcctccaccgtctcctcccgcggtggtccgaccagccccacgccgtcgcattcatcaacttcctccacccctcgccgagttctcccgccgcagccccgtggtcccttctccccgccgacccagcgtctccccactcgctgcacgacctccgccttcgcctcgagtccgcgcttgagggcctcgcccgcgccgccgtcctctgcggtgctgtgggctctaaggacgtgctcgccgcgctctcccgcaaccacggcgtcagtaccgcgctctcccgcctcttgatccccccggccacacgctcctcggccacctctgtgccagcccgccgctcttcgtcgacctccgttccggcgctctggtcgagggccgtgctcgccgcggtgcacagggacgacaccgcgttctgcattggcgagggggaggcgactagctgctccatggaggagaaggcatacatgcaggaggcaatggcagccttgcgagtggctaaggaggtgcttgggatgcaggaggggtggaggaaggaggcaattagggagatgaacagaactgggcgattctcgcgctcattggccaattcggctactgactggccgtgcctgttgctggatgttctgtcacgtgcggcagaggaggaattcttccagccaaagctgatcctgaacaatgtggatgtgttgaggaaggcaatttgtgaggatgagacgatggtgcctgcagcgatgtaccatgatagcttcatttggagggtgattgcacttggcgccaatgaaaagtgcttgccagttattatgtcgacttcagatgggtactattcttctcaagcattcgttgattttggttttccgaacatatttatttctcgtgagacatttggttggacgccacaagaagctaagctgcatatggtttctgaattcttcagtgaacaggagttgtagtggaaagttgtcgatgaggttcttgggccaaacccacggcagttatctgagatatatatgctgaagcaaaaggcgaatagcccagagtaagtaacttgcatccgtagtttgtcattgaacttcatttgccttaccccatgttgacagtatttatcccaaaatatgattcacttttgtttctgatcttatttgggtaagatgacttcttctggcctcctgttattaataaatagaagggaaaaaaccctctatgcttattgcttttgtagaccacacatattttcttgaaaatcactagatggatgagttgatcaattccaggtctttttcccctctgaacaaattctataagttcatcagtttcacttcgtttccctgttaagtttgaactaatttttaatatgtattagggtttgtccactatgccttcttagtaaatccttctcgtttagttatgctttatatacagggttcaaagtgttcgtttctgaaacatttgctattttttctatattcaattatgtggtttgcagtaaagtctcagtaagcagcacaattttattatatttacaagttttaaaatatacatgatagcagcgcccgccttagttttattaactgcacacgctgcatattgctgtgttgcctgtgtttaatatctgttgcattacagagttcttcatgacagaaatattgaggaaattattgatacatacctggcacacttgcaagtctctgtcgttaatccagccatggagaaggcattaaaaatgctgcaggagtttgcctcagatgtccgtgagggtaaagtaccaaagatcagatcgtcctttggtgcaccctggagacatccacctcgtgatgacaatcctgacttgtcctataaatgggcgaagattcagctaatggattttatccaatcttttgtaaacactgagtttggggtgaactacctagcagatgacagcttggaaatattggatgatcctgctgctgttgccatgatggaggttggtttactgtatcaacaaagagaaccatcctttatgcgaccaatcactcgagggattcagcgttgtcttgccagatgagattacaattgaacattcaagaaacactagcattcttttggcaacgtttgatacggggtcgaagctaccgccacttgatgaaagaagttggctacaaataaagaggtgatttccatggactaacattttgacatgatatctgcataagaatgtttcaagggtacaataattttctggccactcattttctcatctgtttaatacagccagcgtggtctggaagtttggaatcaaatcaatctcagatagaggtggatgaccagttttacatgttctgttgctgacgaaaagaatcaatcattttcttaattaataagcgaggaatgcaaatgtttattgtttggactagagtgaagttgcatcagaagttgatgctgaagcctgaaggcactcgaaaaatgttgcagatgcatttctacctgtatggcaatatttagggagtcgaatatctgctgtatgtcaatgagaaaatgggttttcacgtattgcaactgcatgagttaatcttctgggtttccatgtctctggtaaccaacccgtacattggatagtggcccggcaccgcgtctcatacttgctcttccgatcaactgtacatttgtactggaccttgctctgtgattcaacagcacgggtcatgcacggtcgattcgagctgaattatttaaggatccaaacggggccttactttttttttggagagtaataattcaattgaatcagccaatcaaaagcgcttattcagattccagt

SEQ ID NO: 65485 - DNA, 2453 bp, Zea Mays
catgccatccggtcccttgtggccttctcctcgcccgctcgttcccaccactctgctctgctctcctcactagtctgctctccccaaaccccacagaaccctaccgtccccgccgcgccgccatggccgccgccggccggccgtggcgcgtgataccgcgtcctctactggagaccgtacttcacaactatgcgctccacccgcgcgtgccacagccgctccttttccacgggccacgcggcgtcggcaagtccacgctactcctccaccgtctcctcccgcggtggtccgaccagccccacgccgtcgcattcatcaacttcctccacccctcgccgagttctcccgccgcagccccgtggtcccttctccccgccgacccagcgtctccccactcgctgcacgacctccgccttcgcctcgagtccgcgcttgagggcctcgcccgcgccgccgtcctctgcggtgctgtgggctctaaggacgtgctcgccgcgctctcccgcaaccacggcgtcagtaccgcgctctcccgcctcttgatccccccggccacacgctcctcggccacctctgtgccagcccgccgctcttcgtcgacctccgttccggcgctctggtcgagggccgtgctcgccgcggtgcacagggacgacaccgcgttctgcattggcgagggggaggcgactagctgctccatggaggagaaggcatacatgcaggaggcaatggcagccttgcgagtggctaaggaggtgcttgggatgcaggaggggtggaggaaggaggcaattagggagatgaacagaactgggcgattctcgcgctcattggccaattcggctactgactggccgtgcctgttgctggatgttctgtcacgtgcggcagaggaggaattcttccagccaaagctgatcctgaacaatgtggatgtgttgaggaaggcaatttgtgaggatgagacgatggtgcctgcagcgatgtaccatgatagcttcatttggagggtgattgcacttggcgccaatgaaaagtgcttgccagttattatgtcgacttcagatgggtactattcttctcaagcattcgttgattttggttttccgaacatatttatttctcgtgagacatttggttggacgccacaagaagctaagctgcatatggtttctgaattcttcagtgaacaggagtggaaagttgtcgatgaggttcttgggccaaacccacggcagttatctgagatatatatgctgaagcaaaaggcgaatagcccagaagttcttcatgacagaaatattgaggaaattattgatacatacctggcacacttgcaagtctctgtcgttaatccagccatggagaaggcattaaaaatgctgcaggagtttgcctcagatgtccgtgagggtaaagtaccaaagatcagatcgtcctttggtgcaccctggagacatccacctcgtgatgacaatcctgacttgtcctataaatgggcgaagattcagctaatggattttatccaatcttttgtaaacactgagtttggggtgaactacctagcagatgacagcttggaaatattggatgatcctgctgctgttgccatgatggaggttggtttactgtatcaacaaagagaaccatcctttatgcgaccaatcactcgagggattcagcgttgtcttgccagatgagattacaattgaacattcaagaaacactagcattcttttggcaacgtttgatacggggtcgaagctaccgccacttgatgaaagaagttggctacaaataaagaggtgatttccatggactaacattttgacatgatatctgcataagaatgtttcaagggtacaataattttctggccactcattttctcatctgtttaatacagccagcgtggtctggaagtttggaatcaaatcaatctcagatagaggtggatgaccagttttacatgttctgttgctgacgaaaagaatcaatcattttcttaattaataagcgaggaatgcaaatgtttattgtttggactagagtgaagttgcatcagaagttgatgctgaagcctgaaggcactcgaaaaatgttgcagatgcatttctacctgtatggcaatatttagggagtcgaatatctgctgtatgtcaatgagaaaatgggttttcacgtattgcaactgcatgagttaatcttctgggtttccatgtctctggtaaccaacccgtacattggatagtggcccggcaccgcgtctcatacttgctcttccgatcaactgtacatttgtactggaccttgctctgtgattcaacagcacgggtcatgcacggtcgattcgagctgaattatttaaggatccaaacggggccttactttttttttggagagtaataattcaattgaatcagccaatcaaaagcgcttattcagattccagt

SEQ ID NO: 65486 - DNA, 2522 bp, Zea Mays
catgccatccggtcccttgtggccttctcctcgcccgctcgttcccaccactctgctctgctctcctcactagtctgctctccccaaaccccacagaaccctaccgtccccgccgcgccgccatggccgccgccggccggccgtggcgcgtgataccgcgtcctctactggagaccgtacttcacaactatgcgctccacccgcgcgtgccacagccgctccttttccacgggccacgcggcgtcggcaagtccacgctactcctccaccgtctcctcccgcggtggtccgaccagccccacgccgtcgcattcatcaacttcctccacccctcgccgagttctcccgccgcagccccgtggtcccttctccccgccgacccagcgtctccccactcgctgcacgacctccgccttcgcctcgagtccgcgcttgagggcctcgcccgcgccgccgtcctctgcggtgctgtgggctctaaggacgtgctcgccgcgctctcccgcaaccacggcgtcagtaccgcgctctcccgcctcttgatccccccggccacacgctcctcggccacctctgtgccagcccgccgctcttcgtcgacctccgttccggcgctctggtcgagggccgtgctcgccgcggtgcacagggacgacaccgcgttctgcattggcgagggggaggcgactagctgctccatggaggagaaggcatacatgcaggaggcaatggcagccttgcgagtggctaaggaggtgcttgggatgcaggaggggtggaggaaggaggcaattagggagatgaacagaactgggcgattctcgcgctcattggccaattcggctactgactggccgtgcctgttgctggatgttctgtcacgtgcggcagaggaggaattcttccagccaaagctgatcctgaacaatgtggatgtgttgaggaaggcaatttgtgaggatgagacgatggtgcctgcagcgatgtaccatgatagcttcatttggagggtgattgcacttggcgccaatgaaaagtgcttgccagttattatgtcgacttcagatgggtactattcttctcaagcattcgttgattttggttttccgaacatatttatttctcgtgagacatttggttggacgccacaagaagctaagctgcatatggtttctgaattcttcagtgaacaggagtggaaagttgtcgatgaggttcttgggccaaacccacggcagttatctgagatatatatgctgaagcaaaaggcgaatagcccagaagttcttcatgacagaaatattgaggaaattattgatacatacctggcacacttgcaagtctctgtcgttaatccagccatggagaaggcattaaaaatgctgcaggagtttgcctcagatgtccgtgagggtaaagtaccaaagatcagatcgtcctttggtgcaccctggagacatccacctcgtgatgacaatcctgacttgtcctataaatgggcgaagattcagctaatggattttatccaatcttttgtaaacactgagtttggggtgaactacctagcagatgacagcttggaaatattggatgatcctgctgctgttgccatgatggaggttggtttactgtatcaacaaagagaaccatcctttatgcgaccaatcactcgagggattcagcgttgtcttgccagatggtttgttcttctactcaagtattgtgacaaatggttgtgtgccttgatattgatcagcatttcatctaggcttgctgaacagagattacaattgaacattcaagaaacactagcattcttttggcaacgtttgatacggggtcgaagctaccgccacttgatgaaagaagttggctacaaataaagaggtgatttccatggactaacattttgacatgatatctgcataagaatgtttcaagggtacaataattttctggccactcattttctcatccagcgtggtctggaagtttggaatcaaatcaatctcagatagaggtggatgaccagttttacatgttctgttgctgacgaaaagaatcaatcattttcttaattaataagcgaggaatgcaaatgtttattgtttggactagagtgaagttgcatcagaagttgatgctgaagcctgaaggcactcgaaaaatgttgcagatgcatttctacctgtatggcaatatttagggagtcgaatatctgctgtatgtcaatgagaaaatgggttttcacgtattgcaactgcatgagttaatcttctgggtttccatgtctctggtaaccaacccgtacattggatagtggcccggcaccgcgtctcatacttgctcttccgatcaactgtacatttgtactggaccttgctctgtgattcaacagcacgggtcatgcacggtcgattcgagctgaattatttaaggatccaaacggggccttactttttttttggagagtaataattcaattgaatcagccaatcaaaagcgcttattcagattccagt

SEQ ID NO: 65487 - DNA, 1741 bp, Zea Mays
ccaagatccacaaccagagctcaccattgggtttcctgagggagaagcgccaacaaggaataagtcattcaaaataatataattcatcatttgcaccattacacattccgagatgggacaacaaattattcaaaggtccaaaggaacgcatcatcaaagatgttgagaaaaaatttatctatagtagtgagacaaaatggtctactcgagattggattcttaagacagtgaataaaaggtggagagactacaagtcagacttgaagaaacaatactacaatccagataagaggtcttttgaccagattgaaaaggatgtccctgatggtgtgaatgaaaatcaatggagttttctgttaggcatatggtgcagtgaagcacatcagaaattatgccggacaaatgcggaatctggaaagaagcagaggcatccacacactagcggtaggaaaagccatgctagacttaaaaaggagatggaagacaagaagaaaggaagcatcactaaaattgatctttgggacgagtctcataagaagaggaatgggaactatgtcaatcaaaatgtgcaaacacttatgggtaaggccttcgatgaattagagaacaggagaaaggacaaggggacactttctactagtgattatgatgatgtgtttgagaatgtcataagaaaagacttgaacattcgtgggtactatgatgatacgtattggagcaatggaacttattcacatgttcaatcagaggagaataaaatgattagaagggacctagagcttgctatttctgggtttaggaacattagagcattcctagaaaaaaagtttccagaagaggaattgctaagcacaattctagctactggatctagaagcaccacacaggttgatactaaagacaatgaaaatgtctcattgcaatatgataatgtagaacgatccagttatgagaaatcaccttcaccatacaatgaacagatttatactagagattataatattgccaaggtgggttgctctgatcattcagtaccaaatgacaacatagctttcagggaatcacaagttacaaggtctagtgacttgaaccaggaactcaacaatggatcactatctccagataaagaaatgtctgataaggaaactcaaagcaagcaacaacaacaaagcaaattgcaacagaataaacagaagactgtcttgttgtactcaacaaggaaaagaaaactaggccaagttgttgctgttggtaatcttatatctagagatactactcatgaaattggaggaactgtacttggggatggatattatgctgttgcggttcattatcttaacaatgttgaagatgaaagattacctcgaccacacggagatcttaaaactttggaggatgctgtgggcatgtgtgttgcttggcctcgcacacatcttaaaagagtgaagccaactactgagaagcgcacttgaatggttagaagactgaagatgcaactaatgaatgagcaagtgttatagtggagagtagttctaggatcaaaagttctagttgtcaatctacttgtttaattgtgttaggaacctcattttattcattcttgtatgtctaatctacctcaagaccacttcgtttggattgaaaatacttatgtattgttgcttacacatgaagcatttaattgatctgttatatatatgaaccttgtgtcttgtatatatatgtgcacaaattgagtgtt

SEQ ID NO: 65488 - DNA, 478 bp, Zea Mays
cttgtcgtggctaggccgactcaagcaggcattggtccatattgtgcctatctcatatcccctatagatcagtgaacctcaccaagctgttttccctaacgctactatcatgcttttgctggaacaggggcatgtcgtcgtgatctggtgctatgggcagctccaccacataccatacaactcacgctttcctcaatcaacctcgcgcgagcaccgtgatctataacacttagaagaagtggtgttttaagaaggagtctactccagtgtctgttgatcaagtggaagaaccatttaactaggtatttaatatagggatctagaacctcttcactgcaataaggcaagtccgactggatttgccccttccttgtatttttagaaagacttttatacactttaagtctagtgaaatgtgcattaagtttataagagttgcttggaaactatttgatgcattgactaccttgatatccat

SEQ ID NO: 65489 - DNA, 1329 bp, Zea Mays
cttggttctgggctgtctagattaatttaggcccaacactattcactactttacctttttcttttgtctgaaagcttggatgttgtcccaaaaatagtagaaaatttaaaaaatcataggacaaattttgttggatgtctaaaatcaagagctctctggtaaagttggtgttaggatttttagatcagttagcaaattttaagtgaagttaaggtgctcttagaaggactattggaactttataaatttgatttgggtaccaaaaatcatgggaatttttggagaagcttgttatgagaagttgaacagttggtaaaagtttggggatatttggaagcttgttgctctagaaaccttgtaagccccaaaataaaatggttaatccctaatcaggtgtgggttagtggtttggaaacgagatgagtttatttagtgagagttggtctttagaggaaggaaccaaaggaagattaatccctacgtaaattcaatttggccacttttatcaagtgctaggttgtgtagaagtatgtgtatacttgtcatgtacttatttaggagtgtttatgttccccacctctccttgtgagagtttgcatgtcatatcattacataagcattcatgtatttgtaattgacttgtagaacacttagaagaagtggtgttttaagaaggagtctactccagtgtctgttgatcaagtggaagaaccatttaactaggtatttaatatagggatctagaacctcttcactgcaataaggcaagtccgactggatttgccccttccttgtatttttagaaagacttttatacactttaagtctagtgaaatgtgcattaagtttataagagttgcttggaaactatttgatgcattgactaccttgatatccattcctgttatagatacttctttggaagtatcaaatattgtttacaaaaattgcttagccctacctagaggtaagtcttgcaaatagagttggtcatttgcactaatgcctagctcagggtttatcctgaggaaggatggctctacctacaagaatattttcaccaggatcatggggagatctaatgcaaggttacttgtgacgttttaatcatcctaaggtacataaatatgtcctaagggtgaaagtacttaaatcgagacttaggctaggaacaggtgatgttctgcctaggttgattaaggattatagggaatacaggcttgatgatcgaggactatattaactagccacatgccccgatatgggacaggttaagcctaatattagcttgaccaatacaagaaaggctaccacgcaacgggagtggag

SEQ ID NO: 65490 - DNA, 3761 bp, Zea Mays
gcggctattttgagggcttctggcgggcttcatcccagcaaaatcgccactcaacctttcgggttcaagcttccaccccaaaggaagcggcgcgtggtcgctggcgatggcggcggggactatctcccgcatccggctagagaacttcatgtgccactccagtctccacatcgagctcgacaagcacgtgaatttcatcaccggccagaacggaagcgggaagagcgccatccttacggctctctgcgtcgcctttggctgccgtgctaagaacacccagcgcgccgcctccctcaaggatttcatcaagaccggctgcagctatgcagcaattactgtggatattaataaccatggggaagatgcgtttaagcctgaagtatacggggacactattatattggaacgcaggattactgaatcagctagttctacagttttgaaggatcaacatgggaggaaggtggcacatcgcaaggatgacctaaatgaaataattgaacattttaacattgaagttgaaaacccttgtgtaattatgagtcaagacaaaagcagagagtttttacattcaggaaatgacaaggataagttcaagttcttttttaaggctactcttcttcagcaagtgaatgacttgcttgctacaataagagacaacctgaacattgcggcctctatagttgaagaactggaagcgtcaattaggccagcgcttagagaacttgatgagatccaggagaagataaagaatatggaacacattgaagaaatagcacatgagatcgaaaatctgaataaaaagttggcttgggtatgggtttatgatgttgacaagaagattgggggacaacaagagtatcttgagaaactcaaagagcgtatccctgcgtgccaagaacgaattgatcgaaatatagccattatagaggaactgaggaaagaatttattgtgaagaaagaaaattttaaatcctttttggagaagacacaagaagcaaggaggatgaaggaaaaaatggatcatgacattcgtgaggctgtgaaactgaagatggatctagagaaagagcatgctcgtggaaggcaaacattgaataaaatgaatgcccgtgtggtacaactagaggagcaagttcatgaatttgagctgcagcatatgcaacaaactcaggctgaagtatctcaagttgaggatagcatacgggaattacagcaggagataaactctgcccatttaaatgctacaaggttaagtgagaaagaaaaaaaatcatctgaagaactacgggccattattaaaaatatcggtgacattggaaaagagatagaagaagatggacgtaggatcaatcaactgagaagtcaaattgatgatatacgacggcgccaacaaaacaaactaacggccttcggaggagatagagttccgagcctctataaatcagtagagagacacatgagtaaattcaaatgccctcctattggtccaataggatatcatctgcaactggcaagcgattcctggtctgttgcaattgaatatgcattagggaggttattagatgctttcattgtctcatgtcataaggattcactcgttttacgagaatgtgcaaaagaagtgaactaccgcaaccttcaaattattatatatgacttcactaaaccacgatcatttgcttccgtcaacgccacacccaacagtactttcagttattcattcggaaattcctactatattaaatgtgttagtggatcagggccatgcagagagacaggtcctagttcgggatgatgaaacgggaaagtctgttgcatttgatcagaggatacggaatctgaaggaagtatatacttctgatggttgcaaaatgttttgtagaggttctgttcagaccattcttcctgcaaataggaactggagagctggtcgtttgtgcacttctctagaagaaaaaataactgaaatggagcaggaagctactgaaattaagcaaataaactcagagaggttggatcgcaaaaggaaattatttgctgatcgagacagcatcgatttagaattgagacagttaaagagaaaaagagaagatgaggagttgcatgtggagcgtaaaaaggcacagttggttgataccaagaaaatttctattgacaatagtcatgcagctgctgtggatacctctgagctagtagttgaaatgatgcaagtgaaggaagacattgagaaccaagaattagttgtgcagaaaattaatttgaaacttacagatgctttgcaagaagagaataatagaagagcgtcttacaaggacttcattgagtctgtacatgctgaaatggggtctattagcgatgctgagcgtgaattgcagcttgttgaagaaaaaatacatgatgctgagcaggagaaggctcactatgaacgtgttatggaaacaaaggttttaggtcctattacagcgactgaatcagagttgacacgtcttcaacaacttcatcaggagtattttgaaaaggcttcaacaatttgtgccgagagtgaagtggaagctcttgggggtgttgaaggatcaaccctagaacaattaagtgctcgtattaagaaattaaaacagaaatttcagcaagaaagcagaagatatactgaaaccattgatgatctgagagcactgcatgacaagaagggacagaagatcctgagaaaacaacaaatgtattcaggttttagggacaaattaaatgcatgtcaaaaggcactggacttgagatggaagaagtttcagagaaatgcgggtcttttgaagcgtcagcttacgtggctgttcaacgagcacctgggaaagaaaggtatcagtgggcacatcaatgtagattataagaatgaagttctgtctgttgagctgacaatgcctcaagatgcgtctcgtgataccattagagacactagaggactttcaggtggagaacgatctttctcaaccctttgcttcaccttgtctcttcatggaatggccgaagcaccatttagggccatggatgagtttgatgtattcatggatgcggtgagccgcaaaataagcttagacaccctagtagattttgctgtcgcacaagggtctcaatggatatttataacccctcatgatatcagcatggtgaaggctggggataggatcaagaagcagcaaatggctgctcctcgcggttgacagtgttgagacccctgacccttgtaaatgaagcctgagagccttgggcatgggagtgaatctgcttggaactactacttttatattttgtttgtagtttgtacatagcacattttgaggcaatgggcgtgtccctggtcaagagtttgttcctgggcagcatcagcagttctgtagttgcattgctgtttggacagggtcccactgtgctatgttaaagagtggttgatgcatgtcttttgaaataattgggccttgaacatactgcggatgtaaatgaaagaattgcggctgcagatgtcgatgaaggtagccccgacttggactctgctgattgcaggaacctgagttgatgaaggttctgaagttatgctatttttttcatgaaaaaatatgtgggtcccactcaaaactttgacctaactaaatatatccaaacaattgattgggtctgtcttaattgctagtttcttttgtacgagatgcggcagattctatacatgcatggctgatatcatgttctacagtttgacttgtttcccaaat

SEQ ID NO: 65491 - DNA, 2351 bp, Zea Mays
cgggcttcatcccagcaaaatcgccactcaacctttcgggttcaagcttccaccccaaaggaagcggcgcgtggtcgctggcgatggcggcggggactatctcccgcatccggctagagaacttcatgtgccactccagtctccacatcgagctcgacaagcacgtgaatttcatcaccggccagaacggaagcgggaagagcgccatccttacggctctctgcgtcgcctttggctgccgtgctaagaacacccagcgcgccgcctccctcaaggatttcatcaagaccggctgcagctatgcagcaattactgtggatattaataaccatggggaagatgcgtttaagcctgaagtatacggggacactattatattggaacgcaggattactgaatcagctagttctacagttttgaaggatcaacatgggaggaaggtggcacatcgcaaggatgacctaaatgaaataattgaacattttaacattgaagttgaaaacccttgtgtaattatgagtcaagacaaaagcagagagtttttacattcaggaaatgacaaggataagttcaagttcttttttaaggctactcttcttcagcaagtgaatgacttgcttgctacaataagagacaacctgaacattgcggcctctatagttgaagaactggaagcgtcaattaggccagcgcttagagaacttgatgagatccaggagaagataaagaatatggaacacattgaagaaatagcacatgagatcgaaaatctgaataaaaagttggcttgggtatgggtttatgatgttgacaagaagattgggggacaacaagagtatcttgagaaactcaaagagcgtatccctgcgtgccaagaacgaattgatcgaaatatagccattatagaggaactgaggaaagaatttattgtgaagaaagaaaattttaaatcctttttggagaagacacaagaagcaaggaggatgaaggaaaaaatggatcatgacattcgtgaggctgtgaaactgaagatggatctagagaaagagcatgctcgtggaaggcaaacattgaataaaatgaatgcccgtgtggtacaactagaggagcaagttcatgaatttgagctgcagcatatgcaacaaactcaggctgaagtatctcaagttgaggatagcatacgggaattacagcaggagataaactctgcccatttaaatgctacaaggttaagtgagaaagaaaaaaaatcatctgaagaactacgggccattattaaaaatatcggtgacattggaaaagagatagaagaagatggacgtaggatcaatcaactgagaagtcaaattgatgatatacgacggcgccaacaaaacaaactaacggccttcggaggagatagagttccgagcctctataaatcagtagagagacacatgagtaaattcaaatgccctcctattggtccaataggatatcatctgcaactggcaagcgattcctggtctgttgcaattgaatatgcattagggaggttattagatgctttcattgtctcatgtcataaggattcactcgttttacgagaatgtgcaaaagaagtgaactaccgcaaccttcaaattattatatatgacttcactaaaccacgggttgacattccagatcatttgcttccgtcaacgccacacccaacagtactttcagttattcattcggaaattcctactatattaaatgtgttagtggatcagggccatgcagagagacaggtcctagttcgggatgatgaaacgggaaagtctgttgcatttgatcagaggatacggaatctgaaggaagtatatacttctgatggttgcaaaatgttttgtagaggttctgttcagaccattcttcctgcaaataggaactggagagctggtcgtttgtgcacttctctagaagaaaaaataactgaaatggagcaggaagctactgaaattaagcaaataaactcagagaggttggatcgcaaaaggaaattatttgctgatcgagacagcatcgatttagaattgagacagttaaagagaaaaagagaagatgaggagttgcatgtggagcgtaaaaaggcacagttggttgataccaagaaaatttctattgacaatagtcatgcagctgctgtggatacctctgagctagtagttgaaatgatgcaagtgaaggaagacattgagaaccaagaattagttgtgcagaaaattaatttgaaacttacagatgctttgcaagaagagaataatagaagagcgtcttacaaggacttcattgggccaaccaacagatgtaatccacaccatgtattt

SEQ ID NO: 65492 - DNA, 3731 bp, Zea Mays
ccagcaaaatcgccactcaacctttcgggttcaagcttccaccccaaaggaagcggcgcgtggtcgctggcgatggcggcggggactatctcccgcatccggctagagaacttcatgtgccactccagtctccacatcgagctcgacaagcacgtgaatttcatcaccggccagaacggaagcgggaagagcgccatccttacggctctctgcgtcgcctttggctgccgtgctaagaacacccagcgcgccgcctccctcaaggatttcatcaagaccggctgcagctatgcagcaattactgtggatattaataaccatggggaagatgcgtttaagcctgaagtatacggggacactattatattggaacgcaggattactgaatcagctagttctacagttttgaaggatcaacatgggaggaaggtggcacatcgcaaggatgacctaaatgaaataattgaacattttaacattgaagttgaaaacccttgtgtaattatgagtcaagacaaaagcagagagtttttacattcaggaaatgacaaggataagttcaagttcttttttaaggctactcttcttcagcaagtgaatgacttgcttgctacaataagagacaacctgaacattgcggcctctatagttgaagaactggaagcgtcaattaggccagcgcttagagaacttgatgagatccaggagaagataaagaatatggaacacattgaagaaatagcacatgagatcgaaaatctgaataaaaagttggcttgggtatgggtttatgatgttgacaagaagattgggggacaacaagagtatcttgagaaactcaaagagcgtatccctgcgtgccaagaacgaattgatcgaaatatagccattatagaggaactgaggaaagaatttattgtgaagaaagaaaattttaaatcctttttggagaagacacaagaagcaaggaggatgaaggaaaaaatggatcatgacattcgtgaggctgtgaaactgaagatggatctagagaaagagcatgctcgtggaaggcaaacattgaataaaatgaatgcccgtgtggtacaactagaggagcaagttcatgaatttgagctgcagcatatgcaacaaactcaggctgaagtatctcaagttgaggatagcatacgggaattacagcaggagataaactctgcccatttaaatgctacaaggttaagtgagaaagaaaaaaaatcatctgaagaactacgggccattattaaaaatatcggtgacattggaaaagagatagaagaagatggacgtaggatcaatcaactgagaagtcaaattgatgatatacgacggcgccaacaaaacaaactaacggccttcggaggagatagagttccgagcctctataaatcagtagagagacacatgagtaaattcaaatgccctcctattggtccaataggatatcatctgcaactggcaagcgattcctggtctgttgcaattgaatatgcattagggaggttattagatgctttcattgtctcatgtcataaggattcactcgttttacgagaatgtgcaaaagaagtgaactaccgcaaccttcaaattattatatatgacttcactaaaccacgggttgacattccagatcatttgcttccgtcaacgccacacccaacagtactttcagttattcattcggaaattcctactatattaaatgtgttagtggatcagagagacaggtcctagttcgggatgatgaaacgggaaagtctgttgcatttgatcagaggatacggaatctgaaggaagtatatacttctgatggttgcaaaatgttttgtagaggttctgttcagaccattcttcctgcaaataggaactggagagctggtcgtttgtgcacttctctagaagaaaaaataactgaaatggagcaggaagctactgaaattaagcaaataaactcagagaggttggatcgcaaaaggaaattatttgctgatcgagacagcatcgatttagaattgagacagttaaagagaaaaagagaagatgaggagttgcatgtggagcgtaaaaaggcacagttggttgataccaagaaaatttctattgacaatagtcatgcagctgctgtggatacctctgagctagtagttgaaatgatgcaagtgaaggaagacattgagaaccaagaattagttgtgcagaaaattaatttgaaacttacagatgctttgcaagaagagaataatagaagagcgtcttacaaggacttcattgagtctgtacatgctgaaatggggtctattagcgatgctgagcgtgaattgcagcttgttgaagaaaaaatacatgatgctgagcaggagaaggctcactatgaacgtgttatggaaacaaaggttttaggtcctattacagcgactgaatcagagttgacacgtcttcaacaacttcatcaggagtattttgaaaaggcttcaacaatttgtgccgagagtgaagtggaagctcttgggggtgttgaaggatcaaccctagaacaattaagtgctcgtattaagaaattaaaacagaaatttcagcaagaaagcagaagatatactgaaaccattgatgatctgagagcactgcatgacaagaagggacagaagatcctgagaaaacaacaaatgtattcaggttttagggacaaattaaatgcatgtcaaaaggcactggacttgagatggaagaagtttcagagaaatgcgggtcttttgaagcgtcagcttacgtggctgttcaacgagcacctgggaaagaaaggtatcagtgggcacatcaatgtagattataagaatgaagttctgtctgttgagctgacaatgcctcaagatgcgtctcgtgataccattagagacactagaggactttcaggtggagaacgatctttctcaaccctttgcttcaccttgtctcttcatggaatggccgaagcaccatttagggccatggatgagtttgatgtattcatggatgcggtgagccgcaaaataagcttagacaccctagtagattttgctgtcgcacaagggtctcaatggatatttataacccctcatgatatcagcatggtgaaggctggggataggatcaagaagcagcaaatggctgctcctcgcggttgacagtgttgagacccctgacccttgtaaatgaagcctgagagccttgggcatgggagtgaatctgcttggaactactacttttatattttgtttgtagtttgtacatagcacattttgaggcaatgggcgtgtccctggtcaagagtttgttcctgggcagcatcagcagttctgtagttgcattgctgtttggacagggtcccactgtgctatgttaaagagtggttgatgcatgtcttttgaaataattgggccttgaacatactgcggatgtaaatgaaagaattgcggctgcagatgtcgatgaaggtagccccgacttggactctgctgattgcaggaacctgagttgatgaaggttctgaagttatgctatttttttcatgaaaaaatatgtgggtcccactcaaaactttgacctaactaaatatatccaaacaattgattgggtctgtcttaattgctagtttcttttgtacgagatgcggcagattctatacatgcatggctgatatcatgttctacagtttgacttgtttcccaaat

SEQ ID NO: 65493 - DNA, 2496 bp, Zea Mays
gtgtttgttcctatcacttcgttgattttttctgaaacctataccgcgctaggctccttatcttgttggcggccaagctcttcacgccagccatctcccctccatcttcccattctgcagaaatcccgccatggccgccctccctggtgctcgccccagccgaggtctctccatggccggctgcagctccctggcgcccctgctcctccctgttctagcttggtgctcagagccccatcgtcggccgcccttctgctcccttccccatggcgtgcctgctccctagacggcgctcggattcctccttctcggccatctccatcacgccctgctcgcccagcggcgacgagctcggcctctgctcctcccctgctcctatggtggcgccggtcggatctccctggcgcctcaccctactctctgtctgcccatggagtcgcccagcccaaccgtgcctgctccctccctgtgctcgccatggtcgtcgcctccaagcttctccctgctgcgcgcgcggccgtgcccctctgctcgccacggcgcgtcgagctcccgccccgagtccttttcctgttcgcccgtgacgcccggcgtcctgcctgctctgctcgccgtccgtccatgtgccatccgtggagcaacggaggaaaatctgcagcctaagccttggtcaatgtctgtgtggatttgggaaagaagactgtgaagtcggatccagccgttgtctatctcgtcaacatattttatctgccgtggttcagctcgccatgggcctggtcaacgtccctgctttgccttccccaagcagccgcgtggatggccttgctctcgttgtcgttcttacaaatatcgagtcgacttaactctaatcctcaccaaccatgtgatgtatcgtcagacttctatgcgcaatcttgtcggctgtcgcgcccctgctcaccgtcaacccgctcgaacctcgcctcgacgcgcaacaaccatcatagcatggggattcagctgcgtcgtttctttttcggagcgcaaatcgcttgatggtgaagacagtggagttctaggtcggtgctcaccaaatgtttgatggaacgtctaaactgatgatcgttgccgattgtgggaattttcaagttggtttgatcgcggtaaggactcgtcatttatgttctgtttgttttacctccaatggattatggtgagctgaaagtgcggaaatgcttgttagattaataagtagcttgggcaaatatttttagtcgggatgaatctcgtgtttggtcataatgcattgtgtgatgtcgtctgatccatgcttgttgcatatgtattattcgtgacggtgtcttaaaaatagcatcatctggtaatcgtcaattttcgtaggttacatgaaaggtgtttagatggttgtatgtgtcgaatatatttaactaggttttatacacgtaataagtggcgaggttaatcttgtgtagtatgcttgttgaaataccgcggtggcaaggagtgtttgagtagacatatgggtttaatgtgattagtatgatatccaaattaatttgaataaatggtttagaaagttagttaatatgcttctatctttattctaaatttagatgacttatactaataaatcgaatttgttaattttctagtgttgaacattagttaaggagagtagagcgtgtgtatattttattgttttgcgatgtataagttacctccgaacagactggaatagcgtaattattataattagtcgtacatcgctagctagtatttgcttaatgttttgttataagtttttcatcctcttcggtgtatattatctatcttatgctatttatactcgtgcttatacatgtgcatcatgcatctcatgaggcacgctagttgatcacatgatgtgaagggcaagagctggattaatctcaaggtgatgctgatggacgaacctaaagatggataatctgaacaagtgacaagacaaaagctgatcgccaagtggtcgccacctaaaaacactaacgtagtgttatccaggcaagccctggtgcatttgctacctccttgttgtttcaaaatctttatcaccttatatgatgcgttaggtgatagaagttgtgtgctaaacaattgatgcatttctttccttggaaaattgattacccttccttgatacttttttatgaaaggaattttatgatgcttagccttgctatagaaaaacaaaatgttttgtttaaaaacaaaaggtgatgcttcacaacggatgggaatttttgcaaagaaaaacttgtgatggtggatccatcaaaggccttgatgggttcaacatgagaaaagatacctctgccaggtaccaaactttgggttttaaataataaagctgagaccgaacgggtgacttgcacgagaagagagtctcggtgtactgtctccgtctgagtcgattaaggaccgtgccgatgtaggcttgctgattgaggaccttttaac

SEQ ID NO: 65494 - DNA, 1399 bp, Zea Mays
gctggagcattttcctcctaaatactgacaaaagggtcccaactctcaactcgcgctcaatgcatccgctatcgtctctcctcctgttccgttccgccgcgccgcccagcgcgctccccttgcggcggcggcggcggagtcacacgccagtgcgagcatcatggcaggagctggcgggcgtgctggtgttttccgccatccccttcactgcagtcaaggccctcgccaacagtcccctgggtgcccgcctccgccgccgcctcgaggacaggaaggccgccgcagctgccgaggctgacgctctccgcgctgcctcgcgcggcgcccgtaacaacaggtgcagtccgttctattgcttcattaaaaggggaacacgtcgtttgatttgtctgagctgtatccgagtggcaacgattgcagcttttggtacggtggagatcggccacggtggcttggtcccgtgccttacgactaccctgagtatttgacaggagagtaccctggagattatgggttcgatattgcaggtctgggaagggatcctgttgctttcgcaaactacttcaacttcgaaatcttacattgtcggtgggccatgcttgctgccctcggtgttgttgttcctgagctattagatctatttgggttagtgcattttgtggagcctgtctggtggaaagttggttatgcaaaacttcaggcgtcgttgtaattgcaatctgccaagccctcttgatggttggaccagaatatgcaaggtattgtgggatcgaggcactagaaccattgggaatatatcttcctggtgacataaactacccaggaggacccctttttgatcccttgggcctgtccaaggatcccgtggcatttgaagatctcaaggtgaaagaaatcaagaacggtcgccttgcgatggtagcatggtttggattttacatccaggcggctgtcacaggcaagggccctgtacagaacctggttgaacacttgtccgacccactaaataacaatatattgtcctccttccactaaatgaaaatatgcaagagtggcacgaaccatagcaacgggtgtatattgtattagcgtttacagttttacactaatgggttctgaaaattggctattatatttatttagatagacatttaacggtgattagtgatctatttgcagtttggtagtgcgtcttcagaatgccttgcccttacatgctgcaatggattttcttgatccaatccaatgattaaacgacaatagtccttcagttcctaattttaagtgtaagaaactgaaatttttttgggtggtttctgtcactaaagttactaaagtttagttcgtgtcacatcaaatgttcaaatattgattatgcttattaaaggtttaataaatt

SEQ ID NO: 65495 - DNA, 1470 bp, Zea Mays
caactctcaactcgcgctcaatgcatccgctatcgtctctcctcctgttccgttccgccgcgccgcccagcgcgctccccttgcggcggcggcggcggagtcacacgccagtgcgagcatcatggcaggagctggcgggcgtgctggtgttttccgccatccccttcactgcagtcaaggccctcgccaacagtcccctgggtgcccgcctccgccgccgcctcgaggacaggaaggccgccgcagctgccgaggctgacgctctccgcgctgcctcgcgcggcgcccgtaacaacagcttttggtacggtggagatcggccacggtggcttggtcccgtgccttacgactaccctgagtatttgacaggagagtaccctggagattatgggttcgatattgcaggtctgggaagggatcctgttgctttcgcaaactacttcaagttatgaccaacaatgattactgcttttgacagcttcataaaatcacttcgaaatcttacattgtcggtgggccatgcttgctgccctcggtgttgttgttcctgagctattagatctatttgggttagtgcattttgtggagcctgtctggtggaaagttggttatgcaaaacttcagggtgataaccttgattaccttgggattcctggattccgaattgctggtggtcaaggcgtcgttgtaattgcaatctgccaagccctcttgatggcaaccacagtaaaacaaagggagtagcatgcattttttattaaaaaaatgcttgcaaacacttcggaaacatagacattcactttacaaaggttggaccagaatatgcaaggtattgtgggatcgaggcactagaaccattgggaatatatcttcctggtgacataaactacccaggaggacccctttttgatcccttgggcctgtccaaggatcccgtggcatttgaagatctcaaggtgaaagaaatcaagaacggtcgccttgcgatggtagcatggtttggattttacatccaggcggctgtcacaggcaagggccctgtacagaacctggttgaacacttgtccgacccactaaataacaatatattgtcctccttccactaaatgaaaatatgcaagagtggcacgaaccatagcaacgggtgtatattgtattagcgtttacagttttacactaatgggttctgaaaattggctattatatttatttagatagacatttaacggtgattagtgatctatttgcagtttggtagtgcgtcttcagaatgccttgcccttacatgctgcaatggattttcttgatccaatccaatgattaaacgacaatagtccttcagttcctaattttaagtgtaagaaactgaaatttttttgggtggtttctgtcactaaagttactaaagtttagttcgtgtcacatcaaatgttcaaatattgattatgcttattaaaggtttaataaatt

SEQ ID NO: 65496 - DNA, 1814 bp, Zea Mays
caactctcaactcgcgctcaatgcatccgctatcgtctctcctcctgttccgttccgccgcgccgcccagcgcgctccccttgcggcggcggcggcggagtcacacgccagtgcgagcatcatggcaggagctggcgggcgtgctggtgttttccgccatccccttcactgcagtcaaggccctcgccaacagtcccctgggtgcccgcctccgccgccgcctcgaggacaggaaggccgccgcagctgccgaggctgacgctctccgcgctgcctcgcgcggcgcccgtaacaacaggtgcagtccgttctattgcttcattaaaaggggaacacgtcgtttgatttgtctgagctgtatccgagtggcaacgattgcagcttttggtacggtggagatcggccacggtggcttggtcccgtgccttacgactaccctgagtatttgacaggagagtaccctggagattatgggttcgatattgcaggtctgggaagggatcctgttgctttcgcaaactacttcaacttcgaaatcttacattgtcggtgggccatgcttgctgccctcggtgttgttgttcctgagctattagatctatttgggttagtgcattttgtggagcctgtctggtggaaagttggttatgcaaaacttcagggtgataaccttgattaccttgggattcctggattccgaattgctggtggtcaaggcgtcgttgtaattgcaatctgccaagccctcttgatggtaatactgtctttctaatcccccacctccggacatgagtgactcttttgttgcttatatctaaacaatttcaaaacataaagaaccgttccatgaaattcattgaccttgtaagaaactccctccatttcactctgtccattgccttgggagaatatgtccgacaatgttcgtcaatatttctacttcatactcctaattaagtgctttgaaagataagtcgctgcattatgttataaaatagcggtatgatatggatagtcatcatacagttattatttcttggaactcttacttccttggttaggcaaccacagtaaaacaaagggagtagcatgcattttttattaaaaaaatgcttgcaaacacttcggaaacatagacattcactttacaaaggttggaccagaatatgcaaggtattgtgggatcgaggcactagaaccattgggaatatatcttcctggtgacataaactacccaggaggacccctttttgatcccttgggcctgtccaaggatcccgtggcatttgaagatctcaaggtgaaagaaatcaagaacggtcgccttgcgatggtagcatggtttggattttacatccaggcggctgtcacaggcaagggccctgtacagaacctggttgaacacttgtccgacccactaaataacaatatattgtcctccttccactaaatgaaaatatgcaagagtggcacgaaccatagcaacgggtgtatattgtattagcgtttacagttttacactaatgggttctgaaaattggctattatatttatttagatagacatttaacggtgattagtgatctatttgcagtttggtagtgcgtcttcagaatgccttgcccttacatgctgcaatggattttcttgatccaatccaatgattaaacgacaatagtccttcagttcctaattttaagtgtaagaaactgaaatttttttgggtggtttctgtcactaaagttactaaagtttagttcgtgtcacatcaaatgttcaaatattgattatgcttattaaaggtttaataaatt

SEQ ID NO: 65497 - DNA, 1777 bp, Zea Mays
caactctcaactcgcgctcaatgcatccgctatcgtctctcctcctgttccgttccgccgcgccgcccagcgcgctccccttgcggcggcggcggcggagtcacacgccagtgcgagcatcatggcaggagctggcgggcgtgctggtgttttccgccatccccttcactgcagtcaaggccctcgccaacagtcccctgggtgcccgcctccgccgccgcctcgaggacaggaaggccgccgcagctgccgaggctgacgctctccgcgctgcctcgcgcggcgcccgtaacaacagcttttggtacggtggagatcggccacggtggcttggtcccgtgccttacgactaccctgagtatttgacaggagagtaccctggagattatgggttcgatattgcaggtctgggaagggatcctgttgctttcgcaaactacttcaagttatgaccaacaatgattactgcttttgacagcttcataaaatcacttcgaaatcttacattgtcggtgggccatgcttgctgccctcggtgttgttgttcctgagctattagatctatttgggttagtgcattttgtggagcctgtctggtggaaagttggttatgcaaaacttcagggtgataaccttgattaccttgggattcctggattccgaattgctggtggtcaaggcgtcgttgtaattgcaatctgccaagccctcttgatggtaatactgtctttctaatcccccacctccggacatgagtgactcttttgttgcttatatctaaacaatttcaaaacataaagaaccgttccatgaaattcattgaccttgtaagaaactccctccatttcactctgtccattgccttgggagaatatgtccgacaatgttcgtcaatatttctacttcatactcctaattaagtgctttgaaagataagtcgctgcattatgttataaaatagcggtatgatatggatagtcatcatacagttattatttcttggaactcttacttccttggttaggcaaccacagtaaaacaaagggagtagcatgcattttttattaaaaaaatgcttgcaaacacttcggaaacatagacattcactttacaaaggttggaccagaatatgcaaggtattgtgggatcgaggcactagaaccattgggaatatatcttcctggtgacataaactacccaggaggacccctttttgatcccttgggcctgtccaaggatcccgtggcatttgaagatctcaaggtgaaagaaatcaagaacggtcgccttgcgatggtagcatggtttggattttacatccaggcggctgtcacaggcaagggccctgtacagaacctggttgaacacttgtccgacccactaaataacaatatattgtcctccttccactaaatgaaaatatgcaagagtggcacgaaccatagcaacgggtgtatattgtattagcgtttacagttttacactaatgggttctgaaaattggctattatatttatttagatagacatttaacggtgattagtgatctatttgcagtttggtagtgcgtcttcagaatgccttgcccttacatgctgcaatggattttcttgatccaatccaatgattaaacgacaatagtccttcagttcctaattttaagtgtaagaaactgaaatttttttgggtggtttctgtcactaaagttactaaagtttagttcgtgtcacatcaaatgttcaaatattgattatgcttattaaaggtttaataaatt

SEQ ID NO: 65498 - DNA, 1448 bp, Zea Mays
gaaccgtgaacattcgttgcatctccaggattgttctattgttagaacagtcatgcgacatggatctacctatttggctgactgtaaggttcctcggaacttcaggctcctagaagagcttgaacgtggagagaagggcattggagatgggacagtgagctatggaatggatgacgcagatgacatctacatgcgatcatggactggcactattattggccctcataattttatgtcgagttgtattaatctcttttcttacttgaagaccgtccatgagggtcgcatctaccagctgaagttgttctgcgacaaggactaccctgagaagccaccatcagttcgatttcattcaagaataaacttaacatgcgttaatcatgaaactggagtggttgacccgaagaagttcagcgttctgggtaactggcagcgtgattactcaatggaatacatcctaacccatctcaagaaagagatgacatcgccacagaaccgcaagctagttcagcctccggaagggacattcttctaaagatggcagcaactcatgtccatccatggtgactcggaaacagcttccgcacctggttcctatattttatatatttagtctgatctcccagttatctgtaaaccaccgagatcgagtgcaagcagacttggttgatttacaatttgcccggtggttgctaatgatatgggatgaaacggttgccggtttggctgctattaaggttgtgtaatctgatgggcaatttcagcattctaatgccctaatgatgaatctttggccatttgctgttctgccttgtctttgatcgtcaactgcatatttgcacacttttttttcccactttgcgccgctgcacacctaatactctcaaaacaatagtttaggagtaaaggtgaaaatacttagtccaacagctcctgtgccctcaatttatttggtgctccaaaaccaaagccactgacgccctatctgtggtttttttaatttcctgtgcctagaagacgcccgcgtttttttttcatttcctgcgcctagaagcgctgtgctccattatttttctgctgcggtacatatttcgtttcgtactgctgtacaaatttgctcagtgcagcagttaaggaaaagcttaactaagctagatgggttgcattatggtatttttaagcagttattggagttgagtataatttttttgagcttttagacttttgagagaagcccaatatagaaatattggcagtaaaaaataccaggagctgttgaaggtgctctaaagataaaacaggcgctaggagggcaataatgcgaagttgataaaagaagagcgcaagtgaaggccaaaatctgtcatgcaaattggctaaacaatcgacttggactacaaatcctattgttaggcaaaccaccatcttctcctagccattgtattgga

SEQ ID NO: 65499 - DNA, 1648 bp, Zea Mays
gcatttgcatcagccaatatacaacatgtggcacagaaggcctgttcgcaaagaagacgttggaaatcacagaagatatgctttcgtcatacaaaaatcaaggtggttttgatttgctcggcaggactgttgatcaaatccgcacgacagagcaagtagatgctgctaagtcagcatgctgtgatcttaacttggatggcctaatcatcattggaggggtgacctccaattcagatgctgctcagcttgcagaattctttgcggagcatgactgcaagacaaaagtcataggcgtcccagtaacgctgagtggtgatctcaggaatcagttcgtggaagcaactgtcggtttcgatacagtgtgcaaggtgaactctcagctcataagcaatgtttgcctcgatgcaatctcagctgggaagtactactattttgttcgcttgatggggggcaaagcatctcatgttgcattagagtgcgcacttcagtctcatccaaacatggttatattaggagaggaggtggcgttttcaaagctcacattgaaggagattacgaacaagatatgtgacggagtagaagcaagggcggatcaagggaaataccatggagtgctagtaattccagagggactaatagaaagcataccagaaatgtatgcgctcattcaggaaatcaataatctccacagtagcaatgtcactgaggccgacattccgtctcaactttctccatgggccgctgccctgttcaagttcctgccatcgttcattaggagagagttgatcctgcatcaggaatctgataactcagcgcagctatctcagatcgataccgagcagctcttggctcatttggtagaagcagaaatgaacaagagaacaaaagaagggaagtgcaagggaagaaaattcagctccgtgtgccacttcttcggttctcaggcccgaggatcgctgccatccaacttcgactgcaactatgcttatgtccttggccatatctgtgtgcagataatggcggctggattgaatggttacatggccactgtaacaaatctcaaggactccacaaacaagtggcgatgcgctgctgttcctctaacggcaatgatgagcgtgaggagacacttgcgtggtccaggagctgttccgattgggaggccagttatccatccttctcctattgatctcaaagcagagtcatatgcggtcttgagagagaaagcttcaagctttctgctagatgatttctacagaactccaggaggcattcagttcgaaggacctggcgcaggcaccaagcctatcacagtgaccatagaagaacaggactatctgggtgacatcgagatactgcaggactacttggacaaggttaggaccatcctgaagcctggatgctcacgggagattctcaaggcatccataagctccatcgcgtcagtaaacgacgtgctcaagttcatgtcggcgcccctcaacacagagcttcctctctaccatttcagctgattttttttttaaaaccacaacaaatacactgctctagccaatgaaaatccggttgtcatatgacatgagtccagtttagaaaatctggtggagaatccagagtgccttcttttgtaacctcttttttattcatg

SEQ ID NO: 65500 - DNA, 1468 bp, Zea Mays
agccttaccttgttaccttgcattttcccccacttgctgagccctgaccataaagaggaggagaggaagggcagcggtggcgccgccgccggcggcggctcgacccctggggcgaatctaagggacctggtgtcgagggaatactacggccacaagaagaagtttttatcattaggtgcactctgtagcatggaactgcctaggcacaaagcttgcttcaggatcgatcgatcataccgcacgtgtctggagcattgatccacatgtccattctaaggttaaagatattgaactgaaaggccacacagatagtgtagatcagctttgctgggatccaaatcatcctgatacagttgctactgcagctgctgacaaatctattcgtctttgggatgctcgaagtggaaaatgtcaagttgttgaacttagtggagaaaacatcaacatcacatataaacatgatggcactcagatagctgttggaaacaaggaggatgagctgacgatattggatgttaggacacttaaagttgctaagaaacacaagtctacttacgagatgaatgagattgcttggaataaagctggagatctattcttcattactactgggttagggcacgttgaggtggttaaggatcttgagtttttaaagccctgcaagctgaatgctcatacagcagggtgttattgcattgcaatggatccacttgataggtatttcgctgttggaagtgcagattcacttgtcagtctttggaatgtcaaagagttgttatgcattagaaccttcacaaaacttgagtggcctgtaagaacagttagcttcagtcatactggagaattcattgcatatgccagtgaagatcctttcattgacattgccaatgttgagactggacgatcaattcatcagattccatgtaaagcagctatgaatagcgttgaatggaatcctaagtacaacctcctggcctatgcgggagacgacaagaacaagtatatgactgatgaaggtgttttccgggtatttggcttcgaaacacataattgatgctgacttagactaccctcatatagaatggtttgcattgtagattcactttcgaattttgtttacactgatacattttgtagatgttcagtgtaacttggatgctaatcaatcttctgccggcttgaactgaacgtcattgttgtagtgtatcacaggatacccatgtgactaacgtatttccgggatccaattctatttttattacacttactttttattatagtatggagatgtattcattttctttgaattgattttgatccgcaatactatcgaagtaaaaagggatctaagtaagaactaggctaacttttttattttttaacttctaatttttttagtaacaagtaaatactctgtttggacataagaaacttacaatatcaagtgaataaacaccaactaatcaag

SEQ ID NO: 65501 - DNA, 2249 bp, Zea Mays
agccttaccttgttaccttgcattttcccccacttgctgagccctgaccataaagaggaggagaggaagggcagcggtggcgccgccgccggcggcggctcgacccctggggcgaatctaagggacctggtgtcgagggaatactacggccacaagaagaaggtgcactctgtagcatggaactgcctaggcacaaagcttgcttcaggatcgatcgatcataccgcacgtgtctggagcattgatccacatgtccattctaaggttaaagatattgaactgaaaggccacacagatagtgtagatcagctttgctgggatccaaatcatcctgatacagttgctactgcagctgctgacaaatctattcgtctttgggatgctcgaagtggaaaatgtcaagttgttgaacttagtggagaaaacatcaacatcacatataaacatgatggcactcagatagctgttggaaacaaggaggatgagctgacgatattggatgttaggacacttaaagttgctaagaaacacaagtctacttacgagatgaatgagattgcttggaataaagctggagatctattcttcattactactgggttagggcacgttgaggtggttaaggatcttgagtttttaaagccctgcaagctgaatgctcatacagcagggtgttattgcattgcaatggatccacttgataggtattttctattgaaggctctttatttattctcgcccctggtacttctttggatcacttggatttgtaatttgtactacttcaattgggttatctggcctgctatttgatttaagatgtatgtaacagtgaactctataaatatttgacactgatgcttgcatgattaattactttaattccaattaatactgccacaacctattcacatatattttggctattagaataacaaaattctttttctttttaaaagaccagaataacaagaattattgaaattttatagcctagcttcatctctaggtaaagaagaaattgttaactaatagcaacctctgggtgagtgattaactaggacatgacctacatgtaagtgagtttgagaagaaatgattacctgttctgttcatgcaactactgaattcagaatttacatagaggagcaatttagtttgccagtggatctagtttattttctacgctagatactttgtcctgcgaactgtgaggctcaatataccaccacatagattgaggtggagaaaatcgcctgatgtgtgactgagtctgggcctaaatgacggacccatattgtatggttccaattagccttgtttgtgatgaaagcaattatgttcaagttttggtccacaacaatatgcaagtaagcttcatacattttgtagtcatcttttggatatagtaatcagttatctggtttccagttactctgattttgggagaagctataattgtttttctgatgacagttacaaattgttccaatgctaggtatttcgctgttggaagtgcagattcacttgtcagtctttggaatgtcaaagagttgttatgcattagaaccttcacaaaacttgagtggcctgtaagaacagttagcttcagtcatactggagaattcattgcatatgccagtgaagatcctttcattgacattgccaatgttgagactggacgatcaattcatcagattccatgtaaagcagctatgaatagcgttgaatggaatcctaagtacaacctcctggcctatgcgggagacgacaagaacaagtatatgactgatgaaggtgttttccgggtatttggcttcgaaacacataattgatgctgacttagactaccctcatatagaatggtttgcattgtagattcactttcgaattttgtttacactgatacattttgtagatgttcagtgtaacttggatgctaatcaatcttctgccggcttgaactgaacgtcattgttgtagtgtatcacaggatacccatgtgactaacgtatttccgggatccaattctatttttattacacttactttttattatagtatggagatgtattcattttctttgaattgattttgatccgcaatactatcgaagtaaaaagggatctaagtaagaactaggctaacttttttattttttaacttctaatttttttagtaacaagtaaatactctgtttggacataagaaacttacaatatcaagtgaataaacaccaactaatcaag

SEQ ID NO: 65502 - DNA, 2123 bp, Zea Mays
gggatatattcgccaacaaactcatttcccgtctccacttgttcctcctctgtgctctcgcctttccattcctccaccggcctcatcccccaactccgtcgagcattaccgtcagagggcggcggcgcggcgcggcgccgccggcgacggggaccgcgtgaggcaggctcccctcaaggctcgtcctcctcgtcgggaggcgtcgccgttgccccgccctctgggctggcgcggcgtggaggggacagctggagatccgcccgtctctgcttggattgcttccttctcccgcagagggtatgagcaatgtactcaccaaaaccagagtctagttttggcccaaatcccaactcaggtacacaccagcagcaaatggaattaactggggccaacatgggtcctggtaatggagcaaataacaataccaacatggctgggaggcaacgcttacgctggacaaatgaactgcatgaaagatttgttgaggctgttactcaacttgggggtcctgatagggcaactccaaaaggagttctgagaattatgggtgtacaaggattaacaatataccatgtaaaaagtcacttgcagactagcaaagtatattcctgatgcttcaactgatgggaacaagaccgataacaaagacccaggagatttgcttgccggacttgagggatcctcgtatgaacacataattctaattcgtttaattttactgaagaaggatataattcaaagtctagttatttattcccttatgagccattttgggtgaaattttactgtcctagtggcatgatatcagatggaagtatgatgatttatgggattagttagctgtgaacgtatcgtaattgtagctactcctattttagagtgatttctgcaaaatgaacaaaaacatattgattccatctgctcattattttttacctttaatgtcataagatgcataactgttagacaggaaatacagagaactcaaaataatttcaaaatcgaacagtggtattttttatttcttctaatgaaaatggttaccatttcagtcccttttatttcttttctactagaaatatttttcttgtaaggacctttaattgtataagtttttgttcacagtggattgcagatatctgaagccctcaaactgcagatggaggtccaaaagcggctgcacgaacagttagaagtacaaaggcagctgcagttacgaattgaggctcagggaaagtacctccagaagatcatcgaagagcagcagcgcttaacaggtgtgaaatctgaaactcctgctggaggtgcttctgtcactgtatcaagtgatcaattcccagactcggagcggactgagccctccacacctgcaccagcatccgagtctccaactcaagttggtgcttccaatagggacactggagaccgaactgaagcaaccaagagcacctgtcatggtgattctctttcccgcaacgagccactaacccctgattccaactgccagaacggttctcctgtcgctagtccaaaccatgaaagggcagccaagaggcagcgaggcagtggtactgaattcttagattctgaggctgagttttcccttccgcgccacatcttcgagtcgagttcaggctcagagttccaacaatactcaatgtcctactcaggacagtagcttctgatgttcacatcatctctgcaccgttgctagcttgttcagcacgatgcgcatggtccgtaggtctgggtaggttgatgtctcaaggagcgtgttgttggtaaacaaagctgtaggtgttcagtgattgtctacatggtatacgtgaccagctatttaagttcctaggtttgtaacatgtatgtccgcctgcagttcagttgagatgcttcaaggctaaggttctgttgtgtgacctgtagacacgaggctgtcagcttgtattctcttggtaatgtgtgtcagcagagcgttagcattaagtctaattgaacagtgctgttatctgtaacgtctgagtttgatcagaaactgaagttaattgaggaagacatcaacaatgttctgatactattggttgcttgtgttattagattcgacctcatttatgtgggagtaggac

SEQ ID NO: 65503 - DNA, 1554 bp, Zea Mays
gggatatattcgccaacaaactcatttcccgtctccacttgttcctcctctgtgctctcgcctttccattcctccaccggcctcatcccccaactccgtcgagcattaccgtcagagggcggcggcgcggcgcggcgccgccggcgacggggaccgcgtgaggcaggctcccctcaaggctcgtcctcctcgtcgggaggcgtcgccgttgccccgccctctgggctggcgcggcgtggaggggacagctggagatccgcccgtctctgcttggattgcttccttctcccgcagagggtatgagcaatgtactcaccaaaaccagagtctagttttggcccaaatcccaactcaggtacacaccagcagcaaatggaattaactggggccaacatgggtcctggtaatggagcaaataacaataccaacatggctgggaggcaacgcttacgctggacaaatgaactgcatgaaagatttgttgaggctgttactcaacttgggggtcctgatagggcaactccaaaaggagttctgagaattatgggtgtacaaggattaacaatataccatgtaaaaagtcacttgcagaaatacagactagcaaagtatattcctgatgcttcaactgatgggaacaagaccgataacaaagacccaggagatttgcttgccggacttgagggatcctctggattgcagatatctgaagccctcaaactgcagatggaggtccaaaagcggctgcacgaacagttagaagtacaaaggcagctgcagttacgaattgaggctcagggaaagtacctccagaagatcatcgaagagcagcagcgcttaacagggacactggagaccgaactgaagcaaccaagagcacctgtcatggtgattctctttcccgcaacgagccactaacccctgattccaactgccagaacggttctcctgtcgctagtccaaaccatgaaagggcagccaagaggcagcgaggcagtggtactgaattcttagattctgaggctgagttttcccttccgcgccacatcttcgagtcgagttcaggctcagagttccaacaatactcaatgtcctactcaggacagtagcttctgatgttcacatcatctctgcaccgttgctagcttgttcagcacgatgcgcatggtccgtaggtctgggtaggttgatgtctcaaggagcgtgttgttggtaaacaaagctgtaggtgttcagtgattgtctacatggtatacgtgaccagctatttaagttcctaggtttgtaacatgtatgtccgcctgcagttcagttgagatgcttcaaggctaaggttctgttgtgtgacctgtagacacgaggctgtcagcttgtattctcttggtaatgtgtgtcagcagagcgttagcattaagtctaattgaacagtgctgttatctgtaacgtctgagtttgatcagaaactgaagttaattgaggaagacatcaacaatgttctgatactattggttgcttgtgttattagattcgacctcatttatgtgggagtaggac

SEQ ID NO: 65504 - DNA, 1682 bp, Zea Mays
gggatatattcgccaacaaactcatttcccgtctccacttgttcctcctctgtgctctcgcctttccattcctccaccggcctcatcccccaactccgtcgagcattaccgtcagagggcggcggcgcggcgcggcgccgccggcgacggggaccgcgtgaggcaggctcccctcaaggctcgtcctcctcgtcgggaggcgtcgccgttgccccgccctctgggctggcgcggcgtggaggggacagctggagatccgcccgtctctgcttggattgcttccttctcccgcagagggtatgagcaatgtactcaccaaaaccagagtctagttttggcccaaatcccaactcaggtacacaccagcagcaaatggaattaactggggccaacatgggtcctggtaatggagcaaataacaataccaacatggctgggaggcaacgcttacgctggacaaatgaactgcatgaaagatttgttgaggctgttactcaacttgggggtcctgatagggcaactccaaaaggagttctgagaattatgggtgtacaaggattaacaatataccatgtaaaaagtcacttgcagaaatacagactagcaaagtatattcctgatgcttcaactgatgggaacaagaccgataacaaagacccaggagatttgcttgccggacttgagggatcctctggattgcagatatctgaagccctcaaactgcagatggaggtccaaaagcggctgcacgaacagttagaagcagctgcagttacgaattgaggctcagggaaagtacctccagaagatcatcgaagagcagcagcgcttaacaggtgtgaaatctgaaactcctgctggaggtgcttctgtcactgtatcaagtgatcaattcccagactcggagcggactgagccctccacacctgcaccagcatccgagtctccaactcaagttggtgcttccaatagggacactggagaccgaactgaagcaaccaagagcacctgtcatggtgattctctttcccgcaacgagccactaacccctgattccaactgccagaacggttctcctgtcgctagtccaaaccatgaaagggcagccaagaggcagcgaggcagtggtactgaattcttagattctgaggctgagttttcccttccgcgccacatcttcgagtcgagttcaggctcagagttccaacaatactcaatgtcctactcaggacagtagcttctgatgttcacatcatctctgcaccgttgctagcttgttcagcacgatgcgcatggtccgtaggtctgggtaggttgatgtctcaaggagcgtgttgttggtaaacaaagctgtaggtgttcagtgattgtctacatggtatacgtgaccagctatttaagttcctaggtttgtaacatgtatgtccgcctgcagttcagttgagatgcttcaaggctaaggttctgttgtgtgacctgtagacacgaggctgtcagcttgtattctcttggtaatgtgtgtcagcagagcgttagcattaagtctaattgaacagtgctgttatctgtaacgtctgagtttgatcagaaactgaagttaattgaggaagacatcaacaatgttctgatactattggttgcttgtgttattagattcgacctcatttatgtgggagtaggac

SEQ ID NO: 65505 - DNA, 1602 bp, Zea Mays
gaaaatttggcgccattccaggaatcgcgaaaagaaaaggtcctacctcgtatcgcgtccaattgctttgctcattctcgtgctcggcaggggaacggtgcgaagcggaggagcggcgatgcagatccgggtgcagtgcgcgtgcggcgagtcgtcgtgcccggaatgggccgtcgtggagctgcagggcgtggtgcagccgcaggcctccttcgccggcgacatccggggactccacatcggccgcctctgctcctccccttccccagcctccgcctcgtccaaggcagggttcaccttcacggtggggtaccacgagctcgccggcacaaaggtgacgctcaagaagcccctgctggtgctcaggaagaagaaggttaatgctggtgctcaggaagaagagccaccgacggcggcggaggtggagctggaggtgatcggcatcatccggcacaagatcctattcaaggaccgccccaaggccctcatctcaaagccgccaaccaaggagaagaaggccgtgcagccagcagcaaagtgacgcgacgccagcaactccgtgccccttgagaatctgaagctctcttggtttggctgcgtattccctgaatattgcgcctgttgtagtcatgcctggtttggccgatacttagtcagttgtagtcgcacgttcttttttatttgtcacattttaatttaaaaatgaacttgtgagtgacaaatattttagaatggaaaaagtataagtttaaggatgtttcctctcggaaaaaaaagtttaaggatgatcacttgtattgtctgtttctttgtttgtggttaaagtctgtttgattgcaatattccagcatcgaatcgcagccggtagaacatttcagtattcgtctcaaagcaaacaaatagaacaagaaaagatccaaggaaacacttaatctgccatcatatattattaaatataatctgaaaatatgccctctacaattgcccatacccacgtaagtctactcacagcaatgattgttgggccatgttgggccagacaccgaatcagacctcgatcagcaccgcacaggtttgtgcctcctcatcttgactaaccatacttgagcgtaggatcggagccaaccggagccttcgtcaattgcaacttcgttggagccttcgatgaagcaactagtattgactgaggcgaagactggtgcctaggcgagagcccgggcgcaagccaaacatcgaggtcgaggactccgtccaccccaacttttcgagggtccctcggcacaggctacgatcctgcaaggagcgaggggtcccaatgtgcgaaggctacgtgacaacaaaggctttaggaaagaagacatgtctgagttaccaagccactatgggggctacccggagagcccatgtgtaagtgtaaccatagggtaaaattgtgagtgcatgtgtccactaggcacgacggtgttgtaattactcgctacatagaatattgtaggaatgtagttggtaaccgggggtacggatgcactttaggccacctaccctagattgccctatcttattgctggacaggacacgtataatgagacgctacagttctct

SEQ ID NO: 65506 - DNA, 3154 bp, Zea Mays
agggcccatggttgctgctgccgcgagattgtgcaacattttgcttatgacgcatactaaatattgattgatgtgggaaggctgaaggtgttgtacacatgtgcctgtggcgttgctcaattctagcctaccggagggtccatcctgataacctacattgcttaatccaagtttagtttgctgaaatttgtttccagaaaatttactctaatgtatttaaatttggtttactgtgcattttaaggtttaggctagtttgacaaattaaaagtaaaatactcgctcttaaagcaaatatagagttatattataaaatatgtataattttacaactcataaaatattgtaacagtctccggtcatatcattttgaaaaaatatgtaaatcattaacttcttttatttttcagatatcatttaaagttaaaaaataaagaatcaaactttcgtataggcctccatatagattttggcttagggcccccaaaatgtcaggaccggccctgctcacatcccaagtccttccccttctatcggtgagaagattcttcggtgtgagataagttcttgatctaaagcgcaatcttgacttaagttctttgatctctctctctttctagttggtgcaaatcgttcttacttgcgaactctttgttcttggaacgtgttgtttcttgtgtgcttgtaatcttgccttgggagtctccaatgttgtggatgaccccaaggacgatttgtatcaccgactctttgtgggcaaattgagtaagggatcgcctcgacctatgtgatcggcaacaaggattggggttgagaaagaccccgccctttgtgtgcacctcaacgagtagtagggcaccttggtggtgtgatcgaacctcggtaaaaatcatgtgtctcatgtgcttttgtgggtgtgtttttgtctctcatcatatcagatctttgatctacttagttggttttaattcaacacttgcactgcatttattattaatagatctaagtagttttaattgagttcgtagttgaacaggtgaatctcggttgaaccggcctcaaacccggttcaaccgtcctccccggttgaagtgacttttctcacaaaagttcgaagtttgtgttgagaattacaggcgtagcctattcactccctcgactacttttagttgggctagtggtcttcactagtcatatgcctatagatggtctagttactttagattatgtttaagcatgtcaaactatgtgatgtttaagacaatggtctgtaataatatttaatactctttattattcgagcagtgtgtaatattgtaacatttatgtaatcattgtattcgtgatacaaatcctaacacgtatatggttcgtattcggttgccttctaaaatcagttgtgagcctctaatcagtgaagctgctcttcatagcacctatgaatctatagctaccgaactgtcctcccttcactttcccttcacttatccatatcatcctctatgcccgtgcgggtacccatgccgtcccttgaatggcactgaaaccgctgtacaggctcagctgttcatcgcagaggtaggtagtcaacgaatgggtatcgctggcttcgcggccccatctttgttgctggccgagttgggtgatccttaacccgagtacgcctacggtcgcgaattgtttaaccaccatgtaatcagtgactgaccctcgggccctggtggtttctgtcgtttccatccgctggcaactcgccggttgatgtctctgtcttttgtaattgtttttttactttacgtaaaacatgtgaaggcatattcttagactagtttggcaactcctttttccaaaggattccttttttaaaaaaaactaattttatttgagaaaatgtaaatctcttgaaaaaaatgaggttagcaaattagctcttttagcaactacaggagcatatgaaaaagtttaacttgttactttggttgttgttaaaaaaattccttaaatcaaaacgtgcgcgcagcagtctgctaaaaagcaatctccatttgtcttaaacaacgaagtgggctaaagctaacctagttgggccacgcactttggcaaaagtagccacagttgtaccctctactgcgccgccggctacagaacgcgttcgtggtttttttccggctccgtacagtacactctcgttccaagttccaacgtcgccagcacacggcaggtaatttatttggcttgtccacactctctgccaccggcgccagtccataatgttcgccttgttcgtctatgtggacgttgattgttgagaaaatcccttcaatgccatccaaacttatattaatacctttagtgtcatcagaatttataacttctcttcaatatcatcaaatttaaattttaaaccctttaatgccattaccgttagtttggagttaatgccgttaattcaatttaaagtcaatctttccaacgccattaaaatttatattgatccgttcaatgccactagaaattgcttcgatatatttgagatttaaaaattcaaaaaccaaaaaatatggatcatatttttaaaattctacgattttttaaacttaagtacatacttttttgtaaacctccaaaatcacttcgctatatcagtttgtttttaaaaagcttaaatatggactgaagtttttaaaaatcatgaaatattaaaaatctgatccatattttttattctggaatttttaaatcttaaatagatcgaagcaatttctagtggcattgaagggatcagtatagattttagtgacattgcagagattgactttaaattgaactaacggcgttagctccaaactaacagtaatgtcatctaagggattaaaatttaaatttgatgatattgaagagaaactattaattttgatggtattgaagtgattggtataagtttggattgttaggatgtgtcctctacactagccggttaacagtaaccggggtagggttaatcctaaccgtctaaccgcgcccctgatcgggggggctatcctaaccgttggttgcagccccggtcacacgacgccatataaatagattaaaggggccgacgggtttagctaacgctaatcgctcgaccacaaaccctaatcgacactttgag

SEQ ID NO: 65507 - DNA, 1664 bp, Zea Mays
aattcccttttcccctcttcccgagctcccttgctaggttcctcgtccgcctctctgtcctagtctcgtcagcaacagcacagtgttgttactgacgcgccttcactctgttgacctgcatctagccaagtttatttggagactccaacctttggtctcccaaacttggagctcccaaggggagaggttctgccaaaattttcttctctcactatcacttctccaaggccaagccctgccaaaatttccttcatatatcacatgcatcgtagacatacagacaataaactctaatttgcaaaggtaacaaaaaaaaaaagagtgctttcctccttggccttgatggtaggctagtagagaaaaccgcgcgcagcatctgtttacatgttgttgctcgtcctgtccgagcacctcctttccagatttatggtcggttctgccctaacccgccttgtccagtccttctctgttgttttcctctactggttttatgtcttctcagtaagccgccagtagttggactcaccttttcaagttatctaggcatttcctatatatttaccacatataaaaattatactaaggcagtaacaaaagaggtgcctttatatctgacaaacagaagggagtgaaaaagtttagattacacctcagtttgcctgtggtgacaactatgtcaagtggcacttcgtccggatcgagccggtgggtccaaagttctagatccgaggatgacctagatctccaggcccagatggagaggaggagaaagcggaggaaggagtcgaatcgggagtcagctcggaggtctaggcaacggaagcaagaacaccttgacgacctcacctcacaggtaaatcagctgaaggaccagaacaagcagctcagcatggcactgagtataaccagccaaaaccttgtggcagtgcaagcgcagaactctgttctgcagacccagaagatggagctggacagcaggctgggtgccctgacggagatcctctggtacatgaactcaagcaccagcaccagcactgctcctacaaatccagccatagcgaacgacttcacagcatggagcagagcctctgatattcttggtggaaccagctacagcgccatagacctgtaccaatgcttctagctctaagctctagctctagaagagagaaggtggctgtggcatatgacatagtggtagggccaggaagaaaggaggcgggcaggcatcaagttctgttcaatcgtgtggggcctttgtgtcactgttgatgtgtgcagtgtgtgcttgatgcttctccctccactgtttattttcgaggcgacggcgatgttttggtttggtagagactcaaggacggacaaaatggcagaaagttgccttggctttgtgtgacgtaaatgcagttgttctccggtatttatatggcaaataatattgggccagctagtgaaaaagacaggcagatgatttgatgtggctcttgatatatagggaaataatatgcgtaacgatgattataatgtttattaagatgtcgatttgatgtcaattgatatccgtttccagtcttattatgtttgatgcttacctctgtttttaaatatttatcgttcgctagtttatttttgaactaaaatgcgacaaataaaaaagaacagag

SEQ ID NO: 65508 - DNA, 1611 bp, Zea Mays
ataatcccggggtcggcttcaaccgaatgccgcgagatccctgctggtgggcgcggacttgggcgtctcccaggggtaaataaggatgccctcgacccctacgcatcctgaggcaccactaaccgaggtcctgagtgtcgccccagctaaagagcccaagtagaaatctgagcgcggccggtgagggatcgagggcaactgtgagtgttctctcaccgggcagttgttgcgggtcaccgaggtgggcacgccagccgtgttcgcgacctcgccattgaaggttgcagtcttggttgataaaggagtcatcctcggggagtgatcgctgccgtgaaaccattgcgcggcgtggagaacttccctgctaccttgacctacgacgagcaagcaaccgtggagccaggtgctcagcaggtggaaaatactaagcaggggctcattgaaggcaagttgtgcccttgatcacttctatttacccaataatgttcctgttagtcattatgatctgtataggttaattttatgggacccaataggtcaccctagtttggttatctttataccttgtttaccactgaacttttgggtagtacctgctattgctttatgtggttttgggtgttaagatacacattattcatgatcatgcttttattaccaatgtgcaagatcattatgttaattggaacgtggagcgaccacccgggaaaacagtgctaccacaagggtggtatgggacacccttggctgactaattaagaaagctagtggaggactaccttacatgaaaagggcaagggcggtattggagttgtcagtatagggaggttctcaggttgattttgctgagatggcttttcagacggaggattcctgtattgcgctcctcagaaaccgtagcggattttcagaagttagtggaactttgtaaatgcctcgtagtgttaccctgttttgcttcattggtggaggtgtatggggcccgtacaactccgtggcagatgggtaacatgacttgtgggtaaagatgtgcaacctttatagagtgtaaaactggtatatcagccgtgctcatggtcatgagcggctcggaccctcacatgagtaacttatagaattaaatttaattggtcatttgcatcgcattgtggtttatttattaattgcgatctcttattttttggggttggtatttacttatacttagtaactgctaataaaatttgaccaacttattaaaagcagtgctcagctttaaccattatttgttgatcagccttacacttcacatgagctcccacctttggtgcgttgatgcacattattccccacaacttgttgagctatgatcttttgtgagcttacccttatgatatataacccccacaagagaagaacaggtagcccaggaggaggactactacgaggagtacaaggaagtctaggtggcgtctctcaatcagcttgatggcgtcgaggaataattattagttcactttattattatcatttatttttgtaagacacttctgctatgtaataatgtggtgacatttatctctatacacttggtcattatttgtgttgttttctttggcgcacatatgagac

SEQ ID NO: 65509 - DNA, 1249 bp, Zea Mays
acacgcataagcaaaaaaatgttttcattacaacatgtacccctgcactaggaaaataaggcactcggcactcgtgagccgtcgcatttccccccgtgtgaccaattcctctccgggccgagcagccgttccaatccgctcacgccgcctctctcgctgccccgcttgaccgcctgctagcgctgcagtttgatgctgatgacctgatccctccgttgggtaggttcttgggcgcggaaagaacaaagaactcgtggtgggtccgggtccgcaagaccctaggtgttcgtcagcagcgaggatgcccggcctgcctctgcctcaatcgttaaatcagaatattggatgtgaatatgcctatcctgggtctacaggccaggccttccgtcagcagctaagaactgcattgtctccagatgagaaacttaccgctgaaaaagatttggctctgtattgcaagccagtcgagctctacaatattattcaacggcgagccatgaaaaatcccctttttattcaaagatgccttctttataatatacatgcgaggaggaaaaagaggattcagataaccatatcactttctggaagtacaaatactgagttgcaaacacattatgtctttcctctttatgttctgttagctagacccactagtaacctttcacttgaagggcattctccaatttatcgattcagtcgggtttgcttgcttacttcctttagtgaacatggaaataaggacaacagtgaagctacattcatcattcctgacgtgaagagtttgtcaacctcccgtgcttgcaaccatgatattatctttattagctgtgggcaagttggacaaagtaatggtgaagataactgctctgggaaccatgtggaagattcttctctccaaatgcttgaagggaaatgctcctggggtaaaataccaactaatttacttgcttcatctttggagagttgtgtcaatttaagtttgggacatattgtggagttggcatctaaagttacaatgagaccaagcttcttagagccaaaatttctggagcaagacagttgcttgacattttgctctcataaggttgatgctgtgggttcatataaactacaactatgcatgtccgcacaagaggctggtgcaagagatatgtctttgtctccatatagtagttactcatataatgatgtcccaccttcgtcattatcagatatcataaggctggtcccttctaagttcaagcgg

SEQ ID NO: 65510 - DNA, 2342 bp, Zea Mays
acacgcataagcaaaaaaatgttttcattacaacatgtacccctgcactaggaaaataaggcactcggcactcgtgagccgtcgcatttccccccgtgtgaccaattcctctccgggccgagcagccgttccaatccgctcacgccgcctctctcgctgccccgcttgaccgcctgctagcgctgcagtttgatgctgatgacctgatccctccgttgggtaggttcttgggcgcggaaagaacaaagaactcgtggtgggtccgggtccgcaagaccctaggtgttcgtcagcagcgaggatgcccggcctgcctctgcctcaatcgttaaatcagaatattggatgtgaatatgcctatcctgggtctacaggccaggccttccgtcagcagctaagaactgcattgtctccagatgagaaacttaccgctgaaaaagatttggctctgtattgcaagccagtcgagctctacaatattattcaacggcgagccatgaaaaatcccctttttattcaaagatgccttctttataatatacatgcgaggaggaaaaagaggattcagataaccatatcactttctggaagtacaaatactgagttgcaaacacattatgtctttcctctttatgttctgttagctagacccactagtaacctttcacttgaagggcattctccaatttatcgattcagtcgggtttgcttgcttacttcctttagtgaacatggaaataaggacaacagtgaagctacattcatcattcctgacgtgaagagtttgtcaacctcccgtgcttgcaaccatgatattatctttattagctgtgggcaagttggacaaagtaatggtgaagataactgctctgggaaccatgtggaagattcttctctccaaatgcttgaagggaaatgctcctggggtaaaataccaactaatttacttgcttcatctttggagagttgtgtcaatttaagtttgggacatattgtggagttggcatctaaagttacaatgagaccaagcttcttagagccaaaatttctggagcaagacagttgcttgacattttgctctcataaggttgatgctgtgggttcatataaactacaactatgcatgtccgcacaagaggctggtgcaagagatatgtctttgtctccatatagtagttactcatataatgatgtcccaccttcgtcattatcagatatcataaggttaagatctggcaatgtactttttaattacaagtactacaataatacaatgcaagagactgaagtcactgaagatttctcttgtccattttgctatgtacgatgtggaagcttcaagggtctaggatgccatttaaactcatcacatgatctattccactatgagttttggatatctgaagagtaccaggttgttaatgttagtctgaaggctgatgcttggagaacagaggtaaatttatgacagacataaagtttaagctgttttttttttcagattcaatttctgtttggtatatggagctgtagttgatgagtttcgtactttatatatgtgtttaacactttaacttaatatgtccctcagtgttcttccaaaggttcgtttaaatggaggctccacttagttgggcaaaccgaaggcattgcatgttccttagtccaggacgactccctgctttgtgatttccttcctttcttgagtgcagaagccaaggatgaaagagcattggctattctatatctccaatcaaattccttacatagtctttttgcggagggcgttgatccaaggcatcaaacattttcttatcgctcaaggtttaagaagcgtagacgatcaaagaacacaatggagaaaatcaggcatgtacactcacatattatggaatcaggttcacctgaagatgaggcaggatctgaggacaactttgtgcaaggggagaatgggacttctgtagcaaatgcttcgattgatcctgctcaatctttacatggcagcaatctttcaccaccaacagtactacagtttgggaagacaaggaagctatctgagagatctgaccctagaaagtagtccttttcggcaactcctgcaaaaacgacagttcttccattctcacagggcgcagccaatgcaactggagcaagtgttctcggaccgtgatagtgaagatgaagttgatgatgatattgctgacttcgaggatagaagaatgcttgatgattttgttgatgttacgaaagatgaaaaacttattatgcatatgtggaattcatttgttcgaaaacaaagttcgtgcagacaagcatcttgggtgaacaatctacaatctgtg

SEQ ID NO: 65511 - DNA, 2800 bp, Zea Mays
acacgcataagcaaaaaaatgttttcattacaacatgtacccctgcactaggaaaataaggcactcggcactcgtgagccgtcgcatttccccccgtgtgaccaattcctctccgggccgagcagccgttccaatccgctcacgccgcctctctcgctgccccgcttgaccgcctgctagcgctgcagtttgatgctgatgacctgatccctccgttgggtaggttcttgggcgcggaaagaacaaagaactcgtggtgggtccgggtccgcaagaccctaggtgttcgtcagcagcgaggatgcccggcctgcctctgcctcaatcgttaaatcagaatattggatgtgaatatgcctatcctgggtctacaggccaggccttccgtcagcagctaagaactgcattgtctccagatgagaaacttaccgctgaaaaagatttggctctgtattgcaagccagtcgagctctacaatattattcaacggcgagccatgaaaaatcccctttttattcaaagatgccttctttataatatacatgcgaggaggaaaaagaggattcagataaccatatcactttctggaagtacaaatactgagttgcaaacacattatgtctttcctctttatgttctgttagctagacccactagtaacctttcacttgaagggcattctccaatttatcgattcagtcgggtttgcttgcttacttcctttagtgaacatggaaataaggacaacagtgaagctacattcatcattcctgacgtgaagagtttgtcaacctcccgtgcttgcaaccatgatattatctttattagctgtgggcaagttggacaaagtaatggtgaagataactgctctgggaaccatgtggaagattcttctctccaaatgcttgaagggaaatgctcctggggtaaaataccaactaatttacttgcttcatctttggagagttgtgtcaatttaagtttgggacatattgtggagttggcatctaaagttacaatgagaccaagcttcttagagccaaaatttctggagcaagacagttgcttgacattttgctctcataaggttgatgctgtgggttcatataaactacaactatgcatgtccgcacaagaggctggtgcaagagatatgtctttgtctccatatagtagttactcatataatgatgtcccaccttcgtcattatcagatatcataaggttaagatctggcaatgtactttttaattacaagtactacaataatacaatgcaagagactgaagtcactgaagatttctcttgtccattttgctatgtacgatgtggaagcttcaagggtctaggatgccatttaaactcatcacatgatctattccactatgagttttggatatctgaagagtaccaggttgttaatgttagtctgaaggctgatgcttggagaacagagtgttcttccaaaggttcgtttaaatggaggctccacttagttgggcaaaccgaaggcattgcatgttccttagtccaggacgactccctgctttgtgatttccttcctttcttgagtgcagaagccaaggatgaaagagcattggctattctatatctccaatcaaattccttacatagtgtattgtgtacctcaatgattttttggtggataatgttttacatgcttaacaatgcatggttactatttctttaaatggaagcactcttaactgtatttggtaactaatgatcctaactggcagctttttgcggagggcgttgatccaaggcatcaaacattttcttatcgctcaaggtttaagaagcgtagacgatcaaagaacacaatggagaaaatcaggcatgtacactcacatattatggaatcaggttcacctgaagatgaggcaggatctgaggacaactttgtgcaaggggagaatgggacttctgtagcaaatgcttcgattgatcctgctcaatctttacatggcagcaatctttcaccaccaacagtactacagtttgggaagacaaggaagctatctgagagatctgaccctagaaatcggcaactcctgcaaaaacgacagttcttccattctcacagggcgcaggtgaaaaccaatgcaactggagcaagtgttctcggaccgtgatagtgaagatgaagttgatgatgatattgctgacttcgaggatagaagaatgcttgatgattttgttgatgttacgaaagatgaaaaacttattatgcatatgtggaattcatttgttcgaaaacaaagagtgttagctgatggtcatataccttgggcctgcgaggcattctcccagttgcatggacgacaacttatacaaaatcctgctctgctgtggggttggcgtttcttcatgattaaactttggaaccataacattttagatgcccgcactatgaacacatgcaatacagtccttcaaattttacaagaagaaagcacaggactaaagtaattttgatgcttctgatgaaaattcaagggaagaagatttctttaccatttccaagaagaaagcatagaattggagtaactttttattgataatttcattcatatctattgtcaattgtattaatggtttttaaaagagacaaatcatgtctaactctcacgctgtaatattctaagtcgtacgtgaatttgatgaatattcattgttgttttacttaagagttatcgtattgagatccttaacatattattttatttttcatctaggttcttaaattataaaataatggattgagattagaaaatat

SEQ ID NO: 65512 - DNA, 2754 bp, Zea Mays
acacgcataagcaaaaaaatgttttcattacaacatgtacccctgcactaggaaaataaggcactcggcactcgtgagccgtcgcatttccccccgtgtgaccaattcctctccgggccgagcagccgttccaatccgctcacgccgcctctctcgctgccccgcttgaccgcctgctagcgctgcagtttgatgctgatgacctgatccctccgttgggtaggttcttgggcgcggaaagaacaaagaactcgtggtgggtccgggtccgcaagaccctaggtgttcgtcagcagcgaggatgcccggcctgcctctgcctcaatcgttaaatcagaatattggatgtgaatatgcctatcctgggtctacaggccaggccttccgtcagcagctaagaactgcattgtctccagatgagaaacttaccgctgaaaaagatttggctctgtattgcaagccagtcgagctctacaatattattcaacggcgagccatgaaaaatcccctttttattcaaagatgccttctttataatatacatgcgaggaggaaaaagaggattcagataaccatatcactttctggaagtacaaatactgagttgcaaacacattatgtctttcctctttatgttctgttagctagacccactagtaacctttcacttgaagggcattctccaatttatcgattcagtcgggtttgcttgcttacttcctttagtgaacatggaaataaggacaacagtgaagctacattcatcattcctgacgtgaagagtttgtcaacctcccgtgcttgcaaccatgatattatctttattagctgtgggcaagttggacaaagtaatggtgaagataactgctctgggaaccatgtggaagattcttctctccaaatgcttgaagggaaatgctcctggggtaaaataccaactaatttacttgcttcatctttggagagttgtgtcaatttaagtttgggacatattgtggagttggcatctaaagttacaatgagaccaagcttcttagagccaaaatttctggagcaagacagttgcttgacattttgctctcataaggttgatgctgtgggttcatataaactacaactatgcatgtccgcacaagaggctggtgcaagagatatgtctttgtctccatatagtagttactcatataatgatgtcccaccttcgtcattatcagatatcataaggttaagatctggcaatgtactttttaattacaagtactacaataatacaatgcaagagactgaagtcactgaagatttctcttgtccattttgctatgtacgatgtggaagcttcaagggtctaggatgccatttaaactcatcacatgatctattccactatgagttttggatatctgaagagtaccaggttgttaatgttagtctgaaggctgatgcttggagaacagagtgttcttccaaaggttcgtttaaatggaggctccacttagttgggcaaaccgaaggcattgcatgttccttagtccaggacgactccctgctttgtgatttccttcctttcttgagtgcagaagccaaggatgaaagagcattggctattctatatctccaatcaaattccttacatagtctttttgcggagggcgttgatccaaggcatcaaacattttcttatcgctcaaggtttaagaagcgtagacgatcaaagaacacaatggagaaaatcaggcatgtacactcacatattatggaatcaggttcacctgaagatgaggcaggatctgaggacaactttgtgcaaggggagaatgggacttctgtagcaaatgcttcgattgatcctgctcaatctttacatggcagcaatctttcaccaccaacagtactacagtttgggaagacaaggaagctatctgagagatctgaccctagaaatcggcaactcctgcaaaaacgacagttcttccattctcacagggcgcagccaatgcaactggagcaagtgttctcggaccgtgatagtgaagatgaagttgatgatgatattgctgacttcgaggatagaagaatgcttgatgattttgttgatgttacgaaagatgaaaaacttattatgcatatgtggaattcatttgttcgaaaacaaagatggtgctatgtcacaatacacaagggtggcatgacaagatgagcagtggtggtccactcgcaaagaagatggcgcagctaggagagtgttagctgatggtcatataccttgggcctgcgaggcattctcccagttgcatggacgacaacttatacaaaatcctgctctgctgtggggttggcgtttcttcatgattaaactttggaaccataacattttagatgcccgcactatgaacacatgcaatacagtccttcaaattttacaagaagaaagcacaggactaaagtaattttgatgcttctgatgaaaattcaagggaagaagatttctttaccatttccaagaagaaagcatagaattggagtaactttttattgataatttcattcatatctattgtcaattgtattaatggtttttaaaagagacaaatcatgtctaactctcacgctgtaatattctaagtcgtacgtgaatttgatgaatattcattgttgttttacttaagagttatcgtattgagatccttaacatattattttatttttcatctaggttcttaaattataaaataatggattgagattagaaaatat

SEQ ID NO: 65513 - DNA, 2543 bp, Zea Mays
acacgcataagcaaaaaaatgttttcattacaacatgtacccctgcactaggaaaataaggcactcggcactcgtgagccgtcgcatttccccccgtgtgaccaattcctctccgggccgagcagccgttccaatccgctcacgccgcctctctcgctgccccgcttgaccgcctgctagcgctgcagtttgatgctgatgacctgatccctccgttgggtaggttcttgggcgcggaaagaacaaagaactcgtggtgggtccgggtccgcaagaccctaggtgttcgtcagcagcgaggatgcccggcctgcctctgcctcaatcgttaaatcagaatattggatgtgaatatgcctatcctgggtctacaggccaggccttccgtcagcagctaagaactgcattgtctccagatgagaaacttaccgctgaaaaagatttggctctgtattgcaagccagtcgagctctacaatattattcaacggcgagccatgaaaaatcccctttttattcaaagatgccttctttataatatacatgcgaggaggaaaaagaggattcagataaccatatcactttctggaagtacaaatactgagttgcaaacacattatgtctttcctctttatgttctgttagctagacccactagtaacctttcacttgaagggcattctccaatttatcgattcagtcgggtttgcttgcttacttcctttagtgaacatggaaataaggacaacagtgaagctacattcatcattcctgacgtgaagagtttgtcaacctcccgtgcttgcaaccatgatattatctttattagctgtgggcaagttggacaaagtaatggtgaagataactgctctgggaaccatgtggaagattcttctctccaaatgcttgaagggaaatgctcctggggtaaaataccaactaatttacttgcttcatctttggagagttgtgtcaatttaagtttgggacatattgtggagttggcatctaaagttacaatgagaccaagcttcttagagccaaaatttctggagcaagacagttgcttgacattttgctctcataaggttgatgctgtgggttcatataaactacaactatgcatgtccgcacaagaggctggtgcaagagatatgtctttgtctccatatagtagttactcatataatgatgtcccaccttcgtcattatcagatatcataaggttaagatctggcaatgtactttttaattacaagtactacaataatacaatgcaagagactgaagtcactgaagatttctcttgtccattttgctatgtacgatgtggaagcttcaagggtctaggatgccatttaaactcatcacatgatctattccactatgagttttggatatctgaagagtaccaggttgttaatgttagtctgaaggctgatgcttggagaacagagctttttgcggagggcgttgatccaaggcatcaaacattttcttatcgctcaaggtttaagaagcgtagacgatcaaagaacacaatggagaaaatcaggcatgtacactcacatattatggaatcaggttcacctgaagatgaggcaggatctgaggacaactttgtgcaaggggagaatgggacttctgtagcaaatgcttcgattgatcctgctcaatctttacatggcagcaatctttcaccaccaacagtactacagtttgggaagacaaggaagctatctgagagatctgaccctagaaatcggcaactcctgcaaaaacgacagttcttccattctcacagggcgcagccaatgcaactggagcaagtgttctcggaccgtgatagtgaagatgaagttgatgatgatattgctgacttcgaggatagaagaatgaaaaacttattatgcatatgtggaattcatttgttcgaaaacaaagatggtgctatgtcacaatacacaagggtggcatgacaagatgagcagtggtggtccactcgcaaagaagatggcgcagctaggagagtgttagctgatggtcatataccttgggcctgcgaggcattctcccagttgcatggacgacaacttatacaaaatcctgctctgctgtggggttggcgtttcttcatgattaaactttggaaccataacattttagatgcccgcactatgaacacatgcaatacagtccttcaaattttacaagaagaaagcacaggactaaagtaattttgatgcttctgatgaaaattcaagggaagaagatttctttaccatttccaagaagaaagcatagaattggagtaactttttattgataatttcattcatatctattgtcaattgtattaatggtttttaaaagagacaaatcatgtctaactctcacgctgtaatattctaagtcgtacgtgaatttgatgaatattcattgttgttttacttaagagttatcgtattgagatccttaacatattattttatttttcatctaggttcttaaattataaaataatggattgagattagaaaatat

SEQ ID NO: 65514 - DNA, 2493 bp, Zea Mays
acacgcataagcaaaaaaatgttttcattacaacatgtacccctgcactaggaaaataaggcactcggcactcgtgagccgtcgcatttccccccgtgtgaccaattcctctccgggccgagcagccgttccaatccgctcacgccgcctctctcgctgccccgcttgaccgcctgctagcgctgcagtttgatgctgatgacctgatccctccgttgggtaggttcttgggcgcggaaagaacaaagaactcgtggtgggtccgggtccgcaagaccctaggtgttcgtcagcagcgaggatgcccggcctgcctctgcctcaatcgttaaatcagaatattggatgtgaatatgcctatcctgggtctacaggccaggccttccgtcagcagctaagaactgcattgtctccagatgagaaacttaccgctgaaaaagatttggctctgtattgcaagccagtcgagctctacaatattattcaacggcgagccatgaaaaatcccctttttattcaaagatgccttctttataatatacatgcgaggaggaaaaagaggattcagataaccatatcactttctggaagtacaaatactgagttgcaaacacattatgtctttcctctttatgttctgttagctagacccactagtaacctttcacttgaagggcattctccaatttatcgattcagtcgggtttgcttgcttacttcctttagtgaacatggaaataaggacaacagtgaagctacattcatcattcctgacgtgaagagtttgtcaacctcccgtgcttgcaaccatgatattatctttattagctgtgggcaagttggacaaagtaatggtgaagataactgctctgggaaccatgtggaagattcttctctccaaatgcttgaagggaaatgctcctggggtaaaataccaactaatttacttgcttcatctttggagagttgtgtcaatttaagtttgggacatattgtggagttggcatctaaagttacaatgagaccaagcttcttagagccaaaatttctggagcaagacagttgcttgacattttgctctcataaggttgatgctgtgggttcatataaactacaactatgcatgtccgcacaagaggctggtgcaagagatatgtctttgtctccatatagtagttactcatataatgatgtcccaccttcgtcattatcagatatcataaggttaagatctggcaatgtactttttaattacaagtactacaataatacaatgcaagagactgaagtcactgaagatttctcttgtccattttgctatgtacgatgtggaagcttcaagggtctaggatgccatttaaactcatcacatgatctattccactatgagttttgggttgatatctgaagagtaccaggttgttaatgttagtctgaaggctgatgcttggagaacagagctttttgcggagggcgttgatccaaggcatcaaacattttcttatcgctcaaggtttaagaagcgtagacgatcaaagaacacaatggagaaaatcaggcatgtacactcacatattatggaatcaggttcacctgaagatgaggcaggatctgaggacaactttgtgcaaggggagaatgggacttctgtagcaaatgcttcgattgatcctgctcaatctttacatggcagcaatctttcaccaccaacagtactacagtttgggaagacaaggaagctatctgagagatctgaccctagaaatcggcaactcctgcaaaaacgacagttcttccattctcacagggcgcagccaatgcaactggagcaagtgttctcggaccgtgatagtgaagatgaagttgatgatgatattgctgacttcgaggatagaagaatgcttgatgattttgttgatgttacgaaagatgaaaaacttattatgcatatgtggaattcatttgttcgaaaacaaagagtgttagctgatggtcatataccttgggcctgcgaggcattctcccagttgcatggacgacaacttatacaaaatcctgctctgctgtggggttggcgtttcttcatgattaaactttggaaccataacattttagatgcccgcactatgaacacatgcaatacagtccttcaaattttacaagaagaaagcacaggactaaagtaattttgatgcttctgatgaaaattcaagggaagaagatttctttaccatttccaagaagaaagcatagaattggagtaactttttattgataatttcattcatatctattgtcaattgtattaatggtttttaaaagagacaaatcatgtctaactctcacgctgtaatattctaagtcgtacgtgaatttgatgaatattcattgttgttttacttaagagttatcgtattgagatccttaacatattattttatttttcatctaggttcttaaattataaaataatggattgagattagaaaatat

SEQ ID NO: 65515 - DNA, 3306 bp, Zea Mays
acacgcataagcaaaaaaatgttttcattacaacatgtacccctgcactaggaaaataaggcactcggcactcgtgagccgtcgcatttccccccgtgtgaccaattcctctccgggccgagcagccgttccaatccgctcacgccgcctctctcgctgccccgcttgaccgcctgctagcgctgcagtttgatgctgatgacctgatccctccgttgggtaggttcttgggcgcggaaagaacaaagaactcgtggtgggtccgggtccgcaagaccctaggtgttcgtcagcagcgaggatgcccggcctgcctctgcctcaatcgttaaatcagaatattggatgtgaatatgcctatcctgggtctacaggccaggccttccgtcagcagctaagaactgcattgtctccagatgagaaacttaccgctgaaaaagatttggctctgtattgcaagccagtcgagctctacaatattattcaacggcgagccatgaaaaatcccctttttattcaaagatgccttctttataatatacatgcgaggaggaaaaagaggattcagataaccatatcactttctggaagtacaaatactgagttgcaaacacattatgtctttcctctttatgttctgttagctagacccactagtaacctttcacttgaagggcattctccaatttatcgattcagtcgggtttgcttgcttacttcctttagtgaacatggaaataaggacaacagtgaagctacattcatcattcctgacgtgaagagtttgtcaacctcccgtgcttgcaaccatgatattatctttattagctgtgggcaagttggacaaagtaatggtgaagataactgctctgggaaccatgtggaagattcttctctccaaatgcttgaagggaaatgctcctggggtaaaataccaactaatttacttgcttcatctttggagagttgtgtcaatttaagtttgggacatattgtggagttggcatctaaagttacaatgagaccaagcttcttagagccaaaatttctggagcaagacagttgcttgacattttgctctcataaggttgatgctgtggtaaggtctcctctatttttacattcatgtttaatatgattttgtccagggatctccatgtttctcttattactaatgctactaatacattctttgagtccaagattagtgtggttaacaggtatgcatcacttgcaactgccagtccattggatgacatgtcactgcatcacaagtttataaattcagctttgggcatacattgccaccgaatgcgctatatccacttttccatggaattgctggaaaatgactttagctttcaatttaaatgccccaaacttttggcaaaagtatttcaatttttatgaggggtaataaacttgtgaaggggggaatctacaagcttttagttgttgctattctgcagtataagagcatcagatctatcgggtcccactttggaaacctgtgttgagcacttgagttgcttctttctttttgtggtgctggtggttggagggggaagaggggttggcagtcaaaatcattaacctttattcttgcagggttcatataaactacaactatgcatgtccgcacaagaggctggtgcaagagatatgtctttgtctccatatagtagttactcatataatgatgtcccaccttcgtcattatcagatatcataaggttaagatctggcaatgtactttttaattacaagtactacaataatacaatgcaagagactgaagtcactgaagatttctcttgtccattttgctatgtacgatgtggaagcttcaagggtctaggatgccatttaaactcatcacatgatctattccactatgagttttgggttgatatctgaagagtaccaggttgttaatgttagtctgaaggctgatgcttggagaacagagtgttcttccaaaggttcgtttaaatggaggctccacttagttgggcaaaccgaaggcattgcatgttccttagtccaggacgactccctgctttgtgatttccttcctttcttgagtgcagaagccaaggatgaaagagcattggctattctatatctccaatcaaattccttacatagtgtattgtgtacctcaatgattttttggtggataatgttttacatgcttaacaatgcatggttactatttctttaaatggaagcactcttaactgtatttggtaactaatgatcctaactggcagctttttgcggagggcgttgatccaaggcatcaaacattttcttatcgctcaaggtttaagaagcgtagacgatcaaagaacacaatggagaaaatcaggcatgtacactcacatattatggaatcaggttcacctgaagatgaggcaggatctgaggacaactttgtgcaaggggagaatgggacttctgtagcaaatgcttcgattgatcctgctcaatctttacatggcagcaatctttcaccaccaacagtactacagtttgggaagacaaggaagctatctgagagatctgaccctagaaatcggcaactcctgcaaaaacgacagttcttccattctcacagggcgcagccaatgcaactggagcaagtgttctcggaccgtgatagtgaagatgaagttgatgatgatattgctgacttcgaggatagaagaatgcttgatgattttgttgatgttacgaaagatgaaaaacttattatgcatatgtggaattcatttgttcgaaaacaaagagtgttagctgatggtcatataccttgggcctgcgaggcattctcccagttgcatggacgacaacttatacaaaatcctgctctgctgtggggttggcgtttcttcatgattaaactttggaaccataacattttagatgcccgcactatgaacacatgcaatacagtccttcaaattttacaagaagaaagcacaggactaaagtaattttgatgcttctgatgaaaattcaagggaagaagatttctttaccatttccaagaagaaagcatagaattggagtaactttttattgataatttcattcatatctattgtcaattgtattaatggtttttaaaagagacaaatcatgtctaactctcacgctgtaatattctaagtcgtacgtgaatttgatgaatattcattgttgttttacttaagagttatcgtattgagatccttaacatattattttatttttcatctaggttcttaaattataaaataatggattgagattagaaaatat

SEQ ID NO: 65516 - DNA, 2657 bp, Zea Mays
acacgcataagcaaaaaaatgttttcattacaacatgtacccctgcactaggaaaataaggcactcggcactcgtgagccgtcgcatttccccccgtgtgaccaattcctctccgggccgagcagccgttccaatccgctcacgccgcctctctcgctgccccgcttgaccgcctgctagcgctgcagtttgatgctgatgacctgatccctccgttgggtaggttcttgggcgcggaaagaacaaagaactcgtggtgggtccgggtccgcaagaccctaggtgttcgtcagcagcgaggatgcccggcctgcctctgcctcaatcgttaaatcagaatattggatgtgaatatgcctatcctgggtctacaggccaggccttccgtcagcagctaagaactgcattgtctccagatgagaaacttaccgctgaaaaagatttggctctgtattgcaagccagtcgagctctacaatattattcaacggcgagccatgaaaaatcccctttttattcaaagatgccttctttataatatacatgcgaggaggaaaaagaggattcagataaccatatcactttctggaatgaacatggaaataaggacaacagtgaagctacattcatcattcctgacgtgaagagtttgtcaacctcccgtgcttgcaaccatgatattatctttattagctgtgggcaagttggacaaagtaatggtgaagataactgctctgggaaccatgtggaagattcttctctccaaatgcttgaagggaaatgctcctggggtaaaataccaactaatttacttgcttcatctttggagagttgtgtcaatttaagtttgggacatattgtggagttggcatctaaagttacaatgagaccaagcttcttagagccaaaatttctggagcaagacagttgcttgacattttgctctcataaggttgatgctgtgggttcatataaactacaactatgcatgtccgcacaagaggctggtgcaagagatatgtctttgtctccatatagtagttactcatataatgatgtcccaccttcgtcattatcagatatcataaggttaagatctggcaatgtactttttaattacaagtactacaataatacaatgcaagagactgaagtcactgaagatttctcttgtccattttgctatgtacgatgtggaagcttcaagggtctaggatgccatttaaactcatcacatgatctattccactatgagttttggatatctgaagagtaccaggttgttaatgttagtctgaaggctgatgcttggagaacagagtgttcttccaaaggttcgtttaaatggaggctccacttagttgggcaaaccgaaggcattgcatgttccttagtccaggacgactccctgctttgtgatttccttcctttcttgagtgcagaagccaaggatgaaagagcattggctattctatatctccaatcaaattccttacatagtgtattgtgtacctcaatgattttttggtggataatgttttacatgcttaacaatgcatggttactatttctttaaatggaagcactcttaactgtatttggtaactaatgatcctaactggcagctttttgcggagggcgttgatccaaggcatcaaacattttcttatcgctcaaggtttaagaagcgtagacgatcaaagaacacaatggagaaaatcaggcatgtacactcacatattatggaatcaggttcacctgaagatgaggcaggatctgaggacaactttgtgcaaggggagaatgggacttctgtagcaaatgcttcgattgatcctgctcaatctttacatggcagcaatctttcaccaccaacagtactacagtttgggaagacaaggaagctatctgagagatctgaccctagaaatcggcaactcctgcaaaaacgacagttcttccattctcacagggcgcagccaatgcaactggagcaagtgttctcggaccgtgatagtgaagatgaagttgatgatgatattgctgacttcgaggatagaagaatgcttgatgattttgttgatgttacgaaagatgaaaaacttattatgcatatgtggaattcatttgttcgaaaacaaagagtgttagctgatggtcatataccttgggcctgcgaggcattctcccagttgcatggacgacaacttatacaaaatcctgctctgctgtggggttggcgtttcttcatgattaaactttggaaccataacattttagatgcccgcactatgaacacatgcaatacagtccttcaaattttacaagaagaaagcacaggactaaagtaattttgatgcttctgatgaaaattcaagggaagaagatttctttaccatttccaagaagaaagcatagaattggagtaactttttattgataatttcattcatatctattgtcaattgtattaatggtttttaaaagagacaaatcatgtctaactctcacgctgtaatattctaagtcgtacgtgaatttgatgaatattcattgttgttttacttaagagttatcgtattgagatccttaacatattattttatttttcatctaggttcttaaattataaaataatggattgagattagaaaatat

SEQ ID NO: 65517 - DNA, 2797 bp, Zea Mays
acacgcataagcaaaaaaatgttttcattacaacatgtacccctgcactaggaaaataaggcactcggcactcgtgagccgtcgcatttccccccgtgtgaccaattcctctccgggccgagcagccgttccaatccgctcacgccgcctctctcgctgccccgcttgaccgcctgctagcgctgcagtttgatgctgatgacctgatccctccgttgggtaggttcttgggcgcggaaagaacaaagaactcgtggtgggtccgggtccgcaagaccctaggtgttcgtcagcagcgaggatgcccggcctgcctctgcctcaatcgttaaatcagaatattggatgtgaatatgcctatcctgggtctacaggccaggccttccgtcagcagctaagaactgcattgtctccagatgagaaacttaccgctgaaaaagatttggctctgtattgcaagccagtcgagctctacaatattattcaacggcgagccatgaaaaatcccctttttattcaaagatgccttctttataatatacatgcgaggaggaaaaagaggattcagataaccatatcactttctggaagtacaaatactgagttgcaaacacattatgtctttcctctttatgttctgttagctagacccactagtaacctttcacttgaagggcattctccaatttatcgattcagtcgggtttgcttgcttacttcctttagtgaacatggaaataaggacaacagtgaagctacattcatcattcctgacgtgaagagtttgtcaacctcccgtgcttgcaaccatgatattatctttattagctgtgggcaagttggacaaagtaatggtgaagataactgctctgggaaccatgtggaagattcttctctccaaatgcttgaagggaaatgctcctggggtaaaataccaactaatttacttgcttcatctttggagagttgtgtcaatttaagtttgggacatattgtggagttggcatctaaagttacaatgagaccaagcttcttagagccaaaatttctggagcaagacagttgcttgacattttgctctcataaggttgatgctgtgggttcatataaactacaactatgcatgtccgcacaagaggctggtgcaagagatatgtctttgtctccatatagtagttactcatataatgatgtcccaccttcgtcattatcagatatcataaggttaagatctggcaatgtactttttaattacaagtactacaataatacaatgcaagagactgaagtcactgaagatttctcttgtccattttgctatgtacgatgtggaagcttcaagggtctaggatgccatttaaactcatcacatgatctattccactatgagttttgggttgatatctgaagagtaccaggttgttaatgttagtctgaaggctgatgcttggagaacagagtgttcttccaaaggttcgtttaaatggaggctccacttagttgggcaaaccgaaggcattgcatgttccttagtccaggacgactccctgctttgtgatttccttcctttcttgagtgcagaagccaaggatgaaagagcattggctattctatatctccaatcaaattccttacatagtgtattgtgtacctcaatgattttttggtggataatgttttacatgcttaacaatgcatggttactatttctttaaatggaagcactcttaactgtatttggtaactaatgatcctaactggcagctttttgcggagggcgttgatccaaggcatcaaacattttcttatcgctcaaggtttaagaagcgtagacgatcaaagaacacaatggagaaaatcaggcatgtacactcacatattatggaatcaggttcacctgaagatgaggcaggatctgaggacaactttgtgcaaggggagaatgggacttctgtagcaaatgcttcgattgatcctgctcaatctttacatggcagcaatctttcaccaccaacagtactacagtttgggaagacaaggaagctatctgagagatctgaccctagaaatcggcaactcctgcaaaaacgacagttcttccattctcacagggcgcagccaatgcaactggagcaagtgttctcggaccgtgatagtgaagatgaagttgatgatgatattgctgacttcgaggatagaagaatgcttgatgattttgttgatgttacgaaagatgaaaaacttattatgcatatgtggaattcatttgttcgaaaacaaagagtgttagctgatggtcatataccttgggcctgcgaggcattctcccagttgcatggacgacaacttatacaaaatcctgctctgctgtggggttggcgtttcttcatgattaaactttggaaccataacattttagatgcccgcactatgaacacatgcaatacagtccttcaaattttacaagaagaaagcacaggactaaagtaattttgatgcttctgatgaaaattcaagggaagaagatttctttaccatttccaagaagaaagcatagaattggagtaactttttattgataatttcattcatatctattgtcaattgtattaatggtttttaaaagagacaaatcatgtctaactctcacgctgtaatattctaagtcgtacgtgaatttgatgaatattcattgttgttttacttaagagttatcgtattgagatccttaacatattattttatttttcatctaggttcttaaattataaaataatggattgagattagaaaatat

SEQ ID NO: 65518 - DNA, 2424 bp, Zea Mays
acacgcataagcaaaaaaatgttttcattacaacatgtacccctgcactaggaaaataaggcactcggcactcgtgagccgtcgcatttccccccgtgtgaccaattcctctccgggccgagcagccgttccaatccgctcacgccgcctctctcgctgccccgcttgaccgcctgctagcgctgcagtttgatgctgatgacctgatccctccgttgggtaggttcttgggcgcggaaagaacaaagaactcgtggtgggtccgggtccgcaagaccctaggtgttcgtcagcagcgaggatgcccggcctgcctctgcctcaatcgttaaatcagaatattggatgtgaatatgcctatcctgggtctacaggccaggccttccgtcagcagctaagaactgcattgtctccagatgagaaacttaccgctgaaaaagatttggctctgtattgcaagccagtcgagctctacaatattattcaacggcgagccatgaaaaatcccctttttattcaaagatgccttctttataatatacatgcgaggaggaaaaagaggattcagataaccatatcactttctggaagtacaaatactgagttgcaaacacattatgtctttcctctttatgttctgttagctagacccactagtaacctttcacttgaagggcattctccaatttatcgattcagtcgggtttgcttgcttacttcctttagtgaacatggaaataaggacaacagtgaagctacattcatcattcctgacgtgaagagtttgtcaacctcccgtgcttgcaaccatgatattatctttattagctgtgggcaagttggacaaagtaatggtgaagataactgctctgggaaccatgtggaagattcttctctccaaatgcttgaagggaaatgctcctggggtaaaataccaactaatttacttgcttcatctttggagagttgtgtcaatttaagtttgggacatattgtggagttggcatctaaagttacaatgagaccaagcttcttagagccaaaatttctggagcaagacagttgcttgacattttgctctcataaggttgatgctgtgggttcatataaactacaactatgcatgtccgcacaagaggctggtgcaagagatatgtctttgtctccatatagtagttactcatataatgatgtcccaccttcgtcattatcagatatcataagtcactgaagatttctcttgtccattttgctatgtacgatgtggaagcttcaagggtctaggatgccatttaaactcatcacatgatctattccactatgagttttggatatctgaagagtaccaggttgttaatgttagtctgaaggctgatgcttggagaacagagctttttgcggagggcgttgatccaaggcatcaaacattttcttatcgctcaaggtttaagaagcgtagacgatcaaagaacacaatggagaaaatcaggcatgtacactcacatattatggaatcaggttcacctgaagatgaggcaggatctgaggacaactttgtgcaaggggagaatgggacttctgtagcaaatgcttcgattgatcctgctcaatctttacatggcagcaatctttcaccaccaacagtactacagtttgggaagacaaggaagctatctgagagatctgaccctagaaatcggcaactcctgcaaaaacgacagttcttccattctcacagggcgcagccaatgcaactggagcaagtgttctcggaccgtgatagtgaagatgaagttgatgatgatattgctgacttcgaggatagaagaatgcttgatgattttgttgatgttacgaaagatgaaaaacttattatgcatatgtggaattcatttgttcgaaaacaaagagtgttagctgatggtcatataccttgggcctgcgaggcattctcccagttgcatggacgacaacttatacaaaatcctgctctgctgtggggttggcgtttcttcatgattaaactttggaaccataacattttagatgcccgcactatgaacacatgcaatacagtccttcaaattttacaagaagaaagcacaggactaaagtaattttgatgcttctgatgaaaattcaagggaagaagatttctttaccatttccaagaagaaagcatagaattggagtaactttttattgataatttcattcatatctattgtcaattgtattaatggtttttaaaagagacaaatcatgtctaactctcacgctgtaatattctaagtcgtacgtgaatttgatgaatattcattgttgttttacttaagagttatcgtattgagatccttaacatattattttatttttcatctaggttcttaaattataaaataatggattgagattagaaaatat

SEQ ID NO: 65519 - DNA, 2574 bp, Zea Mays
acacgcataagcaaaaaaatgttttcattacaacatgtacccctgcactaggaaaataaggcactcggcactcgtgagccgtcgcatttccccccgtgtgaccaattcctctccgggccgagcagccgttccaatccgctcacgccgcctctctcgctgccccgcttgaccgcctgctagcgctgcagtttgatgctgatgacctgatccctccgttgggtaggttcttgggcgcggaaagaacaaagaactcgtggtgggtccgggtccgcaagaccctaggtgttcgtcagcagcgaggatgcccggcctgcctctgcctcaatcgttaaatcagaatattggatgtgaatatgcctatcctgggtctacaggccaggccttccgtcagcagctaagaactgcattgtctccagatgagaaacttaccgctgaaaaagatttggctctgtattgcaagccagtcgagctctacaatattattcaacggcgagccatgaaaaatcccctttttattcaaagatgccttctttataatatacatgcgaggaggaaaaagaggattcagataaccatatcactttctggaagtacaaatactgagttgcaaacacattatgtctttcctctttatgttctgttagctagacccactagtaacctttcacttgaagggcattctccaatttatcgattcagtcgggtttgcttgcttacttcctttagtgaacatggaaataaggacaacagtgaagctacattcatcattcctgacgtgaagagtttgtcaacctcccgtgcttgcaaccatgatattatctttattagctgtgggcaagttggacaaagtaatggtgaagataactgctctgggaaccatgtggaagattcttctctccaaatgcttgaagggaaatgctcctggggtaaaataccaactaatttacttgcttcatctttggagagttgtgtcaatttaagtttgggacatattgtggagttggcatctaaagttacaatgagaccaagcttcttagagccaaaatttctggagcaagacagttgcttgacattttgctctcataaggttgatgctgtgggttcatataaactacaactatgcatgtccgcacaagaggctggtgcaagagatatgtctttgtctccatatagtagttactcatataatgatgtcccaccttcgtcattatcagatatcataaggttaagatctggcaatgtactttttaattacaagtactacaataatacaatgcaagagactgaagtcactgaagatttctcttgtccattttgctatgtacgatgtggaagcttcaagggtctaggatgccatttaaactcatcacatgatctattccactatgagttttggatatctgaagagtaccaggttgttaatgttagtctgaaggctgatgcttggagaacagagctttttgcggagggcgttgatccaaggcatcaaacattttcttatcgctcaaggtttaagaagcgtagacgatcaaagaacacaatggagaaaatcaggcatgtacactcacatattatggaatcaggttcacctgaagatgaggcaggatctgaggacaactttgtgcaaggggagaatgggacttctgtagcaaatgcttcgattgatcctgctcaatctttacatggcagcaatctttcaccaccaacagtactacagtttgggaagacaaggaagctatctgagagatctgaccctagaaatcggcaactcctgcaaaaacgacagttcttccattctcacagggcgcagccaatgcaactggagcaagtgttctcggaccgtgatagtgaagatgaagttgatgatgatattgctgacttcgaggatagaagaatgcttgatgattttgttgatgttacgaaagatgaaaaacttattatgcatatgtggaattcatttgttcgaaaacaaagatggtgctatgtcacaatacacaagggtggcatgacaagatgagcagtggtggtccactcgcaaagaagatggcgcagctaggagagtgttagctgatggtcatataccttgggcctgcgaggcattctcccagttgcatggacgacaacttatacaaaatcctgctctgctgtggggttggcgtttcttcatgattaaactttggaaccataacattttagatgcccgcactatgaacacatgcaatacagtccttcaaattttacaagaagaaagcacaggactaaagtaattttgatgcttctgatgaaaattcaagggaagaagatttctttaccatttccaagaagaaagcatagaattggagtaactttttattgataatttcattcatatctattgtcaattgtattaatggtttttaaaagagacaaatcatgtctaactctcacgctgtaatattctaagtcgtacgtgaatttgatgaatattcattgttgttttacttaagagttatcgtattgagatccttaacatattattttatttttcatctaggttcttaaattataaaataatggattgagattagaaaatat

SEQ ID NO: 65520 - DNA, 2499 bp, Zea Mays
acacgcataagcaaaaaaatgttttcattacaacatgtacccctgcactaggaaaataaggcactcggcactcgtgagccgtcgcatttccccccgtgtgaccaattcctctccgggccgagcagccgttccaatccgctcacgccgcctctctcgctgccccgcttgaccgcctgctagcgctgcagtttgatgctgatgacctgatccctccgttgggtaggttcttgggcgcggaaagaacaaagaactcgtggtgggtccgggtccgcaagaccctaggtgttcgtcagcagcgaggatgcccggcctgcctctgcctcaatcgttaaatcagaatattggatgtgaatatgcctatcctgggtctacaggccaggccttccgtcagcagctaagaactgcattgtctccagatgagaaacttaccgctgaaaaagatttggctctgtattgcaagccagtcgagctctacaatattattcaacggcgagccatgaaaaatcccctttttattcaaagatgccttctttataatatacatgcgaggaggaaaaagaggattcagataaccatatcactttctggaagtacaaatactgagttgcaaacacattatgtctttcctctttatgttctgttagctagacccactagtaacctttcacttgaagggcattctccaatttatcgattcagtcgggtttgcttgcttacttcctttagtgaacatggaaataaggacaacagtgaagctacattcatcattcctgacgtgaagagtttgtcaacctcccgtgcttgcaaccatgatattatctttattagctgtgggcaagttggacaaagtaatggtgaagataactgctctgggaaccatgtggaagattcttctctccaaatgcttgaagggaaatgctcctggggtaaaataccaactaatttacttgcttcatctttggagagttgtgtcaatttaagtttgggacatattgtggagttggcatctaaagttacaatgagaccaagcttcttagagccaaaatttctggagcaagacagttgcttgacattttgctctcataaggttgatgctgtgggttcatataaactacaactatgcatgtccgcacaagaggctggtgcaagagatatgtctttgtctccatatagtagttactcatataatgatgtcccaccttcgtcattatcagatatcataaggttaagatctggcaatgtactttttaattacaagtactacaataatacaatgcaagagactgaagtcactgaagatttctcttgtccattttgctatgtacgatgtggaagcttcaagggtctaggatgccatttaaactcatcacatgatctattccactatgagttttggatatctgaagagtaccaggttgttaatgttagtctgaaggctgatgcttggagaacagagctttttgcggagggcgttgatccaaggcatcaaacattttcttatcgctcaaggtttaagaagcgtagacgatcaaagaacacaatggagaaaatcaggcatgtacactcacatattatggaatcaggttcacctgaagatgaggcaggatctgaggacaactttgtgcaaggggagaatgggacttctgtagcaaatgcttcgattgatcctgctcaatctttacatggcagcaatctttcaccaccaacagtactacagtttgggaagacaaggaagctatctgagagatctgaccctagaaagtagtccttttcggcaactcctgcaaaaacgacagttcttccattctcacagggcgcagccaatgcaactggagcaagtgttctcggaccgtgatagtgaagatgaagttgatgatgatattgctgacttcgaggatagaagaatgcttgatgattttgttgatgttacgaaagatgaaaaacttattatgcatatgtggaattcatttgttcgaaaacaaagagtgttagctgatggtcatataccttgggcctgcgaggcattctcccagttgcatggacgacaacttatacaaaatcctgctctgctgtggggttggcgtttcttcatgattaaactttggaaccataacattttagatgcccgcactatgaacacatgcaatacagtccttcaaattttacaagaagaaagcacaggactaaagtaattttgatgcttctgatgaaaattcaagggaagaagatttctttaccatttccaagaagaaagcatagaattggagtaactttttattgataatttcattcatatctattgtcaattgtattaatggtttttaaaagagacaaatcatgtctaactctcacgctgtaatattctaagtcgtacgtgaatttgatgaatattcattgttgttttacttaagagttatcgtattgagatccttaacatattattttatttttcatctaggttcttaaattataaaataatggattgagattagaaaatat

SEQ ID NO: 65521 - DNA, 2793 bp, Zea Mays
acacgcataagcaaaaaaatgttttcattacaacatgtacccctgcactaggaaaataaggcactcggcactcgtgagccgtcgcatttccccccgtgtgaccaattcctctccgggccgagcagccgttccaatccgctcacgccgcctctctcgctgccccgcttgaccgcctgctagcgctgcagtttgatgctgatgacctgatccctccgttgggtaggttcttgggcgcggaaagaacaaagaactcgtggtgggtccgggtccgcaagaccctaggtgttcgtcagcagcgaggatgcccggcctgcctctgcctcaatcgttaaatcagaatattggatgtgaatatgcctatcctgggtctacaggccaggccttccgtcagcagctaagaactgcattgtctccagatgagaaacttaccgctgaaaaagatttggctctgtattgcaagccagtcgagctctacaatattattcaacggcgagccatgaaaaatcccctttttattcaaagatgccttctttataatatacatgcgaggaggaaaaagaggattcagataaccatatcactttctggaagtacaaatactgagttgcaaacacattatgtctttcctctttatgttctgttagctagacccactagtaacctttcacttgaagggcattctccaatttatcgattcagtcgggtttgcttgcttacttcctttagtgaacatggaaataaggacaacagtgaagctacattcatcattcctgacgtgaagagtttgtcaacctcccgtgcttgcaaccatgatattatctttattagctgtgggcaagttggacaaagtaatggtgaagataactgctctgggaaccatgtggaagattcttctctccaaatgcttgaagggaaatgctcctggggtaaaataccaactaatttacttgcttcatctttggagagttgtgtcaatttaagtttgggacatattgtggagttggcatctaaagttacaatgagaccaagcttcttagagccaaaatttctggagcaagacagttgcttgacattttgctctcataaggttgatgctgtgggttcatataaactacaactatgcatgtccgcacaagaggctggtgcaagagatatgtctttgtctccatatagtagttactcatataatgatgtcccaccttcgtcattatcagatatcataaggttaagatctggcaatgtactttttaattacaagtactacaataatacaatgcaagagactgaagtcactgaagatttctcttgtccattttgctatgtacgatgtggaagcttcaagggtctaggatgccatttaaactcatcacatgatctattccactatgagttttggatatctgaagagtaccaggttgttaatgttagtctgaaggctgatgcttggagaacagagtgttcttccaaaggttcgtttaaatggaggctccacttagttgggcaaaccgaaggcattgcatgttccttagtccaggacgactccctgctttgtgatttccttcctttcttgagtgcagaagccaaggatgaaagagcattggctattctatatctccaatcaaattccttacatagtgtattgtgtacctcaatgattttttggtggataatgttttacatgcttaacaatgcatggttactatttctttaaatggaagcactcttaactgtatttggtaactaatgatcctaactggcagctttttgcggagggcgttgatccaaggcatcaaacattttcttatcgctcaaggtttaagaagcgtagacgatcaaagaacacaatggagaaaatcaggcatgtacactcacatattatggaatcaggttcacctgaagatgaggcaggatctgaggacaactttgtgcaaggggagaatgggacttctgtagcaaatgcttcgattgatcctgctcaatctttacatggcagcaatctttcaccaccaacagtactacagtttgggaagacaaggaagctatctgagagatctgaccctagaaatcggcaactcctgcaaaaacgacagttcttccattctcacagggcgcagccaatgcaactggagcaagtgttctcggaccgtgatagtgaagatgaagttgatgatgatattgctgacttcgaggatagaagaatgcttgatgattttgttgatgttacgaaagatgaaaaacttattatgcatatgtggaattcatttgttcgaaaacaaagagtgttagctgatggtcatataccttgggcctgcgaggcattctcccagttgcatggacgacaacttatacaaaatcctgctctgctgtggggttggcgtttcttcatgattaaactttggaaccataacattttagatgcccgcactatgaacacatgcaatacagtccttcaaattttacaagaagaaagcacaggactaaagtaattttgatgcttctgatgaaaattcaagggaagaagatttctttaccatttccaagaagaaagcatagaattggagtaactttttattgataatttcattcatatctattgtcaattgtattaatggtttttaaaagagacaaatcatgtctaactctcacgctgtaatattctaagtcgtacgtgaatttgatgaatattcattgttgttttacttaagagttatcgtattgagatccttaacatattattttatttttcatctaggttcttaaattataaaataatggattgagattagaaaatat

SEQ ID NO: 65522 - DNA, 2827 bp, Zea Mays
acacgcataagcaaaaaaatgttttcattacaacatgtacccctgcactaggaaaataaggcactcggcactcgtgagccgtcgcatttccccccgtgtgaccaattcctctccgggccgagcagccgttccaatccgctcacgccgcctctctcgctgccccgcttgaccgcctgctagcgctgcagtttgatgctgatgacctgatccctccgttgggtaggttcttgggcgcggaaagaacaaagaactcgtggtgggtccgggtccgcaagaccctaggtgttcgtcagcagcgaggatgcccggcctgcctctgcctcaatcgttaaatcagaatattggatgtgaatatgcctatcctgggtctacaggccaggccttccgtcagcagctaagaactgcattgtctccagatgagaaacttaccgctgaaaaagatttggctctgtattgcaagccagtcgagctctacaatattattcaacggcgagccatgaaaaatcccctttttattcaaagatgccttctttataatatacatgcgaggaggaaaaagaggattcagataaccatatcactttctggaagtacaaatactgagttgcaaacacattatgtctttcctctttatgttctgttagctagacccactagtaacctttcacttgaagggcattctccaatttatcgattcagtcgggtttgcttgcttacttcctttagtgaacatggaaataaggacaacagtgaagctacattcatcattcctgacgtgaagagtttgtcaacctcccgtgcttgcaaccatgatattatctttattagctgtggtaacagcgcacatcccatatgagttcttttttctccccatttctgtgccatcattaaattattttaatccaaaagggcaagttggacaaagtaatggtgaagataactgctctgggaaccatgtggaagattcttctctccaaatgcttgaagggaaatgctcctggggtaaaataccaactaatttacttgcttcatctttggagagttgtgtcaatttaagtttgggacatattgtggagttggcatctaaagttacaatgagaccaagcttcttagagccaaaatttctggagcaagacagttgcttgacattttgctctcataaggttgatgctgtgggttcatataaactacaactatgcatgtccgcacaagaggctggtgcaagagatatgtctttgtctccatatagtagttactcatataatgatgtcccaccttcgtcattatcagatatcataaggttaagatctggcaatgtactttttaattacaagtactacaataatacaatgcaagagactgaagtcactgaagatttctcttgtccattttgctatgtacgatgtggaagcttcaagggtctaggatgccatttaaactcatcacatgatctattccactatgagttttggatatctgaagagtaccaggttgttaatgttagtctgaaggctgatgcttggagaacagagtgttcttccaaaggttcgtttaaatggaggctccacttagttgggcaaaccgaaggcattgcatgttccttagtccaggacgactccctgctttgtgatttccttcctttcttgagtgcagaagccaaggatgaaagagcattggctattctatatctccaatcaaattccttacatagtgtattgtgtacctcaatgattttttggtggataatgttttacatgcttaacaatgcatggttactatttctttaaatggaagcactcttaactgtatttggtaactaatgatcctaactggcagctttttgcggagggcgttgatccaaggcatcaaacattttcttatcgctcaaggtttaagaagcgtagacgatcaaagaacacaatggagaaaatcaggcatgtacactcacatattatggaatcaggttcacctgaagatgaggcaggatctgaggacaactttgtgcaaggggagaatgcaatctttcaccaccaacagtactacagtttgggaagacaaggaagctatctgagagatctgaccctagaaagtagtccttttcggcaactcctgcaaaaacgacagttcttccattctcacagggcgcagccaatgcaactggagcaagtgttctcggaccgtgatagtgaagatgaagttgatgatgatattgctgacttcgaggatagaagaatgcttgatgattttgttgatgttacgaaagatgaaaaacttattatgcatatgtggaattcatttgttcgaaaacaaagagtgttagctgatggtcatataccttgggcctgcgaggcattctcccagttgcatggacgacaacttatacaaaatcctgctctgctgtggggttggcgtttcttcatgattaaactttggaaccataacattttagatgcccgcactatgaacacatgcaatacagtccttcaaattttacaagaagaaagcacaggactaaagtaattttgatgcttctgatgaaaattcaagggaagaagatttctttaccatttccaagaagaaagcatagaattggagtaactttttattgataatttcattcatatctattgtcaattgtattaatggtttttaaaagagacaaatcatgtctaactctcacgctgtaatattctaagtcgtacgtgaatttgatgaatattcattgttgttttacttaagagttatcgtattgagatccttaacatattattttatttttcatctaggttcttaaattataaaataatggattgagattagaaaatat

SEQ ID NO: 65523 - DNA, 2435 bp, Zea Mays
acacgcataagcaaaaaaatgttttcattacaacatgtacccctgcactaggaaaataaggcactcggcactcgtgagccgtcgcatttccccccgtgtgaccaattcctctccgggccgagcagccgttccaatccgctcacgccgcctctctcgctgccccgcttgaccgcctgctagcgctgcagtttgatgctgatgacctgatccctccgttgggtaggttcttgggcgcggaaagaacaaagaactcgtggtgggtccgggtccgcaagaccctaggtgttcgtcagcagcgaggatgcccggcctgcctctgcctcaatcgttaaatcagaatattggatgtgaatatgcctatcctgggtctacaggccaggccttccgtcagcagctaagaactgcattgtctccagatgagaaacttaccgctgaaaaagatttggctctgtattgcaagccagtcgagctctacaatattattcaacggcgagccatgaaaaatcccctttttattcaaagatgccttctttataatatacatgcgaggaggaaaaagaggattcagataaccatatcactttctggaagtacaaatactgagttgcaaacacattatgtctttcctctttatgttctgttagctagacccactagtaacctttcacttgaagggcattctccaatttatcgattcagtcgggtttgcttgcttacttcctttagtgaacatggaaataaggacaacagtgaagctacattcatcattcctgacgtgaagagtttgtcaacctcccgtgcttgcaaccatgatattatctttattagctgtgggcaagttggacaaagtaatggtgaagataactgctctgggaaccatgtggaagattcttctctccaaatgcttgaagggaaatgctcctggggtaaaataccaactaatttacttgcttcatctttggagagttgtgtcaatttaagtttgggacatattgtggagttggcatctaaagttacaatgagaccaagcttcttagagccaaaatttctggagcaagacagttgcttgacattttgctctcataaggttgatgctgtgggttcatataaactacaactatgcatgtccgcacaagaggctggtgcaagagatatgtctttgtctccatatagtagttactcatataatgatgtcccaccttcgtcattatcagatatcataaggttaagatctggcaatgtactttttaattacaagtactacaataatacaatgcaagagactgaagtcactgaagatttctcttgtccattttgctatgtacgatgtggaagcttcaagatatctgaagagtaccaggttgttaatgttagtctgaaggctgatgcttggagaacagagctttttgcggagggcgttgatccaaggcatcaaacattttcttatcgctcaaggtttaagaagcgtagacgatcaaagaacacaatggagaaaatcaggcatgtacactcacatattatggaatcaggttcacctgaagatgaggcaggatctgaggacaactttgtgcaaggggagaatgggacttctgtagcaaatgcttcgattgatcctgctcaatctttacatggcagcaatctttcaccaccaacagtactacagtttgggaagacaaggaagctatctgagagatctgaccctagaaatcggcaactcctgcaaaaacgacagttcttccattctcacagggcgcagccaatgcaactggagcaagtgttctcggaccgtgatagtgaagatgaagttgatgatgatattgctgacttcgaggatagaagaatgcttgatgattttgttgatgttacgaaagatgaaaaacttattatgcatatgtggaattcatttgttcgaaaacaaagagtgttagctgatggtcatataccttgggcctgcgaggcattctcccagttgcatggacgacaacttatacaaaatcctgctctgctgtggggttggcgtttcttcatgattaaactttggaaccataacattttagatgcccgcactatgaacacatgcaatacagtccttcaaattttacaagaagaaagcacaggactaaagtaattttgatgcttctgatgaaaattcaagggaagaagatttctttaccatttccaagaagaaagcatagaattggagtaactttttattgataatttcattcatatctattgtcaattgtattaatggtttttaaaagagacaaatcatgtctaactctcacgctgtaatattctaagtcgtacgtgaatttgatgaatattcattgttgttttacttaagagttatcgtattgagatccttaacatattattttatttttcatctaggttcttaaattataaaataatggattgagattagaaaatat

SEQ ID NO: 65524 - DNA, 2952 bp, Zea Mays
acacgcataagcaaaaaaatgttttcattacaacatgtacccctgcactaggaaaataaggcactcggcactcgtgagccgtcgcatttccccccgtgtgaccaattcctctccgggccgagcagccgttccaatccgctcacgccgcctctctcgctgccccgcttgaccgcctgctagcgctgcagtttgatgctgatgacctgatccctccgttgggtaggttcttgggcgcggaaagaacaaagaactcgtggtgggtccgggtccgcaagaccctaggtgttcgtcagcagcgaggatgcccggcctgcctctgcctcaatcgttaaatcagaatattggatgtgaatatgcctatcctgggtctacaggccaggccttccgtcagcagctaagaactgcattgtctccagatgagaaacttaccgctgaaaaagatttggctctgtattgcaagccagtcgagctctacaatattattcaacggcgagccatgaaaaatcccctttttattcaaagatgccttctttataatatacatgcgaggaggaaaaagaggattcagataaccatatcactttctggaagtacaaatactgagttgcaaacacattatgtctttcctctttatgttctgttagctagacccactagtaacctttcacttgaagggcattctccaatttatcgattcagtcgggtttgcttgcttacttcctttagtgaacatggaaataaggacaacagtgaagctacattcatcattcctgacgtgaagagtttgtcaacctcccgtgcttgcaaccatgatattatctttattagctgtgggcaagttggacaaagtaatggtgaagataactgctctgggaaccatgtggaagattcttctctccaaatgcttgaagggaaatgctcctggggtaaaataccaactaatttacttgcttcatctttggagagttgtgtcaatttaagtttgggacatattgtggagttggcatctaaagttacaatgagaccaagcttcttagagccaaaatttctggagcaagacagttgcttgacattttgctctcataaggttgatgctgtgggttcatataaactacaactatgcatgtccgcacaagaggctggtgcaagagatatgtctttgtctccatatagtagttactcatataatgatgtcccaccttcgtcattatcagatatcataaggttaagatctggcaatgtactttttaattacaagtactacaataatacaatgcaagagactgaaggttgtctctcctgtttctagtcactgaagatttctcttgtccattttgctatgtacgatgtggaagcttcaagggtctaggatgccatttaaactcatcacatgatctattccactatgagttttgggttgatatctgaagagtaccaggttgttaatgttagtctgaaggctgatgcttggagaacagaggtaaatttatgacagacataaagtttaagctgttttttttttcagattcaatttctgtttggtatatggagctgtagttgatgagtttcgtactttatatatgtgtttaacactttaacttaatatgtccctcagtgttcttccaaaggttcgtttaaatggaggctccacttagttgggcaaaccgaaggcattgcatgttccttagtccaggacgactccctgctttgtgatttccttcctttcttgagtgcagaagccaaggatgaaagagcattggctattctatatctccaatcaaattccttacatagtgtattgtgtacctcaatgattttttggtggataatgttttacatgcttaacaatgcatggttactatttctttaaatggaagcactcttaactgtatttggtaactaatgatcctaactggcagctttttgcggagggcgttgatccaaggcatcaaacattttcttatcgctcaaggtttaagaagcgtagacgatcaaagaacacaatggagaaaatcaggcatgtacactcacatattatggaatcaggttcacctgaagatgaggcaggatctgaggacaactttgtgcaaggggagaatgggacttctgtagcaaatgcttcgattgatcctgctcaatctttacatggcagcaatctttcaccaccaacagtactacagtttgggaagacaaggaagctatctgagagatctgaccctagaaatcggcaactcctgcaaaaacgacagttcttccattctcacagggcgcagccaatgcaactggagcaagtgttctcggaccgtgatagtgaagatgaagttgatgatgatattgctgacttcgaggatagaagaatgcttgatgattttgttgatgttacgaaagatgaaaaacttattatgcatatgtggaattcatttgttcgaaaacaaagagtgttagctgatggtcatataccttgggcctgcgaggcattctcccagttgcatggacgacaacttatacaaaatcctgctctgctgtggggttggcgtttcttcatgattaaactttggaaccataacattttagatgcccgcactatgaacacatgcaatacagtccttcaaattttacaagaagaaagcacaggactaaagtaattttgatgcttctgatgaaaattcaagggaagaagatttctttaccatttccaagaagaaagcatagaattggagtaactttttattgataatttcattcatatctattgtcaattgtattaatggtttttaaaagagacaaatcatgtctaactctcacgctgtaatattctaagtcgtacgtgaatttgatgaatattcattgttgttttacttaagagttatcgtattgagatccttaacatattattttatttttcatctaggttcttaaattataaaataatggattgagattagaaaatat

SEQ ID NO: 65525 - DNA, 3302 bp, Zea Mays
acacgcataagcaaaaaaatgttttcattacaacatgtacccctgcactaggaaaataaggcactcggcactcgtgagccgtcgcatttccccccgtgtgaccaattcctctccgggccgagcagccgttccaatccgctcacgccgcctctctcgctgccccgcttgaccgcctgctagcgctgcagtttgatgctgatgacctgatccctccgttgggtaggttcttgggcgcggaaagaacaaagaactcgtggtgggtccgggtccgcaagaccctaggtgttcgtcagcagcgaggatgcccggcctgcctctgcctcaatcgttaaatcagaatattggatgtgaatatgcctatcctgggtctacaggccaggccttccgtcagcagctaagaactgcattgtctccagatgagaaacttaccgctgaaaaagatttggctctgtattgcaagccagtcgagctctacaatattattcaacggcgagccatgaaaaatcccctttttattcaaagatgccttctttataatatacatgcgaggaggaaaaagaggattcagataaccatatcactttctggaagtacaaatactgagttgcaaacacattatgtctttcctctttatgttctgttagctagacccactagtaacctttcacttgaagggcattctccaatttatcgattcagtcgggtttgcttgcttacttcctttagtgaacatggaaataaggacaacagtgaagctacattcatcattcctgacgtgaagagtttgtcaacctcccgtgcttgcaaccatgatattatctttattagctgtgggcaagttggacaaagtaatggtgaagataactgctctgggaaccatgtggaagattcttctctccaaatgcttgaagggaaatgctcctggggtaaaataccaactaatttacttgcttcatctttggagagttgtgtcaatttaagtttgggacatattgtggagttggcatctaaagttacaatgagaccaagcttcttagagccaaaatttctggagcaagacagttgcttgacattttgctctcataaggttgatgctgtggtaaggtctcctctatttttacattcatgtttaatatgattttgtccagggatctccatgtttctcttattactaatgctactaatacattctttgagtccaagattagtgtggttaacaggtatgcatcacttgcaactgccagtccattggatgacatgtcactgcatcacaagtttataaattcagctttgggcatacattgccaccgaatgcgctatatccacttttccatggaattgctggaaaatgactttagctttcaatttaaatgccccaaacttttggcaaaagtatttcaatttttatgaggggtaataaacttgtgaaggggggaatctacaagcttttagttgttgctattctgcagtataagagcatcagatctatcgggtcccactttggaaacctgtgttgagcacttgagttgcttctttctttttgtggtgctggtggttggagggggaagaggggttggcagtcaaaatcattaacctttattcttgcagggttcatataaactacaactatgcatgtccgcacaagaggctggtgcaagagatatgtctttgtctccatatagtagttactcatataatgatgtcccaccttcgtcattatcagatatcataaggttaagatctggcaatgtactttttaattacaagtactacaataatacaatgcaagagactgaagtcactgaagatttctcttgtccattttgctatgtacgatgtggaagcttcaagggtctaggatgccatttaaactcatcacatgatctattccactatgagttttggatatctgaagagtaccaggttgttaatgttagtctgaaggctgatgcttggagaacagagtgttcttccaaaggttcgtttaaatggaggctccacttagttgggcaaaccgaaggcattgcatgttccttagtccaggacgactccctgctttgtgatttccttcctttcttgagtgcagaagccaaggatgaaagagcattggctattctatatctccaatcaaattccttacatagtgtattgtgtacctcaatgattttttggtggataatgttttacatgcttaacaatgcatggttactatttctttaaatggaagcactcttaactgtatttggtaactaatgatcctaactggcagctttttgcggagggcgttgatccaaggcatcaaacattttcttatcgctcaaggtttaagaagcgtagacgatcaaagaacacaatggagaaaatcaggcatgtacactcacatattatggaatcaggttcacctgaagatgaggcaggatctgaggacaactttgtgcaaggggagaatgggacttctgtagcaaatgcttcgattgatcctgctcaatctttacatggcagcaatctttcaccaccaacagtactacagtttgggaagacaaggaagctatctgagagatctgaccctagaaatcggcaactcctgcaaaaacgacagttcttccattctcacagggcgcagccaatgcaactggagcaagtgttctcggaccgtgatagtgaagatgaagttgatgatgatattgctgacttcgaggatagaagaatgcttgatgattttgttgatgttacgaaagatgaaaaacttattatgcatatgtggaattcatttgttcgaaaacaaagagtgttagctgatggtcatataccttgggcctgcgaggcattctcccagttgcatggacgacaacttatacaaaatcctgctctgctgtggggttggcgtttcttcatgattaaactttggaaccataacattttagatgcccgcactatgaacacatgcaatacagtccttcaaattttacaagaagaaagcacaggactaaagtaattttgatgcttctgatgaaaattcaagggaagaagatttctttaccatttccaagaagaaagcatagaattggagtaactttttattgataatttcattcatatctattgtcaattgtattaatggtttttaaaagagacaaatcatgtctaactctcacgctgtaatattctaagtcgtacgtgaatttgatgaatattcattgttgttttacttaagagttatcgtattgagatccttaacatattattttatttttcatctaggttcttaaattataaaataatggattgagattagaaaatat

SEQ ID NO: 65526 - DNA, 2938 bp, Zea Mays
acacgcataagcaaaaaaatgttttcattacaacatgtacccctgcactaggaaaataaggcactcggcactcgtgagccgtcgcatttccccccgtgtgaccaattcctctccgggccgagcagccgttccaatccgctcacgccgcctctctcgctgccccgcttgaccgcctgctagcgctgcagtttgatgctgatgacctgatccctccgttgggtaggttcttgggcgcggaaagaacaaagaactcgtggtgggtccgggtccgcaagaccctaggtgttcgtcagcagcgaggatgcccggcctgcctctgcctcaatcgttaaatcagaatattggatgtgaatatgcctatcctgggtctacaggccaggccttccgtcagcagctaagaactgcattgtctccagatgagaaacttaccgctgaaaaagatttggctctgtattgcaagccagtcgagctctacaatattattcaacggcgagccatgaaaaatcccctttttattcaaagatgccttctttataatatacatgcgaggaggaaaaagaggattcagataaccatatcactttctggaagtacaaatactgagttgcaaacacattatgtctttcctctttatgttctgttagctagacccactagtaacctttcacttgaagggcattctccaatttatcgattcagtcgggtttgcttgcttacttcctttagtgaacatggaaataaggacaacagtgaagctacattcatcattcctgacgtgaagagtttgtcaacctcccgtgcttgcaaccatgatattatctttattagctgtgggcaagttggacaaagtaatggtgaagataactgctctgggaaccatgtggaagattcttctctccaaatgcttgaagggaaatgctcctggggtaaaataccaactaatttacttgcttcatctttggagagttgtgtcaatttaagtttgggacatattgtggagttggcatctaaagttacaatgagaccaagcttcttagagccaaaatttctggagcaagacagttgcttgacattttgctctcataaggttgatgctgtgggttcatataaactacaactatgcatgtccgcacaagaggctggtgcaagagatatgtctttgtctccatatagtagttactcatataatgatgtcccaccttcgtcattatcagatatcataaggttaagatctggcaatgtactttttaattacaagtactacaataatacaatgcaagagactgaagtcactgaagatttctcttgtccattttgctatgtacgatgtggaagcttcaagggtctaggatgccatttaaactcatcacatgatctattccactatgagttttggatatctgaagagtaccaggttgttaatgttagtctgaaggctgatgcttggagaacagaggtaaatttatgacagacataaagtttaagctgttttttttttcagattcaatttctgtttggtatatggagctgtagttgatgagtttcgtactttatatatgtgtttaacactttaacttaatatgtccctcagtgttcttccaaaggttcgtttaaatggaggctccacttagttgggcaaaccgaaggcattgcatgttccttagtccaggacgactccctgctttgtgatttccttcctttcttgagtgcagaagccaaggatgaaagagcattggctattctatatctccaatcaaattccttacatagtgtattgtgtacctcaatgattttttggtggataatgttttacatgcttaacaatgcatggttactatttctttaaatggaagcactcttaactgtatttggtaactaatgatcctaactggcagctttttgcggagggcgttgatccaaggcatcaaacattttcttatcgctcaaggtttaagaagcgtagacgatcaaagaacacaatggagaaaatcaggcatgtacactcacatattatggaatcaggttcacctgaagatgaggcaggatctgaggacaactttgtgcaaggggagaatgggacttctgtagcaaatgcttcgattgatcctgctcaatctttacatggcagcaatctttcaccaccaacagtactacagtttgggaagacaaggaagctatctgagagatctgaccctagaaagtagtccttttcggcaactcctgcaaaaacgacagttcttccattctcacagggcgcagccaatgcaactggagcaagtgttctcggaccgtgatagtgaagatgaagttgatgatgatattgctgacttcgaggatagaagaatgcttgatgattttgttgatgttacgaaagatgaaaaacttattatgcatatgtggaattcatttgttcgaaaacaaagagtgttagctgatggtcatataccttgggcctgcgaggcattctcccagttgcatggacgacaacttatacaaaatcctgctctgctgtggggttggcgtttcttcatgattaaactttggaaccataacattttagatgcccgcactatgaacacatgcaatacagtccttcaaattttacaagaagaaagcacaggactaaagtaattttgatgcttctgatgaaaattcaagggaagaagatttctttaccatttccaagaagaaagcatagaattggagtaactttttattgataatttcattcatatctattgtcaattgtattaatggtttttaaaagagacaaatcatgtctaactctcacgctgtaatattctaagtcgtacgtgaatttgatgaatattcattgttgttttacttaagagttatcgtattgagatccttaacatattattttatttttcatctaggttcttaaattataaaataatggattgagattagaaaatat

SEQ ID NO: 65527 - DNA, 2981 bp, Zea Mays
acacgcataagcaaaaaaatgttttcattacaacatgtacccctgcactaggaaaataaggcactcggcactcgtgagccgtcgcatttccccccgtgtgaccaattcctctccgggccgagcagccgttccaatccgctcacgccgcctctctcgctgccccgcttgaccgcctgctagcgctgcagtttgatgctgatgacctgatccctccgttgggtaggttcttgggcgcggaaagaacaaagaactcgtggtgggtccgggtccgcaagaccctaggtgttcgtcagcagcgaggatgcccggcctgcctctgcctcaatcgttaaatcagaatattggatgtgaatatgcctatcctgggtctacaggccaggccttccgtcagcagctaagaactgcattgtctccagatgagaaacttaccgctgaaaaagatttggctctgtattgcaagccagtcgagctctacaatattattcaacggcgagccatgaaaaatcccctttttattcaaagatgccttctttataatatacatgcgaggaggaaaaagaggattcagataaccatatcactttctggaagtacaaatactgagttgcaaacacattatgtctttcctctttatgttctgttagctagacccactagtaacctttcacttgaagggcattctccaatttatcgattcagtcgggtttgcttgcttacttcctttagtgaacatggaaataaggacaacagtgaagctacattcatcattcctgacgtgaagagtttgtcaacctcccgtgcttgcaaccatgatattatctttattagctgtgggcaagttggacaaagtaatggtgaagataactgctctgggaaccatgtggaagattcttctctccaaatgcttgaagggaaatgctcctggggtaaaataccaactaatttacttgcttcatctttggagagttgtgtcaatttaagtttgggacatattgtggagttggcatctaaagttacaatgagaccaagcttcttagagccaaaatttctggagcaagacagttgcttgacattttgctctcataaggttgatgctgtgggttcatataaactacaactatgcatgtccgcacaagaggctggtgcaagagatatgtctttgtctccatatagtagttactcatataatgatgtcccaccttcgtcattatcagatatcataaggttaagatctggcaatgtactttttaattacaagtactacaataatacaatgcaagagactgaaggttgtctctcctgtttctagtcactgaagatttctcttgtccattttgctatgtacgatgtggaagcttcaagggtctaggatgccatttaaactcatcacatgatctattccactatgagttttggatatctgaagagtaccaggttgttaatgttagtctgaaggctgatgcttggagaacagaggtaaatttatgacagacataaagtttaagctgttttttttttcagattcaatttctgtttggtatatggagctgtagttgatgagtttcgtactttatatatgtgtttaacactttaacttaatatgtccctcagtgttcttccaaaggttcgtttaaatggaggctccacttagttgggcaaaccgaaggcattgcatgttccttagtccaggacgactccctgctttgtgatttccttcctttcttgagtgcagaagccaaggatgaaagagcattggctattctatatctccaatcaaattccttacatagtgtattgtgtacctcaatgattttttggtggataatgttttacatgcttaacaatgcatggttactatttctttaaatggaagcactcttaactgtatttggtaactaatgatcctaactggcagctttttgcggagggcgttgatccaaggcatcaaacattttcttatcgctcaaggtttaagaagcgtagacgatcaaagaacacaatggagaaaatcaggcatgtacactcacatattatggaatcaggttcacctgaagatgaggcaggatctgaggacaactttgtgcaaggggagaatgcaatctttcaccaccaacagtactacagtttgggaagacaaggaagctatctgagagatctgaccctagaaatcggcaactcctgcaaaaacgacagttcttccattctcacagggcgcagccaatgcaactggagcaagtgttctcggaccgtgatagtgaagatgaagttgatgatgatattgctgacttcgaggatagaagaatgcttgatgattttgttgatgttacgaaagatgaaaaacttattatgcatatgtggaattcatttgttcgaaaacaaagatggtgctatgtcacaatacacaagggtggcatgacaagatgagcagtggtggtccactcgcaaagaagatggcgcagctaggagagtgttagctgatggtcatataccttgggcctgcgaggcattctcccagttgcatggacgacaacttatacaaaatcctgctctgctgtggggttggcgtttcttcatgattaaactttggaaccataacattttagatgcccgcactatgaacacatgcaatacagtccttcaaattttacaagaagaaagcacaggactaaagtaattttgatgcttctgatgaaaattcaagggaagaagatttctttaccatttccaagaagaaagcatagaattggagtaactttttattgataatttcattcatatctattgtcaattgtattaatggtttttaaaagagacaaatcatgtctaactctcacgctgtaatattctaagtcgtacgtgaatttgatgaatattcattgttgttttacttaagagttatcgtattgagatccttaacatattattttatttttcatctaggttcttaaattataaaataatggattgagattagaaaatat

SEQ ID NO: 65528 - DNA, 2461 bp, Zea Mays
gagagattgtggcttagtgccttagtaaagtgcatagcgatgcgtcttagttcgtgtctgttcagtcaggaatattggatgtgaatatgcctatcctgggtctacaggccaggccttccgtcagcagctaagaactgcattgtctccagatgagaaacttaccgctgaaaaagatttggctctgtattgcaagccagtcgagctctacaatattattcaacggcgagccatgaaaaatcccctttttattcaaagatgccttctttataatatacatgcgaggaggaaaaagaggattcagataaccatatcactttctggaagtacaaatactgagttgcaaacacattatgtctttcctctttatgttctgttagctagacccactagtaacctttcacttgaagggcattctccaatttatcgattcagtcgggtttgcttgcttacttcctttagtgaacatggaaataaggacaacagtgaagctacattcatcattcctgacgtgaagagtttgtcaacctcccgtgcttgcaaccatgatattatctttattagctgtgggcaagttggacaaagtaatggtgaagataactgctctgggaaccatgtggaagattcttctctccaaatgcttgaagggaaatgctcctggggtaaaataccaactaatttacttgcttcatctttggagagttgtgtcaatttaagtttgggacatattgtggagttggcatctaaagttacaatgagaccaagcttcttagagccaaaatttctggagcaagacagttgcttgacattttgctctcataaggttgatgctgtgggttcatataaactacaactatgcatgtccgcacaagaggctggtgcaagagatatgtctttgtctccatatagtagttactcatataatgatgtcccaccttcgtcattatcagatatcataagtcactgaagatttctcttgtccattttgctatgtacgatgtggaagcttcaagggtctaggatgccatttaaactcatcacatgatctattccactatgagttttggatatctgaagagtaccaggttgttaatgttagtctgaaggctgatgcttggagaacagagtgttcttccaaaggttcgtttaaatggaggctccacttagttgggcaaaccgaaggcattgcatgttccttagtccaggacgactccctgctttgtgatttccttcctttcttgagtgcagaagccaaggatgaaagagcattggctattctatatctccaatcaaattccttacatagtgtattgtgtacctcaatgattttttggtggataatgttttacatgcttaacaatgcatggttactatttctttaaatggaagcactcttaactgtatttggtaactaatgatcctaactggcagctttttgcggagggcgttgatccaaggcatcaaacattttcttatcgctcaaggtttaagaagcgtagacgatcaaagaacacaatggagaaaatcaggcatgtacactcacatattatggaatcaggttcacctgaagatgaggcaggatctgaggacaactttgtgcaaggggagaatgggacttctgtagcaaatgcttcgattgatcctgctcaatctttacatggcagcaatctttcaccaccaacagtactacagtttgggaagacaaggaagctatctgagagatctgaccctagaaatcggcaactcctgcaaaaacgacagttcttccattctcacagggcgcagccaatgcaactggagcaagtgttctcggaccgtgatagtgaagatgaagttgatgatgatattgctgacttcgaggatagaagaatgcttgatgattttgttgatgttacgaaagatgaaaaacttattatgcatatgtggaattcatttgttcgaaaacaaagagtgttagctgatggtcatataccttgggcctgcgaggcattctcccagttgcatggacgacaacttatacaaaatcctgctctgctgtggggttggcgtttcttcatgattaaactttggaaccataacattttagatgcccgcactatgaacacatgcaatacagtccttcaaattttacaagaagaaagcacaggactaaagtaattttgatgcttctgatgaaaattcaagggaagaagatttctttaccatttccaagaagaaagcatagaattggagtaactttttattgataatttcattcatatctattgtcaattgtattaatggtttttaaaagagacaaatcatgtctaactctcacgctgtaatattctaagtcgtacgtgaatttgatgaatattcattgttgttttacttaagagttatcgtattgagatccttaacatattattttatttttcatctaggttcttaaattataaaataatggattgagattagaaaatat

SEQ ID NO: 65529 - DNA, 1652 bp, Zea Mays
ctcctgtttctagtcactgaagatttctcttgtccattttgctatgtacgatgtggaagcttcaagggtctaggatgccatttaaactcatcacatgatctattccactatgagttttggatatctgaagagtaccaggttgttaatgttagtctgaaggctgatgcttggagaacagaggtaaatttatgacagacataaagtttaagctgttttttttttcagattcaatttctgtttggtatatggagctgtagttgatgagtttcgtactttatatatgtgtttaacactttaacttaatatgtccctcagtgttcttccaaaggttcgtttaaatggaggctccacttagttgggcaaaccgaaggcattgcatgttccttagtccaggacgactccctgctttgtgatttccttcctttcttgagtgcagaagccaaggatgaaagagcattggctattctatatctccaatcaaattccttacatagtgtattgtgtacctcaatgattttttggtggataatgttttacatgcttaacaatgcatggttactatttctttaaatggaagcactcttaactgtatttggtaactaatgatcctaactggcagctttttgcggagggcgttgatccaaggcatcaaacattttcttatcgctcaaggtttaagaagcgtagacgatcaaagaacacaatggagaaaatcaggcatgtacactcacatattatggaatcaggttcacctgaagatgaggcaggatctgaggacaactttgtgcaaggggagaatgggacttctgtagcaaatgcttcgattgatcctgctcaatctttacatggcagcaatctttcaccaccaacagtactacagtttgggaagacaaggaagctatctgagagatctgaccctagaaatcggcaactcctgcaaaaacgacagttcttccattctcacagggcgcagccaatgcaactggagcaagtgttctcggaccgtgatagtgaagatgaagttgatgatgatattgctgacttcgaggatagaagaatgcttgatgattttgttgatgttacgaaagatgaaaaacttattatgcatatgtggaattcatttgttcgaaaacaaagagtgttagctgatggtcatataccttgggcctgcgaggcattctcccagttgcatggacgacaacttatacaaaatcctgctctgctgtggggttggcgtttcttcatgattaaactttggaaccataacattttagatgcccgcactatgaacacatgcaatacagtccttcaaattttacaagaagaaagcacaggactaaagtaattttgatgcttctgatgaaaattcaagggaagaagatttctttaccatttccaagaagaaagcatagaattggagtaactttttattgataatttcattcatatctattgtcaattgtattaatggtttttaaaagagacaaatcatgtctaactctcacgctgtaatattctaagtcgtacgtgaatttgatgaatattcattgttgttttacttaagagttatcgtattgagatccttaacatattattttatttttcatctaggttcttaaattataaaataatggattgagattagaaaatat

SEQ ID NO: 65530 - DNA, 1504 bp, Zea Mays
ctcagcaagattccctattttgtaaggtttttctttctgtctaatatataagatgcgcagttcttctgtgtgttcgataaaaaaaattgggagcgaggaattcatttatgagaagaaatgttatgaatgacagacatccaccgtttagttccttgtgccagataggaaaatcaagcatttgctagcatgggtgatggtaaatatgagtggtttctttgatgataatgtctaacatgtgacttagcccttcacggctaaacttctcaacttcctgttaaatgctgatcatggccaagatttagaatcactgaagatttctcttgtccattttgctatgtacgatgtggaagcttcaagggtctaggatgccatttaaactcatcacatgatctattccactatgagttttggatatctgaagagtaccaggttgttaatgttagtctgaaggctgatgcttggagaacagagctttttgcggagggcgttgatccaaggcatcaaacattttcttatcgctcaaggtttaagaagcgtagacgatcaaagaacacaatggagaaaatcaggcatgtacactcacatattatggaatcaggttcacctgaagatgaggcaggatctgaggacaactttgtgcaaggggagaatgggacttctgtagcaaatgcttcgattgatcctgctcaatctttacatggcagcaatctttcaccaccaacagtactacagtttgggaagacaaggaagctatctgagagatctgaccctagaaatcggcaactcctgcaaaaacgacagttcttccattctcacagggcgcagccaatgcaactggagcaagtgttctcggaccgtgatagtgaagatgaagttgatgatgatattgctgacttcgaggatagaagaatgcttgatgattttgttgatgttacgaaagatgaaaaacttattatgcatatgtggaattcatttgttcgaaaacaaagagtgttagctgatggtcatataccttgggcctgcgaggcattctcccagttgcatggacgacaacttatacaaaatcctgctctgctgtggggttggcgtttcttcatgattaaactttggaaccataacattttagatgcccgcactatgaacacatgcaatacagtccttcaaattttacaagaagaaagcacaggactaaagtaattttgatgcttctgatgaaaattcaagggaagaagatttctttaccatttccaagaagaaagcatagaattggagtaactttttattgataatttcattcatatctattgtcaattgtattaatggtttttaaaagagacaaatcatgtctaactctcacgctgtaatattctaagtcgtacgtgaatttgatgaatattcattgttgttttacttaagagttatcgtattgagatccttaacatattattttatttttcatctaggttcttaaattataaaataatggattgagattagaaaatat

SEQ ID NO: 65531 - DNA, 1817 bp, Zea Mays
agacatccaccgtttagttccttgtgccagataggaaaatcaagcatttgctagcatgggtgatggtaaatatgagtggtttctttgatgataatgtctaacatgtgacttagcccttcacggctaaacttctcaacttcctgttaaatgctgatcatggccaagatttagaatcactgaagatttctcttgtccattttgctatgtacgatgtggaagcttcaagggtctaggatgccatttaaactcatcacatgatctattccactatgagttttgggttggatatctgaagagtaccaggttgttaatgttagtctgaaggctgatgcttggagaacagaggtaaatttatgacagacataaagtttaagctgttttttttttcagattcaatttctgtttggtatatggagctgtagttgatgagtttcgtactttatatatgtgtttaacactttaacttaatatgtccctcagtgttcttccaaaggttcgtttaaatggaggctccacttagttgggcaaaccgaaggcattgcatgttccttagtccaggacgactccctgctttgtgatttccttcctttcttgagtgcagaagccaaggatgaaagagcattggctattctatatctccaatcaaattccttacatagtgtattgtgtacctcaatgattttttggtggataatgttttacatgcttaacaatgcatggttactatttctttaaatggaagcactcttaactgtatttggtaactaatgatcctaactggcagctttttgcggagggcgttgatccaaggcatcaaacattttcttatcgctcaaggtttaagaagcgtagacgatcaaagaacacaatggagaaaatcaggcatgtacactcacatattatggaatcaggttcacctgaagatgaggcaggatctgaggacaactttgtgcaaggggagaatgggacttctgtagcaaatgcttcgattgatcctgctcaatctttacatggcagcaatctttcaccaccaacagtactacagtttgggaagacaaggaagctatctgagagatctgaccctagaaatcggcaactcctgcaaaaacgacagttcttccattctcacagggcgcagccaatgcaactggagcaagtgttctcggaccgtgatagtgaagatgaagttgatgatgatattgctgacttcgaggatagaagaatgcttgatgattttgttgatgttacgaaagatgaaaaacttattatgcatatgtggaattcatttgttcgaaaacaaagagtgttagctgatggtcatataccttgggcctgcgaggcattctcccagttgcatggacgacaacttatacaaaatcctgctctgctgtggggttggcgtttcttcatgattaaactttggaaccataacattttagatgcccgcactatgaacacatgcaatacagtccttcaaattttacaagaagaaagcacaggactaaagtaattttgatgcttctgatgaaaattcaagggaagaagatttctttaccatttccaagaagaaagcatagaattggagtaactttttattgataatttcattcatatctattgtcaattgtattaatggtttttaaaagagacaaatcatgtctaactctcacgctgtaatattctaagtcgtacgtgaatttgatgaatattcattgttgttttacttaagagttatcgtattgagatccttaacatattattttatttttcatctaggttcttaaattataaaataatggattgagattagaaaatat

SEQ ID NO: 65532 - DNA, 1528 bp, Zea Mays
gtctaacatgtgacttagcccttcacggctaaacttctcaacttcctgttaaatgctgatcatggccaagatttagaatcactgaagatttctcttgtccattttgctatgtacgatgtggaagcttcaagatatctgaagagtaccaggttgttaatgttagtctgaaggctgatgcttggagaacagagtgttcttccaaaggttcgtttaaatggaggctccacttagttgggcaaaccgaaggcattgcatgttccttagtccaggacgactccctgctttgtgatttccttcctttcttgagtgcagaagccaaggatgaaagagcattggctattctatatctccaatcaaattccttacatagtgtattgtgtacctcaatgattttttggtggataatgttttacatgcttaacaatgcatggttactatttctttaaatggaagcactcttaactgtatttggtaactaatgatcctaactggcagctttttgcggagggcgttgatccaaggcatcaaacattttcttatcgctcaaggtttaagaagcgtagacgatcaaagaacacaatggagaaaatcaggcatgtacactcacatattatggaatcaggttcacctgaagatgaggcaggatctgaggacaactttgtgcaaggggagaatgggacttctgtagcaaatgcttcgattgatcctgctcaatctttacatggcagcaatctttcaccaccaacagtactacagtttgggaagacaaggaagctatctgagagatctgaccctagaaatcggcaactcctgcaaaaacgacagttcttccattctcacagggcgcagccaatgcaactggagcaagtgttctcggaccgtgatagtgaagatgaagttgatgatgatattgctgacttcgaggatagaagaatgcttgatgattttgttgatgttacgaaagatgaaaaacttattatgcatatgtggaattcatttgttcgaaaacaaagagtgttagctgatggtcatataccttgggcctgcgaggcattctcccagttgcatggacgacaacttatacaaaatcctgctctgctgtggggttggcgtttcttcatgattaaactttggaaccataacattttagatgcccgcactatgaacacatgcaatacagtccttcaaattttacaagaagaaagcacaggactaaagtaattttgatgcttctgatgaaaattcaagggaagaagatttctttaccatttccaagaagaaagcatagaattggagtaactttttattgataatttcattcatatctattgtcaattgtattaatggtttttaaaagagacaaatcatgtctaactctcacgctgtaatattctaagtcgtacgtgaatttgatgaatattcattgttgttttacttaagagttatcgtattgagatccttaacatattattttatttttcatctaggttcttaaattataaaataatggattgagattagaaaatat

SEQ ID NO: 65533 - DNA, 1890 bp, Zea Mays
gctagctctctctcccccatcagcagaccaccacccaatcacaccagctctctctagagctagccctctcttcctccaacacttgttgatcccctcccatctcctcaagccttcttcactgaatttctggccggtcgatcgtcatgcacagctacagagccatgcacccgtacactcatcactcgtaccagcaccacaccgcggccgttgcgcccaccaagcacggccacggccacggacatggacatggccatggcgacgaggaggacgaccagtccatgctgctcctctccctctggcctcctggccaccaccacggcaacgccgctgcttcatcggcgtgctcgtctcccccgatctgcgccagcgccaccaccacctctatggcagccgctgcctcctcccccgcttcttacccttggctcacccaccaaagcctttacaataatgccggctgcggcggagggagcagcagcagcagccacagtagcttcctgttccaggagcatcagcaggagccaggtgtcagcatctcactgtccatagccccgccgtgcagcaacaacgcggcttcgtcctgtggtggcggtggcttcgctgcaccgccggcggcaccgtcgacggtgacgacgaccgtgacgccgggcgggggccaggttcccagacagtactggatcccctccgccgccgagatcctggtcggctccacgcagttctcctgcgccgtctgcaacaagaccttcaaccgcttcaacaacatgcagatgcacatgtggggccacggttcgcagtaccgcaaggggtcggagtccctgcgcggcgccatcacggtgggcacggctccgccggcgtcgctgatgcggctgccgtgctactgctgcgcggaaggctgccggaacaacatcgagcacccgcgggcgcggccgctcaaggatttccgcacgctgcagacgcactaccggcgcaagcacggcgcgcggccgtacgcgtgccggcgctgcggcaagcggttcgccgtgcgtggggactggcgcacgcacgagaagaactgcggcaagctctggttctgcgtctgcggctccgacttcaagcacaaacggtcgctcaaggaccacgtccgctccttcggcggcggccacgcgccgcacctcgtcgagtccgtcgctgtcgaggacgaggaggaggaggacgacgaccacgacgacgacgacctgcagacttttgacgacaacggcggcgccggcgcagaccccagcgacatggtcgtcatctaggtctaggcttcctcattcgaccgatctagtactactactactactccatcgattgacatgaatagttctcgatccgccacttattaagttattagctagcttgctcatccctaaattagctgccgacttttttagctagctatagatttcagtagcttatatactagcttgttggttctgattagagctgcaatatttcatgagtcgtcgtcgacgacgtaggtattacgtataggtacgtgatgctttgcgactgcaatatttttgcatggcaatgcattactgctaaggtcgacgtacgtacaagtagactagctagcatgcagtttgaacttgttggcttttaatcgcatgtgtcaaagctcagtttgtcgtactgcggccctgcagataggtagagagagaaagagatagtttgtacggtgtgtcatggtcatttcctgtatctgtgtcgtatggtctttatctgtgcccaaagctctagcactgtttcatagtgtctcgtgcatgtcaagagagtgaaaaagagctggagagagggacactagcctctctctctctctctgtgtctgtctgtctgcatgatgcacgagtagtagtggtacagtaggaggag

SEQ ID NO: 65534 - DNA, 1094 bp, Zea Mays
agggttggaaaagacccggccctttgtgggttcctcaacgaggagtaggacacctttgtggtggttgccgaacctcgggatatatcgcgtgttcttgtgtgttcttgttaagctttcatattcggtggttggttcatattattcattcaagtagttcttgtgtagggcaaatctttagctgttttctttactacttcgaatttgttcaatagattattaaattcaagttgagtgggttcaaacttgttcagttgggattaaaatcgactgaaccggtttgcacccgtgcaactttgatttaacctatttcgaagtttttagtgaaaattttcaggtgtagcctattcaccccccctctaggctactttcaggttgcacgccttccaggccgaccatgccctagacatggctctcccctacatcccatgttgaccacttcctaggcacgtcgtagccccaactcgagcctaggcatgcgtgactacaccggccacatcatcccctagtcgcaccgtgtgaagagccgacagtgctcgtgtcccttttttcctctgtcgtaactgaagggaggaagaacacaaagggtagaaatggctattccaccaaaaatcatctccactagatctgaagtgagagttagccacacaattttagcagtgaatctcagatctattgaatatgtcctcggactaggaccaagcaaatctctcacacgcgccttgattggggacgtaaacctccaatggttatggccccccccagttcacatgcgctatataaattgaggcagtgtcggcacggaatcaaacgttttcgctaaccctagctgccacactagaaatgatgtgagctcctactagcgccctagtgatcaaaaatcgcccaacctctccatggcatccgtagaccctaatggttctatgccactggccaccgacgctcctcccaacggacaagaggggaaacaaatccagagggagggactcaactcctatagtcgtctatgaccccacctactactgcggcgagtctccacctagccccgaagatatggtttccctatctatcttctcccttcgctctcactagcgctc

SEQ ID NO: 65535 - DNA, 725 bp, Zea Mays
actaaatcgaggaaatcacctaaaaatagacatgttgttcgctctgtgagcttgactttgcactccaaaatgataaacctatagaacccaaagagggtgtgcctcggtacaagcacaaagtgatataatatggcattgaaatgatcaaatgtgaaagatcaaacaaaaagtgattgatgatcatcaagagcctcataatcaaggcaccctaaggggtagtctaggtaagcccctggctaccatagaatttggtccaaaaacaaaccacactttaatggacatggtgcgtattatgttgagttactctagtttaccattggagttgtggatagaggtcttcaaattcgttatccatatacttaacagatttatagtaaatcagtgctaaaaatacatatgagatatggaatgagagaaagcccacgttgaactatctgcatatttggggttgtccaactgaggctagcatctttaatcctaaacagagaaaattagataaaaggacaagttgccattttattggctaccatgagaaatcgaaagaatttagattttactgccaaagcaaatatactaagtttgtagaaacaagacatacagtattcttagagaatgagatgatcaagtagagcatactaccttgagaaataaaccatgaggaaaagagggcgtattccgatggtataagaaccatatttctcgatacccaccaaggtttcaccact

SEQ ID NO: 65536 - DNA, 1112 bp, Zea Mays
gcaatagctgtgtttttaatggtgtgcagcctagtcaaagcatggtcattaattgggtcaaggaggaggctcatctctggtatagggctggagccagggatttatctaacatccttatgctccagtaatttcagtgggtaatccttaatttgagtctccatggtcatgggactagatgtcttttgttgttgttgatgttaattttctccttctccctataacctagtgtttgtgggttcgtgtggagttgtacgaggtttccttgcctcaccctttcttcttaatatattgatacgcagctctcctgcgttttcgaaaaaaaagaagaagcgagataaatgttagcgaggatatagactctgaagatcccactggttataaagccataagaagtccagactcatcaaagtagtgttttgccatgaagaatgaaatgcagtctatgagaataaataaagtttgtgacctaaaggtcatttctaaacgagccaaaacaataggctgcaagtggaccaacaaaagcaagcgtgactctaaagagaacgtagaaactagaaagatataaagctaggcttgtagctaaaggattcacttagagaaaaggaatagattgcaatgaaaccttttcacatgtcttaactaaaaattcattcaagataatcatggcattggttgtgcattacaatttagaactccatcaaatggatgtaaagagtaaagacaacattcctaagcggagagttactagaaaatgtttacatgacacaacctaagggttttgtcacaagagaaaaagaaaatatgggccacttaagaaaagtccatttatgggttgaagcaagcttctagttagttataccttaagtttgatgagactataaaaaatacggttttgaaggaaacaagaaagataattgttagactacccgtctagggtttggggtgttccccttgtaattaccgtctcaccctctgtaatgggcctggcccatctactaagcctattaatactactcccaaccctgtttagggttatgggttctcattccgacatggtatcagcctaggtttagggttttttctcctgcagccgctgcagccgccgggagctc

SEQ ID NO: 65537 - DNA, 2461 bp, Zea Mays
  misc_feature (2460)..(2461): n is a, c, g, or t
gagcgtgtcgctgccggtgacgttcgggttctcagcgtccccaccacgctgcagttcgccgacatcttcaccaaggggttaccgtcgagtgtctttttagactttcgatccagtctcaacatctgtacaggatagagttgtgactgcgggggggtgttagactacccgtctagggtttggggtgttccccttgtaattaccgtctcaccctctgtaatgggcctggcccatctactaagcctattaatactactcccaaccctgtttagggttatgggttctcattccgacaataattgcatttatacaaaattcaagaataaaatgtacatctttctagttatgtatgtagatgatattctactgtctaactgtgataagaaactgctgctagaaacaaagaggtttctttccttgaagtttgacaagaaagacatgggagaagcttcctacgtattaagaatggcaattcacagagacaaacaaaggtatattaagacttccacagaaaacatacataaaaaatatatactaaagaggtaccatatgcacaagtggtaccatatacttcagctatcggaaacattatttatgctcaaatttgtactcgctctgacttagcatttatagccgggatgtttgacagatatcaagttaatctagacaaagagtactgaaaaacaattaagaaggctctcagatgtttacaaggaacaaatggcctcatacttacaaatagaaaatctaattcccttgagatagttgtgtattcagacgccgactagataggttgtgttgatacgtttaaatccacttttagatatatcttcacacttattggggtttgtttcttgggagagttaaaaatatacagttgttgcgtcatcgacaatgcacgctaagtttacgacaatgtatgagacaactgggcaaacgttgtggataaagaaatttgtacccagattaagagttgtggataacacgaaaaggccactaaaaatatattgtgacaatgagctagtactattttacttctacaataagtcaagtggattgtaaagtacattgacatcaatattatgttgttaaggagaagatcaaggatcaaagtattaaagttgaacatattagaatccatcagatgctagcagattcgctcacaaaagaccttccactcaacgtgtttagagagtgcatatctggcatggtattgaaggaaagactatgattctagatcaaggggctataagacaaccatctcacaagatcgaaaaaaattacccaaccttgaggtagagggacatgttatagtcaataagtttggtggcacataattgatctccgtaatatattgggtttgatgtgtaaaaggatggaacatagaaagttaaagaacataaaagatgagaacaaaggggagaatgttggatatgtccttgagagcaaggggctgagctaggatctcgcccacgcgccctgtttggagacacaaacttcccatggtaatgagacctctggttcataggtgcaaactgggggctaacttggaagcaaatgctcctgccaaccctagccgccacaatagaaaggatctgatctcctactagcgcccgagtgaccgaaaattgtgcagcctctctatgacgcccgtagaccctgacattttacgccactggccaccggcgcacctccttaaggtcccaacatgcaaagaggggaaatgaatcaggaggggagagactcaactctcagagtcatctaagacctcgtttgctactgcaacgagtcaccacctcagcactaaagatatggtttccctatctaccttctatattcgctctcactagtgtaataacttgtgtatcttttactctatacacaagaactaggacatgttctagagggattggttagttcctagagaaaaagaggccgacaaattcatcaagatccactagtggaactgctccactataaattctagatctagattctagtaaaattgtcccaaacatagtagaggcacatgatgaattagatattaaagcactaataagtttattgttccaaccataaaactcattacccatactcatatattgcaggtcaggaagttctttcatgcttcggttattactgcggtgggcaatggaaacagaactttattttggactgatagatggataaatggcggctgcatcaatgattttgctcctgatgtcgtttccaaggttgataaacttattgtctccactagaacagtggcccaggctcttgggggacaacaatggatcagtgacatcttgacacctctttcctggatggggatccaacaatttttgctgatttgggatgctatcaatgttcaaaaaagcgcgcttaagcgtccgcttagtcacgattagatgctaagcggtgccttagcgctgcgcttaggccaaaggcgttgctttcagcgtnn

SEQ ID NO: 65538 - DNA, 926 bp, Zea Mays
aaagaagtgtggcgggaaaaaaagggtggcgggaaataaagtggcgggatttccactttatctgctcgggagctgctgctgcatttgagagtagggaaaagtggtgggagctgctgtggagaggacagaggagggaaaaaagcgggagctgctgcatttccactttatccaagtctgctgttgccgcctgccggattgtcctcttaggctcttccccaatcgtccaggtcagcacagcccttctcctcttcccccaataatccagtattccaggcgttcttccctctccctcctttgctatttttctgctgctcctccacctcttctgttatgtttggtgaagggctgaaggtaagaagctgggaacgtgcagcaaggctgcaaaaacatgtccattaatccaggtaagtacccctaattcctaggtacaactgtttttctgtgcaaatatatatattatattgtaatattcctacaaacgcttaagcacgattaatctacgcttaagctttataggcgctaagcagtggcctaacgcccgcctaacgcctagcgcttaatataaccttggatgctattagcaatattgtgttaactcaggaggcggatattcacacctggctgcatacttcctctggtcagttttcttctaggtcttgttacagggctttttttatgggagctattacgtttgaaccttggaagaggctttggaaatcttggactccccctaagtgcaagtttttcttatggctggccattcggaataaatgttggacttcagatagattggagaagagaggtctggaccacccactgtcttgcctactctgcgatcaagagcaggaaaccatacaacatattttgtgtacatgtgtctttgcaggacagttctggcattccattctgtttggattggatgtagt

SEQ ID NO: 65539 - DNA, 3578 bp, Zea Mays
aaaaatcatcagcagtacaagaagaatcagcatagcagataaattccacatgcatttttttatgggcactcaagaacaaaagaaagatataattttatgcttatctagttttctagtaagaaaaggcagaaagagcacaagcagtcccaagaaaataaaattgtatgtttgctggatcagttacattatggacttggttggaagttaaagataggaagcaaaagtagggaaggattgaaaggaagatggtagataattgatggcttcctagtccaaggcatttaattgctgaaatccttgatttttattaggttcttgaggagcagtttttgcagcatggtattcaggatcagcatatttcgaaattcagcacttcgggtgaatatacggctagctcggcttataaagccctcttccaaggatcagtaggctttgagccaacaaaaagggtctggaaaacctgggcaccaggaaaatgcaagttttttatttggcttgtggagcatgacagatgttggacagctgataggcttgcaaagcgtgggctatcacatccggaacgctgcccgctgtgtgatcagaaacctgaaaatattaatcatctattggttgcttgtgttttcaccaagcaattctggtttgagtttctcaaagatggtggtttgcaggagttctgtccgctgaaggatgatctctcttttgaatcttggtggaggagcagcagctctagaatgcctgatcagatggaaaaatgttttaactcattggtgatcttaggtgcctgggttgtatagaagcataggaataagtgtgttttttatgggtgcagtcctagtttagctgtcgccctacgggtggcaagggaggaggctttgtattggtccttggcaggagcaaaagctctgtcctcccaccaggttggagaactgtttgtgtaacagagctctaggtcgttgttttattttatgtaatcctaggtggggtgtgtgagctctgctgtaccggggatctttttccctttggttttttttctctctttttaatatattagtgcacactgcacagctcacctgcgtatttgagaaaaaaaagaaccagcattcatgcccttaatttccactaactgaatatttcgtaaagcttaagcatgtatttggctctagggcacaagcaacatttatagtaatagtagctgcagaatcatgtataggctacaactgtaccatgcttatgcctttggaaacagtgtctagtaatctcacaaaagaacagaaaagaaataagagagtaatactgtatagtacagcacaatagaataattgaagtaaaatgggttgaagttaaaaccttgttcattgagcatcatccatttattcattttcctttgacaccttagaacctacagggtatacaatgcaaactttggatattactatagtcaaattccccaaagatggacttcgtcttccaccgtgtggtattaaatctttagtaattagtatggtaatactcaaattcaaattgtagcatcttatgtccagatttcagaattcttaagggacattactaatttagtagttatctattcctgttttattaatgaattttacagtttctggatatttaggttacataaacaggccactgtcaattactatctccagtaaaaaaatatctgacaaatataactttgcagtatcttcgatgcataccttggaccagtaatatcttctagcatttgttcttaaatcttccgaatttatgagattttgcaaatgctttccaatacgaatctacatacatatcttgcatgttttgaaactaaataatttaaggtcccgtttgttttctttcatttcgaggaattggaatcttactaatgcaataggctatttttttagatgtgacatttcaccactttccaaagttatcatataagactatctcaaattcatggggtgagaaatgaaaattgattctatagttttacatactatttttccgatgtacaacttatagcacattcttctacttgcttcgctataacataaatgtagtatataactatctctctcatatgatttaggataatatacaaatatattatatatataaatatatgaacttaattagttttgtctaaattataattattaaaatggaattgaattccaacgaaacaaacggggcctaaaggtaattgatgtttgtagtttttccagttaccagagggagtactttctggaatagatcaaaatgacctgaatagacagagacccagatgcaatgagattttaagtcatgatttaccatctgataaaaagatctagtagttatagcatttgtcgcacatgtaccaggccaaacacatggaccatctcctgaattcttccccttccagggggcatcatgttagtaatttcattctttaaaaatcttccttttatcatgttttgcctccatcatggaaaatagttgggttcaattaagtttctctacacgaagtacttcagttgtaacgatgttgtggggagagatgttatgaccagccgccacaacaggcgccagacaacagcagaggcggcgggcaacaataggcatgcagattagttagataagaattagaagattaaggagataaggtttcttagagaggaaagaggggatctcatgcagattagttagataaggattagaagatcaaggagataaggtttgttagagagaaaagaggggatctcagattttatctctttagataaggacccgaagagagtataaatacttgtaagcaccactctatatgaattaagcagaaaactatttaacctacttcctccaaaggaagcaggcgtgttttcctctcccaaagtcattgtccagcgtccgccgaaaaacagcgcggccacagcacccctgcgccagtccaccgcgcacccattcacggcgccctgcccagaccgcaacgcctcactcctacaatctgtgcagtctctctgataggagctctaatcctatcaaacgtagttcaacttcaacaccagtccggatatgcagctgttgaagcttctcgaaagtatgaataaacccatcaaatccttacatgacgtccctatcctaaacatgaaatttaatctttctagacccctaaataagagattagtcatgatcccagtccaattggcggtatcgacatccacattagtgcaatcagaagtttgtacctagtaccttgaataggagcacacatgatgcaacaaataaaccacaaggtcagtccatccatgattgctctattataatgttatgcagcaaagtctgagcatgttctcaactgagtactgaccttggaagtaactcagagatgtaaagtaaagctactaaattcatgcaagatactctaaaagctatattagaatcaacaacaaaaatgttgaacaatgaccacacctaacattaacaacaaaagccaaagcctgagctagtaatgtcatggtaaccttttaggatggaaaccaaaagcaataaatgactgtcatacctccaagaagtgccattcttcttctttcaaatcaaac

SEQ ID NO: 65540 - DNA, 246 bp, Zea Mays
atgtccctcataaaagtttacaacaacgactcaaacatttatggactaaacggtcattctatttttaagtcggtttgtaattctgaatcttcatggagaggaaccttcggtcatcacatgcggacagcttcagccgaagctgtttcttcctgcaggacctacggcgacgaagcatggtcccaacagctcccttcacgcccgctcggctcccattcatgcccgcgcggctcggctcccttcacctag

SEQ ID NO: 65541 - DNA, 1496 bp, Zea Mays
ctccatcttgtgcacgtccattctctggaactcccaccgctcagtctcatctctatgcttatccccaccgtttcttctagtctatgtacgatgctcctttgttctttattctgagatgagcatttcctggaagcacacacgcgctctcatctccagccatccagacaaacgaccgcgtcggcagcagcagagctcgctgcctgtgtctctttcaagctctcggcgctagctcttactagcaggcggcgcccagcatcggtgctccgtcgtcgctgagttctctcggcgcactgcgacgtcgtcgtcgtcgtcgtctcctcgccggccgtgctcgactccacagctccttcacgtcgtcgacttcgataacccacggcctctcctccaatcacatcgcactcactcgcggtgtcgtcgtgaagacgctagctgcctgcctcgccgatcacgttttcggtgaatcgatcacttggtgaagcaattttctagaggttggttatcccccaaaaggcttgtagcattttgtttctttttcatttggctttcgctgcaacaaaggcaagcctcagtgcattcaccattttccgtgttctttacaaaacttttatcacttgatataatgcattatgtgataggagttgcgtgatcaaacaattgatgcattaattccttgagaattttaataattattccttgataactgttgtatgaaaaaatagtgctgcttatccctgcttaatgagatagggttttgaaacttattttgattactggatgttgttattgttagagaaatagtcatttttagttttaatttaatccagaaaactagagtgatgtatgtgcatgtgtgtatcactactcacataagcagtaaacaacagtaaaacatacacaattactctgaacataatgtaccctgtggagggatcgttgctcaaggcattagtggctccattcacatgagacatctcgtgtgtatgttcgatgtagtcgcacgtagtcgatggaggtagatgtacacagtgtagcccctcgaacggcgtcggcgtcgaggaacctgatcagcgttgatcgagcggacgaagcgagcagtcgcgagtacgctccccaaaaacatgatcgcccgcacacctgtgcaagtgtagctctatggatggtgatttcagaggcatgctctcccatactctttgtgctcgtagaaggtgggacgagaatggctgtgtgcaacgcgtctgagactgttcgtacgtgctataatcagaagcagcctaccctcctccatatatttacatgcgcagagggaggcgaatggacgataacggtcgtcatcagagctaccattacaaatgtaacacccctggtgttactgtcactaaaacttgagcataacatcatgagcattagcatatcatgtgtttgtcacacctagagtgcattcactaggtaaaaatttcaaatatgttgtactaatatgacttgatgtgtggttaact

SEQ ID NO: 65542 - DNA, 1379 bp, Zea Mays
ggattcactgatgcacagttacaggcagaatctgacacctttagtgaaaatggacacaagagcttccttgcaatggctgattatctggtcactgacaaaatcactgcattcataatgcaaatgcagcgtgcagcaacagaagtcctaaaagagaagccactgaaggaccgtatgaacatggaccaagtattgcaaacagtaatacaaatattggacacgttcatggatctttgtgaagctaactcatggataaattatcttgtacctgagaatccccctgtttatgcacagttgatggctgtgtccagtagtggctttgatgattcatcactcctaaatgatttcagaaagctagaccaactaatgtctgagacacgaatagtactggcaagtgatgatttcagaaatatcatggagaggtcattgaggaagatagcagaagtggtggtaggggacctggctgtgcagacaactctaggatcaggattacccttagcaactctcttgcccaaagttggtcatctgagttccccattgcttgaggagccaaacaataacaaatacatccagatcatcagaagtatgcctgaagtggaactcttctacacattcctgtacgcaaacatgccaccagaaacatgatctgtacattgatgcgaaaagaacacttgcttctgaattttggctccaaagatctggtggtacatgtggatgatgttcaaccgtctgaaatcaggaaaccaacaaacgcagacagactggatttctgcccttgtatatactgagatattccgttgttgctagcaggaaccgagtaaagctccttccatttcgattctttctttctttgaagtttcggttgtgcacgtttagatagtcacacgcactggggctgctatttcgctatatttttgatcgatgacagatgttccagaagttttacttgccacaagtggctaatgtatacattgcaagtctgttgaatcctgtgttgggtgaatgaatattcgagcccacagtttgcgatcctgcaggcatatgattgcttgtgtagttttgctttaggaagaactggattgcctgaatgtttgaaacagctgagtttcttgcattatgtaattttcttcgtgacgcttgaaaacttttgtcattttttcttgctgttcggtaatgaaattcagttcgaccgagtacagtaataatattcggtggagcgtgaagcttcagcttcattagtgctgcttggaaatgtcatgtcatgaggtcatcttcagaccgtgtatatggatatataaatcagcagaccttgtatatggatatataaaacactgtttaaatatgcaaaacactgttttgcactataaagtgtattgttgtag

SEQ ID NO: 65543 - DNA, 1369 bp, Zea Mays
cacagttacagtaggcagaatctgacacctttagtgaaaatggacacaagagcttccttgcaatggctgattatctggtcactgacaaaatcactgcattcataatgcaaatgcagcgtgcagcaacagaagtcctaaaagagaagccactgaaggaccgtatgaacatggaccaagtattgcaaacagtaatacaaatattggacacgttcatggatctttgtgaagctaactcatggataaattatcttgtacctgagaatccccctgtttatgcacagttgatggctgtgtccagtagtggctttgatgattcatcactcctaaatgatttcagaaagctagaccaactaatgtctgagacacgaatagtactggcaagtgatgatttcagaaatatcatggagaggtcattgaggaagatagcagaagtggtggtaggggacctggctgtgcagacaactctaggatcaggattacccttagcaactctcttgcccaaagttggtcatctgagttccccattgcttgaggagccaaacaataacaaatacatccagatcatcagaagtatgcctgaagtggaactcttctacacattcctgtacgcaaacatgccaccagaaacatgatctgtacattgatgcgaaaagaacacttgcttctgaattttggctccaaagatctggtggtacatgtggatgatgttcaaccgtctgaaatcaggaaaccaacaaacgcagacagactggatttctgcccttgtatatactgagatattccgttgttgctagcaggaaccgagtaaagctccttccatttcgattctttctttctttgaagtttcggttgtgcacgtttagatagtcacacgcactggggctgctatttcgctatatttttgatcgatgacagatgttccagaagttttacttgccacaagtggctaatgtatacattgcaagtctgttgaatcctgtgttgggtgaatgaatattcgagcccacagtttgcgatcctgcaggcatatgattgcttgtgtagttttgctttaggaagaactggattgcctgaatgtttgaaacagctgagtttcttgcattatgtaattttcttcgtgacgcttgaaaacttttgtcattttttcttgctgttcggtaatgaaattcagttcgaccgagtacagtaataatattcggtggagcgtgaagcttcagcttcattagtgctgcttggaaatgtcatgtcatgaggtcatcttcagaccgtgtatatggatatataaatcagcagaccttgtatatggatatataaaacactgtttaaatatgcaaaacactgttttgcactataaagtgtattgttgtag

SEQ ID NO: 65544 - DNA, 829 bp, Zea Mays
aaagtcatttggcgaacacaatatgagtgaagattatactaaagttgaagagttgctcgaagcgataacaaataatgagtaatttaatggagtggagtgttccgatcggcgagttcctcgagcggatccatctgctcgtccggtcagaggcggccgccgggcacgcgatccgcgtcgacggcacgtgtctcgtgctcgctggggtgtacctgacgcgtttcatcggcagccacgcggcgcgggtcgcggggatcgtggtggagccgtccaccgcgcaccgattggtggccgtcgcgctgttcctgggcggtcactcccccaagaactgggctgccgcgttcgaggcggtctcagaccgcgcgatccgcacagggccatgaggagaagacggtgcatggtcgtggctatcttcgactcagtcagcattcaattcaatcaaattcttctagttttggttgcttctcctacttctacttcgtctgtcttgattttgctgtaggcacgaggccagagaagacgtagacggtagatgctctcttgctcgtggccacgctcctcggaagaggacgatgctctcgtcattgatcaagctcgctggaccagaacggggtggagctggagcatccccacagttgctgcctagcttcaagttttattagtgattggtcttgttgtttccagctctggtagagagctcggcgtcgctgctcactagcagagcagcttgctgtgttttatgtgtactggatcagcaagtaccaataaaacctgtcgttgcatcaatgacgtacgtgtgtttcaggcgcctgaaattttaggtgtgagacat

SEQ ID NO: 65545 - DNA, 1021 bp, Zea Mays
aaataatgagtaatttaatggagtggagtgttccgatcggcgagttcctcgagcggatccatctgctcgtccggtcagaggcggccgccgggcacgcgatccgcgtcgacggcacgtgtctcgtgctcgctggggtgtacctgacgcgtttcatcggcagccacgcggcgcgggtcgcggggatcgtggtggagccgtccaccgcgcaccgattggtggccgtcgcgctgttcctgggcggtcactcccccaagaactgggctgccgcgttcgaggcggtctcagaccgcgcgatccgcacaggtgagatcgcagccctagaggagcggttcttgcgcgcgatcagctatcgcttgttcgttggcgggcaagagttcaggggcctctgcgaggtcctggagaaggtgcccctgccgccgtgcgggtgctgtgccagtaggaagaggcaggcggacgccgttgtcggggacgaggaggaggagcaccgccgcgtgcgcgctcgcctgccatcacccgtcgtgatgcccccattaggccattacgaatctttttaggctgaaatctaacgaattcaattcagtcgatggttcttgttttttgttgcttgttttacttcgtgtcgtctcttttttgctgtaggcacagggccatgaggagaagacggtgcatggtcgtggctatcttcgactcagcacgaggccagagaagacgtagacggtagatgctctcttgctcgtggccacgctcctcggaagaggacgatgctctcgtcattgatcaagctcgctggaccagaacggggtggagctggagcatccccacagttgctgcctagcttcaagttttattagtgattggtcttgttgtttccagctctggtagagagctcggcgtcgctgctcactagcagagcagcttgctgtgttttatgtgtactggatcagcaagtaccaataaaacctgtcgttgcatcaatgacgtacgtgtgtttcaggcgcctgaaattttaggtgtgagacat

SEQ ID NO: 65546 - DNA, 1399 bp, Zea Mays
ctggtaataatgagcgcaggctagcgtctctgagacgagatcgaagggctgctaaagacaacacgtactctagctagggcgttggcgttgcattgcttgcccgcccgctttccatctctatttcgtgccgggagcaggagatcgccgtgacatcgtcctcagcccgcacgcaaacgcagagtccccgcgcgcggcggccgccacagcaccagcaccacaccgacgaaggcgcggacgagcgacccatggcgcaggtgagcgtggtgacggcggcgaggagggagctagcgggcgcgctgaaccccgacgccagggagttcctcccgtggtggcgcctagggggcagcaggaagcagctctcggccgacgcgccagagttcacgcggtccagcttggggcgagcggtggccgcagccgccgccaacggtgcggtgatagccgccccaaacaacgccggcgtggggaaggcggcgacccaaccagttccaaattatgtgctctatcggaggtctgcaagcaataatgggcaacacgcagagtcgacaatgcctacatttttcaagtctcacaggtctcagtgggatgaaacagtgaaaagaacaatctttgtcaaatacattgatcacaatgtcactgaggacattctggcttgtctatttcagttgtttgggacagtggtggattgccgcatttgtggagatcccacatctgatgatggtctcaggtttggatttgttgagcttcaacacgaggatgaagcaattgcttcgttggatcttgatggatatattattagcgtatcccctttgagcgtttcacgctcaaggactgcaatctgccctattaaccccaagttccttcctcagtctgaagctgagtgggagacgtgcttgaggactatatattgcaccaatatcagcaaaaatgtcacaagtagtaatttgagatccttttgtgaggcgtactttggcaaggtgtgtcgcgttaggcttctggataataaagagcgctccaccaatatagctttcattgagtttgttgaggtttatggtgctattgctgctcttgggtccggtggcatttatgtggatggcgttcctatcaggatgtgcccatccaagagcccgataaggacccattgctttgggaagcttagtagctaataagctggagtgcaggacctaatgccatcatggtgtgtcatgatccggcaatatatatctgcatattatccgttgcatttggttgactcatgacatgagccatgaacaacctttaaacttttgctttagctttaatgccccagaacaataacaacaacaacatttcagaatattatcatactatactatacaacatttaactaaacataggtctaaccatttgttttaaatagcag

SEQ ID NO: 65547 - DNA, 1270 bp, Zea Mays
ctaaagacaacacgtactctagctagggcgttggcgttgcattgcttgcccgcccgctttccatctctatttcgtgccgggagcaggagatcgccgtgacatcgtcctcagcccgcacgcaaacgcagagtccccgcgcgcggcggccgccacagcaccagcaccacaccgacgaaggcgcggacgagcgacccatggcgcaggtgagcgtggtgacggcggcgaggagggagctagcgggcgcgctgaaccccgacgccagggagttcctcccgtggtggcgcctagggggcagcaggaagcagctctcggccgacgcgccagagttcacgcggtccagcttggggcgagcggtggccgcagccgccgccaacggtgcggtgatagccgccccaaacaacgccggcgtggggaaggcggcgcggaggtctgcaagcaataatgggcaacacgcagagtcgacaatgcctacatttttcaagtctcacaggtctcagtgggatgaaacagtgaaaagaacaatctttgtcaaatacattgatcacaatgtcactgaggacattctggcttgtctatttcagttgtttgggacagtggtggattgccgcatttgtggagatcccacatctgatgatggtctcaggtttggatttgttgagcttcaacacgaggatgaagcaattgcttcgttggatcttgatggatatattattagcgtatcccctttgagcgtttcacgctcaaggactgcaatctgccctattaaccccaagttccttcctcagtctgaagctgagtgggagacgtgcttgaggactatatattgcaccaatatcagcaaaaatgtgtgtcgcgttaggcttctggataataaagagcgctccaccaatatagctttcattgagtttgttgaggtttatggtgctattgctgctcttgggtccggtggcatttatgtggatggcgttcctatcaggatgtgcccatccaagagcccgataaggacccattgctttgggaagcttagtagctaataagctggagtgcaggacctaatgccatcatggtgtgtcatgatccggcaatatatatctgcatattatccgttgcatttggttgactcatgacatgagccatgaacaacctttaaacttttgctttagctttaatgccccagaacaataacaacaacaacatttcagaatattatcatactatactatacaacatttaactaaacataggtctaaccatttgttttaaatagcag

SEQ ID NO: 65548 - DNA, 1260 bp, Zea Mays
gtactctagctagggcgttggcgttgcattgcttgcccgcccgctttccatctctatttcgtgccgggagcaggagatcgccgtgacatcgtcctcagcccgcacgcaaacgcagagtccccgcgcgcggcggccgccacagcaccagcaccacaccgacgaaggcgcggacgagcgacccatggcgcaggtgagcgtggtgacggcggcgaggagggagctagcgggcgcgctgaaccccgacgccagggagttcctcccgtggtggcgcctagggggcagcaggaagcagctctcggccgacgcgccagagttcacgcggtccagcttggggcgagcggtggccgcagccgccgccaacggtgcggtgatagccgccccaaacaacgccggcgtggggaaggcggcgcggaggtctgcaagcaataatgggcaacacgcagagtcgacaatgcctacatttttcaagtctcacaggtctcagtgggatgaaacagtgaaaagaacaatctttgtcaaatacattgatcacaatgtggtggattgccgcatttgtggagatcccacatctgatgatggtctcaggtttggatttgttgagcttcaacacgaggatgaagcaattgcttcgttggatcttgatggatatattattagcgtatcccctttgagcgtttcacgctcaaggactgcaatctgccctattaaccccaagttccttcctcagtctgaagctgagtgggagacgtgcttgaggactatatattgcaccaatatcagcaaaaatgtcacaagtagtaatttgagatccttttgtgaggcgtactttggcaaggtgtgtcgcgttaggcttctggataataaagagcgctccaccaatatagctttcattgagtttgttgaggtttatggtgctattgctgctcttgggtccggtggcatttatgtggatggcgttcctatcaggatgtgcccatccaagagcccgataaggacccattgctttgggaagcttagtagctaataagctggagtgcaggacctaatgccatcatggtgtgtcatgatccggcaatatatatctgcatattatccgttgcatttggttgactcatgacatgagccatgaacaacctttaaacttttgctttagctttaatgccccagaacaataacaacaacaacatttcagaatattatcatactatactatacaacatttaactaaacataggtctaaccatttgttttaaatagcag

SEQ ID NO: 65549 - DNA, 1269 bp, Zea Mays
cttgcccgcccgctttccatctctatttcgtgccgggagcaggagatcgccgtgacatcgtcctcagcccgcacgcaaacgcagagtccccgcgcgcggcggccgccacagcaccagcaccacaccgacgaaggcgcggacgagcgacccatggcgcaggtgagcgtggtgacggcggcgaggagggagctagcgggcgcgctgaaccccgacgccagggagttcctcccgtggtggcgcctagggggcagcaggaagcagctctcggccgacgcgccagagttcacgcggtccagcttggggcgagcggtggccgcagccgccgccaacggtgcggtgatagccgccccaaacaacgccggcgtggggaaggcggcgcggaggtctgcaagcaataatgggcaacacgcagagtcgacaatgcctacatttttcaagtctcacaggtctcagtgggatgaaacagtgaaaagaacaatctttgtcaaatacattgatcacaatgtcactgaggacattctggcttgtctatttcagttgtttgggacagtggtggattgccgcatttgtggagatcccacatctgatgatggtctcaggtttggatttgttgagcttcaacacgaggatgaagcaattgcttcgttggatcttgatggatatattattagcgtatcccctttgagcgtttcacgctcaaggactgcaatctgccctattaaccccaagttccttcctcagtctgaagctgagtgggagacgtgcttgaggactatatattgcaccaatatcagcaaaaatgtcacaagtagtaatttgagatccttttgtgaggcgtactttggtgtgtcgcgttaggcttctggataataaagagcgctccaccaatatagctttcattgagtttgttgaggtttatggtgctattgctgctcttgggtccggtggcatttatgtggatggcgttcctatcaggatgtgcccatccaagagcccgataaggacccattgctttgggaagcttagtagctaataagctggagtgcaggacctaatgccatcatggtgtgtcatgatccggcaatatatatctgcatattatccgttgcatttggttgactcatgacatgagccatgaacaacctttaaacttttgctttagctttaatgccccagaacaataacaacaacaacatttcagaatattatcatactatactatacaacatttaactaaacataggtctaaccatttgttttaaatagcag

SEQ ID NO: 65550 - DNA, 1278 bp, Zea Mays
gtgacatcgtcctcagcccgcacgcaaacgcagagtccccgcgcgcggcggccgccacagcaccagcaccacaccgacgaaggcgcggacgagcgacccatggcgcaggtgagcgtggtgacggcggcgaggagggagctagcgggcgcgctgaaccccgacgccagggagttcctcccgtggtggcgcctagggggcagcaggaagcagctctcggccgacgcgccagagttcacgcggtccagcttggggcgagcggtggccgcagccgccgccaacggtgcggtgatagccgccccaaacaacgccggcgtggggaaggcggcgcggaggtctgcaagcaataatgggcaacacgcagagtcgacaatgcctacatttttcaagtctcacaggtctcagtgggatgaaacagtgaaaagaacaatctttgtcaaatacattgatcacaatgtcactgaggacattctggcttgtctatttcagttgtttgggacagtggtggattgccgcatttgtggagatcccacatctgatgatggtctcaggtttggatttgttgagcttcaacacgaggatgaagcaattgcttcgttggatcttgatggatatattattagcgtatcccctttgagcgtttcacgctcaaggactgcaatctgccctattaaccccaagttccttcctcagtctgaagctgagtgggagacgtgcttgaggactatatattgcaccaatatcagcaaaaatgtcacaagtagtaatttgagatccttttgtgaggcgtactttggcaaggcacaacaatctagcaaattatcgttacttcatttgttaattctgcaaatgccatgtgtgtcgcgttaggcttctggataataaagagcgctccaccaatatagctttcattgagtttgttgaggtttatggtgctattgctgctcttgggtccggtggcatttatgtggatggcgttcctatcaggatgtgcccatccaagagcccgataaggacccattgctttgggaagcttagtagctaataagctggagtgcaggacctaatgccatcatggtgtgtcatgatccggcaatatatatctgcatattatccgttgcatttggttgactcatgacatgagccatgaacaacctttaaacttttgctttagctttaatgccccagaacaataacaacaacaacatttcagaatattatcatactatactatacaacatttaactaaacataggtctaaccatttgttttaaatagcag

SEQ ID NO: 65551 - DNA, 2371 bp, Zea Mays
cccgccaaattccgatgccttccccgacactgggccactggcgccgccgctcactgcgggcgactaccgccctgctgcttcgtctccgcgacgccgctgggccgaccacgccgcgccgcctgctcctccaatccatggcagtggtcctcacctccgggctctccttctcccaccccgtgctcgcctcccgcctactcaattccctcctcccgcacgtccccgcccgccgcctcccggccctcctccgcctactcccacccgaccacctcacgctcctgctcctctcctccgccaagcaccaccacgcccagtccctccccgccgcctgcgcgctacatgccctcggtctgtcctatggccacctcccctctgacctccgcctggccaactccctcctctcgctctatctctcccacggctccacagcctccgcgcgccgcctcctcgccgacatcccccgccccgacaccgtgacctggaacaccctcctccgctcctttctccgcatgggcctcctgccggcggcgcggcgcctgttcgacgaaatgccggagcgggatctcgtcacgtataattcaatgttatctgggtacgcggcggagggggatatcgccaacgccagggagctgtttgatggaatgcccgagagggacgtggtcacatggaactcaatgcttgctgggtatgctcagcgtggggacatggagagcgccaagaggctgtttgatgtaatgcctgtgagggatgttgtgtcttggaactcgatgctggatggctacgcccagactggggacattgagatgacaagaatggtttttgatggcatgccaagaaggagcacggtgtcatggaatgttgttcttgcgctatacgcaaaggtgaaggactggcatgagtgtttgaatctgtttgatgcaatgatggctgtggggggaagcaaaccaaatgagaagacatttgtcagcgttttgacagcctgtgggcacctgggtgatcttgagaggggaaggtgggtgcatcacttggttcatgagagttgggagagacttcttcctgacgtactacttcttactgctatgatgacaatgtatgccaagtgtggggtgatggggacagcaaaggagatatttgatttgatgaccgaaaggagtgttgcatcctggaactcaatgatcatcggctatggattgcatgggtacagtgagaaggcccttgagttgttcatggagatggagaagaatgggcctcagccaaatgagacgacattcatctgcatcttgagctcctgtgcccatggaggcttggtgcttgaaggctggtggtgttttgataggatggtcaggttctacaatattgagcccaaggctgagcactttggctgtatgatggacctccttggtcgtgctggactgctcagagactcagagaatctcatcaataatttgcaggcaaaggtgtcacctgcattatggggtgcactaatatcagcctctcgaactcaggacagctccaaacttggagagtttattggaactaaactgatcgaaatgaagccaacagagttcagctcctacgtgcttctgtcaaacatttatgccacggaaggaagatgggatgatgtcgaaaaagtaaggaaggtgatgaaggagaaggtagtggagaaagatgtggggatgagccttgtatgatcaaatgaacctcgccatgttgctgaagatggtatttcattcaacagaattctgtgatgctttcgctggatcgggatcccctgcagtactgcatgggccactgccgcgtgggctccgcgtgcgacagggcccacgcgcagtgacccaactgcacggtcaactataagagggagcctaattagttgttccacaagatctccagcagagtttatgtgttctgtttgctcggcacattaggtagatgcttccatgtgaataccttatggtggctgatagtttgtgcaattgaagattctggggagagcgcccaggcatggtggacttactgataagctgcactgccatcagatgggcattgctgttgtcgttaaaaggcagcagatgctagaatgatttttttgtggaagattcgaaaatgattaatttggagagaaaaggtacaaaatagcattctagcgtgtgacaccagttcgataatggcaattgggcgaatcccaattgtgcgggatggtaaacaagcagaacctaagtttggtaatggcaaaatcccaattttctctctgtttgaactttgaactgtgtgctttctcatgtaaagaaaactgtgaattctgttgtcaaggagcctatttgtgcataggaataaactagagcaacacaatgaatcaatattgtgaacagat

SEQ ID NO: 65552 - DNA, 2496 bp, Zea Mays
cccgccaaattccgatgccttccccgacactgggccactggcgccgccgctcactgcgggcgactaccgccctgctgcttcgtctccgcgacgccgctgggccgaccacgccgcgccgcctgctcctccaatccatggcagtggtcctcacctccgggctctccttctcccaccccgtgctcgcctcccgcctactcaattccctcctcccgcacgtccccgcccgccgcctcccggccctcctccgcctactcccacccgaccacctcacgctcctgctcctctcctccgccaagcaccaccacgcccagtccctccccgccgcctgcgcgctacatgccctcggtctgtcctatggccacctcccctctgacctccgcctggccaactccctcctctcgctctatctctcccacggctccacagcctccgcgcgccgcctcctcgccgacatcccccgccccgacaccgtgacctggaacaccctcctccgctcctttctccgcatgggcctcctgccggcggcgcggcgcctgttcgacgaaatgccggagcgggatctcgtcacgtataattcaatgttatctgggtacgcggcggagggggatatcgccaacgccagggagctgtttgatggaatgcccgagagggacgtggtcacatggaactcaatgcttgctgggtatgctcagcgtggggacatggagagcgccaagaggctgtttgatgtaatgcctgtgagggatgttgtgtcttggaactcgatgctggatggctacgcccagactggggacattgagatgacaagaatggtttttgatggcatgccaagaaggagcacggtgtcatggaatgttgttcttgcgctatacgcaaaggtgaaggactggcatgagtgtttgaatctgtttgatgcaatgatggctgtggggggaagcaaaccaaatgagaagacatttgtcagcgttttgacagcctgtgggcacctgggtgatcttgagaggggaaggtgggtgcatcacttggttcatgagagttgggagagacttcttcctgacgtactacttcttactgctatgatgacaatgtatgccaagtgtggggtgatggggacagcaaaggagatatttgatttgatgaccgaaaggagtgttgcatcctggaactcaatgatcatcggctatggattgcatgggtacagtgagaaggcccttgagttgttcatggagatggagaagaatgggcctcagccaaatgagacgacattcatctgcatcttgagctcctgtgcccatggaggcttggtgcttgaaggctggtggtgttttgataggatggtcaggttctacaatattgagcccaaggctgagcactttggctgtatgatggacctccttggtcgtgctggactgctcagagactcagagaatctcatcaataatttgcaggcaaaggtgtcacctgcattatggggtgcactaatatcagcctctcgaactcaggacagctccaaacttggagagtttattggaactaaactgatcgaaatgaagccaacagagttcagctcctacgtgcttctgtcaaacatttatgccacggaaggaagatgggatgatgtcgaaaaagtaaggaaggtgatgaaggagaaggtagtggagaaagatgtggggatgagccttgtatgatcaaatgaacctcgccatgttgctgaagatggtatttcattcaacagaattctgtgatgctttcgctggatcgggatcccctgcagtactgcatgggccactgccgcgtgggctccgcgtgcgacagggcccacgcgcagtgacccaactgcacggtcaactataagagggagcctaattagttgttccacaagatctccagcagagtttatgtgttctgtttgctcggcacattaggtagatgcttccatgtgaataccttatggtggctgatagtttgtgcaattgaagattctggggagagcgcccaggcatggtggacttactgataagctgcactgccatatgggcattgctgttgtcgttaaaaggcagcagatgctagaatgatttttttgtggaagattcgaaaatgattaatttggagagaaaaggtacaaaatagcattctagcgtgtgacaccagttcgataatggcaattgggcgaatcccaattgtgcgggatggtaaacaagcagaacctaagtttgctgtacaaaacacattctaaagagaaggatcagggactgctgacagcaaccttacccaggagggattcccctgttccggtcgcctacatcttcccccggcgatgctcaaggccaagcgagggagagacgaacgtgagaaagtctccagactctggtaggtcttcagttgtgttcccattcatggtaataaagagatgaggccataaggggtagggtatattttggtagtttccacgggctggaaataagagaggtaaaaggaaacctgtatctattg

SEQ ID NO: 65553 - DNA, 567 bp, Zea Mays
aacgtcttcaccgtctgtcgcgtgggcctttcctcgccgcggtcttcttcctcgcacgaatcgcgccccgtgggcgaacctaacagcctccgcgagatcctcgccgcgaccccaacaaaccccccaaactccctagcaccagctgccaatctacccgtccgattcgcgcggcatgaagccttggtccgcaccccgatcctgttaaaaacccgacacctcacctgcctcaccaaaccctagaattccaattccgtcgcgagagagacctcaccgcctcgccattgactgtcgttgcggcatcgtgggcctcagaaagtgctagggcgtttccccaaccattctgcgcaagtgagaaacctcgggggaaaacaatttcaagatcgcgcgggctctggcgcaagatcgacgggaggagagagaaaaagggggcgttccgtgcgtcgttggtgggccctgaccgcacgtttggggcaccacgcgggtccttcatcatcacgttgggcaagctcgtcgtcggcatctagatcctcgcagtgaggtcacgagtcacctgaagttcatcctggt

SEQ ID NO: 65554 - DNA, 564 bp, Zea Mays
aacgtcttcaccgtctgtcgcgtgggcctttcctcgccgcggtcttcttcctcgcacgaatcgcgccccgtgggcgaacctaacagcctccgcgagatcctcgccgcgaccccaacaaaccccccaaactccctagcaccagctgccaatctacccgtccgattcgcgcggcatgaagccttggtccgcaccccgatcctgttaaaaacccgacacctcacctgcctcaccaaaccctagaattccaattccgtcgcgagagagacctcaccgcctcgccattgactgtcgttgcggcatcgtgggcctcagaaagtgctagggcgtttccccaaccattctgcgcaagtgagaaacctcgggggaaaacaatttcaagatcgcgcgggctctggcgcaagatcgacgggaggagagagaaaaagggggcgttccgtgcgtcgttggtgggccctgaccgcacgtttggggcaccacgcgggtccttcatcatcacgttgggcaagctcgtcgtcggcatctagatcctcgtgaggtcacgagtcacctgaagttcatcctggt

SEQ ID NO: 65555 - DNA, 1595 bp, Zea Mays
gcacatttctcttctggaacataagtagcgtgcaaacttcgaccgggaccggcgatatccgccatggccaccaccactgccgccgctcgctggagcttccccgcccgtctccagctcctcaccagccgccgcttttgcttccccgcctcctctgccgcgccgcccagttctgtagcggggttcagttgggccgacgccctccgcgtcgctggggacggcgggcgcggcgacgagtccgacctctccgggtacttccggaaggtcaagagctgcaaccgcggaatggataaaaaagggcagttcgtgaagttctctgtggaggatcaggtcgtggggtacatccacaagggatttatcgaacacatcagagactttcatgatgtttttaccattgtcatggatgacaatggcagcaacactgtggagcatgtgtctctccagtcatcactaaggactccagaagaccgaacacatgctattggaagtgtcattaaaagccttggagaattgattccagtaacgtcatcttatggcatgcctgtgtacttctctctggaacgtgctgctgctccttactttggtataaaagcttatggagttcatatgaatgggtatgttgagaaggatggtcagaaatttctttggattggtaaacggagtgatgtgaagcaaacatatccaggaatgcttgatcatcttgttgcgggtggcctgccatacggaatgtcctgcaaagagaatatcatcaaggaatgtgaggaggaagctggaatcacaagatccatatcaacaaatgctacttctgttggagcggtttcttatatggatattgaaggctttagatacaaaagggatgttctcttctgctatgacctccaacttcctgctgattttgttcctaataatgaagatggtgaggttgatagcttcagactagtccctgttatacatgctgcaaacattataaggaggacagattttttcaagccgaactgcaaccttgtgatcatcgacttcctcttccgtcatgggtacataaacccagattctcgttgttacttagatctgctgcaaagcttgaggagtggtgattgttcctaactctcttttgctgtccacatttataatcattgttcaatttaatgaaacaaaaaaaaaatcatggagtagtctggtattatggttgatcataatcataattatgcctgggactccattgtcattttagtatgaacagagcattcacgtgcggttggggattatgcctgggactccattcatcgagttccgttggttggggaagcttctccttcccaaagcatgacgcaagtgctcatcatgtgcggttgctggaggtgccatttctgttcttggattcagccctttgcttgcattggttgttctggttgagagcaaacttgttgcttgcattgacgtatgatcgtgaagtacaaagataggcaatcaaaggacatgaatgattatagaaatttaaaaataattatatcatcttttaattacaaaccaatttagtttatttttctgaatctcgagtttagatagaatattgttttgttagtaaaaatggtactaac

SEQ ID NO: 65556 - DNA, 1464 bp, Zea Mays
gcacatttctcttctggaacataagtagcgtgcaaacttcgaccgggaccggcgatatccgccatggccaccaccactgccgccgctcgctggagcttccccgcccgtctccagctcctcaccagccgccgcttttgcttccccgcctcctctgccgcgccgcccagttctgtagcggggttcagttgggccgacgccctccgcgtcgctggggacggcgggcgcggcgacgagtccgacctctccgggtacttccggaaggtcaagagctgcaaccgcggaatggataaaaaagggcagttcgtgaagttctctgtggaggatcaggtcgtggggtacatccacaagggatttatcgaacacatcagagactttcatgatgtttttaccattgtcatggatgacaatggcagcaacactgtggagcatgtgtctctccagtcatcactaaggactccagaagaccgaacacatgctattggaagtgtcattaaaagccttggagaattgattccagctctacccagtaacgtcatcttatggcatgcctgtgtacttctctctggaacgtgctgctgctccttactttggtataaaagcttatggagttcatatgaatgggtatgttgagaaggatggtcagaaatttctttggattggtaaacggagtgatgtgaagcaaacatatccaggaatgcttgatcatcttgttgcgggtggcctgccatacggaatgtcctgcaaagagaatatcatcaaggaatgtgaggaggaagctggaatcacaagatccatatcaacaaatgctacttctgttggagcggtttcttatatggatattgaaggctttagatacaaaagggatgttctcttctgctatgacctccaacttcctgctgattttgttcctaataatgaagatggtgaggttgatagcttcagactagtccctgttatacatgctgcaaacattataaggaggacagattttttcaagccgaactgcaaccttgtgatcatcgacttcctcttccgtcatgggtacataaacccagattctcgttgttacttagatctgctgcaaagcttgaggagtgtatgaacagagcattcacgtgcggttggggattatgcctgggactccattcatcgagttccgttggttggggaagcttctccttcccaaagcatgacgcaagtgctcatcatgtgcggttgctggaggtgccatttctgttcttggattcagccctttgcttgcattggttgttctggttgagagcaaacttgttgcttgcattgacgtatgatcgtgaagtacaaagataggcaatcaaaggacatgaatgattatagaaatttaaaaataattatatcatcttttaattacaaaccaatttagtttatttttctgaatctcgagtttagatagaatattgttttgttagtaaaaatggtactaac

SEQ ID NO: 65557 - DNA, 1554 bp, Zea Mays
gcacatttctcttctggaacataagtagcgtgcaaacttcgaccgggaccggcgatatccgccatggccaccaccactgccgccgctcgctggagcttccccgcccgtctccagctcctcaccagccgccgcttttgcttccccgcctcctctgccgcgccgcccagttctgtagcggggttcagttgggccgacgccctccgcgtcgctggggacggcgggcgcggcgacgagtccgacctctccgggtacttccggaaggtcaagagctgcaaccgcggaatgatttatcgaacacatcagagactttcatgatgtttttaccattgtcatggatgacaatggcagcaacactgtggagcatgtgtctctccagtcatcactaaggactccagaagaccgaacacatgctattggaagtgtcattaaaagccttggagaattgattccaggtattcgaaatgagctctacccagtaacgtcatcttatggcatgcctgtgtacttctctctggaacgtgctgctgctccttactttggtataaaagcttatggagttcatatgaatgggtatgttgagaaggatggtcagaaatttctttggattggtaaacggagtgatgtgaagcaaacatatccaggaatgcttgatcatcttgttgcgggtggcctgccatacggaatgtcctgcaaagagaatatcatcaaggaatgtgaggaggaagctggaatcacaagatccatatcaacaaatgctacttctgttggagcggtttcttatatggatattgaaggctttagatacaaaagggatgttctcttctgctatgacctccaacttcctgctgattttgttcctaataatgaagatggtgaggttgatagcttcagactagtccctgttatacatgctgcaaacattataaggaggacagattttttcaagccgaactgcaaccttgtgatcatcgacttcctcttccgtcatgggtacataaacccagattctcgttgttacttagatctgctgcaaagcttgaggagtggtgattgttcctaactctcttttgctgtccacatttataatcattgttcaatttaatgaaacaaaaaaaaaatcatggagtagtctggtattatggttgatcataatcataattatgcctgggactccattgtcattttagtatgaacagagcattcacgtgcggttggggattatgcctgggactccattcatcgagttccgttggttggggaagcttctccttcccaaagcatgacgcaagtgctcatcatgtgcggttgctggaggtgccatttctgttcttggattcagccctttgcttgcattggttgttctggttgagagcaaacttgttgcttgcattgacgtatgatcgtgaagtacaaagataggcaatcaaaggacatgaatgattatagaaatttaaaaataattatatcatcttttaattacaaaccaatttagtttatttttctgaatctcgagtttagatagaatattgttttgttagtaaaaatggtactaac

SEQ ID NO: 65558 - DNA, 1611 bp, Zea Mays
gcacatttctcttctggaacataagtagcgtgcaaacttcgaccgggaccggcgatatccgccatggccaccaccactgccgccgctcgctggagcttccccgcccgtctccagctcctcaccagccgccgcttttgcttccccgcctcctctgccgcgccgcccagttctgtagcggggttcagttgggccgacgccctccgcgtcgctggggacggcgggcgcggcgacgagtccgacctctccgggtacttccggaaggtcaagagctgcaaccgcggaatggataaaaaagggcagttcgtgaagttctctgtggaggatcaggtcgtggggtacatccacaagggatttatcgaacacatcagagactttcatgatgtttttaccattgtcatggatgacaatggcagcaacactgtggagcatgtgtctctccagtcatcactaaggactccagaagaccgaacacatgctattggaagtgtcattaaaagccttggagaattgattccaggtattcgaaatgagctctacccagtaacgtcatcttatggcatgcctgtgtacttctctctggaacgtgctgctgctccttactttggcttatggagttcatatgaatgggtatgttgagaaggatggtcagaaatttctttggattggtaaacggagtgatgtgaagcaaacatatccaggaatgcttgatcatcttgttgcgggtggcctgccatacggaatgtcctgcaaagagaatatcatcaaggaatgtgaggaggaagctggaatcacaagatccatatcaacaaatgctacttctgttggagcggtttcttatatggatattgaaggctttagatacaaaagggatgttctcttctgctatgacctccaacttcctgctgattttgttcctaataatgaagatggtgaggttgatagcttcagactagtccctgttatacatgctgcaaacattataaggaggacagattttttcaagccgaactgcaaccttgtgatcatcgacttcctcttccgtcatgggtacataaacccagattctcgttgttacttagatctgctgcaaagcttgaggagtggtgattgttcctaactctcttttgctgtccacatttataatcattgttcaatttaatgaaacaaaaaaaaaatcatggagtagtctggtattatggttgatcataatcataattatgcctgggactccattgtcattttagtatgaacagagcattcacgtgcggttggggattatgcctgggactccattcatcgagttccgttggttggggaagcttctccttcccaaagcatgacgcaagtgctcatcatgtgcggttgctggaggtgccatttctgttcttggattcagccctttgcttgcattggttgttctggttgagagcaaacttgttgcttgcattgacgtatgatcgtgaagtacaaagataggcaatcaaaggacatgaatgattatagaaatttaaaaataattatatcatcttttaattacaaaccaatttagtttatttttctgaatctcgagtttagatagaatattgttttgttagtaaaaatggtactaac

SEQ ID NO: 65559 - DNA, 1490 bp, Zea Mays
gcacatttctcttctggaacataagtagcgtgcaaacttcgaccgggaccggcgatatccgccatggccaccaccactgccgccgctcgctggagcttccccgcccgtctccagctcctcaccagccgccgcttttgcttccccgcctcctctgccgcgccgcccagttctgtagcggggttcagttgggccgacgccctccgcgtcgctggggacggcgggcgcggcgacgagtccgacctctccgggtacttccggaaggtcaagagctgcaaccgcggaatggataaaaaagggcagttcgtgaagttctctgtggaggatcaggtcgtggggtacatccacaagggatttatcgaacacatcagagactttcatgatgtttttaccattgtcatggatgacaatggcagcaacactgtggagcatgtgtctctccagtcatcactaaggactccagaagaccgaacacatgctattggaagtgtcattaaaagccttggagaattgattccagctctacccagtaacgtcatcttatggcatgcctgtgtacttctctctggaacgtgctgctgctccttactttggtataaaagcttatggagttcatatgaatgggtatgttgagaaggatggtcagaaatttctttggattggtaaacggagtgatgtgaagcaaacatatccaggaatgcttgatcatcttgttgcgggtggcctgccatacggaatgtcctgcaaagagaatatcatcaaggaatgtgaggaggaagctggaatcacaagatccatatcaacaaatgctacttctgttggagcggtttcttatatggatattgaaggctttagatacaaaagggatgttctcttctgctatgacctccaacttcctgctgattttgttcctaataatgaagatggtgaggttgatagcttcagactagtccctgttatacatgctgcaaacattataaggaggacagattttttcaagccgaactgcaaccttgtgatcatcgacttcctcttccgtcatgggtacataaacccagattctcgttgttacttagatctgctgcaaagcttgaggagtggaaccttcagactcggaacaaagctgttcacaatataaaaagcatggtcgggacgaaggtcgaatcaactccgaagctacgcgcaaaggagcttcaactcagtaacagaaaaaggaaccgacttaaagaggaaaatgctatctagtcctcgatagattgtccttaagtcaattgtaaacatgaaggacatgaatgtaattttacacaggctacgctctgtgcctataaatagatgaacagtacccccgtactgttcacgctgacttgtattcgctcgtgcgtcacgcttggtcttttgtcttctgttaagccgaaggtacaaatgtaattcaatattgttcatgttcatttatgatgatataataaagatatattaagaatgtcatatgatta

SEQ ID NO: 65560 - DNA, 1504 bp, Zea Mays
gcacatttctcttctggaacataagtagcgtgcaaacttcgaccgggaccggcgatatccgccatggccaccaccactgccgccgctcgctggagcttccccgcccgtctccagctcctcaccagccgccgcttttgcttccccgcctcctctgccgcgccgcccagttctgtagcggggttcagttgggccgacgccctccgcgtcgctggggacggcgggcgcggcgacgagtccgacctctccgggtacttccggaaggtcaagagctgcaaccgcggaatggataaaaaagggcagttcgtgaagttctctgtggaggatcaggtcgtggggtacatccacaagggatttatcgaacacatcagagactttcatgatgtttttaccattgtcatggatgacaatggcagcaacactgtggagcatgtgtctctccagtcatcactaaggactccagaagaccgaacacatgctattggaagtgtcattaaaagccttggagaattgattccaggtattcgaaatgagctctacccagtaacgtcatcttatggcatgcctgtgtacttctctctggaacgtgctgctgctccttactttggtataaaagcttatggagttcatatgaatgggtatgttgagaaggatggtcagaaatttctttggattggtaaacggagtgatgtgaagcaaacatatccaggaatgcttgatcatcttgttgcgggtggcctgccatacggaatgtcctgcaaagagaatatcatcaaggaatgtgaggaggaagctggaatcacaagatccatatcaacaaatgctacttctgttggagcggtttcttatatggatattgaaggctttagatacaaaagggatgttctcttctgctatgacctccaacttcctgctgattttgttcctaataatgaagatggtgaggttgatagcttcagactagtccctgttatacatgctgcaaacattataaggaggacagattttttcaagccgaactgcaaccttgtgatcatcgacttcctcttccgtcatgggtacataaacccagattctcgttgttacttagatctgctgcaaagcttgaggagtggaaccttcagactcggaacaaagctgttcacaatataaaaagcatggtcgggacgaaggtcgaatcaactccgaagctacgcgcaaaggagcttcaactcagtaacagaaaaaggaaccgacttaaagaggaaaatgctatctagtcctcgatagattgtccttaagtcaattgtaaacatgaaggacatgaatgtaattttacacaggctacgctctgtgcctataaatagatgaacagtacccccgtactgttcacgctgacttgtattcgctcgtgcgtcacgcttggtcttttgtcttctgttaagccgaaggtacaaatgtaattcaatattgttcatgttcatttatgatgatataataaagatatattaagaatgtcatatgatta

SEQ ID NO: 65561 - DNA, 1617 bp, Zea Mays
gcacatttctcttctggaacataagtagcgtgcaaacttcgaccgggaccggcgatatccgccatggccaccaccactgccgccgctcgctggagcttccccgcccgtctccagctcctcaccagccgccgcttttgcttccccgcctcctctgccgcgccgcccagttctgtagcggggttcagttgggccgacgccctccgcgtcgctggggacggcgggcgcggcgacgagtccgacctctccgggtacttccggaaggtcaagagctgcaaccgcggaatggataaaaaagggcagttcgtgaagttctctgtggaggatcaggtcgtggggtacatccacaagggatttatcgaacacatcagagactttcatgatgtttttaccattgtcatggatgacaatggcagcaacactgtggagcatgtgtctctccagtcatcactaaggactccagaagaccgaacacatgctattggaagtgtcattaaaagccttggagaattgattccagctctacccagtaacgtcatcttatggcatgcctgtgtacttctctctggaacgtgctgctgctccttactttggtataaaagcttatggagttcatatgaatgggtatgttgagaaggatggtcagaaatttctttggattggtaaacggagtgatgtgaagcaaacatatccaggaatgcttgatcatcttgttgcgggtggcctgccatacggaatgtcctgcaaagagaatatcatcaaggaatgtgaggaggaagctggaatcacaagatccatatcaacaaatgctacttctgttggagcggtttcttatatggatattgaaggctttagatacaaaagggatgttctcttctgctatgacctccaacttcctgctgattttgttcctaataatgaagatggtgaggttgatagcttcagactagtccctgttatacatgctgcaaacattataaggaggacagattttttcaagccgaactgcaaccttgtgatcatcgacttcctcttccgtcatgggtacataaacccagattctcgttgttacttagatctgctgcaaagcttgaggagtgtatgaacagagcattcacgtgcggttggggattatgcctgggactccattcatcgagttccgttggttggggaagcttctccttcccaaagcatgacgcaagtgctcatcatgtgcggttgctggaggaaccttcagactcggaacaaagctgttcacaatataaaaagcatggtcgggacgaaggtcgaatcaactccgaagctacgcgcaaaggagcttcaactcagtaacagaaaaaggaaccgacttaaagaggaaaatgctatctagtcctcgatagattgtccttaagtcaattgtaaacatgaaggacatgaatgtaattttacacaggctacgctctgtgcctataaatagatgaacagtacccccgtactgttcacgctgacttgtattcgctcgtgcgtcacgcttggtcttttgtcttctgttaagccgaaggtacaaatgtaattcaatattgttcatgttcatttatgatgatataataaagatatattaagaatgtcatatgatta

SEQ ID NO: 65562 - DNA, 1631 bp, Zea Mays
gcacatttctcttctggaacataagtagcgtgcaaacttcgaccgggaccggcgatatccgccatggccaccaccactgccgccgctcgctggagcttccccgcccgtctccagctcctcaccagccgccgcttttgcttccccgcctcctctgccgcgccgcccagttctgtagcggggttcagttgggccgacgccctccgcgtcgctggggacggcgggcgcggcgacgagtccgacctctccgggtacttccggaaggtcaagagctgcaaccgcggaatggataaaaaagggcagttcgtgaagttctctgtggaggatcaggtcgtggggtacatccacaagggatttatcgaacacatcagagactttcatgatgtttttaccattgtcatggatgacaatggcagcaacactgtggagcatgtgtctctccagtcatcactaaggactccagaagaccgaacacatgctattggaagtgtcattaaaagccttggagaattgattccaggtattcgaaatgagctctacccagtaacgtcatcttatggcatgcctgtgtacttctctctggaacgtgctgctgctccttactttggtataaaagcttatggagttcatatgaatgggtatgttgagaaggatggtcagaaatttctttggattggtaaacggagtgatgtgaagcaaacatatccaggaatgcttgatcatcttgttgcgggtggcctgccatacggaatgtcctgcaaagagaatatcatcaaggaatgtgaggaggaagctggaatcacaagatccatatcaacaaatgctacttctgttggagcggtttcttatatggatattgaaggctttagatacaaaagggatgttctcttctgctatgacctccaacttcctgctgattttgttcctaataatgaagatggtgaggttgatagcttcagactagtccctgttatacatgctgcaaacattataaggaggacagattttttcaagccgaactgcaaccttgtgatcatcgacttcctcttccgtcatgggtacataaacccagattctcgttgttacttagatctgctgcaaagcttgaggagtgtatgaacagagcattcacgtgcggttggggattatgcctgggactccattcatcgagttccgttggttggggaagcttctccttcccaaagcatgacgcaagtgctcatcatgtgcggttgctggaggaaccttcagactcggaacaaagctgttcacaatataaaaagcatggtcgggacgaaggtcgaatcaactccgaagctacgcgcaaaggagcttcaactcagtaacagaaaaaggaaccgacttaaagaggaaaatgctatctagtcctcgatagattgtccttaagtcaattgtaaacatgaaggacatgaatgtaattttacacaggctacgctctgtgcctataaatagatgaacagtacccccgtactgttcacgctgacttgtattcgctcgtgcgtcacgcttggtcttttgtcttctgttaagccgaaggtacaaatgtaattcaatattgttcatgttcatttatgatgatataataaagatatattaagaatgtcatatgatta

SEQ ID NO: 65563 - DNA, 1748 bp, Zea Mays
accactcccaccaccaactaagcagattcgatctcctcccatcacctccatcgcaacctctcgacggcagactaggtttcatccccatctcaaccggcggcagcctagggcttcatcccccacccccaaatccatgccgctcaggttggagatcaattggaaattttctcaatggtcagagagggtcaagttggtggacttgcaccccacggaggcatggatgttgagcctgtactcgaggagtgcctgcatccgggattatcacacacagtcaatttgtaggagaggggacgccatacatcaaagatgactaaagaagaggaagatgaagaatacctcgaagaggaagaagatgcccttgctggtgcaggggggaacacatttagtttcacaaccttcatgctcttaacccctctgatcctggtgcgtggcagattagactccgatggggaagtcactagcgaggtggatcaagttcgtgctcttcaggaagaagtcgtcatccaggtccagctccaccaaggccaagaatttatcgataagaatgctgttacgatttcaagtgtggctctacatatgcatctccagctatggagaaggagcccacgttctctgagagctctccagtgatctcagagcttgtgcttgttagcgcccataacaacgagatcatgcgggaggtggcaaagggtgaaaattctagcgtgcaagaagtgctagtgactgatgtcagtcaagacttggagaagcagctgaaagaagaggctatgctgaataaagtactaaaggagacagtcttgtcaaaggtagttgccattgataaattgcaatctggtctggcatcttcacttcgcatccaagatgttatgagaaatgagatccaaagagtccaggatgaactttcttgcataacccacaaagctaagcagttggagcttcagcccaagttcgatgcaggagttcggcatggggtgaagatggctgctattttgtaagtgagttggtggatgaaaattcaagttattgtagaagacaacacatttctttgcatattacatcctgctatgatgttctgaactatgattggttcaacgggtgccatttttctcttagagctattgttgacatggaagaaatggtggcagcaccagcttagtatggacaacaactgaaatctcctacagaagttgtttctaatgtgctattgagctccattgtgttttggcctacgcaatcttgttctccagtctgcctccaagaaaagctctatagtcccatagtttctgctaaggttcaacaacttcaggatcaattataggctgagaagcaagaaaaaatggacttcgtgatgaagcggaaaccattgatagtatgaagaggttgatggaagaaaataacaaccttcttcgtcaactataaagcttcaattgaagaaaagtgcctccatcttaagtttggttgactactataggacatgcagccttgtggtagctatagtagtagtagatatttatagttgctctagatttgaagttataggattatttttaattatgtttaatgtttaataatttgagttgaagttataagatttgctttgaattttaagttaaaggatttgagatatatggtttggagttatatgattatttgatggatggaatatttgtgtacaacaaattcatgtgatattttggctatgatgtgtaatattctatgacgatatcaattcatatgatgtgttcctt

SEQ ID NO: 65564 - DNA, 244 bp, Zea Mays
tttcaaatttatctgcattaacatgtacataagatgctccaagtctggacccctcccaacaattctgatgtcacaatttctgtatgatgttgtctgcttctcatcataatttaccactgagttaatatgtgagatgaaatgatactgggtcggtaaattttgccttgtctgtaacaactccctcttggatttcatcttatgaaccatgctaaccttcgaaagcatgggattggataaagagcag

SEQ ID NO: 65565 - DNA, 3258 bp, Zea Mays
ctaatcaaaatttatataaattaaagaaacaatcccgttacgttccgcccaccaatcgcgaagatgctaatcttcgccggtcgccactcgcccgtctcggagctactgccgctggccaaccatttcacctgttgcggctctcgcccctccatcgaaatcgccatgccgcatggtcacgccgcagccgtggtggaccggctgctgcgcaggctggggtccgccgcttgccggctggaggtgcccccgaatatagacggggacctagcgcatgtgtggacaactctggcgaggttgcaagatatgctggttagcctggagatccgtccggagctgcaagaatggatgggggatatcaagcaggtcgcgtacgatgttgaggatctggtcgatgaattggaagaccacaatagcatggaatctcagatgagcggctgcgttgcagttggagaggaaacaagatggtgctgttcatgttcgtttctcatgcatagtacaagagcggacagaatgaagacaatcaaaagaaggttggactttttagtaaaagattctgtcatcttcagtttgatgcagtacccttttcctgatgttgagagatttgataatgaagcatttgatagagctgcagtcgttggaagagataatgacaaagcaaagataaaggacatgatcttgcaaagtaatgcacaaaagttctcaatcattcccattcttggcctcgtggggttggggaaaacaactcttgctagattaattttccttgaccagggagaaggttgggattttgatcttcgtatctggatatccttaaataggaaactaaacataaaaatgattgctagtgatataatctcgcaatgtaatcatagagaagaaaagcttttagatgttcgtacggacatggagatccaggaaaactttcagttgctaaagaggtgtttgcaagaggcactccatgaaaaacattgtctgattgtcttggatgacctttctagcacagataaaaaccagttggatgaattgaaggaaatgctgaagggtacaaatgagtctatcaaggttttagtgacgacctccagcgaaataactgcagaactactgcacaccattccaccgtacaagttgtgtcctttatctgaagacgacagttggaaaatattttctcaaaaggcttttgggaattgtgatggtgataacactgaccttaagaaaatcggaaaggaaatagtaaaaaggtgtgagggaataccattattgactcattctcttggtttagttgtacaaaatgaagtcacaaatgtgtggttagctgcaagggatgaagagatatggaaactagaaagaagagttgccactaaaatagaattgttttcaccattatatcaaatatacaatgacttctcctcaactattaaattgtgctttctatatttatccatatttcctaaagggtctacaatagataaggaaaaactgatccaacagtggattgcactcgagattattggatcaaaacatgactccttgcctccttatgtgaatggagagatgtgcatccaggactttttgtcaatatattttctccaagttcgagatacacactcagatggtgcccttaaagctattggtatcgacaactcaacaatcaaacatattccaaggtttaacaccacttctgaactctcagtggatactatttcatcctctaaagtaagcacaccatccaaggagatcccatcaactttacgccgtccggacaagtcaaaaatgcctgcactaatacctggagatggatctttaaacttaagccttaagcaggttcagaaggttactcataatttctcacctttatttgagttaggtgaagggggaacctgggcagtttacagggctgtattatcagataaccaggttgttatcatccggagagctaaaaagggccacgttcaagaggcaaaacatcttatggaagtgaagctccttacaaaaattaatcactggagtttggtgagattcttaggttttattgatgaaaaagatgagtgtattcggatcacagagtatgttccaaatggcactcttagggaacacctacatgaccaacgtaagagaatcctgaattttaatcaacgtatagtgattgcccttgatgttgctattgcattgacttatctccatttgtgttctggggacgctttaatctgttacaacttgaggacgtcaaacatcctactgacagagagctaccgagccaaagtgtgctgttctgaactgtcaaaaagtggtaatatcgtgctattaaagggaacagggggctacattgatccagagtacttggagacctcagagctcactgccaaatctgatgtctactcttttggaataatactcttagaaatcatatcttctcatgggccacaagactgggatgtattgatgaaccaccggcaaagcagtgttgtacaatgggctcttgagaaattctatgacgacctcatgaatgagatattggattaccgtatggaggatcgcgtggatggagatgtggtcagggacttgctcagcttagcgttgagttgtgtggtttcgcgtggcgctgatcgcccaagcatcgtagttgtcggggagcgactgtggaaaatatggcaagatcatcgaagaaacgtaggggaacagcacgagtaccaaggaagctgggcagaatttatcgaacaagagggaatcctgaggcatcacaagtgtgtgctcaagagaagttgggagccttcaacaacgcagcaggattggtctgtgtatgttaggcagattgaattagttcaagaagcttacgataccccatggggagaggaaattttttcggggtctgtttcattggacgatatcacagtatattctcggtagaaagcttcaatacgattatattactcctgttttctccgcggtattacatgtgtagattggaggacaataacctatttgttctatttctgtttcattggacgataaatcatagtgtctcctcggtatgaactcttgaaagtttcaactcgttgttttcctcactctatttattcagtgatattgctgttagaaaattacgcaatttcagtactaatttggtctagaaaatattaataatatattggtggcatcaggcttgcacgtgtgatcatagtgcaacagacatgaacatgatatcgtgtgatcatagtgcaaaagacatgaacatgatatcgatcgtaatgattttaatcacag

SEQ ID NO: 65566 - DNA, 5256 bp, Zea Mays
ccgttacgttccgcccaccaatcgcgaagatgctaatcttcgccggtcgccactcgcccgtctcggagctactgccgctggccaaccatttcacctgttgcggctctcgcccctccatcgaaatcgccatgccgcatggtcacgccgcagccgtggtggaccggctgctgcgcaggctggggtccgccgcttgccggctggaggtgcccccgaatatagacggggacctagcgcatgtgtggacaactctggcgaggttgcaagatatgctggttagcctggagatccgtccggagctgcaagaatggatgggggatatcaagcaggtcgcgtacgatgttgaggatctggtcgatgaattggaagaccacaatagcatggaatctcagatgagcggctgcgttgcagttggagaggaaacaagatggtgctgttcatgttcgtttctcatgcatagtacaagagcggacagaatgaagacaatcaaaagaaggttggactttttagtaaaagattctgtcatcttcagtttgatgcagtacccttttcctgatgttgagagatttgataatgaagcatttgatagagctgcagtcgttggaagagataatgacaaagcaaagataaaggacatgatcttgcaaagtaatgcacaaaagttctcaatcattcccattcttggcctcgtggggttggggaaaacaactcttgctagattaattttccttgaccagggagaaggttgggattttgatcttcgtatctggatatccttaaataggaaactaaacataaaaatgattgctagtgatataatctcgcaatgtaatcatagagaagaaaagcttttagatgttcgtacggacatggagatccaggaaaactttcagttgctaaagaggtgtttgcaagaggcactccatgaaaaacattgtctgattgtcttggatgacctttctagcacagataaaaaccagttggatgaattgaaggaaatgctgaagggtacaaatgagtctatcaaggttttagtgacgacctccagcgaaataactgcagaactactgcacaccattccaccgtacaagttgtgtcctttatctgaagacgacagttggaaaatattttctcaaaaggcttttgggaattgtgatggtgataacactgaccttaagaaaatcggaaaggaaatagtaaaaaggtgtgagggaataccattattgactcattctcttggtttagttgtacaaaatgaagtcacaaatgtgtggttagctgcaagggatgaagagatatggaaactagaaagaagagttgccactaaaatagaattgttttcaccattatatcaaatatacaatgacttctcctcaactattaaattgtgctttctatatttatccatatttcctaaagggtctacaatagataaggaaaaactgatccaacagtggattgcactcgagattattggatcaaaacatgactccttgcctccttatgtgaatggagagatgtgcatccaggactttttgtcaatatattttctccaagttcgagatacacactcagtttatggaatggataacagagtagttcctacaacattctacattcataactttgtccatgaatttgcaagacatgttgcttgtgatgatattataattttcgatggtaccaaaatgcaaaagggctgtgcaaaaagacaaaccttccaatatgcactcttgacatgttaccgggtgcagtcaacattttcccactcaacgctgacaaggacaagggcattgcatatcatgaactctgaggcgataacatttcctcgtgaagcatttgaattactgaagcacttgcgtgttttgaatcttagtggatgttgcattgaagaattaccagcctctataggttgtctaaagcgtctaaaatatcttgatgtttctggtgtgcagatacaaacattgccattcccggtgagtaggttgacaaaccttgaggtactggatctatcaaaaacatatgcattgctatgctaccagactctttgtgcaaccttatcaatcttcgaattttggatttatcaagatgcactatgctgcgacacttacctgctttatttggttcctgaacctatcaagctgctatgaacttcagcagtttcctgaatctgttacaaacctcgagaaactggaagttcttatactccggagatgttgtagacttcgaattctccccccctcctttgcaatgattaagtaccttcgaattcttgatctggctggctgtgaagcacttcatgtaagtactgagatgctaacaaccaatttggagtatctgaacctacaacggtgcctaaatcttcagactcagccatactatttcgaaaacttcaataagttgaagtttttgaatctttcccattgcctccctaccgttgattgcctggaatctattagttacttgttcaacttagaatatctagatctgtcagaaacttcccttgacatacctatgtcttttgcaaggcttcagaagttgcacacactgaacctcactggttgtgctccaatgcatccatcctctaatgtacaccaaacatggccaggtatattagcaaaaattacaagtctcaagtctgtgctgacgatggacccagtattagcggcctctcttcaaggacacaccgagtgctctgctgactatgattatcactcactcacaacaaccgatgagcttgttattaaagagatcacaggcggttcccgaggccttcgtattgctgagcagttgaatctgcagaatcgactggaggtttgtttccttaagctggaatgggttcctaggtcccaatcagctcaagatcaactattggaatatacagatgaggaagtgctggagaagttccaaccaaatgagactctggagcattttatgctagttaaatatacaggcaatgtgtttcctacatggatgatgaacaaactgacttcactcccataccttgtcaatctttgtttgttccacctgcataactgcagtgctctccctccaattggccatctacaaaatctgcgttacttgcatattaaagatatgcccaacctcacaaatctagagatgggtctttctggggggcctgtgtccttggggaaattgactcacctcaaactggaagcactgaatttagaagagctgtctatactcttgtcagccaacaatgagagtccctgtttcatgtttcccaatcttgaggagttatctgttctatcatgctctaagcttgtcttcaaaccatctgtgcctaagtgtgcgaaatatgtaataaaagagagtaacatggttctgtcatgttggcagcctctggggccattctcatctccaccaatagaaaaagtagagataagtgggtgtgtgatgccttctggttggttgcaatggcttagatccatacagactcttgagaaagtagtgatagatggtgaagctctttcatcttttgagctccagaagatatatgcatttcaagaagcatctggtagtaagatttcaaaggaaactgtaagttcatctaggacaaatatgtcacgtgagttgaccactgaggatggtgcccttaaagctattggtatcgacaactcaacaatcaaacatattccaaggtttaacaccacttctgaactctcagtggatactatttcatcctctaaagtaagcacaccatccaaggagatcccatcaactttacgccgtccggacaagtcaaaaatgcctgcactaatacctggagatggatctttaaacttaagccttaagcaggttcagaaggttactcataatttctcacctttatttgagttaggtgaagggggaacctgggcagtttacagggctgtattatcagataaccaggttgttatcatccggagagctaaaaagggccacgttcaagaggcaaaacatcttatggaagtgaagctccttacaaaaattaatcactggagtttggtgagattcttaggttttattgatgaaaaagatgagtgtattcggatcacagagtatgttccaaatggcactcttagggaacacctacatgaccaacgtaagagaatcctgaattttaatcaacgtatagtgattgcccttgatgttgctattgcattgacttatctccatttgtgttctggggacgctttaatctgttacaacttgaggacgtcaaacatcctactgacagagagctaccgagccaaagtgtgctgttctgaactgtcaaaaagtggtaatatcgtgctattaaagggaacagggggctacattgatccagagtacttggagacctcagagctcactgccaaatctgatgtctactcttttggaataatactcttagaaatcatatcttctcatgggccacaagactgggatgtattgatgaaccaccggcaaagcagtgttgtacaatgggctcttgagaaattctatgacgacctcatgaatgagatattggattaccgtatggaggatcgcgtggatggagatgtggtcagggacttgctcagcttagcgttgagttgtgtggtttcgcgtggcgctgatcgcccaagcatcgtagttgtcggggagcgactgtggaaaatatggcaagatcatcgaagaaacgtaggggaacagcacgagtaccaaggaagctgggcagaatttatcgaacaagagggaatcctgaggcatcacaagtgtgtgctcaagagaagttgggagccttcaacaacgcagcaggattggtctgtgtatgttaggcagattgaattagttcaagaagcttacgataccccatggggagaggaaattttttcggggtctgtttcattggacgatatcacagtatattctcggtagaaagcttcaatacgattatattactcctgttttctccgcggtattacatgtgtagattggaggacaataacctatttgttctatttctgtttcattggacgataaatcatagtgtctcctcggtatgaactcttgaaagtttcaactcgttgttttcctcactctatttattcagtgatattgctgttagaaaattacgcaatttcagtactaatttggtctagaaaatattaataatatattggtggcatcaggcttgcacgtgtgatcatagtgcaacagacatgaacatgatatcgtgtgatcatagtgcaaaagacatgaacatgatatcgatcgtaatgattttaatcacag

SEQ ID NO: 65567 - DNA, 5234 bp, Zea Mays
ccgttacgttccgcccaccaatcgcgaagatgctaatcttcgccggtcgccactcgcccgtctcggagctactgccgctggccaaccatttcacctgttgcggctctcgcccctccatcgaaatcgccatgccgcatggtcacgccgcagccgtggtggaccggctgctgcgcaggctggggtccgccgcttgccggctggaggtgcccccgaatatagacggggacctagcgcatgtgtggacaactctggcgaggttgcaagatatgctggttagcctggagatccgtccggagctgcaagaatggatgggggatatcaagcaggtcgcgtacgatgttgaggatctggtcgatgaattggaagaccacaatagcatggaatctcagatgagcggctgcgttgcagttggagaggaaacaagatggtgctgttcatgttcgtttctcatgcatagtacaagagcggacagaatgaagacaatcaaaagaaggttggactttttagtaaaagattctgtcatcttcagtttgatgcagtacccttttcctgatgttgagagatttgataatgaagcatttgatagagctgcagtcgttggaagagataatgacaaagcaaagataaaggacatgatcttgcaaagtaatgcacaaaagttctcaatcattcccattcttggcctcgtggggttggggaaaacaactcttgctagattaattttccttgaccagggagaaggttgggattttgatcttcgtatctggatatccttaaataggaaactaaacataaaaatgattgctagtgatataatctcgcaatgtaatcatagagaagaaaagcttttagatgttcgtacggacatggagatccaggaaaactttcagttgctaaagaggtgtttgcaagaggcactccatgaaaaacattgtctgattgtcttggatgacctttctagcacagataaaaaccagttggatgaattgaaggaaatgctgaagggtacaaatgagtctatcaaggttttagtgacgacctccagcgaaataactgcagaactactgcacaccattccaccgtacaagttgtgtcctttatctgaagacgacagttggaaaatattttctcaaaaggcttttgggaattgtgatggtgataacactgaccttaagaaaatcggaaaggaaatagtaaaaaggtgtgagggaataccattattgactcattctcttggtttagttgtacaaaatgaagtcacaaatgtgtggttagctgcaagggatgaagagatatggaaactagaaagaagagttgccactaaaatagaattgttttcaccattatatcaaatatacaatgacttctcctcaactattaaattgtgctttctatatttatccatatttcctaaagggtctacaatagataaggaaaaactgatccaacagtggattgcactcgagattattggatcaaaacatgactccttgcctccttatgtgaatggagagatgtgcatccaggactttttgtcaatatattttctccaagttcgagatacacactcagtttatggaatggataacagagtagttcctacaacattctacattcataactttgtccatgaatttgcaagacatgttgcttgtgatgatattataattttcgatggtaccaaaatgcaaaagggctgtgcaaaaagacaaaccttccaatatgcactcttgacatgttaccgggtgcagtcaacattttcccactcaacgctgacaaggacaagggcattgcatatcatgaactctgaggcgataacatttcctcgtgaagcatttgaattactgaagcacttgcgtgttttgaatcttagtggatgttgcattgaagaattaccagcctctataggttgtctaaagcgtctaaaatatcttgatgtttctggtgtgcagatacaaacattgccattcccggtgagtaggttgacaaaccttgagatgcattgctatgctaccagactctttgtgcaaccttatcaatcttcgaattttggatttatcaagatgcactatgctgcgacacttacctgctttatttggttcctgaacctatcaagctgctatgaacttcagcagtttcctgaatctgttacaaacctcgagaaactggaagttcttatactccggagatgttgtagacttcgaattctccccccctcctttgcaatgattaagtaccttcgaattcttgatctggctggctgtgaagcacttcatgtaagtactgagatgctaacaaccaatttggagtatctgaacctacaacggtgcctaaatcttcagactcagccatactatttcgaaaacttcaataagttgaagtttttgaatctttcccattgcctccctaccgttgattgcctggaatctattagttacttgttcaacttagaatatctagatctgtcagaaacttcccttgacatacctatgtcttttgcaaggcttcagaagttgcacacactgaacctcactggttgtgctccaatgcatccatcctctaatgtacaccaaacatggccaggtatattagcaaaaattacaagtctcaagtctgtgctgacgatggacccagtattagcggcctctcttcaaggacacaccgagtgctctgctgactatgattatcactcactcacaacaaccgatgagcttgttattaaagagatcacaggcggttcccgaggccttcgtattgctgagcagttgaatctgcagaatcgactggaggtttgtttccttaagctggaatgggttcctaggtcccaatcagctcaagatcaactattggaatatacagatgaggaagtgctggagaagttccaaccaaatgagactctggagcattttatgctagttaaatatacaggcaatgtgtttcctacatggatgatgaacaaactgacttcactcccataccttgtcaatctttgtttgttccacctgcataactgcagtgctctccctccaattggccatctacaaaatctgcgttacttgcatattaaagatatgcccaacctcacaaatctagagatgggtctttctggggggcctgtgtccttggggaaattgactcacctcaaactggaagcactgaatttagaagagctgtctatactcttgtcagccaacaatgagagtccctgtttcatgtttcccaatcttgaggagttatctgttctatcatgctctaagcttgtcttcaaaccatctgtgcctaagtgtgcgaaatatgtaataaaagagagtaacatggttctgtcatgttggcagcctctggggccattctcatctccaccaatagaaaaagtagagataagtgggtgtgtgatgccttctggttggttgcaatggcttagatccatacagactcttgagaaagtagtgatagatggtgaagctctttcatcttttgagctccagaagatatatgcatttcaagaagcatctggtagtaagatttcaaaggaaactgtaagttcatctaggacaaatatgtcacgtgagttgaccactgaggatggtgcccttaaagctattggtatcgacaactcaacaatcaaacatattccaaggtttaacaccacttctgaactctcagtggatactatttcatcctctaaagtaagcacaccatccaaggagatcccatcaactttacgccgtccggacaagtcaaaaatgcctgcactaatacctggagatggatctttaaacttaagccttaagcaggttcagaaggttactcataatttctcacctttatttgagttaggtgaagggggaacctgggcagtttacagggctgtattatcagataaccaggttgttatcatccggagagctaaaaagggccacgttcaagaggcaaaacatcttatggaagtgaagctccttacaaaaattaatcactggagtttggtgagattcttaggttttattgatgaaaaagatgagtgtattcggatcacagagtatgttccaaatggcactcttagggaacacctacatgaccaacgtaagagaatcctgaattttaatcaacgtatagtgattgcccttgatgttgctattgcattgacttatctccatttgtgttctggggacgctttaatctgttacaacttgaggacgtcaaacatcctactgacagagagctaccgagccaaagtgtgctgttctgaactgtcaaaaagtggtaatatcgtgctattaaagggaacagggggctacattgatccagagtacttggagacctcagagctcactgccaaatctgatgtctactcttttggaataatactcttagaaatcatatcttctcatgggccacaagactgggatgtattgatgaaccaccggcaaagcagtgttgtacaatgggctcttgagaaattctatgacgacctcatgaatgagatattggattaccgtatggaggatcgcgtggatggagatgtggtcagggacttgctcagcttagcgttgagttgtgtggtttcgcgtggcgctgatcgcccaagcatcgtagttgtcggggagcgactgtggaaaatatggcaagatcatcgaagaaacgtaggggaacagcacgagtaccaaggaagctgggcagaatttatcgaacaagagggaatcctgaggcatcacaagtgtgtgctcaagagaagttgggagccttcaacaacgcagcaggattggtctgtgtatgttaggcagattgaattagttcaagaagcttacgataccccatggggagaggaaattttttcggggtctgtttcattggacgatatcacagtatattctcggtagaaagcttcaatacgattatattactcctgttttctccgcggtattacatgtgtagattggaggacaataacctatttgttctatttctgtttcattggacgataaatcatagtgtctcctcggtatgaactcttgaaagtttcaactcgttgttttcctcactctatttattcagtgatattgctgttagaaaattacgcaatttcagtactaatttggtctagaaaatattaataatatattggtggcatcaggcttgcacgtgtgatcatagtgcaacagacatgaacatgatatcgtgtgatcatagtgcaaaagacatgaacatgatatcgatcgtaatgattttaatcacag

SEQ ID NO: 65568 - DNA, 5055 bp, Zea Mays
cgaagatgctaatcttcgccggtcgccactcgcccgtctcggagctactgccgctggccaaccatttcacctgttgcggctctcgcccctccatcgaaatcgccatgccgcatggtcacgccgcagccgtggtggaccggctgctgcgcaggctggggtccgccgcttgccggctggaggtgcccccgaatatagacggggacctagcgcatgtgtggacaactctggcgaggttgcaagatatgctggttagcctggagatccgtccggagctgcaagaatggatgggggatatcaagcaggtcgcgtacgatgttgaggatctggtcgatgaattggaagaccacaatagcatggaatctcagatgagcggctgcgttgcagttggagaggaaacaagatggtgctgttcatgttcgtttctcatgcatagtacaagagcggacagaatgaagacaatcaaaagaagagctgcagtcgttggaagagataatgacaaagcaaagataaaggacatgatcttgcaaagtaatgcacaaaagttctcaatcattcccattcttggcctcgtggggttggggaaaacaactcttgctagattaattttccttgaccagggagaaggttgggattttgatcttcgtatctggatatccttaaataggaaactaaacataaaaatgattgctagtgatataatctcgcaatgtaatcatagagaagaaaagcttttagatgttcgtacggacatggagatccaggaaaactttcagttgctaaagaggtgtttgcaagaggcactccatgaaaaacattgtctgattgtcttggatgacctttctagcacagataaaaaccagttggatgaattgaaggaaatgctgaagggtacaaatgagtctatcaaggttttagtgacgacctccagcgaaataactgcagaactactgcacaccattccaccgtacaagttgtgtcctttatctgaagacgacagttggaaaatattttctcaaaaggcttttgggaattgtgatggtgataacactgaccttaagaaaatcggaaaggaaatagtaaaaaggtgtgagggaataccattattgactcattctcttggtttagttgtacaaaatgaagtcacaaatgtgtggttagctgcaagggatgaagagatatggaaactagaaagaagagttgccactaaaatagaattgttttcaccattatatcaaatatacaatgacttctcctcaactattaaattgtgctttctatatttatccatatttcctaaagggtctacaatagataaggaaaaactgatccaacagtggattgcactcgagattattggatcaaaacatgactccttgcctccttatgtgaatggagagatgtgcatccaggactttttgtcaatatattttctccaagttcgagatacacactcagtttatggaatggataacagagtagttcctacaacattctacattcataactttgtccatgaatttgcaagacatgttgcttgtgatgatattataattttcgatggtaccaaaatgcaaaagggctgtgcaaaaagacaaaccttccaatatgcactcttgacatgttaccgggtgcagtcaacattttcccactcaacgctgacaaggacaagggcattgcatatcatgaactctgagatacaaacattgccattcccggtgagtaggttgacaaaccttgaggttgtgataaacttcaaaacctacctttatcccttggtcatctacaacgacttgagcaacttcgactgtcatgctgcagatgcattgctatgctaccagactctttgtgcaaccttatcaatcttcgaattttggatttatcaagatgcactatgctgcgacacttacctgctttatttggttcctgaacctatcaagctgctatgaacttcagcagtttcctgaatctgttacaaacctcgagaaactggaagttcttatactccggagatgttgtagacttcgaattctccccccctcctttgcaatgattaagtaccttcgaattcttgatctggctggctgtgaagcacttcatgtaagtactgagatgctaacaaccaatttggagtatctgaacctacaacggtgcctaaatcttcagactcagccatactatttcgaaaacttcaataagttgaagtttttgaatctttcccattgcctccctaccgttgattgcctggaatctattagttacttgttcaacttagaatatctagatctgtcagaaacttcccttgacatacctatgtcttttgcaaggcttcagaagttgcacacactgaacctcactggttgtgctccaatgcatccatcctctaatgtacaccaaacatggccaggtatattagcaaaaattacaagtctcaagtctgtgctgacgatggacccagtattagcggcctctcttcaaggacacaccgagtgctctgctgactatgattatcactcactcacaacaaccgatgagcttgttattaaagagatcacaggcggttcccgaggccttcgtattgctgagcagttgaatctgcagaatcgactggaggtttgtttccttaagctggaatgggttcctaggtcccaatcagctcaagatcaactattggaatatacagatgaggaagtgctggagaagttccaaccaaatgagactctggagcattttatgctagttaaatatacaggcaatgtgtttcctacatggatgatgaacaaactgacttcactcccataccttgtcaatctttgtttgttccacctgcataactgcagtgctctccctccaattggccatctacaaaatctgcgttacttgcatattaaagatatgcccaacctcacaaatctagagatgggtctttctggggggcctgtgtccttggggaaattgactcacctcaaactggaagcactgaatttagaagagctgtctatactcttgtcagccaacaatgagagtccctgtttcatgtttcccaatcttgaggagttatctgttctatcatgctctaagcttgtcttcaaaccatctgtgcctaagtgtgcgaaatatgtaataaaagagagtaacatggttctgtcatgttggcagcctctggggccattctcatctccaccaatagaaaaagtagagataagtgggtgtgtgatgccttctggttggttgcaatggcttagatccatacagactcttgagaaagtagtgatagatggtgaagctctttcatcttttgagctccagaagatatatgcatttcaagaagcatctggtagtaagatttcaaaggaaactgtaagttcatctaggacaaatatgtcacgtgagttgaccactgaggatggtgcccttaaagctattggtatcgacaactcaacaatcaaacatattccaaggtttaacaccacttctgaactctcagtggatactatttcatcctctaaagtaagcacaccatccaaggagatcccatcaactttacgccgtccggacaagtcaaaaatgcctgcactaatacctggagatggatctttaaacttaagccttaagcaggttcagaaggttactcataatttctcacctttatttgagttaggtgaagggggaacctgggcagtttacagggctgtattatcagataaccaggttgttatcatccggagagctaaaaagggccacgttcaagaggcaaaacatcttatggaagtgaagctccttacaaaaattaatcactggagtttggtgagattcttaggttttattgatgaaaaagatgagtgtattcggatcacagagtatgttccaaatggcactcttagggaacacctacatgaccaacgtaagagaatcctgaattttaatcaacgtatagtgattgcccttgatgttgctattgcattgacttatctccatttgtgttctggggacgctttaatctgttacaacttgaggacgtcaaacatcctactgacagagagctaccgagccaaagtgtgctgttctgaactgtcaaaaagtggtaatatcgtgctattaaagggaacagggggctacattgatccagagtacttggagacctcagagctcactgccaaatctgatgtctactcttttggaataatactcttagaaatcatatcttctcatgggccacaagactgggatgtattgatgaaccaccggcaaagcagtgttgtacaatgggctcttgagaaattctatgacgacctcatgaatgagatattggattaccgtatggaggatcgcgtggatggagatgtggtcagggacttgctcagcttagcgttgagttgtgtggtttcgcgtggcgctgatcgcccaagcatcgtagttgtcggggagcgactgtggaaaatatggcaagatcatcgaagaaacgtaggggaacagcacgagtaccaaggaagctgggcagaatttatcgaacaagagggaatcctgaggcatcacaagtgtgtgctcaagagaagttgggagccttcaacaacgcagcaggattggtctgtgtatgttaggcagattgaattagttcaagaagcttacgataccccatggggagaggaaattttttcggggtctgtttcattggacgatatcacagtatattctcggtagaaagcttcaatacgattatattactcctgttttctccgcggtattacatgtgtagattggaggacaataacctatttgttctatttctgtttcattggacgataaatcatagtgtctcctcggtatgaactcttgaaagtttcaactcgttgttttcctcactctatttattcagtgatattgctgttagaaaattacgcaatttcagtactaatttggtctagaaaatattaataatatattggtggcatcaggcttgcacgtgtgatcatagtgcaacagacatgaacatgatatcgtgtgatcatagtgcaaaagacatgaacatgatatcgatcgtaatgattttaatcacag

SEQ ID NO: 65569 - DNA, 5186 bp, Zea Mays
cgaagatgctaatcttcgccggtcgccactcgcccgtctcggagctactgccgctggccaaccatttcacctgttgcggctctcgcccctccatcgaaatcgccatgccgcatggtcacgccgcagccgtggtggaccggctgctgcgcaggctggggtccgccgcttgccggctggaggtgcccccgaatatagacggggacctagcgcatgtgtggacaactctggcgaggttgcaagatatgctggttagcctggagatccgtccggagctgcaagaatggatgggggatatcaagcaggtcgcgtacgatgttgaggatctggtcgatgaattggaagaccacaatagcatggaatctcagatgagcggctgcgttgcagttggagaggaaacaagatggtgctgttcatgttcgtttctcatgcatagtacaagagcggacagaatgaagacaatcaaaagaaggttggactttttagtaaaagattctgtcatcttcagtttgatgcagtacccttttcctgatgttgagagatttgataatgaagcatttgatagagctgcagtcgttggaagagataatgacaaagcaaagataaaggacatgatcttgcaaagtaatgcacaaaagttctcaatcattcccattcttggcctcgtggggttggggaaaacaactcttgctagattaattttccttgaccagggagaaggttgggattttgatcttcgtatctggatatccttaaataggaaactaaacataaaaatgattgctagtgatataatctcgcaatgtaatcatagagaagaaaagcttttagatgttcgtacggacatggagatccaggaaaactttcagttgctaaagaggtgtttgcaagaggcactccatgaaaaacattgtctgattgtcttggatgacctttctagcacagataaaaaccagttggatgaattgaaggaaatgctgaagggtacaaatgagtctatcaaggttttagtgacgacctccagcgaaataactgcagaactactgcacaccattccaccgtacaagttgtgtcctttatctgaagacgacagttggaaaatattttctcaaaaggcttttgggaattgtgatggtgataacactgaccttaagaaaatcggaaaggaaatagtaaaaaggtgtgagggaataccattattgactcattctcttggtttagttgtacaaaatgaagtcacaaatgtgtggttagctgcaagggatgaagagatatggaaactagaaagaagagttgccactaaaatagaattgttttcaccattatatcaaatatacaatgacttctcctcaactattaaattgtgctttctatatttatccatatttcctaaagggtctacaatagataaggaaaaactgatccaacagtggattgcactcgagattattggatcaaaacatgactccttgcctccttatgtgaatggagagatgtgcatccaggactttttgtcaatatattttctccaagttcgagatacacactcagtttatggaatggataacagagtagttcctacaacattctacattcataactttgtccatgaatttgcaagacatgttgcttgtgatgatattataattttcgatggtaccaaaatgcaaaagggctgtgcaaaaagacaaaccttccaatatgcactcttgacatgttaccgggtgcagtcaacattttcccactcaacgctgacaaggacaagggcattgcatatcatgaactctgaggcgataacatttcctcgtgaagcatttgaattactgaagcacttgcgtgttttgaatcttagtggatgttgcattgaagaattaccagcctctataggttgtctaaagcgtctaaaatatcttgatgtttctggtgtgcagatacaaacattgccattcccgatgcattgctatgctaccagactctttgtgcaaccttatcaatcttcgaattttggatttatcaagatgcactatgctgcgacacttacctgctttatttggttcctgaacctatcaagctgctatgaacttcagcagtttcctgaatctgttacaaacctcgagaaactggaagttcttatactccggagatgttgtagacttcgaattctccccccctcctttgcaatgattaagtaccttcgaattcttgatctggctggctgtgaagcacttcatgtaagtactgagatgctaacaaccaatttggagtatctgaacctacaacggtgcctaaatcttcagactcagccatactatttcgaaaacttcaataagttgaagtttttgaatctttcccattgcctccctaccgttgattgcctggaatctattagttacttgttcaacttagaatatctagatctgtcagaaacttcccttgacatacctatgtcttttgcaaggcttcagaagttgcacacactgaacctcactggttgtgctccaatgcatccatcctctaatgtacaccaaacatggccaggtatattagcaaaaattacaagtctcaagtctgtgctgacgatggacccagtattagcggcctctcttcaaggacacaccgagtgctctgctgactatgattatcactcactcacaacaaccgatgagcttgttattaaagagatcacaggcggttcccgaggccttcgtattgctgagcagttgaatctgcagaatcgactggaggtttgtttccttaagctggaatgggttcctaggtcccaatcagctcaagatcaactattggaatatacagatgaggaagtgctggagaagttccaaccaaatgagactctggagcattttatgctagttaaatatacaggcaatgtgtttcctacatggatgatgaacaaactgacttcactcccataccttgtcaatctttgtttgttccacctgcataactgcagtgctctccctccaattggccatctacaaaatctgcgttacttgcatattaaagatatgcccaacctcacaaatctagagatgggtctttctggggggcctgtgtccttggggaaattgactcacctcaaactggaagcactgaatttagaagagctgtctatactcttgtcagccaacaatgagagtccctgtttcatgtttcccaatcttgaggagttatctgttctatcatgctctaagcttgtcttcaaaccatctgtgcctaagtgtgcgaaatatgtaataaaagagagtaacatggttctgtcatgttggcagcctctggggccattctcatctccaccaatagaaaaagtagagataagtgggtgtgtgatgccttctggttggttgcaatggcttagatccatacagactcttgagaaagtagtgatagatggtgaagctctttcatcttttgagctccagaagatatatgcatttcaagaagcatctggtagtaagatttcaaaggaaactgtaagttcatctaggacaaatatgtcacgtgagttgaccactgaggatggtgcccttaaagctattggtatcgacaactcaacaatcaaacatattccaaggtttaacaccacttctgaactctcagtggatactatttcatcctctaaagtaagcacaccatccaaggagatcccatcaactttacgccgtccggacaagtcaaaaatgcctgcactaatacctggagatggatctttaaacttaagccttaagcaggttcagaaggttactcataatttctcacctttatttgagttaggtgaagggggaacctgggcagtttacagggctgtattatcagataaccaggttgttatcatccggagagctaaaaagggccacgttcaagaggcaaaacatcttatggaagtgaagctccttacaaaaattaatcactggagtttggtgagattcttaggttttattgatgaaaaagatgagtgtattcggatcacagagtatgttccaaatggcactcttagggaacacctacatgaccaacgtaagagaatcctgaattttaatcaacgtatagtgattgcccttgatgttgctattgcattgacttatctccatttgtgttctggggacgctttaatctgttacaacttgaggacgtcaaacatcctactgacagagagctaccgagccaaagtgtgctgttctgaactgtcaaaaagtggtaatatcgtgctattaaagggaacagggggctacattgatccagagtacttggagacctcagagctcactgccaaatctgatgtctactcttttggaataatactcttagaaatcatatcttctcatgggccacaagactgggatgtattgatgaaccaccggcaaagcagtgttgtacaatgggctcttgagaaattctatgacgacctcatgaatgagatattggattaccgtatggaggatcgcgtggatggagatgtggtcagggacttgctcagcttagcgttgagttgtgtggtttcgcgtggcgctgatcgcccaagcatcgtagttgtcggggagcgactgtggaaaatatggcaagatcatcgaagaaacgtaggggaacagcacgagtaccaaggaagctgggcagaatttatcgaacaagagggaatcctgaggcatcacaagtgtgtgctcaagagaagttgggagccttcaacaacgcagcaggattggtctgtgtatgttaggcagattgaattagttcaagaagcttacgataccccatggggagaggaaattttttcggggtctgtttcattggacgatatcacagtatattctcggtagaaagcttcaatacgattatattactcctgttttctccgcggtattacatgtgtagattggaggacaataacctatttgttctatttctgtttcattggacgataaatcatagtgtctcctcggtatgaactcttgaaagtttcaactcgttgttttcctcactctatttattcagtgatattgctgttagaaaattacgcaatttcagtactaatttggtctagaaaatattaataatatattggtggcatcaggcttgcacgtgtgatcatagtgcaacagacatgaacatgatatcgtgtgatcatagtgcaaaagacatgaacatgatatcgatcgtaatgattttaatcacag

SEQ ID NO: 65570 - DNA, 3512 bp, Zea Mays
cgaagatgctaatcttcgccggtcgccactcgcccgtctcggagctactgccgctggccaaccatttcacctgttgcggctctcgcccctccatcgaaatcgccatgccgcatggtcacgccgcagccgtggtggaccggctgctgcgcaggctggggtccgccgcttgccggctggaggtgcccccgaatatagacggggacctagcgcatgtgtggacaactctggcgaggttgcaagatatgctggttagcctggagatccgtccggagctgcaagaatggatgggggatatcaagcaggtcgcgtacgatgttgaggatctggtcgatgaattggaagaccacaatagcatggaatctcagatgagcggctgcgttgcagttggagaggaaacaagatggtgctgttcatgttcgtttctcatgcatagtacaagagcggacagaatgaagacaatcaaaagaaggttggactttttagtaaaagattctgtcatcttcagtttgatgcagtacccttttcctgatgttgagagatttgataatgaagcatttgatagagctgcagtcgttggaagagataatgacaaagcaaagataaaggacatgatcttgcaaagtaatgcacaaaagttctcaatcattcccattcttggcctcgtggggttggggaaaacaactcttgctagattaattttccttgaccagggagaaggttgggattttgatcttcgtatctggatatccttaaataggaaactaaacataaaaatgattgctagtgatataatctcgcaatgtaatcatagagaagaaaagcttttagatgttcgtacggacatggagatccaggaaaactttcagttgctaaagaggtgtttgcaagaggcactccatgaaaaacattgtctgattgtcttggatgacctttctagcacagataaaaaccagttggatgaattgaaggaaatgctgaagggtacaaatgagtctatcaaggttttagtgacgacctccagcgaaataactgcagaactactgcacaccattccaccgtacaagttgtgtcctttatctgaagacgacagttggaaaatattttctcaaaaggcttttgggaattgtgatggtgataacactgaccttaagaaaatcggaaaggaaatagtaaaaaggtgtgagggaataccattattgactcattctcttggtttagttgtacaaaatgaagtcacaaatgtgtggttagctgcaagggatgaagagatatggaaactagaaagaagagttgccactaaaatagaattgttttcaccattatatcaaatatacaatgacttctcctcaactattaaattgtgctttctatatttatccatatttcctaaagggtctacaatagataaggaaaaactgatccaacagtggattgcactcgagattattggatcaaaacatgactccttgcctccttatgtgaatggagagatgtgcatccaggactttttgtcaatatattttctccaagttcgagatacacactcagtttatggaatggataacagagtagttcctacaacattctacattcataactttgtccatgaatttgcaagacatgttgcttgtgatgatattataattttcgatggtaccaaaatgcaaaagggctgtgcaaaaagacaaaccttccaatatgcactcttgacatgttaccgggtgcagtcaacattttcccactcaacgctgacaaggacaagggcattgcatatcatgaactctgaggcgataacatttcctcgtgaagcatttgaattactgaagcacttgcgtgttttgaatcttagtggatgttgcattgaagaattaccagcctctataggttgtctaaagcgtctaaaatatcttgatgtttctggtgtgcagatacaaacattgccattcccggatggtgcccttaaagctattggtatcgacaactcaacaatcaaacatattccaaggtttaacaccacttctgaactctcagtggatactatttcatcctctaaagtaagcacaccatccaaggagatcccatcaactttacgccgtccggacaagtcaaaaatgcctgcactaatacctggagatggatctttaaacttaagccttaagcaggttcagaaggttactcataatttctcacctttatttgagttaggtgaagggggaacctgggcagtttacagggctgtattatcagataaccaggttgttatcatccggagagctaaaaagggccacgttcaagaggcaaaacatcttatggaagtgaagctccttacaaaaattaatcactggagtttggtgagattcttaggttttattgatgaaaaagatgagtgtattcggatcacagagtatgttccaaatggcactcttagggaacacctacatggggacgctttaatctgttacaacttgaggacgtcaaacatcctactgacagagagctaccgagccaaagtgtgctgttctgaactgtcaaaaagtggtaatatcgtgctattaaagggaacagggggctacattgatccagagtacttggagacctcagagctcactgccaaatctgatgtctactcttttggaataatactcttagaaatcatatcttctcatgggccacaagactgggatgtattgatgaaccaccggcaaagcagtgttgtacaatgggctcttgagaaattctatgacgacctcatgaatgagatattggattaccgtatggaggatcgcgtggatggagatgtggtcagggacttgctcagcttagcgttgagttgtgtggtttcgcgtggcgctgatcgcccaagcatcgtagttgtcggggagcgactgtggaaaatatggcaagatcatcgaagaaacgtaggggaacagcacgagtaccaaggaagctgggcagaatttatcgaacaagagggaatcctgaggcatcacaagtgtgtgctcaagagaagttgggagccttcaacaacgcagcaggattggtctgtgtatgttaggcagattgaattagttcaagaagcttacgataccccatggggagaggaaattttttcggggtctgtttcattggacgatatcacagtatattctcggtagaaagcttcaatacgattatattactcctgttttctccgcggtattacatgtgtagattggaggacaataacctatttgttctatttctgtttcattggacgataaatcatagtgtctcctcggtatgaactcttgaaagtttcaactcgttgttttcctcactctatttattcagtgatattgctgttagaaaattacgcaatttcagtactaatttggtctagaaaatattaataatatattggtggcatcaggcttgcacgtgtgatcatagtgcaacagacatgaacatgatatcgtgtgatcatagtgcaaaagacatgaacatgatatcgatcgtaatgattttaatcacag

SEQ ID NO: 65571 - DNA, 4564 bp, Zea Mays
cgaagatgctaatcttcgccggtcgccactcgcccgtctcggagctactgccgctggccaaccatttcacctgttgcggctctcgcccctccatcgaaatcgccatgccgcatggtcacgccgcagccgtggtggaccggctgctgcgcaggctggggtccgccgcttgccggctggaggtgcccccgaatatagacggggacctagcgcatgtgtggacaactctggcgaggttgcaagatatgctggttagcctggagatccgtccggagctgcaagaatggatgggggatatcaagcaggtcgcgtacgatgttgaggatctggtcgatgaattggaagaccacaatagcatggaatctcagatgagcggctgcgttgcagttggagaggaaacaagatggtgctgttcatgttcgtttctcatgcatagtacaagagcggacagaatgaagacaatcaaaagaaggttggactttttagtaaaagattctgtcatcttcagtttgatgcagtacccttttcctgatgttgagagatttgataatgaagcatttgatagagctgcagtcgttggaagagataatgacaaagcaaagataaaggacatgatcttgcaaagtttatggaatggataacagagtagttcctacaacattctacattcataactttgtccatgaatttgcaagacatgttgcttgtgatgatattataattttcgatggtaccaaaatgcaaaagggctgtgcaaaaagacaaaccttccaatatgcactcttgacatgttaccgggtgcagtcaacattttcccactcaacgctgacaaggacaagggcattgcatatcatgaactctgaggcgataacatttcctcgtgaagcatttgaattactgaagcacttgcgtgttttgaatcttagtggatgttgcattgaagaattaccagcctctataggttgtctaaagcgtctaaaatatcttgatgtttctggtgtgcagatacaaacattgccattcccggtgagtaggttgacaaaccttgaggtactggatctatcaaaaacatgtatgaaggaattaccctctttcattggtaatttacagaacctaaaatatttaaacatgcaaggttgtgataaacttcaaaacctacctttatcccttggtcatctacaacgacttgagcaacttcgactgtcatgctgcagatgcattgctatgctaccagactctttgtgcaaccttatcaatcttcgaattttggatttatcaagatgcactatgctgcgacacttacctgctttatttggtaacttagtgaacttggaggatctaagcctatctagttgtttcaaccttaagcagttaccagaatcttttggtaacctttattttcttaggttcctgaacctatcaagctgctatgaacttcagcagtttcctgaatctgttacaaacctcgagaaactggaagttcttatactccggagatgttgtagacttcgaattctccccccctcctttgcaatgattaagtaccttcgaattcttgatctggctggctgtgaagcacttcatgtaagtactgagatgctaacaaccaatttggagtatctgaacctacaacggtgcctaaatcttcagactcagccatactatttcgaaaacttcaataagttgaagtttttgaatctttcccattgcctccctaccgttgattgcctggaatctattagttacttgttcaacttagaatatctagatctgtcagaaacttcccttgacatacctatgtcttttgcaaggcttcagaagttgcacacactgaacctcactggttgtgctccaatgcatccatcctctaatgtacaccaaacatggccaggtatattagcaaaaattacaagtctcaagtctgtgctgacgatggacccagtattagcggcctctcttcaaggacacaccgagtgctctgctgactatgattatcactcactcacaacaaccgatgagcttgttattaaagagatcacaggcggttcccgaggccttcgtattgctgagcagttgaatctgcagaatcgactggaggtttgtttccttaagctggaatgggttcctaggtcccaatcagctcaagatcaactattggaatatacagatgaggaagtgctggagaagttccaaccaaatgagactctggagcattttatgctagttaaatatacaggcaatgtgtttcctacatggatgatgaacaaactgacttcactcccataccttgtcaatctttgtttgttccacctgcataactgcagtgctctccctccaattggccatctacaaaatctgcgttacttgcatattaaagatatgcccaacctcacaaatctagagatgggtctttctggggggcctgtgtccttggggaaattgactcacctcaaactggaagcactgaatttagaagagctgtctatactcttgtcagccaacaatgagagtccctgtttcatgtttcccaatcttgaggagttatctgttctatcatgctctaagcttgtcttcaaaccatctgtgcctaagtgtgcgaaatatgtaataaaagagagtaacatggttctgtcatgttggcagcctctggggccattctcatctccaccaatagaaaaagtagagataagtgggtgtgtgatgccttctggttggttgcaatggcttagatccatacagactcttgagaaagtagtgatagatggtgaagctctttcatcttttgagctccagaagatatatgcatttcaagaagcatctggtagtaagatttcaaaggaaactgtaagttcatctaggacaaatatgtcacgtgagttgaccactgagaacgtttatatgctgttaaatataggatggtgcccttaaagctattggtatcgacaactcaacaatcaaacatattccaaggtttaacaccacttctgaactctcagtggatactatttcatcctctaaagtaagcacaccatccaaggagatcccatcaactttacgccgtccggacaagtcaaaaatgcctgcactaatacctggagatggatctttaaacttaagccttaagcaggttcagaaggttactcataatttctcacctttatttgagttaggtgaagggggaacctgggcagtttacagggctgtattatcagataaccaggttgttatcatccggagagctaaaaagggccacgttcaagaggcaaaacatcttatggaagtgaagctccttacaaaaattaatcactggagtttggtgagattcttaggttttattgatgaaaaagatgagtgtattcggatcacagagtatgttccaaatggcactcttagggaacacctacatgaccaacgtaagagaatcctgaattttaatcaacgtatagtgattgcccttgatgttgctattgcattgacttatctccatttgtgttctggggacgctttaatctgttacaacttgaggacgtcaaacatcctactgacagagagctaccgagccaaagtgtgctgttctgaactgtcaaaaagtggtaatatcgtgctattaaagggaacagggggctacattgatccagagtacttggagacctcagagctcactgccaaatctgatgtctactcttttggaataatactcttagaaatcatatcttctcatgggccacaagactgggatgtattgatgaaccaccggcaaagcagtgttgtacaatgggctcttgagaaattctatgacgacctcatgaatgagatattggattaccgtatggaggatcgcgtggatggagatgtggtcagggacttgctcagcttagcgttgagttgtgtggtttcgcgtggcgctgatcgcccaagcatcgtagttgtcggggagcgactgtggaaaatatggcaagatcatcgaagaaacgtaggggaacagcacgagtaccaaggaagctgggcagaatttatcgaacaagagggaatcctgaggcatcacaagtgtgtgctcaagagaagttgggagccttcaacaacgcagcaggattggtctgtgtatgttaggcagattgaattagttcaagaagcttacgataccccatggggagaggaaattttttcggggtctgtttcattggacgatatcacagtatattctcggtagaaagcttcaatacgattatattactcctgttttctccgcggtattacatgtgtagattggaggacaataacctatttgttctatttctgtttcattggacgataaatcatagtgtctcctcggtatgaactcttgaaagtttcaactcgttgttttcctcactctatttattcagtgatattgctgttagaaaattacgcaatttcagtactaatttggtctagaaaatattaataatatattggtggcatcaggcttgcacgtgtgatcatagtgcaacagacatgaacatgatatcgtgtgatcatagtgcaaaagacatgaacatgatatcgatcgtaatgattttaatcacag

SEQ ID NO: 65572 - DNA, 4297 bp, Zea Mays
cgaagatgctaatcttcgccggtcgccactcgcccgtctcggagctactgccgctggccaaccatttcacctgttgcggctctcgcccctccatcgaaatcgccatgccgcatggtcacgccgcagccgtggtggaccggctgctgcgcaggctggggtccgccgcttgccggctggaggtgcccccgaatatagacggggacctagcgcatgtgtggacaactctggcgaggttgcaagatatgctggttagcctggagatccgtccggagctgcaagaatggatgggggatatcaagcaggtcgcgtacgatgttgaggatctggtcgatgaattggaagaccacaatagcatggaatctcagatgagcggctgcgttgcagttggagaggaaacaagatggtgctgttcatgttcgtttctcatgcatagtacaagagcggacagaatgaagacaatcaaaagaaggtttatggaatggataacagagtagttcctacaacattctacattcataactttgtccatgaatttgcaagacatgttgcttgtgatgatattataattttcgatggtaccaaaatgcaaaagggctgtgcaaaaagacaaaccttccaatatgcactcttgacatgttaccgggtgcagtcaacattttcccactcaacgctgacaaggacaagggcattgcatatcatgaactctgaggcgataacatttcctcgtgaagcatttgaattactgaagcacttgcgtgttttgaatcttagtggatgttgcattgaagaattaccagcctctataggttgtctaaagcgtctaaaatatcttgatgtttctggtgtgcagatacaaacattgccattcccggtgagtaggttgacaaaccttgaggtactggatctatcaaaaacatgtatgaaggaattaccctctttcattggtaatttacagaacctaaaatatttaaacatgcaaggttgtgataaacttcaaaacctacctttatcccttggtcatctacaacgacttgagcaacttcgactgtcatgctgcagatgcattgctatgctaccagactctttgtgcaaccttatcaatcttcgaattttggatttatcaagatgcactatgctgcgacacttacctgctttatttggtaacttagtgaacttggaggatctaagcctatctagttgtttcaaccttaagcagttaccagaatcttttggtaacctttattttcttaggttcctgaacctatcaagctgctatgaacttcagcagtttcctgaatctgttacaaacctcgagaaactggaagttcttatactccggagatgttgtagacttcgaattctccccccctcctttgcaatgattaagtaccttcgaattcttgatctggctggctgtgaagcacttcatgtaagtactgagatgctaacaaccaatttggagtatctgaacctacaacggtgcctaaatcttcagactcagccatactatttcgaaaacttcaataagttgaagtttttgaatctttcccattgcctccctaccgttgattgcctggaatctattagttacttgttcaacttagaatatctagatctgtcagaaacttcccttgacatacctatgtcttttgcaaggcttcagaagttgcacacactgaacctcactggttgtgctccaatgcatccatcctctaatgtacaccaaacatggccaggtatattagcaaaaattacaagtctcaagtctgtgctgacgatggacccagtattagcggcctctcttcaaggacacaccgagtgctctgctgactatgattatcactcactcacaacaaccgatgagcttgttattaaagagatcacaggcggttcccgaggccttcgtattgctgagcagttgaatctgcagaatcgactggaggtttgtttccttaagctggaatgggttcctaggtcccaatcagctcaagatcaactattggaatatacagatgaggaagtgctggagaagttccaaccaaatgagactctggagcattttatgctagttaaatatacaggcaatgtgtttcctacatggatgatgaacaaactgacttcactcccataccttgtcaatctttgtttgttccacctgcataactgcagtgctctccctccaattggccatctacaaaatctgcgttacttgcatattaaagatatgcccaacctcacaaatctagagatgggtctttctggggggcctgtgtccttggggaaattgactcacctcaaactggaagcactgaatttagaagagctgtctatactcttgtcagccaacaatgagagtccctgtttcatgtttcccaatcttgaggagttatctgttctatcatgctctaagcttgtcttcaaaccatctgtgcctaagtgtgcgaaatatgtaataaaagagagtaacatggttctgtcatgttggcagcctctggggccattctcatctccaccaatagaaaaagtagagataagtgggtgtgtgatgccttctggttggttgcaatggcttagatccatacagactcttgagaaagtagtgatagatggtgaagctctttcatcttttgagctccagaagatatatgcatttcaagaagcatctggtagtaagatttcaaaggaaactgtaagttcatctaggacaaatatgtcacgtgagttgaccactgaggatggtgcccttaaagctattggtatcgacaactcaacaatcaaacatattccaaggtttaacaccacttctgaactctcagtggatactatttcatcctctaaagtaagcacaccatccaaggagatcccatcaactttacgccgtccggacaagtcaaaaatgcctgcactaatacctggagatggatctttaaacttaagccttaagcaggttcagaaggttactcataatttctcacctttatttgagttaggtgaagggggaacctgggcagtttacagggctgtattatcagataaccaggttgttatcatccggagagctaaaaagggccacgttcaagaggcaaaacatcttatggaagtgaagctccttacaaaaattaatcactggagtttggtgagattcttaggttttattgatgaaaaagatgagtgtattcggatcacagagtatgttccaaatggcactcttagggaacacctacatggggacgctttaatctgttacaacttgaggacgtcaaacatcctactgacagagagctaccgagccaaagtgtgctgttctgaactgtcaaaaagtggtaatatcgtgctattaaagggaacagggggctacattgatccagagtacttggagacctcagagctcactgccaaatctgatgtctactcttttggaataatactcttagaaatcatatcttctcatgggccacaagactgggatgtattgatgaaccaccggcaaagcagtgttgtacaatgggctcttgagaaattctatgacgacctcatgaatgagatattggattaccgtatggaggatcgcgtggatggagatgtggtcagggacttgctcagcttagcgttgagttgtgtggtttcgcgtggcgctgatcgcccaagcatcgtagttgtcggggagcgactgtggaaaatatggcaagatcatcgaagaaacgtaggggaacagcacgagtaccaaggaagctgggcagaatttatcgaacaagagggaatcctgaggcatcacaagtgtgtgctcaagagaagttgggagccttcaacaacgcagcaggattggtctgtgtatgttaggcagattgaattagttcaagaagcttacgataccccatggggagaggaaattttttcggggtctgtttcattggacgatatcacagtatattctcggtagaaagcttcaatacgattatattactcctgttttctccgcggtattacatgtgtagattggaggacaataacctatttgttctatttctgtttcattggacgataaatcatagtgtctcctcggtatgaactcttgaaagtttcaactcgttgttttcctcactctatttattcagtgatattgctgttagaaaattacgcaatttcagtactaatttggtctagaaaatattaataatatattggtggcatcaggcttgcacgtgtgatcatagtgcaacagacatgaacatgatatcgtgtgatcatagtgcaaaagacatgaacatgatatcgatcgtaatgattttaatcacag

SEQ ID NO: 65573 - DNA, 5119 bp, Zea Mays
cgaagatgctaatcttcgccggtcgccactcgcccgtctcggagctactgccgctggccaaccatttcacctgttgcggctctcgcccctccatcgaaatcgccatgccgcatggtcacgccgcagccgtggtggaccggctgctgcgcaggctggggtccgccgcttgccggctggaggtgcccccgaatatagacggggacctagcgcatgtgtggacaactctggcgaggttgcaagatatgctggttagcctggagatccgtccggagctgcaagaatggatgggggatatcaagcaggtcgcgtacgatgttgaggatctggtcgatgaattggaagaccacaatagcatggaatctcagatgagcggctgcgttgcagttggagaggaaacaagatggtgctgttcatgttcgtttctcatgcatagtacaagagcggacagaatgaagacaatcaaaagaaggttggactttttagtaaaagattctgtcatcttcagtttgatgcagtacccttttcctgatgttgagagatttgataatgaagcatttgatagagctgcagtcgttggaagagataatgacaaagcaaagataaaggacatgatcttgcaaagtaatgcacaaaagttctcaatcattcccattcttggcctcgtggggttggggaaaacaactcttgctagattaattttccttgaccagggagaaggttgggattttgatcttcgtatctggatatccttaaataggaaactaaacataaaaatgattgctagtgatataatctcgcaatgtaatcatagagaagaaaagcttttagatgttcgtacggacatggagatccaggaaaactttcagttgctaaagaggtgtttgcaagaggcactccatgaaaaacattgtctgattgtcttggatgacctttctagcacagataaaaaccagttggatgaattgaaggaaatgctgaagggtacaaatgagtctatcaaggttttagtgacgacctccagcgaaataactgcagaactactgcacaccattccaccgtacaagttgtgtcctttatctgaagacgacagttggaaaatattttctcaaaaggcttttgggaattgtgatggtgataacactgaccttaagaaaatcggaaaggaaatagtaaaaaggtgtgagggaataccattattgactcattctcttggtttagttgtacaaaatgaagtcacaaatgtgtggttagctgcaagggatgaagagatatggaaactagaaagaagagttgccactaaaatagaattgttttcaccattatatcaaatatacaatgacttctcctcaactattaaattgtgctttctatatttatccatatttcctaaagggtctacaatagataaggaaaaactgatccaacagtggattgcactcgagattattggatcaaaacatgactccttgcctccttatgtgaatggagagatgtgcatccaggactttttgtcaatatattttctccaagttcgagatacacactcagtttatggaatggataacagagtagttcctacaacattctacattcataactttgtccatgaatttgcaagacatgttgcttgtgatgatattataattttcgatggtaccaaaatgcaaaagggctgtgcaaaaagacaaaccttccaatatgcactcttgacatgttaccgggtgcagtcaacattttcccactcaacgctgacaaggacaagggcattgcatatcatgaactctgagatacaaacattgccattcccgatgcattgctatgctaccagactctttgtgcaaccttatcaatcttcgaattttggatttatcaagatgcactatgctgcgacacttacctgctttatttggtaacttagtgaacttggaggatctaagcctatctagttgtttcaaccttaagcagttaccagaatcttttggtaacctttattttcttaggttcctgaacctatcaagctgctatgaacttcagcagtttcctgaatctgttacaaacctcgagaaactggaagttcttatactccggagatgttgtagacttcgaattctccccccctcctttgcaatgattaagtaccttcgaattcttgatctggctggctgtgaagcacttcatgtaagtactgagatgctaacaaccaatttggagtatctgaacctacaacggtgcctaaatcttcagactcagccatactatttcgaaaacttcaataagttgaagtttttgaatctttcccattgcctccctaccgttgattgcctggaatctattagttacttgttcaacttagaatatctagatctgtcagaaacttcccttgacatacctatgtcttttgcaaggcttcagaagttgcacacactgaacctcactggttgtgctccaatgcatccatcctctaatgtacaccaaacatggccaggtatattagcaaaaattacaagtctcaagtctgtgctgacgatggacccagtattagcggcctctcttcaaggacacaccgagtgctctgctgactatgattatcactcactcacaacaaccgatgagcttgttattaaagagatcacaggcggttcccgaggccttcgtattgctgagcagttgaatctgcagaatcgactggaggtttgtttccttaagctggaatgggttcctaggtcccaatcagctcaagatcaactattggaatatacagatgaggaagtgctggagaagttccaaccaaatgagactctggagcattttatgctagttaaatatacaggcaatgtgtttcctacatggatgatgaacaaactgacttcactcccataccttgtcaatctttgtttgttccacctgcataactgcagtgctctccctccaattggccatctacaaaatctgcgttacttgcatattaaagatatgcccaacctcacaaatctagagatgggtctttctggggggcctgtgtccttggggaaattgactcacctcaaactggaagcactgaatttagaagagctgtctatactcttgtcagccaacaatgagagtccctgtttcatgtttcccaatcttgaggagttatctgttctatcatgctctaagcttgtcttcaaaccatctgtgcctaagtgtgcgaaatatgtaataaaagagagtaacatggttctgtcatgttggcagcctctggggccattctcatctccaccaatagaaaaagtagagataagtgggtgtgtgatgccttctggttggttgcaatggcttagatccatacagactcttgagaaagtagtgatagatggtgaagctctttcatcttttgagctccagaagatatatgcatttcaagaagcatctggtagtaagatttcaaaggaaactgtaagttcatctaggacaaatatgtcacgatggtgcccttaaagctattggtatcgacaactcaacaatcaaacatattccaaggtttaacaccacttctgaactctcagtggatactatttcatcctctaaagtaagcacaccatccaaggagatcccatcaactttacgccgtccggacaagtcaaaaatgcctgcactaatacctggagatggatctttaaacttaagccttaagcaggttcagaaggttactcataatttctcacctttatttgagttaggtgaagggggaacctgggcagtttacagggctgtattatcagataaccaggttgttatcatccggagagctaaaaagggccacgttcaagaggcaaaacatcttatggaagtgaagctccttacaaaaattaatcactggagtttggtgagattcttaggttttattgatgaaaaagatgagtgtattcggatcacagagtatgttccaaatggcactcttagggaacacctacatgaccaacgtaagagaatcctgaattttaatcaacgtatagtgattgcccttgatgttgctattgcattgacttatctccatttgtgttctggggacgctttaatctgttacaacttgaggacgtcaaacatcctactgacagagagctaccgagccaaagtgtgctgttctgaactgtcaaaaagtggtaatatcgtgctattaaagggaacagggggctacattgatccagagtacttggagacctcagagctcactgccaaatctgatgtctactcttttggaataatactcttagaaatcatatcttctcatgggccacaagactgggatgtattgatgaaccaccggcaaagcagtgttgtacaatgggctcttgagaaattctatgacgacctcatgaatgagatattggattaccgtatggaggatcgcgtggatggagatgtggtcagggacttgctcagcttagcgttgagttgtgtggtttcgcgtggcgctgatcgcccaagcatcgtagttgtcggggagcgactgtggaaaatatggcaagatcatcgaagaaacgtaggggaacagcacgagtaccaaggaagctgggcagaatttatcgaacaagagggaatcctgaggcatcacaagtgtgtgctcaagagaagttgggagccttcaacaacgcagcaggattggtctgtgtatgttaggcagattgaattagttcaagaagcttacgataccccatggggagaggaaattttttcggggtctgtttcattggacgatatcacagtatattctcggtagaaagcttcaatacgattatattactcctgttttctccgcggtattacatgtgtagattggaggacaataacctatttgttctatttctgtttcattggacgataaatcatagtgtctcctcggtatgaactcttgaaagtttcaactcgttgttttcctcactctatttattcagtgatattgctgttagaaaattacgcaatttcagtactaatttggtctagaaaatattaataatatattggtggcatcaggcttgcacgtgtgatcatagtgcaacagacatgaacatgatatcgtgtgatcatagtgcaaaagacatgaacatgatatcgatcgtaatgattttaatcacag

SEQ ID NO: 65574 - DNA, 3461 bp, Zea Mays
cgaagatgctaatcttcgccggtcgccactcgcccgtctcggagctactgccgctggccaaccatttcacctgttgcggctctcgcccctccatcgaaatcgccatgccgcatggtcacgccgcagccgtggtggaccggctgctgcgcaggctggggtccgccgcttgccggctggaggtgcccccgaatatagacggggacctagcgcatgtgtggacaactctggcgaggttgcaagatatgctggttagcctggagatccgtccggagctgcaagaatggatgggggatatcaagcaggtcgcgtacgatgttgaggatctggtcgatgaattggaagaccacaatagcatggaatctcagatgagcggctgcgttgcagttggagaggaaacaagatggtgctgttcatgttcgtttctcatgcatagtacaagagcggacagaatgaagacaatcaaaagaaggttggactttttagtaaaagattctgtcatcttcagtttgatgcagtacccttttcctgatgttgagagatttgataatgaagcatttgatagagctgcagtcgttggaagagataatgacaaagcaaagataaaggacatgatcttgcaaagtaatgcacaaaagttctcaatcattcccattcttggcctcgtggggttggggaaaacaactcttgctagattaattttccttgaccagggagaaggttgggattttgatcttcgtatctggatatccttaaataggaaactaaacataaaaatgattgctagtgatataatctcgcaatgtaatcatagagaagaaaagcttttagatgttcgtacggacatggagatccaggaaaactttcagttgctaaagaggtgtttgcaagaggcactccatgaaaaacattgtctgattgtcttggatgacctttctagcacagataaaaaccagttggatgaattgaaggaaatgctgaagggtacaaatgagtctatcaaggttttagtgacgacctccagcgaaataactgcagaactactgcacaccattccaccgtacaagttgtgtcctttatctgaagacgacagttggaaaatattttctcaaaaggcttttgggaattgtgatggtgataacactgaccttaagaaaatcggaaaggaaatagtaaaaaggtgtgagggaataccattattgactcattctcttggtttagttgtacaaaatgaagtcacaaatgtgtggttagctgcaagggatgaagagatatggaaactagaaagaagagttgccactaaaatagaattgttttcaccattatatcaaatatacaatgacttctcctcaactattaaattgtgctttctatatttatccatatttcctaaagggtctacaatagataaggaaaaactgatccaacagtggattgcactcgagattattggatcaaaacatgactccttgcctccttatgtgaatggagagatgtgcatccaggactttttgtcaatatattttctccaagttcgagatacacactcagtttatggaatggataacagagtagttcctacaacattctacattcataactttgtccatgaatttgcaagacatgttgcttgtgatgatattataattttcgatggtaccaaaatgcaaaagggctgtgcaaaaagacaaaccttccaatatgcactcttgacatgttaccgggtgcagtcaacattttcccactcaacgctgacaaggacaagggcattgcatatcatgaactctgagatacaaacattgccattcccggatggtgcccttaaagctattggtatcgacaactcaacaatcaaacatattccaaggtttaacaccacttctgaactctcagtggatactatttcatcctctaaagtaagcacaccatccaaggagatcccatcaactttacgccgtccggacaagtcaaaaatgcctgcactaatacctggagatggatctttaaacttaagccttaagcaggttcagaaggttactcataatttctcacctttatttgagttaggtgaagggggaacctgggcagtttacagggctgtattatcagataaccaggttgttatcatccggagagctaaaaagggccacgttcaagaggcaaaacatcttatggaagtgaagctccttacaaaaattaatcactggagtttggtgagattcttaggttttattgatgaaaaagatgagtgtattcggatcacagagtatgttccaaatggcactcttagggaacacctacatgaccaacgtaagagaatcctgaattttaatcaacgtatagtgattgcccttgatgttgctattgcattgacttatctccatttgtgttctggggacgctttaatctgttacaacttgaggacgtcaaacatcctactgacagagagctaccgagccaaagtgtgctgttctgaactgtcaaaaagtggtaatatcgtgctattaaagggaacagggggctacattgatccagagtacttggagacctcagagctcactgccaaatctgatgtctactcttttggaataatactcttagaaatcatatcttctcatgggccacaagactgggatgtattgatgaaccaccggcaaagcagtgttgtacaatgggctcttgagaaattctatgacgacctcatgaatgagatattggattaccgtatggaggatcgcgtggatggagatgtggtcagggacttgctcagcttagcgttgagttgtgtggtttcgcgtggcgctgatcgcccaagcatcgtagttgtcggggagcgactgtggaaaatatggcaagatcatcgaagaaacgtaggggaacagcacgagtaccaaggaagctgggcagaatttatcgaacaagagggaatcctgaggcatcacaagtgtgtgctcaagagaagttgggagccttcaacaacgcagcaggattggtctgtgtatgttaggcagattgaattagttcaagaagcttacgataccccatggggagaggaaattttttcggggtctgtttcattggacgatatcacagtatattctcggtagaaagcttcaatacgattatattactcctgttttctccgcggtattacatgtgtagattggaggacaataacctatttgttctatttctgtttcattggacgataaatcatagtgtctcctcggtatgaactcttgaaagtttcaactcgttgttttcctcactctatttattcagtgatattgctgttagaaaattacgcaatttcagtactaatttggtctagaaaatattaataatatattggtggcatcaggcttgcacgtgtgatcatagtgcaacagacatgaacatgatatcgtgtgatcatagtgcaaaagacatgaacatgatatcgatcgtaatgattttaatcacag

SEQ ID NO: 65575 - DNA, 4600 bp, Zea Mays
cgaagatgctaatcttcgccggtcgccactcgcccgtctcggagctactgccgctggccaaccatttcacctgttgcggctctcgcccctccatcgaaatcgccatgccgcatggtcacgccgcagccgtggtggaccggctgctgcgcaggctggggtccgccgcttgccggctggaggtgcccccgaatatagacggggacctagcgcatgtgtggacaactctggcgaggttgcaagatatgctggttagcctggagatccgtccggagctgcaagaatggatgggggatatcaagcaggtcgcgtacgatgttgaggatctggtcgatgaattggaagaccacaatagcatggaatctcagatgagcggctgcgttgcagttggagaggaaacaagatggtgctgttcatgttcgtttctcatgcatagtacaagagcggacagaatgaagacaatcaaaagaaggttggactttttagtaaaagattctgtcatcttcagtttgatgcagtacccttttcctgatgttgagagatttgataatgaagcatttgatagagctgcagtcgttggaagagataatgacaaagcaaagataaaggacatgatcttgcaaagtaatgcacaaaagttctcaatcattcccattcttggcctcgtggggttggggaaaacaactcttgctagattaattttccttgaccagggagaaggttgggattttgatcttcgtatctggatatccttaaataggaaactaaacataaaaatgattgctagtgatataatctcgcaatgtaatcatagagaagaaaagcttttagatgttcgtacggacatggagatccaggaaaactttcagttgctaaagaggtgtttgcaagaggcactccatgaaaaacattgtctgattgtcttggatgacctttctagcacagataaaaaccagttggatgaattgaaggaaatgctgaagggtacaaatgagtctatcaaggttttagtgacgacctccagcgaaataactgcagaactactgcacaccattccaccgtacaagttgtgtcctttatctgaagacgacagttggaaaatattttctcaaaaggcttttgggaattgtgatggtgataacactgaccttaagaaaatcggaaaggaaatagtaaaaaggtgtgagggaataccattattgactcattctcttggtttagttgtacaaaatgaagtcacaaatgtgtggttagctgcaagggatgaagagatatggaaactagaaagaagagttgccactaaaatagaattgttttcaccattatatcaaatatacaatgacttctcctcaactattaaattgtgctttctatatttatccatatttcctaaagggtctacaatagataaggaaaaactgatccaacagtggattgcactcgagattattggatcaaaacatgactccttgcctccttatgtgaatggagagatgtgcatccaggactttttgtcaatatattttctccaagttcgagatacacactcagtttatggaatggataacagagtagttcctacaacattctacattcataactttgtccatgaatttgcaagacatgttgcttgtgatgatattataattttcgatggtaccaaaatgcaaaagggctgtgcaaaaagacaaaccttccaatatgcactcttgacatgttaccgggtgcagtcaacattttcccactcaacgctgacaaggacaagggcattgcatatcatgaactctgaggcgataacatttcctcgtgaagcatttgaattactgaagcacttgcgtgttttgaatcttagtggatgttgcattgaagaattaccagcctctataggttgtctaaagcgtctaaaatatcttgatgtttctggtgtgcagatacaaacattgccattcccggtatattagcaaaaattacaagtctcaagtctgtgctgacgatggacccagtattagcggcctctcttcaaggacacaccgagtgctctgctgactatgattatcactcactcacaacaaccgatgagcttgttattaaagagatcacaggcggttcccgaggccttcgtattgctgagcagttgaatctgcagaatcgactggaggtttgtttccttaagctggaatgggttcctaggtcccaatcagctcaagatcaactattggaatatacagatgaggaagtgctggagaagttccaaccaaatgagactctggagcattttatgctagttaaatatacaggcaatgtgtttcctacatggatgatgaacaaactgacttcactcccataccttgtcaatctttgtttgttccacctgcataactgcagtgctctccctccaattggccatctacaaaatctgcgttacttgcatattaaagatatgcccaacctcacaaatctagagatgggtctttctggggggcctgtgtccttggggaaattgactcacctcaaactggaagcactgaatttagaagagctgtctatactcttgtcagccaacaatgagagtccctgtttcatgtttcccaatcttgaggagttatctgttctatcatgctctaagcttgtcttcaaaccatctgtgcctaagtgtgcgaaatatgtaataaaagagagtaacatggttctgtcatgttggcagcctctggggccattctcatctccaccaatagaaaaagtagagataagtgggtgtgtgatgccttctggttggttgcaatggcttagatccatacagactcttgagaaagtagtgatagatggtgaagctctttcatcttttgagctccagaagatatatgcatttcaagaagcatctggtagtaagatttcaaaggaaactgtaagttcatctaggacaaatatgtcacgtgagttgaccactgaggatggtgcccttaaagctattggtatcgacaactcaacaatcaaacatattccaaggtttaacaccacttctgaactctcagtggatactatttcatcctctaaagtaagcacaccatccaaggagatcccatcaactttacgccgtccggacaagtcaaaaatgcctgcactaatacctggagatggatctttaaacttaagccttaagcaggttcagaaggttactcataatttctcacctttatttgagttaggtgaagggggaacctgggcagtttacagggctgtattatcagataaccaggttgttatcatccggagagctaaaaagggccacgttcaagaggcaaaacatcttatggaagtgaagctccttacaaaaattaatcactggagtttggtgagattcttaggttttattgatgaaaaagatgagtgtattcggatcacagagtatgttccaaatggcactcttagggaacacctacatgaccaacgtaagagaatcctgaattttaatcaacgtatagtgattgcccttgatgttgctattgcattgacttatctccatttgtgttctggggacgctttaatctgttacaacttgaggacgtcaaacatcctactgacagagagctaccgagccaaagtgtgctgttctgaactgtcaaaaagtggtaatatcgtgctattaaagggaacagggggctacattgatccagagtacttggagacctcagagctcactgccaaatctgatgtctactcttttggaataatactcttagaaatcatatcttctcatgggccacaagactgggatgtattgatgaaccaccggcaaagcagtgttgtacaatgggctcttgagaaattctatgacgacctcatgaatgagatattggattaccgtatggaggatcgcgtggatggagatgtggtcagggacttgctcagcttagcgttgagttgtgtggtttcgcgtggcgctgatcgcccaagcatcgtagttgtcggggagcgactgtggaaaatatggcaagatcatcgaagaaacgtaggggaacagcacgagtaccaaggaagctgggcagaatttatcgaacaagagggaatcctgaggcatcacaagtgtgtgctcaagagaagttgggagccttcaacaacgcagcaggattggtctgtgtatgttaggcagattgaattagttcaagaagcttacgataccccatggggagaggaaattttttcggggtctgtttcattggacgatatcacagtatattctcggtagaaagcttcaatacgattatattactcctgttttctccgcggtattacatgtgtagattggaggacaataacctatttgttctatttctgtttcattggacgataaatcatagtgtctcctcggtatgaactcttgaaagtttcaactcgttgttttcctcactctatttattcagtgatattgctgttagaaaattacgcaatttcagtactaatttggtctagaaaatattaataatatattggtggcatcaggcttgcacgtgtgatcatagtgcaacagacatgaacatgatatcgtgtgatcatagtgcaaaagacatgaacatgatatcgatcgtaatgattttaatcacag

SEQ ID NO: 65576 - DNA, 4181 bp, Zea Mays
cgaagatgctaatcttcgccggtcgccactcgcccgtctcggagctactgccgctggccaaccatttcacctgttgcggctctcgcccctccatcgaaatcgccatgccgcatggtcacgccgcagccgtggtggaccggctgctgcgcaggctggggtccgccgcttgccggctggaggtgcccccgaatatagacggggacctagcgcatgtgtggacaactctggcgaggttgcaagatatgctggttagcctggagatccgtccggagctgcaagaatggatgggggatatcaagcaggtcgcgtacgatgttgaggatctggtcgatgaattggaagaccacaatagcatggaatctcagatgagcggctgcgttgcagttggagaggaaacaagatggtgctgttcatgttcgtttctcatgcatagtacaagagcggacagaatgaagacaatcaaaagaaggtttatggaatggataacagagtagttcctacaacattctacattcataactttgtccatgaatttgcaagacatgttgcttgtgatgatattataattttcgatggtaccaaaatgcaaaagggctgtgcaaaaagacaaaccttccaatatgcactcttgacatgttaccgggtgcagtcaacattttcccactcaacgctgacaaggacaagggcattgcatatcatgaactctgaggcgataacatttcctcgtgaagcatttgaattactgaagcacttgcgtgttttgaatcttagtggatgttgcattgaagaattaccagcctctataggttgtctaaagcgtctaaaatatcttgatgtttctggtgtgcagatacaaacattgccattcccggtgagtaggttgacaaaccttgaggtactggatctatcaaaaacatgtatgaaggaattaccctctttcattgatgcattgctatgctaccagactctttgtgcaaccttatcaatcttcgaattttggatttatcaagatgcactatgctgcgacacttacctgctttatttggttcctgaacctatcaagctgctatgaacttcagcagtttcctgaatctgttacaaacctcgagaaactggaagttcttatactccggagatgttgtagacttcgaattctccccccctcctttgcaatgattaagtaccttcgaattcttgatctggctggctgtgaagcacttcatgtaagtactgagatgctaacaaccaatttggagtatctgaacctacaacggtgcctaaatcttcagactcagccatactatttcgaaaacttcaataagttgaagtttttgaatctttcccattgcctccctaccgttgattgcctggaatctattagttacttgttcaacttagaatatctagatctgtcagaaacttcccttgacatacctatgtcttttgcaaggcttcagaagttgcacacactgaacctcactggttgtgctccaatgcatccatcctctaatgtacaccaaacatggccaggtatattagcaaaaattacaagtctcaagtctgtgctgacgatggacccagtattagcggcctctcttcaaggacacaccgagtgctctgctgactatgattatcactcactcacaacaaccgatgagcttgttattaaagagatcacaggcggttcccgaggccttcgtattgctgagcagttgaatctgcagaatcgactggaggtttgtttccttaagctggaatgggttcctaggtcccaatcagctcaagatcaactattggaatatacagatgaggaagtgctggagaagttccaaccaaatgagactctggagcattttatgctagttaaatatacaggcaatgtgtttcctacatggatgatgaacaaactgacttcactcccataccttgtcaatctttgtttgttccacctgcataactgcagtgctctccctccaattggccatctacaaaatctgcgttacttgcatattaaagatatgcccaacctcacaaatctagagatgggtctttctggggggcctgtgtccttggggaaattgactcacctcaaactggaagcactgaatttagaagagctgtctatactcttgtcagccaacaatgagagtccctgtttcatgtttcccaatcttgaggagttatctgttctatcatgctctaagcttgtcttcaaaccatctgtgcctaagtgtgcgaaatatgtaataaaagagagtaacatggttctgtcatgttggcagcctctggggccattctcatctccaccaatagaaaaagtagagataagtgggtgtgtgatgccttctggttggttgcaatggcttagatccatacagactcttgagaaagtagtgatagatggtgaagctctttcatcttttgagctccagaagatatatgcatttcaagaagcatctggtagtaagatttcaaaggaaactgtaagttcatctaggacaaatatgtcacgtgagttgaccactgaggatggtgcccttaaagctattggtatcgacaactcaacaatcaaacatattccaaggtttaacaccacttctgaactctcagtggatactatttcatcctctaaagtaagcacaccatccaaggagatcccatcaactttacgccgtccggacaagtcaaaaatgcctgcactaatacctggagatggatctttaaacttaagccttaagcaggttcagaaggttactcataatttctcacctttatttgagttaggtgaagggggaacctgggcagtttacagggctgtattatcagataaccaggttgttatcatccggagagctaaaaagggccacgttcaagaggcaaaacatcttatggaagtgaagctccttacaaaaattaatcactggagtttggtgagattcttaggttttattgatgaaaaagatgagtgtattcggatcacagagtatgttccaaatggcactcttagggaacacctacatgaccaacgtaagagaatcctgaattttaatcaacgtatagtgattgcccttgatgttgctattgcattgacttatctccatttgtgttctggggacgctttaatctgttacaacttgaggacgtcaaacatcctactgacagagagctaccgagccaaagtgtgctgttctgaactgtcaaaaagtggtaatatcgtgctattaaagggaacagggggctacattgatccagagtacttggagacctcagagctcactgccaaatctgatgtctactcttttggaataatactcttagaaatcatatcttctcatgggccacaagactgggatgtattgatgaaccaccggcaaagcagtgttgtacaatgggctcttgagaaattctatgacgacctcatgaatgagatattggattaccgtatggaggatcgcgtggatggagatgtggtcagggacttgctcagcttagcgttgagttgtgtggtttcgcgtggcgctgatcgcccaagcatcgtagttgtcggggagcgactgtggaaaatatggcaagatcatcgaagaaacgtaggggaacagcacgagtaccaaggaagctgggcagaatttatcgaacaagagggaatcctgaggcatcacaagtgtgtgctcaagagaagttgggagccttcaacaacgcagcaggattggtctgtgtatgttaggcagattgaattagttcaagaagcttacgataccccatggggagaggaaattttttcggggtctgtttcattggacgatatcacagtatattctcggtagaaagcttcaatacgattatattactcctgttttctccgcggtattacatgtgtagattggaggacaataacctatttgttctatttctgtttcattggacgataaatcatagtgtctcctcggtatgaactcttgaaagtttcaactcgttgttttcctcactctatttattcagtgatattgctgttagaaaattacgcaatttcagtactaatttggtctagaaaatattaataatatattggtggcatcaggcttgcacgtgtgatcatagtgcaacagacatgaacatgatatcgtgtgatcatagtgcaaaagacatgaacatgatatcgatcgtaatgattttaatcacag

SEQ ID NO: 65577 - DNA, 4993 bp, Zea Mays
cgaagatgctaatcttcgccggtcgccactcgcccgtctcggagctactgccgctggccaaccatttcacctgttgcggctctcgcccctccatcgaaatcgccatgccgcatggtcacgccgcagccgtggtggaccggctgctgcgcaggctggggtccgccgcttgccggctggaggtgcccccgaatatagacggggacctagcgcatgtgtggacaactctggcgaggttgcaagatatgctggttagcctggagatccgtccggagctgcaagaatggatgggggatatcaagcaggtcgcgtacgatgttgaggatctggtcgatgaattggaagaccacaatagcatggaatctcagatgagcggctgcgttgcagttggagaggaaacaagatggtgctgttcatgttcgtttctcatgcatagtacaagagcggacagaatgaagacaatcaaaagaaggttggactttttagtaaaagattctgtcatcttcagtttgatgcagtacccttttcctgatgttgagagatttgataatgaagcatttgatagagctgcagtcgttggaagagataatgacaaagcaaagataaaggacatgatcttgcaaagtaatgcacaaaagttctcaatcattcccattcttggcctcgtggggttggggaaaacaactcttgctagattaattttccttgaccagggagaaggttgggattttgatcttcgtatctggatatccttaaataggaaactaaacataaaaatgattgctagtgatataatctcgcaatgtaatcatagagaagaaaagcttttagatgttcgtacggacatggagatccaggaaaactttcagttgctaaagaggtgtttgcaagaggcactccatgaaaaacattgtctgattgtcttggatgacctttctagcacagataaaaaccagttggatgaattgaaggaaatgctgaagggtacaaatgagtctatcaaggttttagtgacgacctccagcgaaataactgcagaactactgcacaccattccaccgtacaagttgtgtcctttatctgaagacgacagttggaaaatattttctcaaaaggcttttgggaattgtgatggtgataacactgaccttaagaaaatcggaaaggaaatagtaaaaaggtgtgagggaataccattattgactcattctcttggtttagttgtacaaaatgaagtcacaaatgtgtggttagctgcaagggatgaagagatatggaaactagaaagaagagttgccactaaaatagaattgttttcaccattatatcaaatatacaatgacttctcctcaactattaaattgtgctttctatatttatccatatttcctaaagggtctacaatagataaggaaaaactgatccaacagtggattgcactcgagattattggatcaaaacatgactccttgcctccttatgtgaatggagagatgtgcatccaggactttttgtcaatatattttctccaagttcgagatacacactcaatacaaacattgccattcccggtgagtaggttgacaaaccttgaggtactggatctatcaaaaacatgtatgaaggaattaccctctttcattggtaatttacagaacctaaaatatttaaacatgcaaggttgtgataaacttcaaaacctacctttatcccttggtcatctacaacgacttgagcaacttcgactgtcatgctgcagatgcattgctatgctaccagactctttgtgcaaccttatcaatcttcgaattttggatttatcaagatgcactatgctgcgacacttacctgctttatttggttcctgaacctatcaagctgctatgaacttcagcagtttcctgaatctgttacaaacctcgagaaactggaagttcttatactccggagatgttgtagacttcgaattctccccccctcctttgcaatgattaagtaccttcgaattcttgatctggctggctgtgaagcacttcatgtaagtactgagatgctaacaaccaatttggagtatctgaacctacaacggtgcctaaatcttcagactcagccatactatttcgaaaacttcaataagttgaagtttttgaatctttcccattgcctccctaccgttgattgcctggaatctattagttacttgttcaacttagaatatctagatctgtcagaaacttcccttgacatacctatgtcttttgcaaggcttcagaagttgcacacactgaacctcactggttgtgctccaatgcatccatcctctaatgtacaccaaacatggccaggtatattagcaaaaattacaagtctcaagtctgtgctgacgatggacccagtattagcggcctctcttcaaggacacaccgagtgctctgctgactatgattatcactcactcacaacaaccgatgagcttgttattaaagagatcacaggcggttcccgaggccttcgtattgctgagcagttgaatctgcagaatcgactggaggtttgtttccttaagctggaatgggttcctaggtcccaatcagctcaagatcaactattggaatatacagatgaggaagtgctggagaagttccaaccaaatgagactctggagcattttatgctagttaaatatacaggcaatgtgtttcctacatggatgatgaacaaactgacttcactcccataccttgtcaatctttgtttgttccacctgcataactgcagtgctctccctccaattggccatctacaaaatctgcgttacttgcatattaaagatatgcccaacctcacaaatctagagatgggtctttctggggggcctgtgtccttggggaaattgactcacctcaaactggaagcactgaatttagaagagctgtctatactcttgtcagccaacaatgagagtccctgtttcatgtttcccaatcttgaggagttatctgttctatcatgctctaagcttgtcttcaaaccatctgtgcctaagtgtgcgaaatatgtaataaaagagagtaacatggttctgtcatgttggcagcctctggggccattctcatctccaccaatagaaaaagtagagataagtgggtgtgtgatgccttctggttggttgcaatggcttagatccatacagactcttgagaaagtagtgatagatggtgaagctctttcatcttttgagctccagaagatatatgcatttcaagaagcatctggtagtaagatttcaaaggaaactgtaagttcatctaggacaaatatgtcacgtgagttgaccactgaggatggtgcccttaaagctattggtatcgacaactcaacaatcaaacatattccaaggtttaacaccacttctgaactctcagtggatactatttcatcctctaaagtaagcacaccatccaaggagatcccatcaactttacgccgtccggacaagtcaaaaatgcctgcactaatacctggagatggatctttaaacttaagccttaagcaggttcagaaggttactcataatttctcacctttatttgagttaggtgaagggggaacctgggcagtttacagggctgtattatcagataaccaggttgttatcatccggagagctaaaaagggccacgttcaagaggcaaaacatcttatggaagtgaagctccttacaaaaattaatcactggagtttggtgagattcttaggttttattgatgaaaaagatgagtgtattcggatcacagagtatgttccaaatggcactcttagggaacacctacatgaccaacgtaagagaatcctgaattttaatcaacgtatagtgattgcccttgatgttgctattgcattgacttatctccatttgtgttctggggacgctttaatctgttacaacttgaggacgtcaaacatcctactgacagagagctaccgagccaaagtgtgctgttctgaactgtcaaaaagtggtaatatcgtgctattaaagggaacagggggctacattgatccagagtacttggagacctcagagctcactgccaaatctgatgtctactcttttggaataatactcttagaaatcatatcttctcatgggccacaagactgggatgtattgatgaaccaccggcaaagcagtgttgtacaatgggctcttgagaaattctatgacgacctcatgaatgagatattggattaccgtatggaggatcgcgtggatggagatgtggtcagggacttgctcagcttagcgttgagttgtgtggtttcgcgtggcgctgatcgcccaagcatcgtagttgtcggggagcgactgtggaaaatatggcaagatcatcgaagaaacgtaggggaacagcacgagtaccaaggaagctgggcagaatttatcgaacaagagggaatcctgaggcatcacaagtgtgtgctcaagagaagttgggagccttcaacaacgcagcaggattggtctgtgtatgttaggcagattgaattagttcaagaagcttacgataccccatggggagaggaaattttttcggggtctgtttcattggacgatatcacagtatattctcggtagaaagcttcaatacgattatattactcctgttttctccgcggtattacatgtgtagattggaggacaataacctatttgttctatttctgtttcattggacgataaatcatagtgtctcctcggtatgaactcttgaaagtttcaactcgttgttttcctcactctatttattcagtgatattgctgttagaaaattacgcaatttcagtactaatttggtctagaaaatattaataatatattggtggcatcaggcttgcacgtgtgatcatagtgcaacagacatgaacatgatatcgtgtgatcatagtgcaaaagacatgaacatgatatcgatcgtaatgattttaatcacag

SEQ ID NO: 65578 - DNA, 3118 bp, Zea Mays
cgaagatgctaatcttcgccggtcgccactcgcccgtctcggagctactgccgctggccaaccatttcacctgttgcggctctcgcccctccatcgaaatcgccatgccgcatggtcacgccgcagccgtggtggaccggctgctgcgcaggctggggtccgccgcttgccggctggaggtgcccccgaatatagacggggacctagcgcatgtgtggacaactctggcgaggttgcaagatatgctggttagcctggagatccgtccggagctgcaagaatggatgggggatatcaagcaggtcgcgtacgatgttgaggatctggtcgatgaattggaagaccacaatagcatggaatctcagatgagcggctgcgttgcagttggagaggaaacaagatggtgctgttcatgttcgtttctcatgcatagtacaagagcggacagaatgaagacaatcaaaagaaggttggactttttagtaaaagattctgtcatcttcagtttgatgcagtacccttttcctgatgttgagagatttgataatgaagcatttgatagagctgcagtcgttggaagagataatgacaaagcaaagataaaggacatgatcttgcaaagtaatgcacaaaagttctcaatcattcccattcttggcctcgtggggttggggaaaacaactcttgctagattaattttccttgaccagggagaaggttgggattttgatcttcgtatctggatatccttaaataggaaactaaacataaaaatgattgctagtgatataatctcgcaatgtaatcatagagaagaaaagcttttagatgttcgtacggacatggagatccaggaaaactttcagttgctaaagaggtgtttgcaagaggcactccatgaaaaacattgtctgattgtcttggatgacctttctagcacagataaaaaccagttggatgaattgaaggaaatgctgaagggtacaaatgagtctatcaaggttttagtgacgacctccagcgaaataactgcagaactactgcacaccattccaccgtacaagttgtgtcctttatctgaagacgacagttggaaaatattttctcaaaaggcttttgggaattgtgatggtgataacactgaccttaagaaaatcggaaaggaaatagtaaaaaggtgtgagggaataccattattgactcattctcttggtttagttgtacaaaatgaagtcacaaatgtgtggttagctgcaagggatgaagagatatggaaactagaaagaagagttgccactaaaatagaattgttttcaccattatatcaaatatacaatgacttctcctcaactattaaattgtgctttctatatttatccatatttcctaaagggtctacaatagataaggaaaaactgatccaacagtggattgcactcgagattattggatcaaaacatgactccttgcctccttatgtgaatggagagatgtgcatccaggactttttgtcaatatattttctccaagttcgagatacacactcatggatactatttcatcctctaaagtaagcacaccatccaaggagatcccatcaactttacgccgtccggacaagtcaaaaatgcctgcactaatacctggagatggatctttaaacttaagccttaagcaggttcagaaggttactcataatttctcacctttatttgagttaggtgaagggggaacctgggcagtttacagggctgtattatcagataaccaggttgttatcatccggagagctaaaaagggccacgttcaagaggcaaaacatcttatggaagtgaagctccttacaaaaattaatcactggagtttggtgagattcttaggttttattgatgaaaaagatgagtgtattcggatcacagagtatgttccaaatggcactcttagggaacacctacatgaccaacgtaagagaatcctgaattttaatcaacgtatagtgattgcccttgatgttgctattgcattgacttatctccatttgtgttctggggacgctttaatctgttacaacttgaggacgtcaaacatcctactgacagagagctaccgagccaaagtgtgctgttctgaactgtcaaaaagtggtaatatcgtgctattaaagggaacagggggctacattgatccagagtacttggagacctcagagctcactgccaaatctgatgtctactcttttggaataatactcttagaaatcatatcttctcatgggccacaagactgggatgtattgatgaaccaccggcaaagcagtgttgtacaatgggctcttgagaaattctatgacgacctcatgaatgagatattggattaccgtatggaggatcgcgtggatggagatgtggtcagggacttgctcagcttagcgttgagttgtgtggtttcgcgtggcgctgatcgcccaagcatcgtagttgtcggggagcgactgtggaaaatatggcaagatcatcgaagaaacgtaggggaacagcacgagtaccaaggaagctgggcagaatttatcgaacaagagggaatcctgaggcatcacaagtgtgtgctcaagagaagttgggagccttcaacaacgcagcaggattggtctgtgtatgttaggcagattgaattagttcaagaagcttacgataccccatggggagaggaaattttttcggggtctgtttcattggacgatatcacagtatattctcggtagaaagcttcaatacgattatattactcctgttttctccgcggtattacatgtgtagattggaggacaataacctatttgttctatttctgtttcattggacgataaatcatagtgtctcctcggtatgaactcttgaaagtttcaactcgttgttttcctcactctatttattcagtgatattgctgttagaaaattacgcaatttcagtactaatttggtctagaaaatattaataatatattggtggcatcaggcttgcacgtgtgatcatagtgcaacagacatgaacatgatatcgtgtgatcatagtgcaaaagacatgaacatgatatcgatcgtaatgattttaatcacag

SEQ ID NO: 65579 - DNA, 5234 bp, Zea Mays
cgaagatgctaatcttcgccggtcgccactcgcccgtctcggagctactgccgctggccaaccatttcacctgttgcggctctcgcccctccatcgaaatcgccatgccgcatggtcacgccgcagccgtggtggaccggctgctgcgcaggctggggtccgccgcttgccggctggaggtgcccccgaatatagacggggacctagcgcatgtgtggacaactctggcgaggttgcaagatatgctggttagcctggagatccgtccggagctgcaagaatggatgggggatatcaagcaggtcgcgtacgatgttgaggatctggtcgatgaattggaagaccacaatagcatggaatctcagatgagcggctgcgttgcagttggagaggaaacaagatggtgctgttcatgttcgtttctcatgcatagtacaagagcggacagaatgaagacaatcaaaagaaggttggactttttagtaaaagattctgtcatcttcagtttgatgcagtacccttttcctgatgttgagagatttgataatgaagcatttgatagagctgcagtcgttggaagagataatgacaaagcaaagataaaggacatgatcttgcaaagtaatgcacaaaagttctcaatcattcccattcttggcctcgtggggttggggaaaacaactcttgctagattaattttccttgaccagggagaaggttgggattttgatcttcgtatctggatatccttaaataggaaactaaacataaaaatgattgctagtgatataatctcgcaatgtaatcatagagaagaaaagcttttagatgttcgtacggacatggagatccaggaaaactttcagttgctaaagaggtgtttgcaagaggcactccatgaaaaacattgtctgattgtcttggatgacctttctagcacagataaaaaccagttggatgaattgaaggaaatgctgaagggtacaaatgagtctatcaaggttttagtgacgacctccagcgaaataactgcagaactactgcacaccattccaccgtacaagttgtgtcctttatctgaagacgacagttggaaaatattttctcaaaaggcttttgggaattgtgatggtgataacactgaccttaagaaaatcggaaaggaaatagtaaaaaggtgtgagggaataccattattgactcattctcttggtttagttgtacaaaatgaagtcacaaatgtgtggttagctgcaagggatgaagagatatggaaactagaaagaagagttgccactaaaatagaattgttttcaccattatatcaaatatacaatgacttctcctcaactattaaattgtgctttctatatttatccatatttcctaaagggtctacaatagataaggaaaaactgatccaacagtggattgcactcgagattattggatcaaaacatgactccttgcctccttatgtgaatggagagatgtgcatccaggactttttgtcaatatattttctccaagttcgagatacacactcagtttatggaatggataacagagtagttcctacaacattctacattcataactttgtccatgaatttgcaagacatgttgcttgtgatgatattataattttcgatggtaccaaaatgcaaaagggctgtgcaaaaagacaaaccttccaatatgcactcttgacatgttaccgggtgcagtcaacattttcccactcaacgctgacaaggacaagggcattgcatatcatgaactctgagatacaaacattgccattcccggtgagtaggttgacaaaccttgaggtactggatctatcaaaaacatgtatgaaggaattaccctctttcattggtaatttacagaacctaaaatatttaaacatgcaaggttgtgataaacttcaaaacctacctttatcccttggtcatctacaacgacttgagcaacttcgactgtcatgctgcagatgcattgctatgctaccagactctttgtgcaaccttatcaatcttcgaattttggatttatcaagatgcactatgctgcgacacttacctgctttatttggtaacttagtgaacttggaggatctaagcctatctagttgtttcaaccttaagcagttaccagaatcttttggtaacctttattttcttaggttcctgaacctatcaagctgctatgaacttcagcagtttcctgaatctgttacaaacctcgagaaactggaagttcttatactccggagatgttgtagacttcgaattctccccccctcctttgcaatgattaagtaccttcgaattcttgatctggctggctgtgaagcacttcatgtaagtactgagatgctaacaaccaatttggagtatctgaacctacaacggtgcctaaatcttcagactcagccatactatttcgaaaacttcaataagttgaagtttttgaatctttcccattgcctccctaccgttgattgcctggaatctattagttacttgttcaacttagaatatctagatctgtcagaaacttcccttgacatacctatgtcttttgcaaggcttcagaagttgcacacactgaacctcactggttgtgctccaatgcatccatcctctaatgtacaccaaacatggccaggtatattagcaaaaattacaagtctcaagtctgtgctgacgatggacccagtattagcggcctctcttcaaggacacaccgagtgctctgctgactatgattatcactcactcacaacaaccgatgagcttgttattaaagagatcacaggcggttcccgaggccttcgtattgctgagcagttgaatctgcagaatcgactggaggtttgtttccttaagctggaatgggttcctaggtcccaatcagctcaagatcaactattggaatatacagatgaggaagtgctggagaagttccaaccaaatgagactctggagcattttatgctagttaaatatacaggcaatgtgtttcctacatggatgatgaacaaactgacttcactcccataccttgtcaatctttgtttgttccacctgcataactgcagtgctctccctccaattggccatctacaaaatctgcgttacttgcatattaaagatatgcccaacctcacaaatctagagatgggtctttctggggggcctgtgtccttggggaaattgactcacctcaaactggaagcactgaatttagaagagctgtctatactcttgtcagccaacaatgagagtccctgtttcatgtttcccaatcttgaggagttatctgttctatcatgctctaagcttgtcttcaaaccatctgtgcctaagtgtgcgaaatatgtaataaaagagagtaacatggttctgtcatgttggcagcctctggggccattctcatctccaccaatagaaaaagtagagataagtgggtgtgtgatgccttctggttggttgcaatggcttagatccatacagactcttgagaaagtagtgatagatggtgaagctctttcatcttttgagctccagaagatatatgcatttcaagaagcatctggtagtaagatttcaaaggaaactgtaagttcatctaggacaaatatgtcacgtgagttgaccactgaggatggtgcccttaaagctattggtatcgacaactcaacaatcaaacatattccaaggtttaacaccacttctgaactctcagtggatactatttcatcctctaaagtaagcacaccatccaaggagatcccatcaactttacgccgtccggacaagtcaaaaatgcctgcactaatacctggagatggatctttaaacttaagccttaagcaggttcagaaggttactcataatttctcacctttatttgagttaggtgaagggggaacctgggcagtttacagggctgtattatcagataaccaggttgttatcatccggagagctaaaaagggccacgttcaagaggcaaaacatcttatggaagtgaagctccttacaaaaattaatcactggagtttggtgagattcttaggttttattgatgaaaaagatgagtgtattcggatcacagagtatgttccaaatggcactcttagggaacacctacatggggacgctttaatctgttacaacttgaggacgtcaaacatcctactgacagagagctaccgagccaaagtgtgctgttctgaactgtcaaaaagtggtaatatcgtgctattaaagggaacagggggctacattgatccagagtacttggagacctcagagctcactgccaaatctgatgtctactcttttggaataatactcttagaaatcatatcttctcatgggccacaagactgggatgtattgatgaaccaccggcaaagcagtgttgtacaatgggctcttgagaaattctatgacgacctcatgaatgagatattggattaccgtatggaggatcgcgtggatggagatgtggtcagggacttgctcagcttagcgttgagttgtgtggtttcgcgtggcgctgatcgcccaagcatcgtagttgtcggggagcgactgtggaaaatatggcaagatcatcgaagaaacgtaggggaacagcacgagtaccaaggaagctgggcagaatttatcgaacaagagggaatcctgaggcatcacaagtgtgtgctcaagagaagttgggagccttcaacaacgcagcaggattggtctgtgtatgttaggcagattgaattagttcaagaagcttacgataccccatggggagaggaaattttttcggggtctgtttcattggacgatatcacagtatattctcggtagaaagcttcaatacgattatattactcctgttttctccgcggtattacatgtgtagattggaggacaataacctatttgttctatttctgtttcattggacgataaatcatagtgtctcctcggtatgaactcttgaaagtttcaactcgttgttttcctcactctatttattcagtgatattgctgttagaaaattacgcaatttcagtactaatttggtctagaaaatattaataatatattggtggcatcaggcttgcacgtgtgatcatagtgcaacagacatgaacatgatatcgtgtgatcatagtgcaaaagacatgaacatgatatcgatcgtaatgattttaatcacag

SEQ ID NO: 65580 - DNA, 979 bp, Zea Mays
tctgttcttccacgcagcaccagacgcacgactctcctctgtcttctctgtgccgcctcctcgccgagctgcgcgctgccaaccgcgctggtgaactcgcccggtccggcgcactgctcatctcggctcctttggaaatccttcgcgaacgtctcgccaagttgtcaggcccgtcttcgagtttggtggagtcccaagcttgcgcgccgtcggcctcttcctcctgtgtcctaacgtcgtcgtccctgctcacttcatccaactgctcccttcatctcggccgaactcgacgtccagcaagccgcctgctcgtgttccatctcttcaaccatcagcttccgtggaacacactgatcacgttgtctgttgatcaatcacttggtggagtaattttctagagaccggtcatcaccctgaagactcgtgacattttattttcttagtcttcggctcttctctgcaacaaagacaagccccgatcacgttgtctgttgatcaatcacttggtggagtaattttctagagactggtcatcaccctgaagactcgtgacattttattttcttagtcttcggctcttctctgcaacaaaggaaaaagaacaagtggttcaggagaagccacaaagcgaggagtttgatctgatctaggtggcatttcccagttgacattagcgccaaggatgatccttagttcattttatatttatcttttattttgtaataagacttccgctatgtaataaatactctgatgtttttaagacattatctctatacactctgttattatatatgttgtcttcttggcgcatgtatgaaatgcacctggctttgttccttaaagcccgggtgttacactttgactatttacaaaagattttgaaaggatttttccaaaagatttgcaaaaacaaataagtggtgcaaatgtggtccaaaatgttaaataagagaaaagcaatcctgtcggcgtttcg

SEQ ID NO: 65581 - DNA, 3097 bp, Zea Mays
agccacagaggtaacccatggggtgcgcgagctccaaggccaacgccgacgtcgcggtggccgacgtctactgcccgccgcccaccagtctgaatctggttaagtctgaacagctcaaaaattctactaaaattcagtacttcgccatttggtgtgttgaagtcgtttggttgccatatacctctagcctagcctgtattaggccagattgtgtggatacatacagtagcagtttgttttgttgtatgtcttaattaagagtggacattatgtatcctacctctttagaacatggataaggaaacatgtttcattttgttgccatacacctctaatctatcctgtataggcgagaccgtgtggatgcagttgcagtttgcttcattagctgaattaattaagaatggtcataaaggatggtttttttttgcccgtataaatacatgctgcatgatatgaaggttgaaaccatgtgtataatctgaagttctttccctactaatgtgcttctgcagttctttcagcctactaatgtgcttctgaagttctttcactacatgtctggacagctcataaaggatggtttagtaatgagggcgtgtctgatcatttgttggacagttctttctcaagtattctttctcaagtatacttgagaaaaaatatggttttctcaagctaaatgggcgtgtctgatcatttgttggacatgtctgatcatttgtgcttctgaagttctttctcaagtattctttcactacatgtctggacagttctttcactacatgtctgcagttctttcagcctactaatgtgcttctgaagttctttcactgcagaaaaccatattctttcagcctactaatgtgcatcatcgagtactaccattttcccactgcctctaccaaatgatcagcaacaaccagtttcccatttgctgctcatttcgttccaaacatcatcgagtactaccaaaaccttgctcccatttagctttttctcaagtattctctgaactagatctaagttactgatgctgttcaagtcagctgatatggagccatcccatgaaaccctgctggttccacctcttttccttttatgcctacggcatttctgtgactgtaccatctcttttgtgaggcgtttgacaccaaatttttctgagacatagagccatgccatgatgtcaaaatgtcctatatcacgaaaatggctgtataccctctgcagtagcgcagttttaccaacgccggcgactccaactattgctattacagaatatggttttctgcaccaatcatttggttgttgctgctgctggtagaggcagtggtgttggttgttgcggaggatgaagagttaacagtacttcgccaaattagtacttcgccaaatgtatcagtacttcgccaaattagtgtatcagtttcaattttatagcagttttagttctagcacttttagcaaatgtatatagcagtttcatagcagttaactgcataacattcatgccattctcttgtagaaaaaacagaagacaagtgttccaacaactaaacctccaaacttgcgaccaagaccacaaagacaaagtgttccaacaactaaacctccaaacttgcgaccaaggccacaaagacaaaatgctcaacctcaagacgaacaagcgattgctgatttgcagacggtgggagattttctcactgacaatgttgaagtttccgaggatgatccaatcaatgctacaaaaaagaggcctgcaaggggcataactaagatggagggaatattctcaaggtcacctgaaatgccaaaaatcaaaattttactcaatgatcgaggtcagcctattggtaaaagtgctagacaactttcaagtgctattgggtgtcaagttagaaagaaattgtctattgctaccacggactggaggcttgttgatataaacaagaagtatgagttgtgggaggatataaagacatattatgatgtagatgctgctgccttaaactgggttatgcgcacagctggaaagaagtggaagcaatttaaagcatccataaagcaacgatacttcaatcctgaattgtctataaaagaaattccagaatgtcctgataagagggttaatgatgatgattggcactctatgtacaactattggatgtcttctgaatttcaggatcgctcagaaaaagctaaaataaatcgacaaaagctaaagatgcaccatacagccggcagtgaccaacttaatgatgttcttggagtatatccagagttaaaggaccgatcaattcaagagggtgatgcattctctattgtttgtggaccgaaagagccaaaaggatatgttcgtgttttgggtttaggccctactcctcaagatattggcactccagagttgaagtcttatactgcaacaagactacaaatggagattcttgctcgtacaaaggttcaaagtgagaaggctgctttagaagagcgtgtacttgagctacagactcaaattgagcaaagggctcaaccagaccgggcaagtgaagagcccatgtcacatcgcggctctacttcatttcaacataaggtgatgaggaacaagtttgctgctgaggatgaggaagacaatgaagaatattgtgcttctgaagatgaggaattagatgatgaggatgatcaaatatttcatcagatgcaaggtgctaactcaccaagatctacaaggcactttgctgaagcttcacactctaaacatgatgatcttgttggaaaagatgtcatattatatgctatgttgagatctgatttgcctgtggctaaagggacaattgtttctactaaaccaagcaccacagttggaggccagatccttggaaggcaatattgtgaagttattgtaacttgtgtgataaaacgagatacagttttgcctcgcccttgtgcaaatgtggaaactatggctgatgcttacatgatgtcagttgcatggccgtacaagaaactgaagttggtgcataaggctgcaacaccgtctagtggaggtagcatcaaaactgtatttttatttgcaaatgtagcaacaatatactaa

SEQ ID NO: 65582 - DNA, 2289 bp, Zea Mays
ctaaaataactcgtcgttctcgtaggcagcgcgccagcgccgccgtctactctcctttcttgccgcgcggcgccgccgtctactctcgctcaccggaatgccgtcccagcctcagccgagctccatcggcggaacctcccagaccccggcgccgttccagaccgcgcccgtcttcaccggcggaagcccccggaccctggcgacgctctccgctcagtccgtcccccgcgtcacgcggagaagcattgcgctcgtcgattggtgtttggagagggtggagggcgaggagggcaagatccgcgtcgctggaaccacctacaccccgcaaacgagcccgcaaacgaggagagaagcatcgtcctcaaagggaagcaggaaagtggcaggccgagtgttcagatcatctgctattgttaggcgccatgatcacttcagaattatgtccgaggatggttacctcatacggataggctgtctcttgaatattcccaaaacacgtaacaatggattttctgaagaggtgtgtgaatgctttgagtttggctttccaattcaatggcacaggcttgttaatccaaagatggtgcccgataataaacatgcactgtcaccatcagaaacaactgctagtgcaccaagtcattcagttggatattacatggagaagttcttaagtgacagtttttccaattctaacagatattctttcacagagaatgattcttacacatctgtagtgtgtactggcagcagaaatggacttactacccaaaccctttcaaacttaccagatgataatgcaggaaacataactgtatcttggggattatatggcctcgggatggacatgtctgagaaaccttggacaccacctgcagaagcgtgtaataatagacaagaaagtgatcaacatgaaagtatgcaaatagatgcatgtaaacaagagttagttaatcgctccatgagttctgtttcagttaagcaaagtataagttccatcagccccaactcaaaagtagacggcaacagaattgtaccatccaaaattatgtcagttgtgaatgaaagttacaggagcacagtaggttgtggtcaggctgaggaagacgttggtattcagcaagagaaaaagcacagctgttcaagtgagcatggaatggttactctttctattaactgtacatcctctcaactaggtgcaccaggaattccaaaatttgggaaagattcagtgaacctttggactacagatgcattagaactatcaactgaagggatgactccaaagattggagctgacagtactgacaggagattacgaagtggcaaaattcttggaatgccaagtggtggactaatgaatagaggccacaagctgaaaaagatcaagcaggaagcatccagtaaacagatggttaatcaaggggctacatgcactgtggatctgacttctcatgaaaattcatatgaagctttgctggaatgctgtcaagcaatcatgtgacttgttgaatcgttactgggcaaagacctgtacggcctatttggtaggtctcattagatgtcaataattgcaggatttttcagcagctgagattgtcgttgaagaaaagctggaatcacatagttcatgccttaaaggacgaggaggaccagcgaaggggaagaggaagagggagagatggtaggattcagcgtgtctgttttcaagccggatgtgaaccgtgtttcagtttgtttctcggcttgagtagctaacttatgtagatgggtcgtgtgtgccagttccatgagcagatggtgccactaagggtgtgtttagtttgaggtcaaagtaggatgagtcaggggcgacatcgttccctcgactttttgggatcacgtcgccacaaaaaactactccggggtttttctcgctcatgcgtgattctcatccaaacactgttgaaactgtggtcactctatttcattcctccatttacatccaaccaaatacactctaatttacacgcctcacctctcagttactatccttaggacttgtttgggagcgaggatactggaggggatctgagggactgaaattaacaaggggattttagctcatcgattccctccggtattcttgcttccaaagaagcatttagtgagtcctggactctcagctatttctagtataattaaccttgcgcattgctgtcggaattcaagaatttatttctcccattgctgtggagtctttttttataatcgaatattacattaaaccaaaagattagaacaccaaga

SEQ ID NO: 65583 - DNA, 1644 bp, Zea Mays
acacggtcacacacaccacaacccagccacccaccacctcccccaattgcctcttctcttctcccagcagctgccgcgacgcagtcctactcctgcggtgcctccagtttcgcagcaccgttgccacacatcgccaactaacgccatcgatcacccggcggccgcccagagtcctgccctgccatatccgaacctgctcctgcagctagccagcaacacagacagaataggtcggtcggtcgatcgatcgatggccagcgttatcgacggcaatggaggcagccggctggtggtgacggagctgggccacctcaaggagctggcgatgcagctggaggggcacctcggcggctcctcgccggacctctgcaagcacctcgcctcgcagatctcctccatcaccgaccgctccatcagcctgctcatcaccgccacctcatcaagcccccacggcggcgcctctgacgcgccgcccttcatcagggctactaccaagaaaaggaagaggatggacaagaagaggcatgaggtgagggtgggctcggccggaggcggcggcggcgaccatccggccgacgacggctacagctggaggaagtacggccagaaggagatccttggagccaagcacccaaggtgcccacttgacacatgctgtgctatcagaagatttttttcccccctccttcatcttttccacactccacagcccaatctcatctgcacgtgttcttatcgcaacttcgcaagtggaatcgaaatcattttgcctctgctttctttgtcttctttccatggcggggctgcagctagtattgtcctggtggaaatgggctactaccgctgcacgcacaagagctctcagggatgtgcggcgacgaagcaagtgcagcgcaccgacgaggacccggccttcttcgacgtcgtctacctcggcgaccacacctgcgttcagagccagagggcggcagcgacggcgggtcgtcaggctgccgcggacgcgcaggcgccggagtacgacgccaacctcatggtgaagaccgaggggccggccctggagccagagcagcagcggcggggctgggaggacgcgcccacgccctttctcttctcctccacgccggcgtgccttgtgccggagcgcagccccttctccgcaccgtccacgtccgagaactggggcgtgtccccggcgacctcggactccaaccacgtcgtctctttcccgcctttcgaggtcgccgccgccgctgccgcgcagttcgagttcgaggaagtcatgtcagcgatcgacagagccgacggcgagtttctcgaggacctcgacatctatgtctcaagcttcttagcgtgatctgctggatgtaatgtaaccgatgaacgctagggaatgggaatctgaggcagctgttaccatgagttgctctctgccgtttgtccaggggcagagcagggaagaacacatgttcttcctcggcccgtcccgttgtaaaccttagggtgtgagaatattgaatgtcccatctctctctctctttttcttcggtcgagggtttgcaaggaaaacaatttcgtaatagtgctgtcagttcagctaaacatgtgagtttctcgtgaatttaaacatttttccaacgtataaca

SEQ ID NO: 65584 - DNA, 1744 bp, Zea Mays
acacggtcacacacaccacaacccagccacccaccacctcccccaattgcctcttctcttctcccagcagctgccgcgacgcagtcctactcctgcggtgcctccagtttcgcagcaccgttgccacacatcgccaactaacgccatcgatcacccggcggccgcccagagtcctgccctgccatatccgaacctgctcctgcagctagccagcaacacagacagaataggtcggtcggtcgatcgatcgatggccagcgttatcgacggcaatggaggcagccggctggtggtgacggagctgggccacctcaaggagctggcgatgcagctggaggggcacctcggcggctcctcgccggacctctgcaagcacctcgcctcgcagatctcctccatcaccgaccgctccatcagcctgctcatcaccgccacctcatcaagcccccacggcggcgcctctgacgcgccgcccttcatcagggctactaccaagaaaaggaagaggatggacaagaagaggcatgaggtgagggtgggctcggccggaggcggcggcggcgaccatccggccgacgacggctacagctggaggaagtacggccagaaggagatccttggagccaagcacccaagctagtattgtcctggtggaaatgtcagtacagcctctttttgcttgtcttgttttgcaattgtttggctggcctccactttttgtccgatgtcgggggcgaacagggattcatcatatcgtgcgaatcttgctctggatgcacaagaaaattctctcttctccttctcctcctcctcctcctcctcctcttttttcccctaacaaacaagatgccggagctcacaagcaaaatctcatgggcctgcctgacctacctgcccggacctgacatgatccaccgtgcgaaatttccaggggctactaccgctgcacgcacaagagctctcagggatgtgcggcgacgaagcaagtgcagcgcaccgacgaggacccggccttcttcgacgtcgtctacctcggcgaccacacctgcgttcagagccagagggcggcagcgacggcgggtcgtcaggctgccgcggacgcgcaggcgccggagtacgacgccaacctcatggtgaagaccgaggggccggccctggagccagagcagcagcggcggggctgggaggacgcgcccacgccctttctcttctcctccacgccggcgtgccttgtgccggagcgcagccccttctccgcaccgtccacgtccgagaactggggcgtgtccccggcgacctcggactccaaccacgtcgtctctttcccgcctttcgaggtcgccgccgccgctgccgcgcagttcgagttcgaggaagtcatgtcagcgatcgacagagccgacggcgagtttctcgaggacctcgacatctatgtctcaagcttcttagcgtgatctgctggatgtaatgtaaccgatgaacgctagggaatgggaatctgaggcagctgttaccatgagttgctctctgccgtttgtccaggggcagagcagggaagaacacatgttcttcctcggcccgtcccgttgtaaaccttagggtgtgagaatattgaatgtcccatctctctctctctttttcttcggtcgagggtttgcaaggaaaacaatttcgtaatagtgctgtcagttcagctaaacatgtgagtttctcgtgaatttaaacatttttccaacgtataaca

SEQ ID NO: 65585 - DNA, 731 bp, Zea Mays
acacggtcacacacaccacaacccagccacccaccacctcccccaattgcctcttctcttctcccagcagctgccgcgacgcagtcctactcctgcggtgcctccagtttcgcagcaccgttgccacacatcgccaactaacgccatcgatcacccggcggccgcccagagtcctgccctgccatatccgaacctgctcctgcagctagccagcaacacagacagaataggtcggtcggtcgatcgatcgatggccagcgttatcgacggcaatggaggcagccggctggtggtgacggagctgggccacctcaaggagctggcgatgcagctggaggggcacctcggcggctcctcgccggacctctgcaagcacctcgcctcgcagatctcctccatcaccgaccgctccatcagcctgctcatcaccgccacctcatcaagcccccacggcggcgcctctgacgcgccgcccttcatcagggctactaccaagaaaaggaagaggatggacaagaagaggcatgaggtgagggtgggctcggccggaggcggcggcggcgaccatccggccgacgacggctacagctggaggaagtacggccagaaggagatccttggagccaagcacccaaggtacaggacgatgattcggcggcgctcttgcatatccatttccgtggcgcgttgctggctgcacctcccctggactggacaaaatgctgattgat

SEQ ID NO: 65586 - DNA, 1326 bp, Zea Mays
atggcgacccgtaggatggagcagtgcgcgtgggtggcggaggtggagcgggcggtggccgacggcggcgcgtcgtcggaggagtcctcgcggtggcggcagcagtgcatctaccgcgtgccgacgtgtatcaagaacctgaaccgtaaggcgtaccagccgcaggtggtgtcgctgggcccgttccaccacggcgagccccagctgcggcccatggacacgcacaagcgccgcgccctggtccacttcctgcgacgcgcgcgcaagcctctggcggcgttcgcgggcgcagtcgccgcggcgggcgagcggctggaggccgcgtacgaggggctcggcgacgagtggcgcgtcggcggcggagcggctgagaggttcgtggagctgatggtgaccgacgggtgcttcctcctggagacgatgcggacggccaccggctgggaggtgaacgactacgacggtgaggaccccgtcttcagcgcccacggcctgctctacaacgtgccctacatccgccgcgacatgctcatgatcgagaaccagctgccgctgctcgtcctggaccgcctcctcgccgttgagaacggcaaggatgggaacgaggatgtgatcaaccggatagtgcttctgtttctgtccccgacggcggcgtggccgctgacgacgggcaccggcctggctctccatccgctggacatgttccgcaggagcctcctctgcggtagtccgacgccgtccggcggccctcgtgcgccgccgccggactcgccggacgacatcatcaggtcggcggaggagctgtacgaggcgggcgtcaggttcaggcgcagcgcgacgagcagctttttggacatccgctttcacaggggcacgctgtacctgccggccatcgtcgtggacgacaccaccgagtacgtgctgctcaacctgatggcgttcgagcgcctgcacgtgggagccggcaacgacgtcaccgcctacgtcttcttcatggacaacatggtggactcggcgcgtgacgtggcactgctcacgtcgcggcggatcgtgtacaacaccgtgggcagcgacaaggcggtggccaagctcttcagcggcctgtccagggacgtggtgctggagccgcacagcgcgctggacgacgtgcaccgggaggtcaatgcctactgccggaagcgccggaaccggtggcgcgccaacctggtgcacacctacttccggagcccctggtcgttcctctccctcgctgccgccgtcttcctcctcgtcatgaccgtcttgcagactgtctacaccctcctaccgtactacagcgacaagagctag

SEQ ID NO: 65587 - DNA, 2301 bp, Zea Mays
aaaatatattacaaggtatggacaaatttacagagcaatgtttgattcctaaattacaataccttttacaaagataaatcaaatttctctagagctttttgcagcagcttcatcagtatccgtcaagcttcggatcattgaccttcggcttcgtcatcttgtacataacaaagcgatataaggtaaatagaaattttaggagaaggtaagcaacaggtacaagtttaataccggcttaacatgacttcgagcttcgtcaccagctataagttccgcccacccttcgtccaaatttgagttatgaatctatttccaatgcttcgggtcaggctggggatgtcagttaaatccgctggtgataggctgaagtttggcctgtttacgatctttctgtgcgtgcaatgtaatacccaacttgcaatttgtggaagatagcctaagaggagaaatgatattcctttgtatatatgtgtgttgtccatatttatcatctcatgagaacatcacaggagaacaaataaataaataataaaaagatataccattaaatcatgtgacatgctggagtttatggtttgtgcatttaatgaaaagagtaatgccactaatagaaataaattagtggcaaaaaaagcaaggatttaatacctaatttgagagtttgaaaaagagaagatatataaaatataaagaaagtttatgtgtatttccaaaatttgtaccttaaggtcacaatataacttgaagataaattttggcacaagatttgaatgtaaatttgaattccagaaattgaaaagggagaaaaagaaaaaagaaaacaaaagaaaaagagaaagaagcttacctgggctcactggtggctattcggcccaccaggggatttccctcgcgtggcccaccagccattctctgcgccgcgcgtaagtcctcgtgctcctcctccctggttcctgcgcgcatggcgggcggatggttgtaaaccaaccaacgatttgaccgggggtttgggtggtgatttgcccctcgatctgagtataaagatccgggcgcgtccgcctcctcccacctaccttcacgcgaatccgttgatcaccacaaaccgcaggggaaaactgggagccttccgccgccgcgaggacaggcttcaatacccgttcgtctagccctgggatttggttcttgtgctcggcccgaccactggaatcgtgtggtgctgttggtttccctcgggcacctccgtggcggcgataattcctcgccggagtaccatccttgccgctgcttcgccctgcgtcgtgactggccctgccctggtctccgcctctggtaagaagctatcctagtgattcggttttgtttcctctgcgcgtagcaccgattccatctgagtaattcgcaccgaggcgccaaatcgtgggtcaccggcaatggtgccaccgtagtgcatgtgacaccccagtgtcacctagggtttctctcaaatgccaaaccaagaaccattatttcatgtgaaccaaagtaagcatgagcatcaaattaacttaagtaataaagaattcaccaagtatatatacttaaaagtgtcatgatcaaaacaattgagtcttttaaaaaggtaagaatgtgcaaccctaataaaaactctaagtgagccctatgagcaaaattcaagaaaataagagaaagggaatgaaaagtttaaaattttgacttgagccaattatataagttaaagtatatttattgagcaacaagaaaggttgagaaagcttagccaaaataactcaaataaatccccaaatcagcccttgatctatgaacccttagagaaattcagatttctgaatttctgaatttcagacctcttcccaaagatcatctgcgttctctgcttttcaaaactcaaagccaggagatccaaatatcaaagtcgtgccaaattcccttgaacacatcctggaaaaatttgaactcaaaccaaattcatttggcatggttttggcgcagcttgacctcgggaccaggcattctgacactggcaccttggtgacgctacaactccctgtccctagcctaaaaccgcgcgatgtccatacacaaaagacaaagcttggtcaggtgaacaaatccttcacagcgatcttgcccaaattcgtgaagatttgctcccaatcggcgcttgaacaggggcagaggcaacgggaacacgtgttcgaccgtggctgacacccccggttcacgcctgttcgcgcaccgcgcctcccagtgcacgcccgcgcgcactcgccagtccacgac

SEQ ID NO: 65588 - DNA, 2349 bp, Zea Mays
ccgagacctccccttcgtcctagaccacttcaccggagcaatctcgccgccggtaagccccttcgccctttcttccgccgcggttactgtttaaggtagaagaaggacctcgggttaggatttgtagaacccgaggggttttctgcaacgtcagtgactcatgtgaatagtagcctaaggactgatccgcgaagaaaacttaaaaacccgccagggaccccagtgcaaagtggatttccatttaaaccaattctgttattctttttaaatgaccagagaacttaggaaacccataacttgatgaattcttcataaaaagttgtcaaaccaattttgctagctcttgaatattatgaactatcatttaaaaataataaaccctatgctttttgttctaaattttagagtttgaatttaaaaacagaaacccaccaaaccttgtttaattaaggaaaattagtttttcttctgtgctgaacttaagaaaatttgtagatgttcaaaccttatttagacactgtttaaaaatagtaggaaccccagcattagaaattatgatgtagttattcatttaaagcaattttgcctaaaacttaggaaaaatcagaagggcattagaattaatgaacagtgattaagattatttttcctagtttacttatgtaacagagaatctaggaaaaatacagagaccattactttggaccagttttaaattaaaaggattcatttagccttatgtagactgaaaatcaattattaaagaggcaaagctatcaccaaaatgaataataaaaatccagtggacttacaaacaccagagccccactacaaaaatacagagcacctcagcccaactttttaagtaaggaaattaaatgcaaagtgataataaggcattttccaaataaatcatgaacaaccccaaataatatgataatgggcaaccaaaaattagctaagttcgtaatgagataaaccaccagagaaaaatgccaacccataaaaaagaagcaaactcataccaattgctaaggatttaagagaaagactacttaattcaaataatgcataccaccccttcccttaagcaaaaagatgccaaacttcagaatgattgctcttgcacaaaataataactaagaaaaataagaactctgttgtttgatgcttatcaaatatagtagtactagaaagcacccattgggctagaaacatgagaaagccatagaaaaataattaaaaggtattaatgattagaaatttatatcaagccatgttataacacctaaaagccagcaaaaatgagttttgaaggatgacccactgttaaataatagttgtagttcaaatcaccccttctgccctagaatttaataattttgtccagagaaaactattcactttctgatccccaaaatttgagacagagaaacacacaccagtaacaagccactgtaatgtttacagaatttttagaattttataaaagcaacttgtagttcaaacctactccaaaacaataaagagaataaaagaaaagggaagaagaaataaaccccacctcaataaatctaacttgagtacttatcaattctcactaagacttaacaggaactcggtggaaccccaaaatttaatttacttaccttaactaagtttaacccaatttaccaagtataccacccaagggtcttacataagtaaagttaaccttgtttaactcaagaaagatcatacacctttaaagttgtaatttctaaaagcacatatcatatcatgcatatatcttacgcattgcattcattagattgtaatcttgccgacggagagtacgtgctcatccccgagcaaggacctgtccaagaggaggaccaggagcaggtgtggcagaacctccaagttattgggcccacatgcacccgtccttgtcccaaagacctcaaacgaccatgcatgtgcaccagataactcaacaggatctgtccgattgccccaaggacatcggataaaccactttcaaccagaaccgcgggattaagtaacacaaatcacacacaccaatattgttgcagcggaaatcttactaccaaattttacaggttacaaaaattttacattattttatcggagtgattacaaaattataagtttgaaatgtatgctagctcaagtgaccatcctcattaagaagtatagaagaagtacttagacttataagaaggccgagcccaccggcacttaaacaccatcatcagcagcacaaaactaaacctgaaaaacaacagggaataaaaccctgagtatggaattactcagcaagtcttacccgactaaagaaaagactct

SEQ ID NO: 65589 - DNA, 2198 bp, Zea Mays
cctctcccagttcgcggcgtgctgcaccagccgtcaaccgccggtcagcgcgcgcgctctgctttctgccgttctcatccgctcaggaagaaaaatctcctcgacgctatcctcccgccgccctgctcagatattccttccggtggtttatcttctcacgcggcgctcctccagcctccccaacgctcagcagttcctatctccaagcgtcgctcgctctccctgctagctgcgacctccctagtggcgcgtcgttctccctgcgctcgccggcggagctcccatgccgcgcgcgcccttgccttcttcctccccctgcgtccctattcggttcctgcgcgcgcgctctgttctctcctaccggcacccagccggattcctctacgtcgtgccctgctcgccctctccagcgccagtcgctcctacccatctccctgctccagctctgttgccgcgcgagctcgccgtggagctctgcgcgccgagcttctccctggtctcccatggcgcccagctcagatctcgccctgctcctctgcgcgcagccccctgacgcgttttcctccctgccgagctcgtctcgagctcccgctcaccctctgcccagccgtcgcttgcccctgccccaacgccgtgcctctgttatttacggtcgtcgctctcccagcccggccggatctcccagcgtcgcgccctgttgtcctccctttcccatggccggcgctccgttttcctctgccggctgagtctcctcgacatggagcatctccctgcgcgcgttgaacttctgctcggcgtcctgctggccgaagcttcggattgccgcgccgatggccgagcccggcccgcgccttccctgtcctctgtacgcgcgcagctcgccccctcagctcgtcgcgcgcctgggatgcttgccggcgctcagctccaccgcgctgtgaagtctctgcgcgcaagctatctgttggccgcgcacgaactcctctgcttggcccgtcgtcgttctccagctccttaccgcactcgatcgtttcgtcgtctcgtcttaatgccagtccccacgtgacatctctgacgtatgttcacgccgacaaaagaatcccaagaaaatgtagagaagcaagcctttggtcgatgttcaagtggtcgacgaaaggccagaacaagaatcatcactgtttatgcggagttatacttaatatgaaaagattccaagaattatggatggaagagaaagtgaagcttcgtgctatactcgtcagctgctcgatcgaagacttcaatcgaagactatcgtcgttcccgccaacactgaatcaagttgataacggtacgctaaataatcgcgtgatgcggaagacgacccaagtcgatcccaagcgcgggctactccgcaggatggtgctgatggacgaatcggaagatggataatctgaatgagtgccaagccaaaggatgctcgtcaagtggacgtcgtctaacaacactaacctagtgttactcaggcaagccccggtgcatttgccacctccttgtgttttaaaaatctttttcacttgcgtgatgcattaggtgataggagttgattgctaaaacaattcctgcattaccttccttggatttgattatcttccttgaaatccctgttttacaaaaagatttttgatgcttagccttgcttaagaaaaacaaaatgttttgtttttataaaagatgatgtggcaaaagtgggtgggatgtttttgaaaataaaacttgatggtgaatccatcatggccatgatggattcaacatcggaaaagatgtacctctgccaggtaccaaactttgggtttaaattataaagctgagaccgggcgggtgacttgcacgagaaaggagtctcggtgtagtgtcttcgtctgtgtcgattaaggaccgtaccgattgttggcctgctgatctaggaccctttatctggccacatacctcgtcatgggtaagcttgaacccggctattccatacatgaaaagacaatcgcgcactgggagtggagagatggcgagagtggcacgtaccctcctggcaaaggaccgcctaaaaggggtggtgtgctctcgggtggtgcggacctgttcatgtggtggaggatccgtgggagtggtagacatgtgcaaaagagttaagagaagcatatgtcgtgtggttggagatccct

SEQ ID NO: 65590 - DNA, 2764 bp, Zea Mays
cagccatccatcgcgcgacgcgtgtgccaccagtccgctcgcctttgctcgcatgacagcatttcacggacccgaaatttttcttgaagttaatggagccgagctacatcacgtccgccctccccctctctctccctctccctctctcgacgacacaccaggccaccacgcacatgctttgtcccatggatgccgaccacctcatggtgttcaagaccatgctcgccgtcaggtggtagtcccggcgagcgagatctccccactccaggctctctcccatcgctcgctgccgcctcatgttgtttgcggccgtgctcgccaaccgcggcacggaggcgtcgatccgaccgggagcccttcgcaatggacaaagccttcctcctctccggcaatgagggcatcgtcggctcgtcgctaacgtgagcacgtggcagaccctgctgcccccatccttcttcatcttcactaagtgaggaactctctcgacccccttccccacccttcttgtcttcggagttcggatggctggagaacacggtgtttggtcatggcttctagaaggtggtgttttgcatttaaaaaggaaaaaattggagcataatccaaagctttgtttgcagatggggaagaggtaggagtagctcagcagtaggatggagtggccaggacagctcggtgcccacccgtcttcatcgatcgggaccctcttcccctctagcgagctattcccagtttcgagaacaagattaaaatagcttcgtaggcttttatgtggtttagatttgcatatctatctctcaccattaaagcacaaccagatctggtagcttcagctccaaacaacaagaaacactgagagctgtgaagagtctgagatggcttatgtaagccccgcgactgatgatacatcaacagatctagatactgacgagaagaaccaaatgggactcccttctggaaggtcatcagcttcaagtgcggcttcgctgcatcagcgccaaccgcaatcagacattcatagtcatgagtaccatcagctttctcttttgcttatgttagccagcctgacttctattttccacccccttgtatgtctggtggacacgcagatggccaaaccagagtaccaggctatggagaccggacgagcctccaaaagaaggtgcatgatagggtattttaacagaaacaataaatttcctcgaagcatcaaagtctccagcaacctgcacaggaaaacaaatatttataattatgtcatgttcccaacaatttagtgcaagagtccaaggagaccaccccgcgattcgtcaacgtctccgggatggcgaagccgcaacccgacgcctccctgtcctttttgttacctccggacgccgctgccgaggggctgcatgacatgattctgaatgctcgcgacgaccttgatgttttatctccgtggtcggtgggggcgtcggcgtgtggtgtaggcagatgagggaggcgacgatgttcttctgtggtgacccatcgacgccgcagtgggtcgaccaacaccatcaccacatggagattcacaggtatgtatcctggcatgcagattcaccggtatgtatcccatcatctctattctatgcaatggtttgttgaactttttttattcagggttgcaaatggatctacattattgaagagatttaggaaaccatcaccgaacaacaacctattagaggttcacagttagttatgcttcttttcaattgtgctgggaaatattgctgaaatattctatcctgaaaaaaggttcatcaccttatcagaatgtattgcccctaaatatcgtttagttggtgattgttaactcaattttcacaattaaatatgcttgtgtacaatgttactttgaaatcgtatgaacatgttctatcctattgtcattcagtgtactcaacatgcttacgatatctgcactgtggaccagggctctcttctgaagcagctagcaaacaagagtatcagtggtggtgtagctgttgttctagctgaaacgaacaagtaagagatggagatggacatagcaaagctagaagttggcttcatgggaacatctgtaatatgtaggagtgacgctcctctaattctagcagacttgaggaaggtttctgtttcgaaagcacgggccattattgtgttaacatctgataaaaatgcagaccaacctcgacaaacctgaagtttgaacgtatgacagatgacatcttggttacttttgtggatggacatcttggtcgcttttgtggttggcttttgtggatgcgtgaagctacaattgtagttgtgtaagatttatgtgcataactatgtgggttgcatcagctctccgtactatgtatatacctcccgcgtagctgcctacctatccctaacttgcgacccataaacgtagacttcgatcctataatcttatttgggatcagtttcaggctgtaatagccctgaccgtcttactatggaacacgttaaagtatggtctaaaactttaatgcggattatgttcggtctatctatgtttggtctcatagttgctttgttgctccccgcgctaaacggttttattggagacttaatcatcctttgctgaattttaatatagcatatataattgtttgctcatgttttaccttgtgttggatagggcgcccgaatgggcgccacatgatccagtaatataaataaagaagcttaaatatgataaagatacaaactctcattgatactcgat

SEQ ID NO: 65591 - DNA, 2533 bp, Zea Mays
ctcgcctttgctcgcatgacagcatttcacggacccgaaatttttcttgaagttaatggagccgagctacatcacgtccgccctccccctctctctccctctccctctctcgacgacacaccaggccaccacgcacatgctttgtcccatggatgccgaccacctcatggtgttcaagaccatgctcgccgtcaggtggtagtcccggcgagcgagatctccccactccaggctctctcccatcgctcgctgccgcctcatgttgtttgcggccgtgctcgccaaccgcggcacggaggcgtcgatccgaccgggagcccttcgcaatggacaaagccttcctcctctccggcaatgagggcatcgtcggctcgtcgctaacgtgagcacgtggcagaccctgctgcccccatccttcttcatcttcactaagtgaggaactctctcgacccccttccccacccttcttgtcttcggagttcggatggctggagaacacggtgtttggtcatggcttctagaaggtggtgttttgcatttaaaaaggaaaaaattggagcataatccaaagctttgtttgcagatggggaagaggtaggagtagctcagcagtaggatggagtggccaggacagctcggtgcccacccgtcttcatcgatcgggaccctcttcccctctagcgagctattcccagtttcgagaacaagattaaaatagcttcgtaggcttttatgtggtttagatttgcatatctatctctcaccattaaagcacaaccagatctggtagcttcagctccaaacaacaagaaacactgagagctgtgaagagtctgagatggcttatgtaagccccgcgactgatgatacatcaacagatctagatactgacgagaagaaccaaatgggactcccttctggaaggtcatcagcttcaagtgcggcttcgctgcatcagcgccaaccgcaatcagacattcatagtcatgagtaccatcagctttctcttttgcttatgttagccagcctgacttctattttccacccccttgtatgtctggtggacacgcagatggccaaaccagagtaccaggctatggagaccggacgagagtccaaggagaccaccccgcgattcgtcaacgtctccgggatggcgaagccgcaacccgacgcctccctgtcctttttgttacctccggacgccgctgccgaggggctgcatgacatgattctgaatgctcgcgacgaccttgatgttttatctccgtggtcggtgggggcgtcggcgtgtggtgtaggcagatgagggaggcgacgatgttcttctgtggtgacccatcgacgccgcagtgggtcgaccaacaccatcaccacatggagattcacaggtatgtatcctggcatgcagattcaccggtatgtatcccatcatctctattctatgcaatggtttgttgaactttttttattcagggttgcaaatggatctacattattgaagagatttaggaaaccatcaccgaacaacaacctattagaggttcacagttagttatgcttcttttcaattgtgctgggaaatattgctgaaatattctatcctgaaaaaaggttcatcaccttatcagaatgtattgcccctaaatatcgtttagttggtgattgttaactcaattttcacaattaaatatgcttgtgtacaatgttactttgaaatcgtatgaacatgttctatcctattgtcattcagtgtactcaacatgcttacgatatctgcactgtggaccagggctctcttctgaagcagctagcaaacaagagtatcagtggtggtgtagctgttgttctagctgaaacgaacaagtaagagatggagatggacatagcaaagctagaagttggcttcatgggaacatctgtaatatgtaggagtgacgctcctctaattctagcagacttgaggaagcctcgacaaacctgaagtttgaacgtatgacagatgacatcttggttacttttgtggatggacatcttggtcgcttttgtggttggcttttgtggatgcgtgaagctacaattgtagttgtgtaagatttatgtgcataactatgtgggttgcatcagctctccgtactatgtatatacctcccgcgtagctgcctacctatccctaacttgcgacccataaacgtagacttcgatcctataatcttatttgggatcagtttcaggctgtaatagccctgaccgtcttactatggaacacgttaaagtatggtctaaaactttaatgcggattatgttcggtctatctatgtttggtctcatagttgctttgttgctccccgcgctaaacggttttattggagacttaatcatcctttgctgaattttaatatagcatatataattgtttgctcatgttttaccttgtgttggatagggcgcccgaatgggcgccacatgatccagtaatataaataaagaagcttaaatatgataaagatacaaactctcattgatactcgat

SEQ ID NO: 65592 - DNA, 2698 bp, Zea Mays
aaatttttcttgaagttaatggagccgagctacatcacgtccgccctccccctctctctccctctccctctctcgacgacacaccaggccaccacgcacatgctttgtcccatggatgccgaccacctcatggtgttcaagaccatgctcgccgtcaggtggtagtcccggcgagcgagatctccccactccaggctctctcccatcgctcgctgccgcctcatgttgtttgcggccgtgctcgccaaccgcggcacggaggcgtcgatccgaccgggagcccttcgcaatggacaaagccttcctcctctccggcaatgagggcatcgtcggctcgtcgctaacgtgagcacgtggcagaccctgctgcccccatccttcttcatcttcactaagtgaggaactctctcgacccccttccccacccttcttgtcttcggagttcggatggctggagaacacggtgtttggtcatggcttctagaaggtggtgttttgcatttaaaaaggaaaaaattggagcataatccaaagctttgtttgcagatggggaagaggtaggagtagctcagcagtaggatggagtggccaggacagctcggtgcccacccgtcttcatcgatcgggaccctcttcccctctagcgagctattcccagtttcgagaacaagattaaaatagcttcgtaggcttttatgtggtttagatttgcatatctatctctcaccattaaagcacaaccagatctggtagcttcagctccaaacaacaagaaacactgagagctgtgaagagtctgagatggcttatgtaagccccgcgactgatgatacatcaacagatctagatactgacgagaagaaccaaatgggactcccttctggaaggtcatcagcttcaagtgcggcttcgctgcatcagcgccaaccgcaatcagacattcatagtcatgagtaccatcagctttctcttttgcttatgttagccagcctgacttctattttccacccccttgtatgtctggtggacacgcagatggccaaaccagagtaccaggctatggagaccggacgagcctccaaaagaaggtgcatgatagggtattttaacagaaacaataaatttcctcgaagcatcaaagtctccagcaacctgcacaggaaaacaaatatttataattatgtcatgttcccaacaatttagtgcaaggtaaatctgattcaagaattatatttacctcaaaactaacagccgtcatttgaatcttggcaatgtcatgttcagggtgacttggtaagccaagatagtagacaggagcaatctgggaacaagggataatacagtagctaaaacaataggaacatagagtaccactaatttgtaaacatacatcaataaaagaaacatgtgtgttactgttaataaagctttgaattttaggtgtggactttgtttatgtgtctcagagtccaaggagaccaccccgcgattcgtcaacgtctccgggatggcgaagccgcaacccgacgcctccctgtcctttttgttacctccggacgccgctgccgaggggctgcatgacatgattctgaatgctcgcgacgaccttgatgttttatctccgtggtcggtgggggcgtcggcgtgtggtgtaggcagatgagggaggcgacgatgttcttctgtggtgacccatcgacgccgcagtgggtcgaccaacaccatcaccacatggagattcacaggtatgtatcctggcatgcagattcaccggtatgtatcccatcatctctattctatgcaatggtttgttgaactttttttattcagggttgcaaatggatctacattattgaagagatttaggaaaccatcaccgaacaacaacctattagagggctctcttctgaagcagctagcaaacaagagtatcagtggtggtgtagctgttgttctagctgaaacgaacaagtaagagatggagatggacatagcaaagctagaagttggcttcatgggaacatctgtaatatgtaggagtgacgctcctctaattctagcagacttgaggaaggtttctgtttcgaaagcacgggccattattgtgttaacatctgataaaaatgcagaccaacctcgacaaacctgaagtttgaacgtatgacagatgacatcttggttacttttgtggatggacatcttggtcgcttttgtggttggcttttgtggatgcgtgaagctacaattgtagttgtgtaagatttatgtgcataactatgtgggttgcatcagctctccgtactatgtatatacctcccgcgtagctgcctacctatccctaacttgcgacccataaacgtagacttcgatcctataatcttatttgggatcagtttcaggctgtaatagccctgaccgtcttactatggaacacgttaaagtatggtctaaaactttaatgcggattatgttcggtctatctatgtttggtctcatagttgctttgttgctccccgcgctaaacggttttattggagacttaatcatcctttgctgaattttaatatagcatatataattgtttgctcatgttttaccttgtgttggatagggcgcccgaatgggcgccacatgatccagtaatataaataaagaagcttaaatatgataaagatacaaactctcattgatactcgat

SEQ ID NO: 65593 - DNA, 2842 bp, Zea Mays
aaatttttcttgaagttaatggagccgagctacatcacgtccgccctccccctctctctccctctccctctctcgacgacacaccaggccaccacgcacatgctttgtcccatggatgccgaccacctcatggtgttcaagaccatgctcgccgtcaggtggtagtcccggcgagcgagatctccccactccaggctctctcccatcgctcgctgccgcctcatgttgtttgcggccgtgctcgccaaccgcggcacggaggcgtcgatccgaccgggagcccttcgcaatggacaaagccttcctcctctccggcaatgagggcatcgtcggctcgtcgctaacatggggaagaggtaggagtagctcagcagtaggatggagtggccaggacagctcggtgcccacccgtcttcatcgatcgggaccctcttcccctctagcgagctattcccagtttcgagaacaagattaaaatagcttcgtaggcttttatgtggtttagatttgcatatctatctctcaccattaaagcacaaccagatctggtagcttcagctccaaacaacaagaaacactgagagctgtgaagagtctgagatggcttatgtaagccccgcgactgatgatacatcaacagatctagatactgacgagaagaaccaaatgggactcccttctggaaggtcatcagcttcaagtgcggcttcgctgcatcagcgccaaccgcaatcagacattcatagtcatgagtaccatcagctttctcttttgcttatgttagccagcctgacttctattttccacccccttgtatgtctggtggacacgcagatggccaaaccagagtaccaggctatggagaccggacgaggtatatttagatatttcagctctttattcatctctttaatcaccaatttcttaccagtagtacatgatggcagactgatcaattatgctctcacagcctccaaaagaaggtgcatgatagggtattttaacagaaacaataaatttcctcgaagcatcaaagtctccagcaacctgcacaggaaaacaaatatttataattatgtcatgttcccaacaatttagtgcaaggtaaatctgattcaagaattatatttacctcaaaactaacagccgtcatttgaatcttggcaatgtcatgttcagggtgacttggtaagccaagatagtagacaggagcaatctgggaacaagggataatacagtagctaaaacaataggaacatagagtaccactaatttgtaaacatacatcaataaaagaaacatgtgtgttactgttaataaagctttgaattttaggtgtggactttgtttatgtgtctcagagtccaaggagaccaccccgcgattcgtcaacgtctccgggatggcgaagccgcaacccgacgcctccctgtcctttttgttacctccggacgccgctgccgaggggctgcatgacatgattctgaatgctcgcgacgaccttgatgttttatctccgtggtcggtgggggcgtcggcgtgtggtgtaggcagatgagggaggcgacgatgttcttctgtggtgacccatcgacgccgcagtgggtcgaccaacaccatcaccacatggagattcacaggtatgtatcctggcatgcagattcaccggtatgtatcccatcatctctattctatgcaatggtttgttgaactttttttattcagggttgcaaatggatctacattattgaagagatttaggaaaccatcaccgaacaacaacctattagaggttcacagttagttatgcttcttttcaattgtgctgggaaatattgctgaaatattctatcctgaaaaaaggttcatcaccttatcagaatgtattgcccctaaatatcgtttagttggtgattgttaactcaattttcacaattaaatatgcttgtgtacaatgttactttgaaatcgtatgaacatgttctatcctattgtcattcagtgtactcaacatgcttacgatatctgcactgtggaccagggctctcttctgaagcagctagcaaacaagagtatcagtggtggtgtagctgttgttctagctgaaacgaacaagtaagagatggagatggacatagcaaagctagaagttggcttcatgggaacatctgtaatatgtaggagtgacgctcctctaattctagcagacttgaggaaggtttctgtttcgaaagcacgggccattattgtgttaacatctgataaaaatgcagaccaacctcgacaaacctgaagtttgaacgtatgacagatgacatcttggttacttttgtggatggacatcttggtcgcttttgtggttggcttttgtggatgcgtgaagctacaattgtagttgtgtaagatttatgtgcataactatgtgggttgcatcagctctccgtactatgtatatacctcccgcgtagctgcctacctatccctaacttgcgacccataaacgtagacttcgatcctataatcttatttgggatcagtttcaggctgtaatagccctgaccgtcttactatggaacacgttaaagtatggtctaaaactttaatgcggattatgttcggtctatctatgtttggtctcatagttgctttgttgctccccgcgctaaacggttttattggagacttaatcatcctttgctgaattttaatatagcatatataattgtttgctcatgttttaccttgtgttggatagggcgcccgaatgggcgccacatgatccagtaatataaataaagaagcttaaatatgataaagatacaaactctcattgatactcgat

SEQ ID NO: 65594 - DNA, 2556 bp, Zea Mays
aaatttttcttgaagttaatggagccgagctacatcacgtccgccctccccctctctctccctctccctctctcgacgacacaccaggccaccacgcacatgctttgtcccatggatgccgaccacctcatggtgttcaagaccatgctcgccgtcaggtggtagtcccggcgagcgagatctccccactccaggctctctcccatcgctcgctgccgcctcatgttgtttgcggccgtgctcgccaaccgcggcacggaggcgtcgatccgaccgggagcccttcgcaatggacaaagccttcctcctctccggcaatgagggcatcgtcggctcgtcgctaacgtgagcacgtggcagaccctgctgcccccatccttcttcatcttcactaagtgaggaactctctcgacccccttccccacccttcttgtcttcggagttcggatggctggagaacacggtgtttggtcatggcttctagaaggtggtgttttgcatttaaaaaggaaaaaattggagcataatccaaagctttgtttgcagatggggaagaggtaggagtagctcagcagtaggatggagtggccaggacagctcggtgcccacccgtcttcatcgatcgggaccctcttcccctctagcgagctattcccagtttcgagaacaagattaaaatagcttcgtaggcttttatgtggtttagatttgcatatctatctctcaccattaaagcacaaccagatctggtagcttcagctccaaacaacaagaaacactgagagctgtgaagagtctgagatggcttatgtaagccccgcgactgatgatacatcaacagatctagatactgacgagaagaaccaaatgggactcccttctggaaggtcatcagcttcaagtgcggcttcgctgcatcagcgccaaccgcaatcagacattcatagtcatgagtaccatcagctttctcttttgcttatgttagccagcctgacttctattttccacccccttgtatgtctggtggacacgcagatggccaaaccagagtaccaggctatggagaccggacgagagtccaaggagaccaccccgcgattcgtcaacgtctccgggatggcgaagccgcaacccgacgcctccctgtcctttttgttacctccggacgccgctgccgaggggctgcatgacatgattctgaatgctcgcgacgaccttgatgttttatctccgtggtcggtgggggcgtcggcgtgtggtgtaggcagatgagggaggcgacgatgttcttctgtggtgacccatcgacgccgcagtgggtcgaccaacaccatcaccacatggagattcacaggtatgtatcctggcatgcagattcaccggtatgtatcccatcatctctattctatgcaatggtttgttgaactttttttattcagggttgcaaatggatctacattattgaagagatttaggaaaccatcaccgaacaacaacctattagaggttcacagttagttatgcttcttttcaattgtgctgggaaatattgctgaaatattctatcctgaaaaaaggttcatcaccttatcagaatgtattgcccctaaatatcgtttagttggtgattgttaactcaattttcacaattaaatatgcttgtgtacaatgttactttgaaatcgtatgaacatgttctatcctattgtcattcagtgtactcaacatgcttacgatatctgcactgtggaccagggctctcttctgaagcagctagcaaacaagagtatcagtggtggtgtagctgttgttctagctgaaacgaacaagtaagagatggagatggacatagcaaagctagaagttggcttcatgggaacatctgtaatatgtaggagtgacgctcctctaattctagcagacttgaggaaggtttctgtttcgaaagcacgggccattattgtgttaacatctgataaaaatgcagaccaacctcgacaaacctgaagtttgaacgtatgacagatgacatcttggttacttttgtggatggacatcttggtcgcttttgtggttggcttttgtggatgcgtgaagctacaattgtagttgtgtaagatttatgtgcataactatgtgggttgcatcagctctccgtactatgtatatacctcccgcgtagctgcctacctatccctaacttgcgacccataaacgtagacttcgatcctataatcttatttgggatcagtttcaggctgtaatagccctgaccgtcttactatggaacacgttaaagtatggtctaaaactttaatgcggattatgttcggtctatctatgtttggtctcatagttgctttgttgctccccgcgctaaacggttttattggagacttaatcatcctttgctgaattttaatatagcatatataattgtttgctcatgttttaccttgtgttggatagggcgcccgaatgggcgccacatgatccagtaatataaataaagaagcttaaatatgataaagatacaaactctcattgatactcgat

SEQ ID NO: 65595 - DNA, 2295 bp, Zea Mays
aaatttttcttgaagttaatggagccgagctacatcacgtccgccctccccctctctctccctctccctctctcgacgacacaccaggccaccacgcacatgctttgtcccatggatgccgaccacctcatggtgttcaagaccatgctcgccgtcaggtggtagtcccggcgagcgagatctccccactccaggctctctcccatcgctcgctgccgcctcatgttgtttgcggccgtgctcgccaaccgcggcacggaggcgtcgatccgaccgggagcccttcgcaatggacaaagccttcctcctctccggcaatgagggcatcgtcggctcgtcgctaacatggggaagaggtaggagtagctcagcagtaggatggagtggccaggacagctcggtgcccacccgtcttcatcgatcgggaccctcttcccctctagcgagctattcccagtttcgagaacaagattaaaatagcttcgtaggcttttatgtggtttagatttgcatatctatctctcaccattaaagcacaaccagatctggtagcttcagctccaaacaacaagaaacactgagagctgtgaagagtctgagatggcttatgtaagccccgcgactgatgatacatcaacagatctagatactgacgagaagaaccaaatgggactcccttctggaaggtcatcagcttcaagtgcggcttcgctgcatcagcgccaaccgcaatcagacattcatagtcatgagtaccatcagctttctcttttgcttatgttagccagcctgacttctattttccacccccttgtatgtctggtggacacgcagatggccaaaccagagtaccaggctatggagaccggacgagagtccaaggagaccaccccgcgattcgtcaacgtctccgggatggcgaagccgcaacccgacgcctccctgtcctttttgttacctccggacgccgctgccgaggggctgcatgacatgattctgaatgctcgcgacgaccttgatgttttatctccgtggtcggtgggggcgtcggcgtgtggtgtaggcagatgagggaggcgacgatgttcttctgtggtgacccatcgacgccgcagtgggtcgaccaacaccatcaccacatggagattcacaggtatgtatcctggcatgcagattcaccggtatgtatcccatcatctctattctatgcaatggtttgttgaactttttttattcagggttgcaaatggatctacattattgaagagatttaggaaaccatcaccgaacaacaacctattagaggttcacagttagttatgcttcttttcaattgtgctgggaaatattgctgaaatattctatcctgaaaaaaggttcatcaccttatcagaatgtattgcccctaaatatcgtttagttggtgattgttaactcaattttcacaattaaatatgcttgtgtacaatgttactttgaaatcgtatgaacatgttctatcctattgtcattcagtgtactcaacatgcttacgatatctgcactgtggaccagggctctcttctgaagcagctagcaaacaagagtatcagtggtggtgtagctgttgttctagctgaaacgaacaagtaagagatggagatggacatagcaaagctagaagttggcttcatgggaacatctgtaatatgtaggagtgacgctcctctaattctagcagacttgaggaagcctcgacaaacctgaagtttgaacgtatgacagatgacatcttggttacttttgtggatggacatcttggtcgcttttgtggttggcttttgtggatgcgtgaagctacaattgtagttgtgtaagatttatgtgcataactatgtgggttgcatcagctctccgtactatgtatatacctcccgcgtagctgcctacctatccctaacttgcgacccataaacgtagacttcgatcctataatcttatttgggatcagtttcaggctgtaatagccctgaccgtcttactatggaacacgttaaagtatggtctaaaactttaatgcggattatgttcggtctatctatgtttggtctcatagttgctttgttgctccccgcgctaaacggttttattggagacttaatcatcctttgctgaattttaatatagcatatataattgtttgctcatgttttaccttgtgttggatagggcgcccgaatgggcgccacatgatccagtaatataaataaagaagcttaaatatgataaagatacaaactctcattgatactcgat

SEQ ID NO: 65596 - DNA, 2368 bp, Zea Mays
aaatttttcttgaagttaatggagccgagctacatcacgtccgccctccccctctctctccctctccctctctcgacgacacaccaggccaccacgcacatgctttgtcccatggatgccgaccacctcatggtgttcaagaccatgctcgccgtcaggtggtagtcccggcgagcgagatctccccactccaggctctctcccatcgctcgctgccgcctcatgttgtttgcggccgtgctcgccaaccgcggcacggaggcgtcgatccgaccgggagcccttcgcaatggacaaagccttcctcctctccggcaatgagggcatcgtcggctcgtcgctaacatggggaagaggtaggagtagctcagcagtaggatggagtggccaggacagctcggtgcccacccgtcttcatcgatcgggaccctcttcccctctagcgagctattcccagtttcgagaacaagattaaaatagcttcgtaggcttttatgtggtttagatttgcatatctatctctcaccattaaagcacaaccagatctggtagcttcagctccaaacaacaagaaacactgagagctgtgaagagtctgagatggcttatgtaagccccgcgactgatgatacatcaacagatctagatactgacgagaagaaccaaatgggactcccttctggaaggtcatcagcttcaagtgcggcttcgctgcatcagcgccaaccgcaatcagacattcatagtcatgagtaccatcagctttctcttttgcttatgttagccagcctgacttctattttccacccccttgtatgtctggtggacacgcagatggccaaaccagagtaccaggctatggagaccggacgagactgatcaattatgctctcacagcctccaaaagaaggtgcatgatagggtattttaacagaaacaataaatttcctcgaagcatcaaagtctccagcaacctgcacaggaaaacaaatatttataattatgtcatgttcccaacaatttagtgcaaggtaaatctgattcaagaattatatttacctcaaaactaacagccgtcatttgaatcttggcaatgtcatgttcagggtgacttggtaagccaagatagtagacaggagcaatctgggaacaagggataatacagtagctaaaacaataggaacatagagtaccactaatttgtaaacatacatcaataaaagaaacatgtgtgttactgttaataaagctttgaattttaggtgtggactttgtttatgtgtctcagagtccaaggagaccaccccgcgattcgtcaacgtctccgggatggcgaagccgcaacccgacgcctccctgtcctttttgttacctccggacgccgctgccgaggggctgcatgacatgattctgaatgctcgcgacgaccttgatgttttatctccgtggtcggtgggggcgtcggcgtgtggtgtaggcagatgagggaggcgacgatgttcttctgtggtgacccatcgacgccgcagtgggtcgaccaacaccatcaccacatggagattcacagggctctcttctgaagcagctagcaaacaagagtatcagtggtggtgtagctgttgttctagctgaaacgaacaagtaagagatggagatggacatagcaaagctagaagttggcttcatgggaacatctgtaatatgtaggagtgacgctcctctaattctagcagacttgaggaaggtttctgtttcgaaagcacgggccattattgtgttaacatctgataaaaatgcagaccaacctcgacaaacctgaagtttgaacgtatgacagatgacatcttggttacttttgtggatggacatcttggtcgcttttgtggttggcttttgtggatgcgtgaagctacaattgtagttgtgtaagatttatgtgcataactatgtgggttgcatcagctctccgtactatgtatatacctcccgcgtagctgcctacctatccctaacttgcgacccataaacgtagacttcgatcctataatcttatttgggatcagtttcaggctgtaatagccctgaccgtcttactatggaacacgttaaagtatggtctaaaactttaatgcggattatgttcggtctatctatgtttggtctcatagttgctttgttgctccccgcgctaaacggttttattggagacttaatcatcctttgctgaattttaatatagcatatataattgtttgctcatgttttaccttgtgttggatagggcgcccgaatgggcgccacatgatccagtaatataaataaagaagcttaaatatgataaagatacaaactctcattgatactcgat

SEQ ID NO: 65597 - DNA, 2429 bp, Zea Mays
aaatttttcttgaagttaatggagccgagctacatcacgtccgccctccccctctctctccctctccctctctcgacgacacaccaggccaccacgcacatgctttgtcccatggatgccgaccacctcatggtgttcaagaccatgctcgccgtcaggtggtagtcccggcgagcgagatctccccactccaggctctctcccatcgctcgctgccgcctcatgttgtttgcggccgtgctcgccaaccgcggcacggaggcgtcgatccgaccgggagcccttcgcaatggacaaagccttcctcctctccggcaatgagggcatcgtcggctcgtcgctaacatggggaagaggtaggagtagctcagcagtaggatggagtggccaggacagctcggtgcccacccgtcttcatcgatcgggaccctcttcccctctagcgagctattcccagtttcgagaacaagattaaaatagcttcgtaggcttttatgtggtttagatttgcatatctatctctcaccattaaagcacaaccagatctggtagcttcagctccaaacaacaagaaacactgagagctgtgaagagtctgagatggcttatgtaagccccgcgactgatgatacatcaacagatctagatactgacgagaagaaccaaatgggactcccttctggaaggtcatcagcttcaagtgcggcttcgctgcatcagcgccaaccgcaatcagacattcatagtcatgagtaccatcagctttctcttttgcttatgttagccagcctgacttctattttccacccccttgtatgtctggtggacacgcagatggccaaaccagagtaccaggctatggagaccggacgagcctccaaaagaaggtgcatgatagggtattttaacagaaacaataaatttcctcgaagcatcaaagtctccagcaacctgcacaggaaaacaaatatttataattatgtcatgttcccaacaatttagtgcaagagtccaaggagaccaccccgcgattcgtcaacgtctccgggatggcgaagccgcaacccgacgcctccctgtcctttttgttacctccggacgccgctgccgaggggctgcatgacatgattctgaatgctcgcgacgaccttgatgttttatctccgtggtcggtgggggcgtcggcgtgtggtgtaggcagatgagggaggcgacgatgttcttctgtggtgacccatcgacgccgcagtgggtcgaccaacaccatcaccacatggagattcacaggtatgtatcctggcatgcagattcaccggtatgtatcccatcatctctattctatgcaatggtttgttgaactttttttattcagggttgcaaatggatctacattattgaagagatttaggaaaccatcaccgaacaacaacctattagaggttcacagttagttatgcttcttttcaattgtgctgggaaatattgctgaaatattctatcctgaaaaaaggttcatcaccttatcagaatgtattgcccctaaatatcgtttagttggtgattgttaactcaattttcacaattaaatatgcttgtgtacaatgttactttgaaatcgtatgaacatgttctatcctattgtcattcagtgtactcaacatgcttacgatatctgcactgtggaccagggctctcttctgaagcagctagcaaacaagagtatcagtggtggtgtagctgttgttctagctgaaacgaacaagtaagagatggagatggacatagcaaagctagaagttggcttcatgggaacatctgtaatatgtaggagtgacgctcctctaattctagcagacttgaggaagcctcgacaaacctgaagtttgaacgtatgacagatgacatcttggttacttttgtggatggacatcttggtcgcttttgtggttggcttttgtggatgcgtgaagctacaattgtagttgtgtaagatttatgtgcataactatgtgggttgcatcagctctccgtactatgtatatacctcccgcgtagctgcctacctatccctaacttgcgacccataaacgtagacttcgatcctataatcttatttgggatcagtttcaggctgtaatagccctgaccgtcttactatggaacacgttaaagtatggtctaaaactttaatgcggattatgttcggtctatctatgtttggtctcatagttgctttgttgctccccgcgctaaacggttttattggagacttaatcatcctttgctgaattttaatatagcatatataattgtttgctcatgttttaccttgtgttggatagggcgcccgaatgggcgccacatgatccagtaatataaataaagaagcttaaatatgataaagatacaaactctcattgatactcgat

SEQ ID NO: 65598 - DNA, 1796 bp, Zea Mays
aaatttttcttgaagttaatggagccgagctacatcacgtccgccctccccctctctctccctctccctctctcgacgacacaccaggccaccacgcacatgctttgtcccatggatgccgaccacctcatggtgttcaagaccatgctcgccgtcaggtggtagtcccggcgagcgagatctccccactccaggctctctcccatcgctcgctgccgcctcatgttgtttgcggccgtgctcgccaaccgcggcacggaggcgtcgatccgaccgggagcccttcgcaatggacaaagccttcctcctctccggcaatgagggcatcgtcggctcgtcgctaacgtgagcacgtggcagaccctgctgcccccatccttcttcatcttcactaaatggggaagaggtaggagtagctcagcagtaggatggagtggccaggacagctcggtgcccacccgtcttcatcgatcgggaccctcttcccctctagcgagctattcccagtttcgagaacaagattaaaatagcttcgtaggcttttatgtggtttagatttgcatatctatctctcaccattaaagcacaaccagatctggtagcttcagctccaaacaacaagaaacactgagagctgtgaagagtctgagatggcttatgtaagccccgcgactgatgatacatcaacagatctagatactgacgagaagaaccaaatgggactcccttctggaagatggccaaaccagagtaccaggctatggagaccggacgagagtccaaggagaccaccccgcgattcgtcaacgtctccgggatggcgaagccgcaacccgacgcctccctgtcctttttgttacctccggacgccgctgccgaggggctgcatgacatgattctgaatgctcgcgacgaccttgatgttttatctccgtggtcggtgggggcgtcggcgtgtggtgtaggcagatgagggaggcgacgatgttcttctgtggtgacccatcgacgccgcagtgggtcgaccaacaccatcaccacatggagattcacagggctctcttctgaagcagctagcaaacaagagtatcagtggtggtgtagctgttgttctagctgaaacgaacaagtaagagatggagatggacatagcaaagctagaagttggcttcatgggaacatctgtaatatgtaggagtgacgctcctctaattctagcagacttgaggaagcctcgacaaacctgaagtttgaacgtatgacagatgacatcttggttacttttgtggatggacatcttggtcgcttttgtggttggcttttgtggatgcgtgaagctacaattgtagttgtgtaagatttatgtgcataactatgtgggttgcatcagctctccgtactatgtatatacctcccgcgtagctgcctacctatccctaacttgcgacccataaacgtagacttcgatcctataatcttatttgggatcagtttcaggctgtaatagccctgaccgtcttactatggaacacgttaaagtatggtctaaaactttaatgcggattatgttcggtctatctatgtttggtctcatagttgctttgttgctccccgcgctaaacggttttattggagacttaatcatcctttgctgaattttaatatagcatatataattgtttgctcatgttttaccttgtgttggatagggcgcccgaatgggcgccacatgatccagtaatataaataaagaagcttaaatatgataaagatacaaactctcattgatactcgat

SEQ ID NO: 65599 - DNA, 2561 bp, Zea Mays
aaatttttcttgaagttaatggagccgagctacatcacgtccgccctccccctctctctccctctccctctctcgacgacacaccaggccaccacgcacatgctttgtcccatggatgccgaccacctcatggtgttcaagaccatgctcgccgtcaggtggtagtcccggcgagcgagatctccccactccaggctctctcccatcgctcgctgccgcctcatgttgtttgcggccgtgctcgccaaccgcggcacggaggcgtcgatccgaccgggagcccttcgcaatggacaaagccttcctcctctccggcaatgagggcatcgtcggctcgtcgctaacgtgagcacgtggcagaccctgctgcccccatccttcttcatcttcactaagtgaggaactctctcgacccccttccccacccttcttgtcttcggagttcggatggctggagaacacggtgtttggtcatggcttctagaaggtggtgttttgcatttaaaaaggaaaaaattggagcataatccaaagctttgtttgcagatggggaagaggtaggagtagctcagcagtaggatggagtggccaggacagctcggtgcccacccgtcttcatcgatcgggaccctcttcccctctagcgagctattcccagtttcgagaacaagattaaaatagcttcgtaggcttttatgtggtttagatttgcatatctatctctcaccattaaagcacaaccagatctggtagcttcagctccaaacaacaagaaacactgagagctgtgaagagtctgagatggcttatgtaagccccgcgactgatgatacatcaacagatctagatactgacgagaagaaccaaatgggactcccttctggaaggtcatcagcttcaagtgcggcttcgctgcatcagcgccaaccgcaatcagacattcatagtcatgagtaccatcagctttctcttttgcttatgttagccagcctgacttctattttccacccccttgtatgtctggtggacacgcagatggccaaaccagagtaccaggctatggagaccggacgagcctccaaaagaaggtgcatgatagggtattttaacagaaacaataaatttcctcgaagcatcaaagtctccagcaacctgcacaggaaaacaaatatttataattatgtcatgttcccaacaatttagtgcaagagtccaaggagaccaccccgcgattcgtcaacgtctccgggatggcgaagccgcaacccgacgcctccctgtcctttttgttacctccggacgccgctgccgaggggctgcatgacatgattctgaatgctcgcgacgaccttgatgttttatctccgtggtcggtgggggcgtcggcgtgtggtgtaggcagatgagggagattcacaggtatgtatcctggcatgcagattcaccggtatgtatcccatcatctctattctatgcaatggtttgttgaactttttttattcagggttgcaaatggatctacattattgaagagatttaggaaaccatcaccgaacaacaacctattagaggttcacagttagttatgcttcttttcaattgtgctgggaaatattgctgaaatattctatcctgaaaaaaggttcatcaccttatcagaatgtattgcccctaaatatcgtttagttggtgattgttaactcaattttcacaattaaatatgcttgtgtacaatgttactttgaaatcgtatgaacatgttctatcctattgtcattcagtgtactcaacatgcttacgatatctgcactgtggaccagggctctcttctgaagcagctagcaaacaagagtatcagtggtggtgtagctgttgttctagctgaaacgaacaagtaagagatggagatggacatagcaaagctagaagttggcttcatgggaacatctgtaatatgtaggagtgacgctcctctaattctagcagacttgaggaagcctcgacaaacctgaagtttgaacgtatgacagatgacatcttggttacttttgtggatggacatcttggtcgcttttgtggttggcttttgtggatgcgtgaagctacaattgtagttgtgtaagatttatgtgcataactatgtgggttgcatcagctctccgtactatgtatatacctcccgcgtagctgcctacctatccctaacttgcgacccataaacgtagacttcgatcctataatcttatttgggatcagtttcaggctgtaatagccctgaccgtcttactatggaacacgttaaagtatggtctaaaactttaatgcggattatgttcggtctatctatgtttggtctcatagttgctttgttgctccccgcgctaaacggttttattggagacttaatcatcctttgctgaattttaatatagcatatataattgtttgctcatgttttaccttgtgttggatagggcgcccgaatgggcgccacatgatccagtaatataaataaagaagcttaaatatgataaagatacaaactctcattgatactcgat

SEQ ID NO: 65600 - DNA, 2782 bp, Zea Mays
aaatttttcttgaagttaatggagccgagctacatcacgtccgccctccccctctctctccctctccctctctcgacgacacaccaggccaccacgcacatgctttgtcccatggatgccgaccacctcatggtgttcaagaccatgctcgccgtcaggtggtagtcccggcgagcgagatctccccactccaggctctctcccatcgctcgctgccgcctcatgttgtttgcggccgtgctcgccaaccgcggcacggaggcgtcgatccgaccgggagcccttcgcaatggacaaagccttcctcctctccggcaatgagggcatcgtcggctcgtcgctaacatggggaagaggtaggagtagctcagcagtaggatggagtggccaggacagctcggtgcccacccgtcttcatcgatcgggaccctcttcccctctagcgagctattcccagtttcgagaacaagattaaaatagcttcgtaggcttttatgtggtttagatttgcatatctatctctcaccattaaagcacaaccagatctggtagcttcagctccaaacaacaagaaacactgagagctgtgaagagtctgagatggcttatgtaagccccgcgactgatgatacatcaacagatctagatactgacgagaagaaccaaatgggactcccttctggaaggtcatcagcttcaagtgcggcttcgctgcatcagcgccaaccgcaatcagacattcatagtcatgagtaccatcagctttctcttttgcttatgttagccagcctgacttctattttccacccccttgtatgtctggtggacacgcagatggccaaaccagagtaccaggctatggagaccggacgaggtatatttagatatttcagctctttattcatctctttaatcaccaatttcttaccagtagtacatgatggcagactgatcaattatgctctcacagcctccaaaagaaggtgcatgatagggtattttaacagaaacaataaatttcctcgaagcatcaaagtctccagcaacctgcacaggaaaacaaatatttataattatgtcatgttcccaacaatttagtgcaaggtaaatctgattcaagaattatatttacctcaaaactaacagccgtcatttgaatcttggcaatgtcatgttcagggtgacttggtaagccaagatagtagacaggagcaatctgggaacaagggataatacagtagctaaaacaataggaacatagagtaccactaatttgtaaacatacatcaataaaagaaacatgtgtgttactgttaataaagctttgaattttaggtgtggactttgtttatgtgtctcagagtccaaggagaccaccccgcgattcgtcaacgtctccgggatggcgaagccgcaacccgacgcctccctgtcctttttgttacctccggacgccgctgccgaggggctgcatgacatgattctgaatgctcgcgacgaccttgatgttttatctccgtggtcggtgggggcgtcggcgtgtggtgtaggcagatgagggaggcgacgatgttcttctgtggtgacccatcgacgccgcagtgggtcgaccaacaccatcaccacatggagattcacaggtatgtatcctggcatgcagattcaccggtatgtatcccatcatctctattctatgcaatggtttgttgaactttttttattcagggttgcaaatggatctacattattgaagagatttaggaaaccatcaccgaacaacaacctattagaggttcacagttagttatgcttcttttcaattgtgctgggaaatattgctgaaatattctatcctgaaaaaaggttcatcaccttatcagaatgtattgcccctaaatatcgtttagttggtgattgttaactcaattttcacaattaaatatgcttgtgtacaatgttactttgaaatcgtatgaacatgttctatcctattgtcattcagtgtactcaacatgcttacgatatctgcactgtggaccagggctctcttctgaagcagctagcaaacaagagtatcagtggtggtgtagctgttgttctagctgaaacgaacaagtaagagatggagatggacatagcaaagctagaagttggcttcatgggaacatctgtaatatgtaggagtgacgctcctctaattctagcagacttgaggaagcctcgacaaacctgaagtttgaacgtatgacagatgacatcttggttacttttgtggatggacatcttggtcgcttttgtggttggcttttgtggatgcgtgaagctacaattgtagttgtgtaagatttatgtgcataactatgtgggttgcatcagctctccgtactatgtatatacctcccgcgtagctgcctacctatccctaacttgcgacccataaacgtagacttcgatcctataatcttatttgggatcagtttcaggctgtaatagccctgaccgtcttactatggaacacgttaaagtatggtctaaaactttaatgcggattatgttcggtctatctatgtttggtctcatagttgctttgttgctccccgcgctaaacggttttattggagacttaatcatcctttgctgaattttaatatagcatatataattgtttgctcatgttttaccttgtgttggatagggcgcccgaatgggcgccacatgatccagtaatataaataaagaagcttaaatatgataaagatacaaactctcattgatactcgat

SEQ ID NO: 65601 - DNA, 2402 bp, Zea Mays
aaaaaatctaaaccaaacaagctgatcccaacctagcgtcctagcccaatcagctcggctcctcagcccacatatgggccgccgttgcgtgacgcacttcccttcccttgccccctctcatagtctcatccacatcggacgtcggcgcgtcgacgcgtcgtgccgtcgtgctcgttctcgtccataccctgcttggctcctcagtcctccccaccttccccctggccttaaccagcaattcccatatcgccactcccccaaaacgggagctcagcggcggcggccgcaacccctcccctgaaccctaccccgttctacccggccaccaccccacaacatggccctctcccgccgcctcctcccgctcttcctccgccgcggcgcctccatccccacccgcgctctctccacggctgtcgcacctgcggcggtggcctcggaggaggacgaggcggccgtcaccgtcaagggcgtgcgcatctcgggccgcccgctctacatggacatgcaggcgacgacccccgtcgacccgcgtgtcctcgacgccatgctccccttctacctctctcgctacgggaaccctcactcccgtacccacctctacggctgggagtccgacgccgccgtagaggacgctcgcgcccgcgtcgcctcactcgtcggcgccgacccgcgcgagatcttcttcacctcgggcgccaccgagtgcaacaacatcgccgtcaagggcgtcatgcgcttctaccgcgagcgccgccgccacgtcatcaccacgcagaccgagcacaagtgcgtgctggactcctgcaggtatctgcaacaggagggattcgaggtcacctatctccccgtgcgcaaggacgggctcgtcgacctcgcgcagctcgaggacgccatccgcccggacaccgggctggtgtctgtcatggctgtcaacaacgagatcggcgtcgtccagccgctcgaggagattgggcgcatctgcaaggagaaaggcgtgccgttccacactgatgctgcgcaggcgctggggaagatcccgattgatgtgaacaggatggggattgggctcatgtccttgtccggccacaagatttatggccccaagggcgtgggggccctctaccttcgtcgccgccctcgcatcagggtggaaccacagatgaatggtggtgggcaggagcgtggcatccgcagtgggactgttcctacacctcttgttgttggatttggggctgcctgtgagattgccgctcaagagatggattatgaccacaggcgtgtcagtgctctgcagcagaggctgcttgatggcatacgtgcgcaggtcgatgatgttgtcatcaatggaagtatggagcaccgttacccaggcaatctaaatttgtcatttgcttatgtggaaggggagagcttactgatgggtctgaaggaggtggctgtgtcaagtggtagtgcctgcactagtgccagcttggagccctcatatgtgctgcgggcacttggggtggaggaggatatggcacacacttctattcgtttcggcatgggtcgctttaccactgacgaagaggtggacagagcaattgagcttactgtgcatcaggtgaagaagctccgtgacatgagcccactctatgagatggccaaggctggcattgacctcaagagcatcgagtggtcacaacattgaggcagttttcatgacaaacggtcactcgaaagcgtacacggatcgcatacataggcttatggtgctgctggtgagtacgttcatgtggtgctcctacctctgataggattatcacacttttttagctctcacatggggcccgagtgtattcacgagtgctttcttagttgagtatcttgacttcaaaataaggatacttcaaatacttggtaatgtatcgtctgaaatacagtttgaagtagtattgaagcggtgacaatgatgataacctattttagtgctgacaaaaaatgttgttataatctctagttgttacaattcctgcatatgtatttattgtatgcttgatctgaaaaatacttgggccccatgttatccatccacttcttgctcgcgtagttgcggacttggtttaccaaggactttagtcggttgtactggttcttctctctttcatggcgaaatgctcgagcctaccttctaggagctctatcttggtgattttgtcaccctcatacgttgtcttgagtatgtcctatattttcttggcgatctccaatggttgtagacttggtttaccaaagactttacctggttgtactggttcttctctctttaatggcgaaacgctcgagctcaccttctaggagctctatattggtgattttgtcaccttcatatgccgtcttgagtatatcctatatttcct

SEQ ID NO: 65602 - DNA, 2267 bp, Zea Mays
atggcggtaatgagctctggcggccttctacccacgctgtgctgcctctgctacgtgctgtcctccgtccacgttcccctcgccgcctcgctctctttccatttcaacttctcagaccccgattccacctgcaccgcccagaacgcggagctggcctgctccagcgacgcctacttccacagcaccgaggacgcgatcgagctgaccaagaacggcatggacaaccacaacaacaaaagcgtcgggcggctggtgtacacgcagccgatacccctctggaacggcgccaccggcgagctcgccagcttcaccacctccttcaccttccggatcaagcgagcacaaccggggtccccgagcggcgacgggatggcgttcttcctcgcgcaccaccccggacgggtgccccccagcagcttcggcaggaacctgggcctcttcaacgacagcaccaacaggaacgccacgggcgacgaccgcgccgtggcggtcgagttcgacacgttcgagaacgacgagttggaggatgcggatggcaaccacgtcggcatcgacgtcaactccatcgtctctaccgattccatctcgcccgacaagagcatcaagtccggcgagaccctggcagccgacgtcgccttcgacaacacaacggagacgctgtccgtcaccctctggatgagcggggcaccgtaccgtgtcagcgccaacgtcgacatgaggaaaagcttgccccagatggtggccgtcggcttcgctgcttccaccggcaacaacgtggagatgcaccagctcctgtcgtggtccttcaactctaccctggcgtcgtcgaaggatggtgagaccaggccacctgcgccctctcaggccatcgtctccaaaaacaaatccaaggcgcgtagcagcgcgatagcagtgtcttctgcagctgcgtttgtggtcgtgtgcgctttaactgggtttcttctaaggcggaaactgaggatgtggaagacgtccaaggaagcatccggcgccggcgagctcgacgacgacgaacacgacggagaggaggctgagtttgagaagggcgtcggcccaaagaggtattcctatcgcgaactcgcggccgcgacgcgcaacttctcggaagagacgaagctcgggcgaggcggcttcggccacgtctaccagggccgcctcaacattgacggccaggaccgccgcgtggccataaagaagttctcggagtcgtccatgcaggggaggaaggagttcgaggccgaggtgaagatcatcagccggctgaggcaccgcaacctcgtgcggttgatcggttggtgcgactgctgcaaggggctcctcatcgtctatgagctcgtgtcagagggcagccttgacaggcacatatacaacgctgccaggtggcttacctggcctcaaaggtacaagatcatcatcggcctggggtcggcgttgcggtacctgcacgcggagtgggagcagtgcgtagtgcacggcgacatcaagccgagcaacatcatgctggactcctcgctggacgccaagctgggcgacttcggcctggcgaggctggtcgaccacggcgtcaagccggccacgaccaaggtggtgctgggcacggcgggctacatcgacccggagctcgtgaacacgcgccgcccgagcgccgtgtcggacgtctacagcttcggcgtcgtcctcctggagctcgtcacgggccggcgccccgtggaggagcccgacgacagcgacgagctgttcgtgctgatcaggtgggtgtggcgcctgtacggcaggaacgccatcgccgaggcggtggacgagaggctgaagctggtaggaagggaaggcgatgggggcggtggcgaggtggaggaggaggaggagcgcggacagatggaacgcgcgctggtggtggggctgtggtgcgctcaacccgaccgcggcgaccgcccgtccatcgcgcacgccatgcacgtcctgcagtccgcggacgtgaagctgccggtgctgcggccgcacatgtacgccagcgccgccgacacggttcatagtaccattgccatgggaggagatggttacagcgagctgtctttcggggtgacgtccactgatggtagcgacacgtcgactactagcgagagggaaagcaaatgatcgaaacggtattcatgcccagctctattagcagcggctatttatgatccatatactggcataatgcaatcctatactctcctatgggcaaggctacaagtggggagctg

SEQ ID NO: 65603 - DNA, 4689 bp, Zea Mays
gcccactggcacagcaaatttcgcactatttttttttctcccgttcacctagcgtgaggcgtgcgctctcgtggcgactttggacaccgccggcgcctaccctctgtctcgtggcgacgagccgccgccgccgacctaagcgaggtctctgtgggactctttgctggtgacgagcaaccatcaggtccgcccctgatgagcaggcccaacactcgcaacaagagcaagaggccacgatctgatgaatccattaatccgtctgcggctgttttcaagaagatacactccgccggtgatatctcgaaagacgatatctgccagctttacatggtgtggaaaccgccttgccatggctgccatggcaatactaaggattccccaaattgtttctgtgggttgatccctgctgccaatggggttcggaagactggcctctggcagaaaatgcaggaaatggttcgtggtctcggccccaatccatccaaggacctccgcgattccactgatacgcctgctggattgactaacctgggtgcaacctgttatgcaaatagcatacttcagtgcctttacatgaacattgcattccgctcaggcattttctctttggagctggacgttttggagaagcatcctgttctggatcagctagcacggttgtttgcacagctacactcaagcaaaatgttattcattgattcagcgccttttattaagacactggaattagacaatggtgtccagcaggacagccatgaatttctcactttgtttctgtctctgctcgagcaatcgttaagtcattccaaggttcctggagccagaacaatcgtgcaaaatctgttttgcggcagcgtatcacatgtaacaaggtcaagcaaaatgatcagcactcaggagtcccattttgtggcatgtgctacattatgttaatgtgctcaatgttggctatgctttagcttgttatttccatactgctgaattggacaagttactggtgtaatttgtgggggactgatgtttaaccatcatcccttaaggtgctcgtcatgtggaaaggaatctgcagcatcttcaaaaatggaggacttttatgagctggaattgaatatcaaaggtttaaataatttggaagaaagtctgaatgagtactttagcgaggaagcactggatggggagaatcaatacttttgtgagtcatgtcaaaaaagggtagatgccactcgttgtataaaacttcgatcacttcctccagttgtcaattttcaactgaagcgttatgtattcctcccgaagacaacaacaaagaaaaaaatttcttcaacattcagtttcccaggacaacttgatttgggaaaacgattatcagagccttcatctagttgcacttatgccttgtctgctattttaattcacaagggtactggtgctaacagtggacactatgtggcacatataaaagatgaaagcaatgggcaatggtgggagtttgatgatgagactgtatccaaacttggtttgcatccttttggtgaaaaaccaggaaaggcatcaaacaaagatgatcagaagtcccaaaatacctccacagaaggttctgtcacaaacaataataataatggccaccatgaggcagcgcctagttctaccatgggggagatgttttcatctaccgatgcttatatgctgatgtacaaatgtatcactaaggatgtcaatcccactgaaagcaataaaattgtggagataaataatgatttacttccacaccatcttctagatgaaattaatgaactaaatgcatcatatacaaaattgtgtgtggaataccaaagcaagaaggacagccatttggcatatataacagagaggcgtcaagaagtaaaatctgttctgacagaagcacctgcaggcccaggagatgattcatatttttggatctcaacagactggcttcgtcagtgggcagataatattactcccccctcttccatcgacaatggtgcaattcaatgtgaacatggaaaggttccagcatctaaagtcacatcaatgaagcggttatcatctgtagcttggcagaaattacattcgaaatatggagggggacctatattgaacagtgacgatttttgcatggagtgtcttaaagacggggcaaaaagtgcagtatctgctgatgtttaccgtgaacgaagagcatcattgaaaacactcgcagaagcagcacttgctggtaattgtccagatggtccttcttactttatctcaaagacatggttgactcattggctgcgtagaaaaaatgctgatatcccttctgatggggataacggaccaacaagtgctttaagatgttgccatggggattttctgccagaacatgctccaggggcaaaacgggtatctgtaccagagatcctctggctatttctctaccaaacagtccatgagaagaaggctgatgatacagtgacttttccatcagatagtcatccatgtgaaacctgcagccgagaattgtctgatgttgcttctgtggaggttaatcttagagcagtgaaactcaagcaacgacagaaccatgaaaagttgatatctgggaaaagctttgcgcttcatcctggtcaaaaatattatttggttccttcatcttggttgtcagaatggagagcttatattacagcaactgggaaaaacatttcttcattaccagaacctcaaactctggaagctgttgccaggtcacttatatgtgaaaagcattcaagattgctgcaaaggcctttggatcttgttttaaagcgtgggagcatcattcagaaagcatcaaatagtatgattggaaattattctctgaagagtggagtgctacacctggaaaaggtatatctgctgaaattgcttttagcaagagttctcaagacaaactgcatggatcatctgaagcagtgccgattacggatggaaatctaggccagtctcttgatgacacaaacgatgatttgggagccagagagccttatatcagaactgatcccgagaaccatgtaacctttataggtcaaatattgagataccaacacccagctggtgtctgaatcccatcctgcaaggagtatgagagggaataagctgcagaatcttgagactaatgcactgaaacatgatgctaattaagctattttggtgatttttttggtctttagcgctgcattacttcagaaaactgatgcttcttgtagtttcttcattgttcagacattgaaaggattttacatgattacacctagtgagtataagttacttctaaaattttccccatttcagctctacctatgaactttgtatgctaggtttgtgaagaatgtattggcgaaagggagagctgtgcattggtggaaaaactcaactatcaaaatgaagatatccacgtttactttgtccatggaaaagaagcaccaaagtctattaaagaagcatctaaagctgttactgtaccagatcgtcggacatcgaagcgttcccggagaacaagctctggaaactcaatcagtttgaaagtctctggctctacatctgtctatcagttgaaactgatgatatgggaatctttagggattgttaaggagaaccaaatgcttcacaaaggctctgttgagattgaagatgattttgctactcttgctgataagagtatttttcctggggattttctctgggtcagagactctgaaatatatgagaaccgtgacattgcagatgagatttcagaacaaaaggatgatatgctacaggctgaggaaggctttcgaggaactctgttgacatcaactgtctcagctcagctttgtcaggatatagcttttagtgaatgagttcccacatcagatatgtagctgcatatctgctgacttaagctggtgaagcctgctgggagaaggccgattgattcatgattatggtggttctggcagccgccgaggtggaaatttttgtcgaccccttatctccatgctcagtcaagctaaggttgtttagcgaggaaaatgtatggggtacctactgtagttaaggccccgtttggtttgagggactaaagattagtccctccattttagttccatttagttcctagattgccaaacggtaggactaaaaatgagactaaactgttttagtccctagtctctcaaaatgtggctaaaaagactaaaccatattaattccacatttgcccatcatttagttcaattgtactaatagcacgagaatgttaaagacaattttagtcttcttatgagtcattttgtatattcttactaattttagtctatagaaccaaatatgttagggactaaactttagtcccctaattaaactttagtccctagactaaagaaaccaaacagtgcccaagtctttcccgatgtaagtatatgattactagtattagtaggaagttgctgttttcggccatgctgttgccttgcctgcatagtctttttttatctattttggttgtgcgggctgagtgacatgccctgtacctgggtcacctggtgcctggtggcatggctagcagaggcgtgttgagaggctggaggagccttaatgccgatgagtttgttatgttagatgaggtcgcagggccttttgacccctgttgtatgttcctgtaccctgttg

SEQ ID NO: 65604 - DNA, 3154 bp, Zea Mays
ctggcacagcaaatttcgcactatttttttttctcccgttcacctagcgtgaggcgtgcgctctcgtggcgactttggacaccgccggcgcctaccctctgtctcgtggcgacgagccgccgccgccgacctaagcgaggtctctgtgggactctttgctggtgacgagcaaccatcaggtccgcccctgatgagcaggcccaacactcgcaacaagagcaagaggccacgatctgatgaatccattaatccgtctgcggctgttttcaagaagatacactccgccggtgatatctcgaaagacgatatctgccagctttacatggtgtggaaaccgccttgccatggctgccatggcaatactaaggattccccaaattgtttctgtgggttgatccctgctgccaatggggttcggaagactggcctctggcagaaaatgcaggaaatggttcgtggtctcggccccaatccatccaaggacctccgcgattccactgatacgcctgctggattgactaacctgggtgcaacctgttatgcaaatagcatacttcagtgcctttacatgaacattgcattccgctcaggcattttctctttggagctggacgttttggagaagcatcctgttctggatcagctagcacggttgtttgcacagctacactcaagcaaaatgttattcattgattcagcgccttttattaagacactggaattagacaatggtgtccagcaggacagccatgaatttctcactttgtttctgtctctgctcgagcaatcgttaagtcattccaaggttcctggagccagaacaatcgtgcaaaatctgttttgcggcagcgtatcacatgtaacaaggtgctcgtcatgtggaaaggaatctgcagcatcttcaaaaatggaggacttttatgagctggaattgaatatcaaaggtttaaataatttggaagaaagtctgaatgagtactttagcgaggaagcactggatggggagaatcaatacttttgtgagtcatgtcaaaaaagggtagatgccactcgttgtataaaacttcgatcacttcctccagttgtcaattttcaactgaagcgttatgtattcctcccgaagacaacaacaaagaaaaaaatttcttcaacattcagtttcccaggacaacttgatttgggaaaacgattatcagagccttcatctagttgcacttatgccttgtctgctattttaattcacaagggtactggtgctaacagtggacactatgtggcacatataaaagatgaaagcaatgggcaatggtgggagtttgatgatgagactgtatccaaacttggtttgcatccttttggtgaaaaaccaggaaaggcatcaaacaaagatgatcagaagtcccaaaatacctccacagaaggttctgtcacaaacaataataataatggccaccatgaggcagcgcctagttctaccatgggggagatgttttcatctaccgatgcttatatgctgatgtacaaatgtatcactaaggatgtcaatcccactgaaagcaataaaattgtggagataaataatgatttacttccacaccatcttctagatgaaattaatgaactaaatgcatcatatacaaaattgtgtgtggaataccaaagcaagaaggacagccatttggcatatataacagagaggcgtcaagaagtaaaatctgttctgacagaagcacctgcaggcccaggagatgattcatatttttggatctcaacagactggcttcgtcagtgggcagataatattactcccccctcttccatcgacaatggtgcaattcaatgtgaacatggaaaggttccagcatctaaagtcacatcaatgaagcggttatcatctgtagcttggcagaaattacattcgaaatatggagggggacctatattgaacagtgacgatttttgcatggagtgtcttaaagacggggcaaaaagtgcagtatctgctgatgtttaccgtgaacgaagagcatcattgaaaacactcgcagaagcagcacttgctggttgactcattggctgcgtagaaaaaatgctgatatcccttctgatggggataacggaccaacaagtgctttaagatgttgccatggggattttctgccagaacatgctccaggggcaaaacgggtatctgtaccagagatcctctggctatttctctaccaaacagtccatgagaagaaggctgatgatacagtgacttttccatcagatagtcatccatgtgaaacctgcagccgagaattgtctgatgttgcttctgtggaggttaatcttagagcagtgaaactcaagcaacgacagaaccatgaaaagttgatatctgggaaaagctttgcgcttcatcctggtcaaaaatattatttggttccttcatcttggttgtcagaatggagagcttatattacagcaactgggaaaaacatttcttcattaccagaacctcaaactctggaagctgttgccaggtcacttatatgtgaaaagcattcaagattgctgcaaaggcctttggatcttgttttaaagcgtgggagcatcattcagaaagcatcaaatactgatgggttaaccataatcccagagtatgattggaaattattctctgaagagtggagtgctacacctggaaaaggtatatctgctgaaattgcttttagcaagagttctcaagacaaactgcatggatcatctgaagcagtgccgattacggatggaaatctaggccagtctcttgatgacacaaacgatgatttgggagccagagagccttatatcagaactgatcccgaggtttgtgaagaatgtattggcgaaagggagagctgtgcattggtggaaaaactcaactatcaaaatgaagatatccacgtttactttgtccatggaaaagaagcaccaaagtctattaaagaagcatctaaagctgttactgtaccagatcgtcggacatcgaagcgttcccggagaacaagctctggaaactcaatcagtttgaaagtctctggctctacatctgtctatcagttgaaactgatgatatgggaatctttaggggtatgcacaaggggaatcactaaaattattgttgatg

SEQ ID NO: 65605 - DNA, 4541 bp, Zea Mays
aaatttcgcactatttttttttctcccgttcacctagcgtgaggcgtgcgctctcgtggcgactttggacaccgccggcgcctaccctctgtctcgtggcgacgagccgccgccgccgacctaagcgaggtctctgtgggactctttgctggtgacgagcaaccatcaggtccgcccctgatgagcaggcccaacactcgcaacaagagcaagaggccacgatctgatgaatccattaatccgtctgcggctgttttcaagaagatacactccgccggtgatatctcgaaagacgatatctgccagctttacatggtgtggaaaccgccttgccatggctgccatggcaatactaaggattccccaaattgtttctgtgggttgatccctgctgccaatggggttcggaagactggcctctggcagaaaatgcaggaaatggttcgtggtctcggccccaatccatccaaggacctccgcgattccactgatacgcctgctggattgactaacctgggtgcaacctgttatgcaaatagcatacttcagtgcctttacatgaacattgcattccgctcaggcattttctctttggagctggacgttttggagaagcatcctgttctggatcagctagcacggttgtttgcacagctacactcaagcaaaatgttattcattgattcagcgccttttattaagacactggaattagacaatggtgtccagcaggacagccatgaatttctcactttgtttctgtctctgctcgagcaatcgttaagtcattccaaggttcctggagccagaacaatcgtgcaaaatctgttttgcggcagcgtatcacatgtaacaaggtgctcgtcatgtggaaaggaatctgcagcatcttcaaaaatggaggacttttatgagctggaattgaatatcaaaggtttaaataatttggaagaaagtctgaatgagtactttagcgaggaagcactggatggggagaatcaatacttttgtgagtcatgtcaaaaaagggtagatgccactcgttgtataaaacttcgatcacttcctccagttgtcaattttcaactgaagcgttatgtattcctcccgaagacaacaacaaagaaaaaaatttcttcaacattcagtttcccaggacaacttgatttgggaaaacgattatcagagccttcatctagttgcacttatgccttgtctgctattttaattcacaagggtactggtgctaacagtggacactatgtggcacatataaaagatgaaagcaatgggcaatggtgggagtttgatgatgagactgtatccaaacttggtttgcatccttttggtgaaaaaccaggaaaggcatcaaacaaagatgatcagaagtcccaaaatacctccacagaaggttctgtcacaaacaataataataatggccaccatgaggcagcgcctagttctaccatgggggagatgttttcatctaccgatgcttatatgctgatgtacaaatgtatcactaaggatgtcaatcccactgaaagcaataaaattgtggagataaataatgatttacttccacaccatcttctagatgaaattaatgaactaaatgcatcatatacaaaattgtgtgtggaataccaaagcaagaaggacagccatttggcatatataacagagaggcgtcaagaagtaaaatctgttctgacagaagcacctgcaggcccaggagatgattcatatttttggatctcaacagactggcttcgtcagtgggcagataatattactcccccctcttccatcgacaatggtgcaattcaatgtgaacatggaaaggttccagcatctaaagtcacatcaatgaagcggttatcatctgtagcttggcagaaattacattcgaaatatggagggggacctatattgaacagtgacgatttttgcatggagtgtcttaaagacggggcaaaaagtgcagtatctgctgatgtttaccgtgaacgaagagcatcattgaaaacactcgcagaagcagcacttgctggtaattgtccagatggtccttcttactttatctcaaagacatggttgactcattggctgcgtagaaaaaatgctgatatcccttctgatggggataacggaccaacaagtgctttaagatgttgccatggggattttctgccagaacatgctccaggggcaaaacgggtatctgtaccagagatcctctggctatttctctaccaaacagtccatgagaagaaggctgatgatacagtgacttttccatcagatagtcatccatgtgaaacctgcagccgagaattgtctgatgttgcttctgtggaggttaatcttagagcagtgaaactcaagcaacgacagaaccatgaaaagttgatatctgggaaaagctttgcgcttcatcctggtcaaaaatattatttggttccttcatcttggttgtcagaatggagagcttatattacagcaactgggaaaaacatttcttcattaccagaacctcaaactctggaagctgttgccaggtcacttatatgtgaaaagcattcaagattgctgcaaaggcctttggatcttgttttaaagcgtgggagcatcattcagaaagcatcaaatactgatgggttaaccataatcccagagtatgattggaaattattctctgaagagtggagtgctacacctggaaaaggtatatctgctgaaattgcttttagcaagagttctcaagacaaactgcatggatcatctgaagcagtgccgattacggatggaaatctaggccagtctcttgatgacacaaacgatgatttgggagccagagagccttatatcagaactgatcccgaggtttgtgaagaatgtattggcgaaagggagagctgtgcattggtggaaaaactcaactatcaaaatgaagatatccacgtttactttgtccatggaaaagaagcaccaaagtctattaaagaagcatctaaagctgttactgtaccagatcgtcggacatcgaagcgttcccggagaacaagctctggaaactcaatcagtttgaaaattgttaaggagaaccaaatgcttcacaaaggctctgttgagattgaagatgattttgctactcttgctgataagagtatttttcctggggattttctctgggtcagagactctgaaatatatgagaaccgtgacattgcagatgagatttcagaacaaaaggatgatatgctacaggctgaggaaggctttcgaggaactctgttgacatcaactgtctcagctcagctttgtcaggatatagcttttagtgaatgagttcccacatcagatatgtagctgcatatctgctgacttaagctggtgaagcctgctgggaggtgatgctgactagcttattctttgtttttattgcatattgctgttttttctgaatggcgatcactacttctacatccttctccctctgactatcaaagtcccacttgtatatgcacctgcttccactgtcgatcatgcaaccgacagaacttcaaagttaactacggttttgaacccttattttcattatgtatatattattcatcttccgttccatgcgccgtgtatgaaatgaattttaggatatcaacaaagttggaatgtcagttttatccactgctcattcatatcgcactgctgccagcctgccaccctacgtttcagtccatttccccgtttatatcttttgacgctaacacgtgctctctcgagatgcagaaggccgattgattcatgattatggtggttctggcagccgccgaggtggaaatttttgtcgaccccttatctccatgctcagtcaagctaaggttgtttagcgaggaaaatgtatggggtacctactgtagttaaggccccgtttggtttgagggactaaagattagtccctccattttagttccatttagttcctagattgccaaacggtaggactaaaaatgagactaaactgttttagtccctagtctctcaaaatgtggctaaaaagactaaaccatattaattccacatttgcccatcatttagttcaattgtactaatagcacgagaatgttaaagacaattttagtcttcttatgagtcattttgtatattcttactaattttagtctatagaaccaaatatgttagggactaaactttagtcccctaattaaactttagtccctagactaaagaaaccaaacagtgcccaagtctttcccgatgtaagtatatgattactagtattagtaggaagttgctgttttcggccatgctgttgccttgcctgcatagtctttttttatctattttggttgtgcgggctgagtgacatgccctgtacctgggtcacctggtgcctggtggcatggctagcagaggcgtgttgagaggctggaggagccttaatgccgatgagtttgttatgttagatgaggtcgcagggccttttgacccctgttgtatgttcctgtaccctgttg

SEQ ID NO: 65606 - DNA, 3619 bp, Zea Mays
actatttttttttctcccgttcacctagcgtgaggcgtgcgctctcgtggcgactttggacaccgccggcgcctaccctctgtctcgtggcgacgagccgccgccgccgacctaagcgaggtctctgtgggactctttgctggtgacgagcaaccatcaggtccgcccctgatgagcaggcccaacactcgcaacaagagcaagaggccacgatctgatgaatccattaatccgtctgcggctgttttcaagaagatacactccgccggtgatatctcgaaagacgatatctgccagctttacatggtgtggaaaccgccttgccatggctgccatggcaatactaaggattccccaaattgtttctgtgggttgatccctgctgccaatggggttcggaagactggcctctggcagaaaatgcaggaaatggttcgtggtctcggccccaatccatccaaggacctccgcgattccactgatacgcctgctggattgactaacctgggtgcaacctgttatgcaaatagcatacttcagtgcctttacatgaacattgcattccgctcaggcattttctctttggagctggacgttttggagaagcatcctgttctggatcagctagcacggttgtttgcacagctacactcaagcaaaatgttattcattgattcagcgccttttattaagacactggaattagacaatggtgtccagcaggacagccatgaatttctcactttgtttctgtctctgctcgagcaatcgttaagtcattccaaggttcctggagccagaacaatcgtgcaaaatctgttttgcggcagcgtatcacatgtaacaaggtgctcgtcatgtggaaaggaatctgcagcatcttcaaaaatggaggacttttatgagctggaattgaatatcaaaggtttaaataatttggaagaaagtctgaatgagtactttagcgaggaagcactggatggggagaatcaatacttttgtgagtcatgtcaaaaaagggtagatgccactcgttgtataaaacttcgatcacttcctccagttgtcaattttcaactgaagcgttatgtattcctcccgaagacaacaacaaagaaaaaaatttcttcaacattcagtttcccaggacaacttgatttgggaaaacgattatcagagccttcatctagttgcacttatgccttgtctgctattttaattcacaagggtactggtgctaacagtggacactatgtggcacatataaaagatgaaagcaatgggcaatggtgggagtttgatgatgagactgtatccaaacttggtttgcatccttttggtgaaaaaccaggaaaggcatcaaacaaagatgatcagaagtcccaaaatacctccacagaaggttctgtcacaaacaataataataatggccaccatgaggcagcgcctagttctaccatgggggagatgttttcatctaccgatgcttatatgctgatgtacaaatgtatcactaaggatgtcaatcccactgaaagcaataaaattgtggagataaataatgatttacttccacaccatcttctagatgaaattaatgaactaaatgcatcatatacaaaattgtgtgtggaataccaaagcaagaaggacagccatttggcatatataacagagaggcgtcaagaagtaaaatctgttctgacagaagcacctgcaggcccaggagatgattcatatttttggatctcaacagactggcttcgtcagtgggcagataatattactcccccctcttccatcgacaatggtgcaattcaatgtgaacatggaaaggttccagcatctaaagtcacatcaatgaagcggttatcatctgtagcttggcagaaattacattcgaaatatggagggggacctatattgaacagtgacgatttttgcatggagtgtcttaaagacggggcaaaaagtgcagtatctgctgatgtttaccgtgaacgaagagcatcattgaaaacactcgcagaagcagcacttgctggtaattgtccagatggtccttcttactttatctcaaagacatggttgactcattggctgcgtagaaaaaatgctgatatcccttctgatggggataacggaccaacaagtgctttaagatgttgccatggggattttctgccagaacatgctccaggggcaaaacgggtatctgtaccagagatcctctggctatttctctaccaaacagtccatgagaagaaggctgatgatacagtgacttttccatcagatagtcatccatgtgaaacctgcagccgagaattgtctgatgttgcttctgtggaggttaatcttagagcagtgaaactcaagcaacgacagaaccatgaaaagttgatatctgggaaaagctttgcgcttcatcctggtcaaaaatattatttggttccttcatcttggttgtcagaatggagagcttatattacagcaactgggaaaaacatttcttcattaccagaacctcaaactctggaagctgttgccaggtcacttatatgtgaaaagcattcaagattgctgcaaaggcctttggatcttgttttaaagcgtgggagcatcattcagaaagcatcaaatagtatgattggaaattattctctgaagagtggagtgctacacctggaaaaggccagtctcttgatgacacaaacgatgatttgggagccagagagccttatatcagaactgatcccgaggtttgtgaagaatgtattggcgaaagggagagctgtgcattggtggaaaaactcaactatcaaaatgaagatatccacgtttactttgtccatggaaaagaagcaccaaagtctattaaagaagcatctaaagctgttactgtaccagatcgtcggacatcgaagcgttcccggagaacaagctctggaaactcaatcagtttgaaagtctctggctctacatctgtctatcagttgaaactgatgatatgggaatctttagggattgttaaggagaaccaaatgcttcacaaaggctctgttgagattgaagatgattttgctactcttgctgataagagtatttttcctggggattttctctgggtcagagactctgaaatatatgagaaccgtgacattgcagatgagatttcagaacaaaaggatgatatgctacaggctgaggaaggctttcgaggaactctgttgacatcaactgtctcagctcagctttgtcaggatatagcttttagtgaatgagttcccacatcagatatgtagctgcatatctgctgacttaagctggtgaagcctgctgggaggtgatgctgactagcttattctttgtttttattgcatattgctgttttttctgaatggcgatcactacttctacatccttctccctctgactatcaaagtcccacttgtatatgcacctgcttccactgtcgatcatgcaaccgacagaacttcaaagttaactacggttttgaacccttattttcattatgtatatattattcatcttccgttccatgcgccgtgtatgaaatgaattttaggatatcaacaaagttggaatgtcagtttta

SEQ ID NO: 65607 - DNA, 3690 bp, Zea Mays
actatttttttttctcccgttcacctagcgtgaggcgtgcgctctcgtggcgactttggacaccgccggcgcctaccctctgtctcgtggcgacgagccgccgccgccgacctaagcgaggtctctgtgggactctttgctggtgacgagcaaccatcaggcccaacactcgcaacaagagcaagaggccacgatctgatgaatccattaatccgtctgcggctgttttcaagaagatacactccgccggtgatatctcgaaagacgatatctgccagctttacatggtgtggaaaccgccttgccatggctgccatggcaatactaaggattccccaaattgtttctgtgggttgatccctgctgccaatggggttcggaagactggcctctggcagaaaatgcaggaaatggttcgtggtctcggccccaatccatccaaggacctccgcgattccactgatacgcctgctggattgactaacctgggtgcaacctgttatgcaaatagcatacttcagtgcctttacatgaacattgcattccgctcaggcattttctctttggagctggacgttttggagaagcatcctgttctggatcagctagcacggttgtttgcacagctacactcaagcaaaatgttattcattgattcagcgccttttattaagacactggaattagacaatggtgtccagcaggacagccatgaatttctcactttgtttctgtctctgctcgagcaatcgttaagtcattccaaggttcctggagccagaacaatcgtgcaaaatctgttttgcggcagcgtatcacatgtaacaaggtgctcgtcatgtggaaaggaatctgcagcatcttcaaaaatggaggacttttatgagctggaattgaatatcaaaggtttaaataatttggaagaaagtctgaatgagtactttagcgaggaagcactggatggggagaatcaatacttttgtgagtcatgtcaaaaaagggtagatgccactcgttgtataaaacttcgatcacttcctccagttgtcaattttcaactgaagcgttatgtattcctcccgaagacaacaacaaagaaaaaaatttcttcaacattcagtttcccaggacaacttgatttgggaaaacgattatcagagccttcatctagttgcacttatgccttgtctgctattttaattcacaagggtactggtgctaacagtggacactatgtggcacatataaaagatgaaagcaatgggcaatggtgggagtttgatgatgagactgtatccaaacttggtttgcatccttttggtgaaaaaccaggaaaggcatcaaacaaagatgatcagaagtcccaaaatacctccacagaaggttctgtcacaaacaataataataatggccaccatgaggcagcgcctagttctaccatgggggagatgttttcatctaccgatgcttatatgctgatgtacaaatgtatcactaaggatgtcaatcccactgaaagcaataaaattgtggagataaataatgatttacttccacaccatcttctagatgaaattaatgaactaaatgcatcatatacaaaattgtgtgtggaataccaaagcaagaaggacagccatttggcatatataacagagaggcgtcaagaagtaaaatctgttctgacagaagcacctgcaggcccaggagatgattcatatttttggatctcaacagactggcttcgtcagtgggcagataatattactcccccctcttccatcgacaatggtgcaattcaatgtgaacatggaaaggttccagcatctaaagtcacatcaatgaagcggttatcatctgtagcttggcagaaattacattcgaaatatggagggggacctatattgaacagtgacgatttttgcatggagtgtcttaaagacggggcaaaaagtgcagtatctgctgatgtttaccgtgaacgaagagcatcattgaaaacactcgcagaagcagcacttgctggtaattgtccagatggtccttcttactttatctcaaagacatggttgactcattggctgcgtagaaaaaatgctgatatcccttctgatggggataacggaccaacaagtgctttaagatgttgccatggggattttctgccagaacatgctccaggggcaaaacgggtatctgtaccagagatcctctggctatttctctaccaaacagtccatgagaagaaggctgatgatacagtgacttttccatcagatagtcatccatgtgaaacctgcagccgagaattgtctgatgttgcttctgtggaggttaatcttagagcagtgaaactcaagcaacgacagaaccatgaaaagttgatatctgggaaaagctttgcgcttcatcctggtcaaaaatattatttggttccttcatcttggttgtcagaatggagagcttatattacagcaactgggaaaaacatttcttcattaccagaacctcaaactctggaagctgttgccaggtcacttatatgtgaaaagcattcaagattgctgcaaaggcctttggatcttgttttaaagcgtgggagcatcattcagaaagcatcaaatagtatgattggaaattattctctgaagagtggagtgctacacctggaaaaggtatatctgctgaaattgcttttagcaagagttctcaagacaaactgcatggatcatctgaagcagtgccgattacggatggaaatctaggccagtctcttgatgacacaaacgatgatttgggagccagagagccttatatcagaactgatcccgaggtttgtgaagaatgtattggcgaaagggagagctgtgcattggtggaaaaactcaactatcaaaatgaagatatccacgtttactttgtccatggaaaagaagcaccaaagtctattaaagaagcatctaaagctgttactgtaccagatcgtcggacatcgaagcgttcccggagaacaagctctggaaactcaatcagtttgaaagtctctggctctacatctgtctatcagttgaaactgatgatatgggaatctttagggattgttaaggagaaccaaatgcttcacaaaggctctgttgagattgaagatgattttgctactcttgctgataagagtatttttcctggggattttctctgggtcagagactctgaaatatatgagaaccgtgacattgcagatgagatttcagaacaaaaggatgatatgctacaggctgaggaaggctttcgaggaactctgttgacatcaactgtctcagctcagctttgtcaggatatagcttttagtgaatgagttcccacatcagatatgtagctgcatatctgctgacttaagctggtgaagcctgctgggaggtgatgctgactagcttattctttgtttttattgcatattgctgttttttctgaatggcgatcactacttctacatccttctccctctgactatcaaagtcccacttgtatatgcacctgcttccactgtcgatcatgcaaccgacagaacttcaaagttaactacggttttgaacccttattttcattatgtatatattattcatcttccgttccatgcgccgtgtatgaaatgaattttaggatatcaacaaagttggaatgtcagtttta

SEQ ID NO: 65608 - DNA, 4798 bp, Zea Mays
actatttttttttctcccgttcacctagcgtgaggcgtgcgctctcgtggcgactttggacaccgccggcgcctaccctctgtctcgtggcgacgagccgccgccgccgacctaagcgaggtctctgtgggactctttgctggtgacgagcaaccatcaggtccgcccctgatgagcaggcccaacactcgcaacaagagcaagaggccacgatctgatgaatccattaatccgtctgcggctgttttcaagaagatacactccgccggtgatatctcgaaagacgatatctgccagctttacatggtgtggaaaccgccttgccatggctgccatggcaatactaaggattccccaaattgtttctgtgggttgatccctgctgccaatggggttcggaagactggcctctggcagaaaatgcaggaaatggttcgtggtctcggccccaatccatccaaggacctccgcgattccactgatacgcctgctggattgactaacctgggtgcaacctgttatgcaaatagcatacttcagtgcctttacatgaacattgcattccgctcaggcattttctctttggagctggacgttttggagaagcatcctgttctggatcagctagcacggttgtttgcacagctacactcaagcaaaatgttattcattgattcagcgccttttattaagacactggaattagacaatggtgtccagcaggacagccatgaatttctcactttgtttctgtctctgctcgagcaatcgttaagtcattccaaggttcctggagccagaacaatcgtgcaaaatctgttttgcggcagcgtatcacatgtaacaaggtgctcgtcatgtggaaaggaatctgcagcatcttcaaaaatggaggacttttatgagctggaattgaatatcaaaggtttaaataatttggaagaaagtctgaatgagtactttagcgaggaagcactggatggggagaatcaatacttttgtgagtcatgtcaaaaaagggtagatgccactcgttgtataaaacttcgatcacttcctccagttgtcaattttcaactgaagcgttatgtattcctcccgaagacaacaacaaagaaaaaaatttcttcaacattcagtttcccaggacaacttgatttgggaaaacgattatcagagccttcatctagttgcacttatgccttgtctgctattttaattcacaagggtactggtgctaacagtggacactatgtggcacatataaaagatgaaagcaatgggcaatggtgggagtttgatgatgagactgtatccaaacttggtttgcatccttttggtgaaaaaccaggaaaggcatcaaacaaagatgatcagaagtcccaaaatacctccacagaaggttctgtcacaaacaataataataatggccaccatgaggcagcgcctagttctaccatgggggagatgttttcatctaccgatgcttatatgctgatgtacaaatgtatcactaaggatgtcaatcccactgaaagcaataaaattgtggagataaataatgatttacttccacaccatcttctagatgaaattaatgaactaaatgcatcatatacaaaattgtgtgtggaataccaaagcaagaaggacagccatttggcatatataacagagaggcgtcaagaagtaaaatctgttctgacagaagcacctgcaggcccaggagatgattcatatttttggatctcaacagactggcttcgtcagtgggcagataatattactcccccctcttccatcgacaatggtgcaattcaatgtgaacatggaaaggttccagcatctaaagtcacatcaatgaagcggttatcatctgtagcttggcagaaattacattcgaaatatggagggggacctatattgaacagtgacgatttttgcatggagtgtcttaaagacggggcaaaaagtgcagtatctgctgatgtttaccgtgaacgaagagcatcattgaaaacactcgcagaagcagcacttgctggtaattgtccagatggtccttcttactttatctcaaagacatggttgactcattggctgcgtagaaaaaatgctgatatcccttctgatggggataacggaccaacaagtgctttaagatgttgccatggggattttctgccagaacatgctccaggggcaaaacgggtatctgtaccagagatcctctggctatttctctaccaaacagtccatgagaagaaggctgatgatacagtgacttttccatcagatagtcatccatgtgaaacctgcagccgagaattgtctgatgttgcttctgtggaggttaatcttagagcagtgaaactcaagcaacgacagaaccatgaaaagttgatatctgggaaaagctttgcgcttcatcctggtcaaaaatattatttggttccttcatcttggttgtcagaatggagagcttatattacagcaactgggaaaaacatttcttcattaccagaacctcaaactctggaagctgttgccaggtcacttatatgtgaaaagcattcaagattgctgcaaaggcctttggatcttgttttaaagcgtgggagcatcattcagaaagcatcaaatactgatgggttaaccataatcccagagtatgattggaaattattctctgaagagtggagtgctacacctggaaaaggtatatctgctgaaattgcttttagcaagagttctcaagacaaactgcatggatcatctgaagcagtgccgattacggatggaaatctaggccagtctcttgatgacacaaacgatgatttgggagccagagagccttatatcagaactgatcccgaggtttgtgaagaatgtattggcgaaagggagagctgtgcattggtggaaaaactcaactatcaaaatgaagatatccacgtttactttgtccatggaaaagaagcaccaaagtctattaaagaagcatctaaagctgttactgtaccagatcgtcggacatcgaagcgttcccggagaacaagctctggaaactcaatcagtttgaaagtctctggctctacatctgtctatcagttgaaactgatgatatgggaatctttaggggtatgcacaaggggaatcactaaaattgtgcgatcacagatactaatctgtaccatagttgtttccttcttcatgtttcaaaagggacttcatacatttatgtttttccatcaagctatgggatgggctttcttgttctttatacttgtgtgcttctttcaactgctccaaatatttaaatagcttacatgtgctcttgttacattcagattgttaaggagaaccaaatgcttcacaaaggctctgttgagattgaagatgattttgctactcttgctgataagagtatttttcctggggattttctctgggtcagagactctgaaatatatgagaaccgtgacattgcagatgagatttcagaacaaaaggatgatatgctacaggctgaggaaggctttcgaggaactctgttgacatcaactgtctcagctcagctttgtcaggatatagcttttagtgaatgagttcccacatcagatatgtagctgcatatctgctgacttaagctggtgaagcctgctgggaggtgatgctgactagcttattctttgtttttattgcatattgctgttttttctgaatggcgatcactacttctacatccttctccctctgactatcaaagtcccacttgtatatgcacctgcttccactgtcgatcatgcaaccgacagaacttcaaagttaactacggttttgaacccttattttcattatgtatatattattcatcttccgttccatgcgccgtgtatgaaatgaattttaggatatcaacaaagttggaatgtcagttttatccactgctcattcatatcgcactgctgccagcctgccaccctacgtttcagtccatttccccgtttatatcttttgacgctaacacgtgctctctcgagatgcagaaggccgattgattcatgattatggtggttctggcagccgccgaggtggaaatttttgtcgaccccttatctccatgctcagtcaagctaaggttgtttagcgaggaaaatgtatggggtacctactgtagttaaggccccgtttggtttgagggactaaagattagtccctccattttagttccatttagttcctagattgccaaacggtaggactaaaaatgagactaaactgttttagtccctagtctctcaaaatgtggctaaaaagactaaaccatattaattccacatttgcccatcatttagttcaattgtactaatagcacgagaatgttaaagacaattttagtcttcttatgagtcattttgtatattcttactaattttagtctatagaaccaaatatgttagggactaaactttagtcccctaattaaactttagtccctagactaaagaaaccaaacagtgcccaagtctttcccgatgtaagtatatgattactagtattagtaggaagttgctgttttcggccatgctgttgccttgcctgcatagtctttttttatctattttggttgtgcgggctgagtgacatgccctgtacctgggtcacctggtgcctggtggcatggctagcagaggcgtgttgagaggctggaggagccttaatgccgatgagtttgttatgttagatgaggtcgcagggccttttgacccctgttgtatgttcctgtaccctgttg

SEQ ID NO: 65609 - DNA, 4153 bp, Zea Mays
actatttttttttctcccgttcacctagcgtgaggcgtgcgctctcgtggcgactttggacaccgccggcgcctaccctctgtctcgtggcgacgagccgccgccgccgacctaagcgaggtctctgtgggactctttgctggtgacgagcaaccatcaggtccgcccctgatgagcaggcccaacactcgcaacaagagcaagaggccacgatctgatgaatccattaatccgtctgcggctgttttcaagaagatacactccgccggtgatatctcgaaagacgatatctgccagctttacatggtgtggaaaccgccttgccatggctgccatggcaatactaaggattccccaaattgtttctgtgggttgatccctgctgccaatggggttcggaagactggcctctggcagaaaatgcaggaaatggttcgtggtctcggccccaatccatccaaggacctccgcgattccactgatacgcctgctggattgactaacctgggtgcaacctgttatgcaaatagcatacttcagtgcctttacatgaacattgcattccgctcaggcattttctctttggagctggacgttttggagaagcatcctgttctggatcagctagcacggttgtttgcacagctacactcaagcaaaatgttattcattgattcagcgccttttattaagacactggaattagacaatggtgtccagcaggacagccatgaatttctcactttgtttctgtctctgctcgagcaatcgttaagtcattccaaggttcctggagccagaacaatcgtgcaaaatctgttttgcggcagcgtatcacatgtaacaaggtgctcgtcatgtggaaaggaatctgcagcatcttcaaaaatggaggacttttatgagctggaattgaatatcaaaggtttaaataatttggaagaaagtctgaatgagtactttagcgaggaagcactggatggggagaatcaatacttttgtgagtcatgtcaaaaaagggtagatgccactcgttgtataaaacttcgatcacttcctccagttgtcaattttcaactgaagcgttatgtattcctcccgaagacaacaacaaagaaaaaaatttcttcaacattcagtttcccaggacaacttgatttgggaaaacgattatcagagccttcatctagttgcacttatgccttgtctgctattttaattcacaagggtactggtgctaacagtggacactatgtggcacatataaaagatgaaagcaatgggcaatggtgggagtttgatgatgagactgtatccaaacttggtttgcatccttttggtgaaaaaccaggaaaggcatcaaacaaagatgatcagaagtcccaaaatacctccacagaaggttctgtcacaaacaataataataatggccaccatgaggcagcgcctagttctaccatgggggagatgttttcatctaccgatgcttatatgctgatgtacaaatgtatcactaaggatgtcaatcccactgaaagcaataaaattgtggagataaataatgatttacttccacaccatcttctagatgaaattaatgaactaaatgcatcatatacaaaattgtgtgtggaataccaaagcaagaaggacagccatttggcatatataacagagaggcgtcaagaagtaaaatctgttctgacagaagcacctgcaggcccaggagatgattcatatttttggatctcaacagactggcttcgtcagtgggcagataatattactcccccctcttccatcgacaatggtgcaattcaatgtgaacatggaaaggttccagcatctaaagtcacatcaatgaagcggttatcatctgtagcttggcagaaattacattcgaaatatggagggggacctatattgaacagtgacgatttttgcatggagtgtcttaaagacggggcaaaaagtgcagtatctgctgatgtttaccgtgaacgaagagcatcattgaaaacactcgcagaagcagcacttgctggtaattgtccagatggtccttcttactttatctcaaagacatggttgactcattggctgcgtagaaaaaatgctgatatcccttctgatggggataacggaccaacaagtgctttaagatgttgccatggggattttctgccagaacatgctccaggggcaaaacgggtatctgtaccagagatcctctggctatttctctaccaaacagtccatgagaagaaggctgatgatacagtgacttttccatcagatagtcatccatgtgaaacctgcagccgagaattgtctgatgttgcttctgtggaggttaatcttagagcagtgaaactcaagcaacgacagaaccatgaaaagttgatatctgggaaaagctttgcgcttcatcctggtcaaaaatattatttggttccttcatcttggttgtcagaatggagagcttatattacagcaactgggaaaaacatttcttcattaccagaacctcaaactctggaagctgttgccaggtcacttatatgtgaaaagcattcaagattgctgcaaaggcctttggatcttgttttaaagcgtgggagcatcattcagaaagcatcaaatactgatgggttaaccataatcccagagtatgattggaaattattctctgaagagtggagtgctacacctggaaaaggtatatctgctgaaattgcttttagcaagagttctcaagacaaactgcatggatcatctgaagcagtgccgattacggatggaaatctaggccagtctcttgatgacacaaacgatgatttgggagccagagagccttatatcagaactgatcccgaggtttgtgaagaatgtattggcgaaagggagagctgtgcattggtggaaaaactcaactatcaaaatgaagatatccacgtttactttgtccatggaaaagaagcaccaaagtctattaaagaagcatctaaagctgttactgtaccagatcgtcggacatcgaagcgttcccggagaacaagctctggaaactcaatcagtttgaaaattgttaaggagaaccaaatgcttcacaaaggctctgttgagattgaagatgattttgctactcttgctgataagagtatttttcctggggattttctctgggtcagagactctgaaatatatgagaaccgtgacattgcagatgagatttcagaacaaaaggatgatatgctacaggctgaggaaggctttcgaggaactctgttgacatcaactgtctcagctcagctttgtcaggatatagcttttagtgaatgagttcccacatcagatatgtagctgcatatctgctgacttaagctggtgaagcctgctgggagaaggccgattgattcatgattatggtggttctggcagccgccgaggtggaaatttttgtcgaccccttatctccatgctcagtcaagctaaggttgtttagcgaggaaaatgtatggggtacctactgtagttaaggccccgtttggtttgagggactaaagattagtccctccattttagttccatttagttcctagattgccaaacggtaggactaaaaatgagactaaactgttttagtccctagtctctcaaaatgtggctaaaaagactaaaccatattaattccacatttgcccatcatttagttcaattgtactaatagcacgagaatgttaaagacaattttagtcttcttatgagtcattttgtatattcttactaattttagtctatagaaccaaatatgttagggactaaactttagtcccctaattaaactttagtccctagactaaagaaaccaaacagtgcccaagtctttcccgatgtaagtatatgattactagtattagtaggaagttgctgttttcggccatgctgttgccttgcctgcatagtctttttttatctattttggttgtgcgggctgagtgacatgccctgtacctgggtcacctggtgcctggtggcatggctagcagaggcgtgttgagaggctggaggagccttaatgccgatgagtttgttatgttagatgaggtcgcagggccttttgacccctgttgtatgttcctgtaccctgttg

SEQ ID NO: 65610 - DNA, 4589 bp, Zea Mays
actatttttttttctcccgttcacctagcgtgaggcgtgcgctctcgtggcgactttggacaccgccggcgcctaccctctgtctcgtggcgacgagccgccgccgccgacctaagcgaggtctctgtgggactctttgctggtgacgagcaaccatcaggtccgcccctgatgagcaggcccaacactcgcaacaagagcaagaggccacgatctgatgaatccattaatccgtctgcggctgttttcaagaagatacactccgccggtgatatctcgaaagacgatatctgccagctttacatggtgtggaaaccgccttgccatggctgccatggcaatactaaggattccccaaattgtttctgtgggttgatccctgctgccaatggggttcggaagactggcctctggcagaaaatgcaggaaatggttcgtggtctcggccccaatccatccaaggacctccgcgattccactgatacgcctgctggattgactaacctgggtgcaacctgttatgcaaatagcatacttcagtgcctttacatgaacattgcattccgctcaggcattttctctttggagctggacgttttggagaagcatcctgttctggatcagctagcacggttgtttgcacagctacactcaagcaaaatgttattcattgattcagcgccttttattaagacactggaattagacaatggtgtccagcaggacagccatgaatttctcactttgtttctgtctctgctcgagcaatcgttaagtcattccaaggttcctggagccagaacaatcgtgcaaaatctgttttgcggcagcgtatcacatgtaacaaggtgctcgtcatgtggaaaggaatctgcagcatcttcaaaaatggaggacttttatgagctggaattgaatatcaaaggtttaaataatttggaagaaagtctgaatgagtactttagcgaggaagcactggatggggagaatcaatacttttgtgagtcatgtcaaaaaagggtagatgccactcgttgtataaaacttcgatcacttcctccagttgtcaattttcaactgaagcgttatgtattcctcccgaagacaacaacaaagaaaaaaatttcttcaacattcagtttcccaggacaacttgatttgggaaaacgattatcagagccttcatctagttgcacttatgccttgtctgctattttaattcacaagggtactggtgctaacagtggacactatgtggcacatataaaagatgaaagcaatgggcaatggtgggagtttgatgatgagactgtatccaaacttggtttgcatccttttggtgaaaaaccaggaaaggcatcaaacaaagatgatcagaagtcccaaaatacctccacagaaggttctgtcacaaacaataataataatggccaccatgaggcagcgcctagttctaccatgggggagatgttttcatctaccgatgcttatatgctgatgtacaaatgtatcactaaggatgtcaatcccactgaaagcaataaaattgtggagataaataatgatttacttccacaccatcttctagatgaaattaatgaactaaatgcatcatatacaaaattgtgtgtggaataccaaagcaagaaggacagccatttggcatatataacagagaggcgtcaagaagtaaaatctgttctgacagaagcacctgcaggcccaggagatgattcatatttttggatctcaacagactggcttcgtcagtgggcagataatattactcccccctcttccatcgacaatggtgcaattcaatgtgaacatggaaaggttccagcatctaaagtcacatcaatgaagcggttatcatctgtagcttggcagaaattacattcgaaatatggagggggacctatattgaacagtgacgatttttgcatggagtgtcttaaagacggggcaaaaagtgcagtatctgctgatgtttaccgtgaacgaagagcatcattgaaaacactcgcagaagcagcacttgctggtaattgtccagatggtccttcttactttatctcaaagacatggttgactcattggctgcgtagaaaaaatgctgatatcccttctgatggggataacggaccaacaagtgctttaagatgttgccatggggattttctgccagaacatgctccaggggcaaaacgggtatctgtaccagagatcctctggctatttctctaccaaacagtccatgagaagaaggctgatgatacagtgacttttccatcagatagtcatccatgtgaaacctgcagccgagaattgtctgatgttgcttctgtggaggttaatcttagagcagtgaaactcaagcaacgacagaaccatgaaaagttgatatctgggaaaagctttgcgcttcatcctggtcaaaaatattatttggttccttcatcttggttgtcagaatggagagcttatattacagcaactgggaaaaacatttcttcattaccagaacctcaaactctggaagctgttgccaggtcacttatatgtgaaaagcattcaagattgctgcaaaggcctttggatcttgttttaaagcgtgggagcatcattcagaaagcatcaaatactgatgggttaaccataatcccagagtatgattggaaattattctctgaagagtggagtgctacacctggaaaaggtatatctgctgaaattgcttttagcaagagttctcaagacaaactgcatggatcatctgaagcagtgccgattacggatggaaatctaggccagtctcttgatgacacaaacgatgatttgggagccagagagccttatatcagaactgatcccgaggtttgtgaagaatgtattggcgaaagggagagctgtgcattggtggaaaaactcaactatcaaaatgaagatatccacgtttactttgtccatggaaaagaagcaccaaagtctattaaagaagcatctaaagctgttactgtaccagatcgtcggacatcgaagcgttcccggagaacaagctctggaaactcaatcagtttgaaagtctctggctctacatctgtctatcagttgaaactgatgatatgggaatctttagggattgttaaggagaaccaaatgcttcacaaaggctctgttgagattgaagatgattttgctactcttgctgataagagtatttttcctggggattttctctgggtcagagactctgaaatatatgagaaccgtgacattgcagatgagatttcagaacaaaaggatgatatgctacaggctgaggaaggctttcgaggaactctgttgacatcaactgtctcagctcagctttgtcaggatatagcttttagtgaatgagttcccacatcagatatgtagctgcatatctgctgacttaagctggtgaagcctgctgggaggtgatgctgactagcttattctttgtttttattgcatattgctgttttttctgaatggcgatcactacttctacatccttctccctctgactatcaaagtcccacttgtatatgcacctgcttccactgtcgatcatgcaaccgacagaacttcaaagttaactacggttttgaacccttattttcattatgtatatattattcatcttccgttccatgcgccgtgtatgaaatgaattttaggatatcaacaaagttggaatgtcagttttatccactgctcattcatatcgcactgctgccagcctgccaccctacgtttcagtccatttccccgtttatatcttttgacgctaacacgtgctctctcgagatgcagaaggccgattgattcatgattatggtggttctggcagccgccgaggtggaaatttttgtcgaccccttatctccatgctcagtcaagctaaggttgtttagcgaggaaaatgtatggggtacctactgtagttaaggccccgtttggtttgagggactaaagattagtccctccattttagttccatttagttcctagattgccaaacggtaggactaaaaatgagactaaactgttttagtccctagtctctcaaaatgtggctaaaaagactaaaccatattaattccacatttgcccatcatttagttcaattgtactaatagcacgagaatgttaaagacaattttagtcttcttatgagtcattttgtatattcttactaattttagtctatagaaccaaatatgttagggactaaactttagtcccctaattaaactttagtccctagactaaagaaaccaaacagtgcccaagtctttcccgatgtaagtatatgattactagtattagtaggaagttgctgttttcggccatgctgttgccttgcctgcatagtctttttttatctattttggttgtgcgggctgagtgacatgccctgtacctgggtcacctggtgcctggtggcatggctagcagaggcgtgttgagaggctggaggagccttaatgccgatgagtttgttatgttagatgaggtcgcagggccttttgacccctgttgtatgttcctgtaccctgttg

SEQ ID NO: 65611 - DNA, 730 bp, Zea Mays
aaaaaaaagaaaaccaaataatctccaaagactctataatcccaaaacacccatgtataaaacatttttttaccttatacaagttttggctttaaacccctttcccctcgcttgccgctgctccgccgtcgccgcgccccgaccagcatcggcgaatacctcccgcgcactcaaccgatggtctcactacctacgactgttcccattcccgagctccgattcggggctcgacggttcctggcccctttgtttcttggataaccgatgcaatttttggttctggataggttgtagttgaatgtaatcgattggtgttccctggcaccatctttgtctgagttccgattctggaattgcgggattggttggtcgggtccggtgagcacgctcggggcggcgccggccgatggcggagctggtggggccgcgcgtctacagttgctgcaactgccggaacaacgtctgcctccacgacgacatcctctcaaaggcttttcaggacatgagaagataggcgtagactagttgacatggaacttgttttcatttattgaagagatcatctgctgtgatatttatcaattcataatggttttgcatgtctttctctgcaaaaatggccccgttgatgtggcagtcgaactgttgtccaaatccaataacgagggagcatgtatttgatacgtttggttaacgacgaattggccctgcatgtatgttttgacgaatc

SEQ ID NO: 65612 - DNA, 768 bp, Zea Mays
tttaccttatacaagttttggctttaaacccctttcccctcgcttgccgctgctccgccgtcgccgcgccccgaccagcatcggcgaatacctcccgcgcactcaaccgatggttgtagttgaatgtaatcgattggtgttccctggcaccatctttgtctgagttccgattctggaattgcgggattggttggtcgggtccggtgagcacgctcggggcggcgccggccgatggcggagctggtggggccgcgcgtctacagttgctgcaactgccggaacaacgtctgcctccacgacgacatcctctcaaaggcttttcagccgtgcctttatgttctcccatgccatgaatgtagttgtgggggcgaaggaggatcggcaactaacgatagggctacacaaggttgctgatatctactgtagtgattgccgtgaggtgttgggctggaagtatgagagagcatatgaagaaacgcagaaatacaaggaaagttcatatttgagaagtcaaagattgtcaaagaaaactggtagtgtccaaattgtgactcagcaaacgttctggtgaagatgaaatgttataatatgcttttggatgtctgcgtccttgtagatagctgtcctccatggattgcagcccggaagtgctttaatgttcttgttgtagtgacaattgtaaagcacacttatttctgttcatttgtgtgaataagatactgcatatggttatttggccttgaaacatggtctctaatgtgctttact

SEQ ID NO: 65613 - DNA, 733 bp, Zea Mays
tttaccttatacaagttttggctttaaacccctttcccctcgcttgccgctgctccgccgtcgccgcgccccgaccagcatcggcgaatacctcccgcgcactcaaccgatggttgtagttgaatgtaatcgattggtgttccctggcaccatctttgtctgagttccgattctggaattgcgggattggttggtcgggtccggtgagcacgctcggggcggcgccggccgatggcggagctggtggggccgcgcgtctacagttgctgcaactgccggaacaacgtctgcctccacgacgacatcctctcaaaggcttttcagttgtgggggcgaaggaggatcggcaactaacgatagggctacacaaggttgctgatatctactgtagtgattgccgtgaggtgttgggctggaagtatgagagagcatatgaagaaacgcagaaatacaaggaaagttcatatttgagaagtcaaagattgtcaaagaaaactggtagtgtccaaattgtgactcagcaaacgttctggtgaagatgaaatgttataatatgcttttggatgtctgcgtccttgtagatagctgtcctccatggattgcagcccggaagtgctttaatgttcttgttgtagtgacaattgtaaagcacacttatttctgttcatttgtgtgaataagatactgcatatggttatttggccttgaaacatggtctctaatgtgctttact

SEQ ID NO: 65614 - DNA, 918 bp, Zea Mays
tttaccttatacaagttttggctttaaacccctttcccctcgcttgccgctgctccgccgtcgccgcgccccgaccagcatcggcgaatacctcccgcgcactcaaccgatggtctcactacctacgactgttcccattcccgagctccgattcggggctcgacggttcctggcccctttgtttcttggataaccgatgcaatttttggttctggataggttgtagttgaatgtaatcgattggtgttccctggcaccatctttgtctgagttccgattctggaattgcgggattggttggtcgggtccggtgagcacgctcggggcggcgccggccgatggcggagctggtggggccgcgcgtctacagttgctgcaactgccggaacaacgtctgcctccacgacgacatcctctcaaaggcttttcaggcacttgccaagttgaaaaatctgataagttggtgctcagctaaaggaacaaaatttgcgtgttcaagccccttgcgattaggttggaattagattcggtttcaaaactcgtgtgttttagctgtctttgttattttactagtaatttgcatctcactgttatgtttatagttggttccaatatttaggcccgaccttgcattagtgatatgtttctgtgcataagatactatttatggttatggttggtcactcgttctgattcttgaaaaggcaccagaacaaggcaacacaattaagaacaaggacattttcctcttcaatttatcttcagttttagagataaactgatgagaaaaagttattaagattgaaattttaacgaaattgagaacatataagcacacaaaagatatatccactattatactctcagtattatcttattataaatgaatacaattattcgttcgtaggtatagataac

SEQ ID NO: 65615 - DNA, 1212 bp, Zea Mays
gttccttgcgtcaaacaccagccaacctctctaccctcaccgtcgctctcaggccagaggccaatgcccctctcctcctcacggcgcccttctcaagcatcagcagtgggctcgccgtcgtttccccccaaccctggcgtgcatcaccatccctcatcctcatctcttcctctgctccttcgttcctcactagctcggccagggagctcccttcctctcgcgcccatcttctccctgcccagacgcactcgccctggactccatgtgtctccccagcttcatcttcctcagctcgcccaggccatggacatcagtgagctcaccctaggtcccacctgcattgaccctactcctctccatccatggctacgctcggcatccacatcaagccttgccctgggatcgtcttccaacgtccccttcacacccttgactctagctcgccagcaccctccgtttggccggccatggccacctcgccgaggccccggccacgacgtcatcctagctagctgtcaaagtcgtgcctcgcataccgcctatttgatgaaatgcccaaactcgtggactgtcaatgccacgtccgctccctgtcctaacaccctgtcgcaatttcgtgcgttgtcgatgagacatcgattttcttctattcaaatagtacattgcttgatgttagattaggatttaaaatatacaattgtgcgaggaatagtgataaatcagtggttgttgtcaaaataccgtgttgcatgtattgttatgattgtatccataattgtaatggagtcacatcgtatgattgagtttaagctgagatgtggtgtatgcatgagatgttctagtagatgtataaatctagtatcagtaaattggtttgatttggataggtggatgtatatgcagggtgcttaaattagttcttcatttgtgatgcgtggtcaacttaataatgtgaaggataacttatgtatttttaatgtctagccgataggtgttagtattgattatgatgaatatcgtttgtttgtttagggctaatgccttacttaaatagttactatattctagattccttgatcggtgaaatgtcttgtagagtggagatttgcttatgattcatttgtcgtttgtcactctgatttcatcatgccatgtcatgccttgtggtttaagtgttctctcttcaaatagttagtagagggtggtattgca

SEQ ID NO: 65616 - DNA, 2471 bp, Zea Mays
catccatccaattcatccatccacatgtttcccgccgtctctgcatgaggcgaacaccaagcaagaaaagaaaccctctccagccacgtaaaaaaaagcgtgggaaaaaaaagtgagcgaagcgtccagctctagaaaagaaaaaaaaaacgagaggattgtacagagcgcccctcttctaaatttggcacggagctctcgtcgccttcccgtctttcagaattcagagggccgcacacgttccctgccgctgcctctacccctctccgggctctccctccccctctccaccgtctctacaccgccgccgctcacaccccaattcctctcgccccattgccggccgcctccctccgtcctctcgcctcgcttgctgcaggttcaatcgccgccgccatttctgcagtttttaattcccacgtcctgttccggcccggccgtgcactccaaattcttccaacaaggccagcccacgccacccggccgggatcccagaaaagttgcgctcggccttcgcgcgttacgtctcccacccagcccttcgatcccgtgatttcagaggcgcccctgtaccgaaagcctagctcccaatcttccttggattcgtcttttttttggatcttggggactgcactgcacacagtttgcctctcttacctttttttggatcttggtggtgccgagccgacaagcaatggggaggaagtactactgccacgccgtggccgcgctggccgtcgtgttcgcggcggccgtcgtcgtcgctgccgaccggcgcctgtcgctggtggtcggcgccgcggtggcgcccgaggaggtgagtctgctccggaaggtggccaatctgatgtggaacggcgatggcaactcgtaccagcacgtgtggccgccaatggagtttgggtggcaaattgtgctggggtcactgatcggattcttcggtgccgcgtttgggagcgtcggcggagttggtggcggcgggatcttcgtgccgatgctgacgctcatcattgggtttgacccgaaatcatctactgcgatatcaaagtgtatgattatgggagcctctgtttcaactgtttactacaatctcaagctaaagcatccgactttggacatgccagtgatcgattatgacctggctgtgctcatgcagcctatgctaatgcttgggatcagcattggtgttatttttaatgttatattccctgactggctggtcacagttctgctgataattcttttcctaggcacatccacaaaagcctttctgaagggcattgagacatggaagaaagagacagtaatccaaagggaggctgcgaaacttttggagcaaactgcaggtgaggaagcagagtatgcagcacttcctactggaccagatgttgcagcaaacaaaaaagccctcacatcagatgaggcgccatcgcttataaagaacatacactggaagaaggttggtcttctttcatttgtatgggtggcattccttgttcttcaggtcacaaagaattacactgctacttgctccccatggtactgggtcttgaaccttctccagtgtcagtaggagtgacactgtatgaaggatttgggctgatgagtgggaagagggtgttatcatcaaagggaagtggacaaactaccatgaaatttcatcaggtagtcgtatacggtctattcggtatagccgcaggactagttggtggactccttggtctcggaggtggcttcattatggggccactgttcttggagcttggcatccctccccaagtttcaagtgctactgctacctttgcaatgatgttctcatcttccatgtcggttgtcgaatactacctcttgaaccggtttccagtgccttatgctgtttatttcatcgttgttgcatttgttgctgccatcattggccagcatgtggtgaggaagttgatcaactggctagggcgagcatcacttatcatcttcatactggctttcatgatctttgtcagcgcgatttctctcggtggggttggcgtctctaacatggttcacaagattgagcgacatgagtacatggggtttgaggacctttgcaagtacgatgcataagaagcagggaagctgaagatgtgagctatgtggtgtgcagttctccgcaagcagaagtgggataattcaaggatagaagggttccatgatgcaatttggtgcgtaggaccgaagaggttctagcagcgacagttcctcgaagggaggctagctgcatggattggcttaagatgaattttgggcactgaattttcaaaacaaatgtagagatgattttctgccacggcagaatgtcgtcagtgcatttcgttgtaggaaatgtacactgcacatcttcagataaccatcctatagtactacgcgatatgaaatatcacatgatagacatgagatgggtgcctcttatggatttaacgtctttagcctagctc

SEQ ID NO: 65617 - DNA, 2411 bp, Zea Mays
ccacatgtttcccgccgtctctgcatgaggcgaacaccaagcaagaaaagaaaccctctccagccacgtaaaaaaaagcgtgggaaaaaaaagtgagcgaagcgtccagctctagaaaagaaaaaaaaaacgagaggattgtacagagcgcccctcttctaaatttggcacggagctctcgtcgccttcccgtctttcagaattcagagggccgcacacgttccctgccgctgcctctacccctctccgggctctccctccccctctccaccgtctctacaccgccgccgctcacaccccaattcctctcgccccattgccggccgcctccctccgtcctctcgcctcgcttgctgcaggttcaatcgccgccgccatttctgcagtttttaattcccacgtcctgttccggcccggccgtgcactccaaattcttccaacaaggccagcccacgccacccggccgggatcccagaaaagttgcgctcggccttcgcgcgttacgtctcccacccagcccttcgatcccgtgatttcagaggcgcccctgtaccgaaagcctagctcccaatcttccttggattcgtcttttttttggatcttggggactgcactgcacacagtttgcctctcttacctttttttggatcttggtggtgccgagccgacaagcaatggggaggaagtactactgccacgccgtggccgcgctggccgtcgtgttcgcggcggccgtcgtcgtcgctgccgaccggcgcctgtcgctggtggtcggcgccgcggtggcgcccgaggaggtgagtctgctccggaaggtggccaatctgatgtggaacggcgatggcaactcgtaccagcacgtgtggccgccaatggagtttgggtggcaaattgtgctggggtcactgatcggattcttcggtgccgcgtttgggagcgtcggcggagttggtggcggcgggatcttcgtgccgatgctgacgctcatcattgggtttgacccgaaatcatctactgcgatatcaaagtgtatgattatgggagcctctgtttcaactgtttactacaatctcaagctaaagcatccgactttggacatgccagtgatcgattatgacctggctgtgctcatgcagcctatgctaatgcttgggatcagcattggtgttatttttaatgttatattccctgactggctggtcacagttctgctgataattcttttcctaggcacatccacaaaagcctttctgaagggcattgagacatggaagaaagagacagtaatccaaagggaggctgcgaaacttttggagcaaactgcaggtgaggaagcagagtatgcagcacttcctactggaccagatgttgcagcaaacaaaaaagccctcacatcagatgaggcgccatcgcttataaagaacatacactggaagaaggttggtcttctttcatttgtatgggtggcattccttgttcttcaggtcacaaagaattacactgctacttgctccccatggtactgggtcttgaaccttctccaggttccagtgtcagtaggagtgacactgtatgaaggatttgggctgatgagtgggaagagggtgttatcatcaaagggaagtggacaaactaccatgaaatttcatcaggtagtcgtatacggtctattcggtatagccgcaggactagttggtggactccttggtctcggaggtggcttcattatggggccactgttcttggagcttggcatccctccccaagtttcaagtgctactgctacctttgcaatgatgttctcatcttccatgtcggttgtcgaatactacctcttgaaccggtttccagtgccttatgcatgtggtgaggaagttgatcaactggctagggcgagcatcacttatcatcttcatactggctttcatgatctttgtcagcgcgatttctctcggtggggttggcgtctctaacatggttcacaagattgagcgacatgagtacatggggtttgaggacctttgcaagtacgatgcataagaagcagggaagctgaagatgtgagctatgtggtgtgcagttctccgcaagcagaagtgggataattcaaggatagaagggttccatgatgcaatttggtgcgtaggaccgaagaggttctagcagcgacagttcctcgaagggaggctagctgcatggattggcttaagatgaattttgggcactgaattttcaaaacaaatgtagagatgattttctgccacggcagaatgtcgtcagtgcatttcgttgtaggaaatgtacactgcacatcttcagataaccatcctatagtactacgcgatatgaaatatcacatgatagacatgagatgggtgcctcttatggatttaacgtctttagcctagctc

SEQ ID NO: 65618 - DNA, 3880 bp, Zea Mays
cagaaagcaactcagctgcgcggcagtgcaggggtacacccatggcaacgtgacatgcctgccaatgataccgcggagaagactccaaaaagactgagacagtgagacgcctttacgatagagaaaagatatacatgcccctccctctttcttcgcctagagacagccaagtcactcacgctcctctccactccgtccactactttcacctgatcgccaccactacctccacctggaacctggaagagagagagacaatggcgtgtaggccgccatgtccatgtggctgcttctgcttctacatggtgttcttcctcggcttgctgctcgtcgaggccgtccatggcacagggcggagcgaggtggccgcggccgctccgactccgagcctcgttccagctgaagcgagcgtccttcgccggatcgcggccaggcttggtgtgtccagctgggacttcaccgccggcgccggtccctgcgaccacggagactccggggtgcactgtgactgctccttctccaacggcaccgtctgccatgtcacagagatattcctcaaggggcagaacttctccggtgagctcccgcctgacttcgctgacctcccctacctcctccagctagatctaagcaggagcttgttccatggcggagtgcctcaccagtgggccaggatgaagttacaaggactgtcactgatggcgaatagattgtcagggccttttcccatggttctcacaaagatcacaaccctgactaacctgagcattgaaggcaatgagttctatgggccaatccctcctgaaattgggtatttaattagaatggaaaagctaatattatcaaccaatgagttcactggaccccttccagctgctctttcgctattcagtaatttaactgatttgaggatttctagcaccaatttttccggaaggatacctgatttttggggaaacttgaaaaggcttgacaaattgcaaatagaaggatctttcttagaagggccaattccctcgagcctatctgaattgaaaaacctttctgatctgaggattagtgacctgagaggtagtggttcatctttccctgatttaagtggaatgacatacatgaacaaattggtactaaggaactgttccatcagtggaagcatacccccatacattggcacatggacatctcttaagcatctggatctcagctttaataaactgagtggagaaataccaccttcttttgctagcatgggagctgtagattacatatatctatctggaaattcactcaccgggaacatacctggatggttattaagaagaaacaagatcgcggacatatcttttaataacttcacgatggggagttcaggtccgagccaatgccttcaagggagtgtcaatctggtggagagctattcagctgaagtgaaccgtttaaatagtattcatccatgcttaaagaggaacttcccatgtgttgcttcgaatggacaatatcactcttcactgcatatcaattgcggcgacaaagaagcaactattaacggaactaaatatgaagccgacacaacacccaaaggggcatcattgttgtatgtgtccccaggcttgaactgggcattcagcagcaccgggaacttcatggacgacaacataaatgacgacaactacatagcaacaagtgcatcaaaattggccgtgcccaattcagatctgtacaacaaagcccgtctttctcctctttcgctcacatattatgggctttgcatgttaagtgggagctacacagttaatctccactttgctgaaattgttttcacaaatgacagcacatattatagccttggcaaaaggagattcaacgtgtttatacaggggagaatggtgctagaggatttcgatattgaacagtcatccggtgcggctgcaaaaccagttaccaagacttttcaaacatatgttacaaatcacactctagagattcagttctattgggcaggaagagggacaacaggcattccatatagaggttcttatggcccactgatatctgcaatatcagtaactccaaatttccaaattccattggctgttgaccctcccaaagctggaagtagggaaaaaaggagttcaagggcatctattgctttaggaattggaattcctattgtagcaatattcactgctctgattctcggcatttattgtattaagaagcagagaaagagttcgatgcatgaagaactcagagcccttgacctgcaaattggctccttcaccttgcgtcaaatcaaagcagcaactaggaacttcgatgcagctaacaagattggtgaaggaggatttggttcggtttacaagggtttattatccgatggcaccatcatcgctgtcaagcagttatcatcaaggtctaaacaagggaatcgggaatttgtgaacgagataggcatgatatctgcactccagcatccaaaccttgtcaaactctacggctgctgtacagaaggaaaccagctgtcgctagtttatgagtacatggaaaacaattgcctcgcacgagctcttttcgttgaacagtatagactgagaatggattggggaacaaggcataagatttgccttggaatagcgaaaggtctagcatatttgcatgaagagtctgcaataaggatcgtgcacagagatataaaggccagcaatatactgctcgacaaagatttgaatgccaagatctcagattttgggctagcaaagcttaatgaagatgatcacacccacataagcacaaaagtagctggaactatcggttacatggctcctgagtatgctatgcgtggttatttaacagataaagctgatgtatacagttttggtgttgttgttttggaaattgtcagtggaaaaagtaacacaaactacaggccgaaggaagactttgtttatcttttagattgggcttgtgttctacatgagagaggaactctactggaattggttgatccagatctaggatccaattactcgacagaagaagcgctcctcatgctgaatgttgccctgctatgcacaactgcggcgcctacactcagaccaaagatgtcaaaagttgttagcctgcttgaaggcagtgccccactgcagcctttgctgtcagacctcagccttgcagcaaatagcctgagctcaagtggtgtacgcaggaacttctggcaaaacccaggtgagagtcagagcctgacagcacaagcttcatgcagcgatactaatgaatcatccaccattgatatagatggtattctactggtaagttagatgtagtttgctgtgcatcatgaactaggtttacatgtaggaactactaagcataggccagcatgtttgtattaagttcaccagtgcaatgtaaatagcaagtagcatactaatgtctagtacaggtagagccctatgcattttacaccagtgcaatgtaaatagcaagtagcatactaatgtctagtacaggtaaagccctattcattttagtagtctctgtttcatattacatgggaatattaagatgtctgtgacagaacactggaagttctctatggactatagtctctgagctcctatccatcttttctttgatttctgaaaagataaaaatttgacattaatattttatctgatagcagttaaggatcaatttcaacttggagatgaaccggtaccgattaggtactcaataactcggctcacctcaatcatcctaccaaatataaaagcaccatcacaaaaatacagatgtcctcttcagcaaatgttctggaacacaacttataaggtagaagagtttgaggatatctcaagtgcctccccatgctaaattgaat

SEQ ID NO: 65619 - DNA, 1431 bp, Zea Mays
ctcctctccactccgtccactactttcacctgatcgccaccactacctccacctggaacctggaagagagagagacaatggcgtgtaggccgccatgtccatgtggctgcttctgcttctacatggtgttcttcctcggcttgctgctcgtcgaggccgtccatggcacagggcggagcgaggtggccgcggccgctccgactccgagcctcgttccagctgaagcgagcgtccttcgccggatcgcggccaggcttggtgtgtccagctgggacttcaccgccggcgccggtccctgcgaccacggagactccggggtgcactgtgactgctccttctccaacggcaccgtctgccatgtcacagagatattcctcaaggggcagaacttctccggtgagctcccgcctgacttcgctgacctcccctacctcctccagctagatctaagcaggagcttgttccatggcggagtgcctcaccagtgggccaggatgaagttacaaggactgtcactgatggcgaatagattgtcagggccttttcccatggttctcacaaagatcacaaccctgactaacctgagcattgaaggcaatgagttctatgggccaatccctcctgaaattgggtatttaattagaatggaaaagctaatattatcaaccaatgagttcactggaccccttccagctgctctttcgctattcagtaatttaactgatttgaggatttctagcaccaatttttccggaaggatacctgatttttggggaaacttgaaaaggcttgacaaattgcaaatagaaggatctttcttagaagggccaattccctcgagcctatctgaattgaaaaacctttctgatctgaggattagtgacctgagaggtagtggttcatctttccctgatttaagtggaatgacatacatgaacaaattggtactaaggaactgttccatcagtggaagcatacccccatacattggcacatggacatctcttaagcatctggatctcagctttaataaactgagtggagaaataccaccttcttttgctagcatgggagctgtagattacatatatctatctggaaattcactcaccgggaacatacctggatggttattaagaagaaacaagatcgcggacatatcttttaataacttcacgatggggagttcaggtccgagccaatgccttcaagggagtgtcaatctggtggagagctattcagctgaagtgaaccgtttaaatagtattcatccatgcttaaagaggaacttcccatgtgttgcttcgaatggacaattcgaggaaaagccttctggacgggtgatgtgagttggacctctatccaaccaagtccacaaatctccctgcgctcaaacatgctcttgcagcaagatctactacctactctcat

SEQ ID NO: 65620 - DNA, 3124 bp, Zea Mays
ctcctctccactccgtccactactttcacctgatcgccaccactacctccacctggaacctggaagagagagagacaatggcgtgtaggccgccatgtccatgtggctgcttctgcttctacatggtgttcttcctcggcttgctgctcgtcgaggccgtccatggcacagggcggagcgaggtggccgcggccgctccgactccgagcctcgttccagctgaagcgagcgtccttcgccggatcgcggccaggcttggtgtgtccagctgggacttcaccgccggcgccggtccctgcgaccacggagactccggggtgcactgtgactgctccttctccaacggcaccgtctgccatgtcacagagatattcctcaaggggcagaacttctccggtgagctcccgcctgacttcgctgacctcccctacctcctccagctagatctaagcaggagcttgttccatggcggagtgcctcaccagtgggccaggatgaagttacaaggactgtcactgatggcgaatagattgtcagggccttttcccatggttctcacaaagatcacaaccctgactaacctgagcattgaaggcaatgagttctatgggccaatccctcctgaaattgggtatttaattagaatggaaaagctaatattatcaaccaatgagttcactggaccccttccagctgctctttcgctattcagtaatttaactgatttgaggatttctagcaccaatttttccggaaggatacctgatttttggggaaacttgaaaaggcttgacaaattgcaaatagaaggatctttcttagaagggccaattccctcgagcctatctgaattgaaaaacctttctgatctgaggattagtgacctgagaggtagtggttcatctttccctgatttaagtggaatgacatacatgaacaaattggtactaaggaactgttccatcagtggaagcatacccccatacattggcacatggacatctcttaagcatctggatctcagctttaataaactgagtggagaaataccaccttcttttgctagcatgggagctgtagattacatatatctatctggaaattcactcaccgggaacatacctggatggttattaagaagaaacaagatcgcggacatatcttttaataacttcacgatggggagttcaggtccgagccaatgccttcaagggagtgtcaatctggtggagagctattcagctgaagtgaaccgtttaaatagtattcatccatgcttaaagaggaacttcccatgtgttgcttcgaatggacaatatttccaaattccattggctgttgaccctcccaaagctggaagtagggaaaaaaggagttcaagggcatctattgctttaggaattggaattcctattgtagcaatattcactgctctgattctcggcatttattgtattaagaagcagagaaagagttcgatgcatgaagaactcagagcccttgacctgcaaattggctccttcaccttgcgtcaaatcaaagcagcaactaggaacttcgatgcagctaacaagattggtgaaggaggatttggttcggtttacaagggtttattatccgatggcaccatcatcgctgtcaagcagttatcatcaaggtctaaacaagggaatcgggaatttgtgaacgagataggcatgatatctgcactccagcatccaaaccttgtcaaactctacggctgctgtacagaaggaaaccagctgtcgctagtttatgagtacatggaaaacaattgcctcgcacgagctcttttcgttgaacagtatagactgagaatggattggggaacaaggcataagatttgccttggaatagcgaaaggtctagcatatttgcatgaagagtctgcaataaggatcgtgcacagagatataaaggccagcaatatactgctcgacaaagatttgaatgccaagatctcagattttgggctagcaaagcttaatgaagatgatcacacccacataagcacaaaagtagctggaactatcggttacatggctcctgagtatgctatgcgtggttatttaacagataaagctgatgtatacagttttggtgttgttgttttggaaattgtcagtggaaaaagtaacacaaactacaggccgaaggaagactttgtttatcttttagattgggcttgtgttctacatgagagaggaactctactggaattggttgatccagatctaggatccaattactcgacagaagaagcgctcctcatgctgaatgttgccctgctatgcacaactgcggcgcctacactcagaccaaagatgtcaaaagttgttagcctgcttgaaggcagtgccccactgcagcctttgctgtcagacctcagccttgcagcaaatagcctgagctcaagtggtgtacgcaggaacttctggcaaaacccaggtgagagtcagagcctgacagcacaagcttcatgcagcgatactaatgaatcatccaccattgatatagatggtattctactggtaagttagatgtagtttgctgtgcatcatgaactaggtttacatgtaggaactactaagcataggccagcatgtttgtattaagttcaccagtgcaatgtaaatagcaagtagcatactaatgtctagtacaggtagagccctatgcattttacaccagtgcaatgtaaatagcaagtagcatactaatgtctagtacaggtaaagccctattcattttagtagtctctgtttcatattacatgggaatattaagatgtctgtgacagaacactggaagttctctatggactatagtctctgagctcctatccatcttttctttgatttctgaaaagataaaaatttgacattaatattttatctgatagcagttaaggatcaatttcaacttggagatgaaccggtaccgattaggtactcaataactcggctcacctcaatcatcctaccaaatataaaagcaccatcacaaaaatacagatgtcctcttcagcaaatgttctggaacacaacttataaggtagaagagtttgaggatatctcaagtgcctccccatgctaaattgaat

SEQ ID NO: 65621 - DNA, 3661 bp, Zea Mays
ctcctctccactccgtccactactttcacctgatcgccaccactacctccacctggaacctggaagagagagagacaatggcgtgtaggccgccatgtccatgtggctgcttctgcttctacatggtgttcttcctcggcttgctgctcgtcgaggccgtccatggcacagggcggagcgaggtggccgcggccgctccgactccgagcctcgttccagctgaagcgagcgtccttcgccggatcgcggccaggcttggtgtgtccagctgggacttcaccgccggcgccggtccctgcgaccacggagactccggggtgcactgtgactgctccttctccaacggcaccgtctgccatgtcacagagatattcctcaaggggcagaacttctccggtgagctcccgcctgacttcgctgacctcccctacctcctccagctagatctaagcaggagcttgttccatggcggagtgcctcaccagtgggccaggatgaagttacaaggactgtcactgatggcgaatagattgtcagggccttttcccatggttctcacaaagatcacaaccctgactaacctgagcattgaaggcaatgagttctatgggccaatccctcctgaaattgggtatttaattagaatggaaaagctaatattatcaaccaatgagttcactggaccccttccagctgctctttcgctattcagtaatttaactgatttgaggatttctagcaccaatttttccggaaggatacctgatttttggggaaacttgaaaaggcttgacaaattgcaaatagaaggatctttcttagaagggccaattccctcgagcctatctgaattgaaaaacctttctgatctgaggattagtgacctgagaggtagtggttcatctttccctgatttaagtggaatgacatacatgaacaaattggtactaaggaactgttccatcagtggaagcatacccccatacattggcacatggacatctcttaagcatctggatctcagctttaataaactgagtggagaaataccaccttcttttgctagcatgggagctgtagattacatatatctatctggaaattcactcaccgggaacatacctggatggttattaagaagaaacaagatcgcggacatatcttttaataacttcacgatggggagttcaggtccgagccaatgccttcaagggagtgtcaatctggtggagagctattcagctgaagtgaaccgtttaaatagtattcatccatgcttaaagaggaacttcccatgtgttgcttcgaatggacaatatcactcttcactgcatatcaattgcggcgacaaagaagcaactattaacggaactaaatatgaagccgacacaacacccaaaggggcatcattgttgtatgtgtccccaggcttgaactgggcattcagcagcaccgggaacttcatggacgacaacataaatgacgacaactacatagcaacaagtgcatcaaaattggccgtgcccaattcagatctgtacaacaaagcccgtctttctcctctttcgctcacatattatgggctttgcatgttaagtgggagctacacagttaatctccactttgctgaaattgttttcacaaatgacagcacatattatagccttggcaaaaggagattcaacgtgtttatacaggggagaatggtgctagaggatttcgatattgaacagtcatccggtgcggctgcaaaaccagttaccaagacttttcaaacatatgttacaaatcacactctagagattcagttctattgggcaggaagagggacaacaggcattccatatagaggttcttatggcccactgatatctgcaatatcagtaactccaaatttccaaattccattggctgttgaccctcccaaagctggaagtagggaaaaaaggagttcaagggcatctattgctttaggaattggaattcctattgtagcaatattcactgctctgattctcggcatttattgtattaagaagcagagaaagagttcgatgcatgaagaactcagagcccttgacctgcaaattggctccttcaccttgcgtcaaatcaaagcagcaactaggaacttcgatgcagctaacaagattggtgaaggaggatttggttcggtttacaagttatcatcaaggtctaaacaagggaatcgggaatttgtgaacgagataggcatgatatctgcactccagcatccaaaccttgtcaaactctacggctgctgtacagaaggaaaccagctgtcgctagtttatgagtacatggaaaacaattgcctcgcacgagctcttttcgttgaacagtatagactgagaatggattggggaacaaggcataagatttgccttggaatagcgaaaggtctagcatatttgcatgaagagtctgcaataaggatcgtgcacagagatataaaggccagcaatatactgctcgacaaagatttgaatgccaagatctcagattttgggctagcaaagcttaatgaagatgatcacacccacataagcacaaaagtagctggaactatcggttacatggctcctgagtatgctatgcgtggttatttaacagataaagctgatgtatacagttttggtgttgttgttttggaaattgtcagtggaaaaagtaacacaaactacaggccgaaggaagactttgtttatcttttagattgggcttgtgttctacatgagagaggaactctactggaattggttgatccagatctaggatccaattactcgacagaagaagcgctcctcatgctgaatgttgccctgctatgcacaactgcggcgcctacactcagaccaaagatgtcaaaagttgttagcctgcttgaaggcagtgccccactgcagcctttgctgtcagacctcagccttgcagcaaatagcctgagctcaagtggtgtacgcaggaacttctggcaaaacccaggtgagagtcagagcctgacagcacaagcttcatgcagcgatactaatgaatcatccaccattgatatagatggtattctactggtaagttagatgtagtttgctgtgcatcatgaactaggtttacatgtaggaactactaagcataggccagcatgtttgtattaagttcaccagtgcaatgtaaatagcaagtagcatactaatgtctagtacaggtagagccctatgcattttacaccagtgcaatgtaaatagcaagtagcatactaatgtctagtacaggtaaagccctattcattttagtagtctctgtttcatattacatgggaatattaagatgtctgtgacagaacactggaagttctctatggactatagtctctgagctcctatccatcttttctttgatttctgaaaagataaaaatttgacattaatattttatctgatagcagttaaggatcaatttcaacttggagatgaaccggtaccgattaggtactcaataactcggctcacctcaatcatcctaccaaatataaaagcaccatcacaaaaatacagatgtcctcttcagcaaatgttctggaacacaacttataaggtagaagagtttgaggatatctcaagtgcctccccatgctaaattgaat

SEQ ID NO: 65622 - DNA, 3658 bp, Zea Mays
ctcctctccactccgtccactactttcacctgatcgccaccactacctccacctggaacctggaagagagagagacaatggcgtgtaggccgccatgtccatgtggctgcttctgcttctacatggtgttcttcctcggcttgctgctcgtcgaggccgtccatggcacagggcggagcgaggtggccgcggccgctccgactccgagcctcgttccagctgaagcgagcgtccttcgccggatcgcggccaggcttggtgtgtccagctgggacttcaccgccggcgccggtccctgcgaccacggagactccggggtgcactgtgactgctccttctccaacggcaccgtctgccatgtcacagagatattcctcaaggggcagaacttctccggtgagctcccgcctgacttcgctgacctcccctacctcctccagctagatctaagcaggagcttgttccatggcggagtgcctcaccagtgggccaggatgaagttacaaggactgtcactgatggcgaatagattgtcagggccttttcccatggttctcacaaagatcacaaccctgactaacctgagcattgaaggcaatgagttctatgggccaatccctcctgaaattgggtatttaattagaatggaaaagctaatattatcaaccaatgagttcactggaccccttccagctgctctttcgctattcagtaatttaactgatttgaggatttctagcaccaatttttccggaaggatacctgatttttggggaaacttgaaaaggcttgacaaattgcaaatagaaggatctttcttagaagggccaattccctcgagcctatctgaattgaaaaacctttctgatctgaggattagtgacctgagaggtagtggttcatctttccctgatttaagtggaatgacatacatgaacaaattggtactaaggaactgttccatcagtggaagcatacccccatacattggcacatggacatctcttaagcatctggatctcagctttaataaactgagtggagaaataccaccttcttttgctagcatgggagctgtagattacatatatctatctggaaattcactcaccgggaacatacctggatggttattaagaagaaacaagatcgcggacatatcttttaataacttcacgatggggagttcaggtccgagccaatgccttcaagggagtgtcaatctggtggagagctattcagctgaagtgaaccgtttaaatagtattcatccatgcttaaagaggaacttcccatgtgttgcttcgaatggacaatatcactcttcactgcatatcaattgcggcgacaaagaagcaactattaacggaactaaatatgaagccgacacaacacccaaaggggcatcattgttgtatgtgtccccaggcttgaactgggcattcagcagcaccgggaacttcatggacgacaacataaatgacgacaactacatagcaacaagtgcatcaaaattggccgtgcccaattcagatctgtacaacaaagcccgtctttctcctctttcgctcacatattatgggctttgcatgttaagtgggagctacacagttaatctccactttgctgaaattgttttcacaaatgacagcacatattatagccttggcaaaaggagattcaacgtgtttatacaggggagaatggtgctagaggatttcgatattgaacagtcatccggtgcggctgcaaaaccagttaccaagacttttcaaacatatgttacaaatcacactctagagattcagttctattgggcaggaagagggacaacaggcattccatatagagatttccaaattccattggctgttgaccctcccaaagctggaagtagggaaaaaaggagttcaagggcatctattgctttaggaattggaattcctattgtagcaatattcactgctctgattctcggcatttattgtattaagaagcagagaaagagttcgatgcatgaagaactcagagcccttgacctgcaaattggctccttcaccttgcgtcaaatcaaagcagcaactaggaacttcgatgcagctaacaagattggtgaaggaggatttggttcggtttacaagggtttattatccgatggcaccatcatcgctgtcaagcagttatcatcaaggtctaaacaagggaatcgggaatttgtgaacgagataggcatgatatctgcactccagcatccaaaccttgtcaaactctacggctgctgtacagaaggaaaccagctgtcgctagtttatgagtacatggaaaacaattgcctcgcacgagctcttttcgttgaacagtatagactgagaatggattggggaacaaggcataagatttgccttggaatagcgaaaggtctagcatatttgcatgaagagtctgcaataaggatcgtgcacagagatataaaggccagcaatatactgctcgacaaagatttgaatgccaagatctcagattttgggctagcaaagcttaatgaagatgatcacacccacataagcacaaaagtagctggaactatcggttacatggctcctgagtatgctatgcgtggttatttaacagataaagctgatgtatacagttttggtgttgttgttttggaaattgtcagtggaaaaagtaacacaaactacaggccgaaggaagactttgtttatcttttagattgggcttgtgttctacatgagagaggaactctactggaattggttgatccagatctaggatccaattactcgacagaagaagcgctcctcatgctgaatgttgccctgctatgcacaactgcggcgcctacactcagaccaaagatgtcaaaagttgttagcctgcttgaaggcagtgccccactgcagcctttgctgtcagacctcagccttgcagcaaatagcctgagctcaagtggtgtacgcaggaacttctggcaaaacccaggtgagagtcagagcctgacagcacaagcttcatgcagcgatactaatgaatcatccaccattgatatagatggtattctactggtaagttagatgtagtttgctgtgcatcatgaactaggtttacatgtaggaactactaagcataggccagcatgtttgtattaagttcaccagtgcaatgtaaatagcaagtagcatactaatgtctagtacaggtagagccctatgcattttacaccagtgcaatgtaaatagcaagtagcatactaatgtctagtacaggtaaagccctattcattttagtagtctctgtttcatattacatgggaatattaagatgtctgtgacagaacactggaagttctctatggactatagtctctgagctcctatccatcttttctttgatttctgaaaagataaaaatttgacattaatattttatctgatagcagttaaggatcaatttcaacttggagatgaaccggtaccgattaggtactcaataactcggctcacctcaatcatcctaccaaatataaaagcaccatcacaaaaatacagatgtcctcttcagcaaatgttctggaacacaacttataaggtagaagagtttgaggatatctcaagtgcctccccatgctaaattgaat

SEQ ID NO: 65623 - DNA, 4967 bp, Zea Mays
ccgtccactactttcacctgatcgccaccactacctccacctggaacctggaagagagagagacaatggcgtgtaggccgccatgtccatgtggctgcttctgcttctacatggtgttcttcctcggcttgctgctcgtcgaggccgtccatggcacagggcggagcgaggtggccgcggccgctccgactccgagcctcgttccagctgaagcgagcgtccttcgccggatcgcggccaggcttggtgtgtccagctgggacttcaccgccggcgccggtccctgcgaccacggagactccggggtgcactgtgactgctccttctccaacggcaccgtctgccatgtcacagagatattcctcaaggggcagaacttctccggtgagctcccgcctgacttcgctgacctcccctacctcctccagctagatctaagcaggagcttgttccatggcggagtgcctcaccagtgggccaggatgaagttacaaggactattggatgtcgtcgggtttacttaccttggggacttgaagcgaagatagaagagatgtgacgtcggtctctccatggttgacaactttctggtggcgatccaccgtgtattgtgacaagaatttctctttcgcttgatgcatgtagtcctcgtattgctgtcgctcatcggtcgtcagacttttaacaaccggcttcaggatattgtccagggagatatcggtgtgatctttagaaccaaccatttgagagcctgatttttagtagatctagacacctgtctctagcggagtcgccaaaaagtgtgttggcgccgatctggacgccaaacatggaaacgggtcgcctggcggtgttctctgcagaggcgcggatggtccgcgacacagagccggacggtccgcgacctggcgtaggagctctcctcctatgtgtacgtccggacggtccgcgcttggggctcggacggtccacaatggcgcagagggtcttcttcttcacagcagacctagatctcaccttccgggagggaccccgtcggggaggagagatcctagggtgtgtcttggcatcgacagaccacccaagatgcctctagtcgacgtagagccaaagagaagtgaagatttgaggtagagggaggctaaactagaactactcctaatgcataaggtaaaacgagaagtagatttgatttgatcgattgtggggggtttaatcggtcgtagcccttcatctatataaaggggggagatctggacccattacaagtcatttcccaagttaatcccgtagttttagctaacaaaccccgcaagaaactcggaccctgcgcacgcgcggaccatccgcgccaccactgcggaccatccggaccacggtctgtctgcctcagggccggaccgtctgcacggtcactttctgtgctcaacaaatgtagtagtgaccaacaacagtctagtagtagtctccctttgcagccttgttagagtagtgaattcttgttcatctgactggtgccgtacatgataatccatggcatcgccgttaatgcactgaatgaatttgattttccgatcataagcctaaaacatacctcctatgaacgaaggtatcagaatataaaatattttaataattcgatttgtagaacaaacagagtcacataccatgttgttgatctgttgatgccaaagccatgcaggtcactgatggcgaatagattgtcagggccttttcccatggttctcacaaagatcacaaccctgactaacctgagcattgaaggcaatgagttctatgggccaatccctcctgaaattgggtatttaattagaatggaaaagctaatattatcaaccaatgagttcactggaccccttccagctgctctttcgctattcagtaatttaactgatttgaggatttctagcaccaatttttccggaaggatacctgatttttggggaaacttgaaaaggcttgacaaattgcaaatagaaggatctttcttagaagggccaattccctcgagcctatctgaattgaaaaacctttctgatctgaggattagtgacctgagaggtagtggttcatctttccctgatttaagtggaatgacatacatgaacaaattggtactaaggaactgttccatcagtggaagcatacccccatacattggcacatggacatctcttaagcatctgtaataaatcacaatttatctaagtgctaaaatgtttttataattaacatattttgttataacattgtttattcagggatctcagctttaataaactgagtggagaaataccaccttcttttgctagcatgggagctgtagattacatatatctatctggaaattcactcaccgggaacatacctggatggttattaagaagaaacaagatcgcggacatatcttttaataacttcacgatggggagttcaggtccgagccaatgccttcaagggagtgtcaatctggtggagagctattcagctgaagtgaaccgtttaaatagtattcatccatgcttaaagaggaacttcccatgtgttgcttcgaatggacaatatcactcttcactgcatatcaattgcggcgacaaagaagcaactattaacggaactaaatatgaagccgacacaacacccaaaggggcatcattgttgtatgtgtccccaggcttgaactgggcattcagcagcaccgggaacttcatggacgacaacataaatgacgacaactacatagcaacaagtgcatcaaaattggccgtgcccaattcagatctgtacaacaaagcccgtctttctcctctttcgctcacatattatgggctttgcatgttaagtgggagctacacagttaatctccactttgctgaaattgttttcacaaatgacagcacatattatagccttggcaaaaggagattcaacgtgtttatacaggggagaatggtgctagaggatttcgatattgaacagtcatccggtgcggctgcaaaaccagttaccaagacttttcaaacatatgttacaaatcacactctagagattcagttctattgggcaggaagagggacaacaggcattccatatagaggttcttatggcccactgatatctgcaatatcagtaactccaaatttccaaattccattggctgttgaccctcccaaagctggaagtagggaaaaaaggagttcaagggcatctattgctttaggaattggaattcctattgtagcaatattcactgctctgattctcggcatttattgtattaagaagcagagaaagagttcgatgcatgaagaactcagagcccttgacctgcaaattggctccttcaccttgcgtcaaatcaaagcagcaactaggaacttcgatgcagctaacaagattggtgaaggaggatttggttcggtttacaagggtttattatccgatggcaccatcatcgctgtcaagcagttatcatcaaggtctaaacaagggaatcgggaatttgtgaacgagataggcatgatatctgcactccagcatccaaaccttgtcaaactctacggctgctgtacagaaggaaaccagctgtcgctagtttatgagtacatggaaaacaattgcctcgcacgagctcttttcgttgaacagtatagactgagaatggattggggaacaaggcataagatttgccttggaatagcgaaaggtctagcatatttgcatgaagagtctgcaataaggatcgtgcacagagatataaaggccagcaatatactgctcgacaaagatttgaatgccaagatctcagattttgggctagcaaagcttaatgaagatgatcacacccacataagcacaaaagtagctggaactatcggttacatggctcctgagtatgctatgcgtggttatttaacagataaagctgatgtatacagttttggtgttgttgttttggaaattgtcagtggaaaaagtaacacaaactacaggccgaaggaagactttgtttatcttttagattgggcttgtgttctacatgagagaggaactctactggaattggttgatccagatctaggatccaattactcgacagaagaagcgctcctcatgctgaatgttgccctgctatgcacaactgcggcgcctacactcagaccaaagatgtcaaaagttgttagcctgcttgaaggcagtgccccactgcagcctttgctgtcagacctcagccttgcagcaaatagcctgagctcaagtggtgtacgcaggaacttctggcaaaacccaggtgagagtcagagcctgacagcacaagcttcatgcagcgatactaatgaatcatccaccattgatatagatggtattctactggtaagttagatgtagtttgctgtgcatcatgaactaggtttacatgtaggaactactaagcataggccagcatgtttgtattaagttcaccagtgcaatgtaaatagcaagtagcatactaatgtctagtacaggtagagccctatgcattttacaccagtgcaatgtaaatagcaagtagcatactaatgtctagtacaggtaaagccctattcattttagtagtctctgtttcatattacatgggaatattaagatgtctgtgacagaacactggaagttctctatggactatagtctctgagctcctatccatcttttctttgatttctgaaaagataaaaatttgacattaatattttatctgatagcagttaaggatcaatttcaacttggagatgaaccggtaccgattaggtactcaataactcggctcacctcaatcatcctaccaaatataaaagcaccatcacaaaaatacagatgtcctcttcagcaaatgttctggaacacaacttataaggtagaagagtttgaggatatctcaagtgcctccccatgctaaattgaat

SEQ ID NO: 65624 - DNA, 3679 bp, Zea Mays
ctgatcgccaccactacctccacctggaacctggaagagagagagacaatggcgtgtaggccgccatgtccatgtggctgcttctgcttctacatggtgttcttcctcggcttgctgctcgtcgaggccgtccatggcacagggcggagcgaggtggccgcggccgctccgactccgagcctcgttccagctgaagcgagcgtccttcgccggatcgcggccaggcttggtgtgtccagctgggacttcaccgccggcgccggtccctgcgaccacggagactccggggtgcactgtgactgctccttctccaacggcaccgtctgccatgtcacagagatattcctcaaggggcagaacttctccggtgagctcccgcctgacttcgctgacctcccctacctcctccagctagatctaagcaggagcttgttccatggcggagtgcctcaccagtgggccaggatgaagttacaaggactccatgcaggtcactgatggcgaatagattgtcagggccttttcccatggttctcacaaagatcacaaccctgactaacctgagcattgaaggcaatgagttctatgggccaatccctcctgaaattgggtatttaattagaatggaaaagctaatattatcaaccaatgagttcactggaccccttccagctgctctttcgctattcagtaatttaactgatttgaggatttctagcaccaatttttccggaaggatacctgatttttggggaaacttgaaaaggcttgacaaattgcaaatagaaggatctttcttagaagggccaattccctcgagcctatctgaattgaaaaacctttctgatctgaggattagtgacctgagaggtagtggttcatctttccctgatttaagtggaatgacatacatgaacaaattggtactaaggaactgttccatcagtggaagcatacccccatacattggcacatggacatctcttaagcatctggatctcagctttaataaactgagtggagaaataccaccttcttttgctagcatgggagctgtagattacatatatctatctggaaattcactcaccgggaacatacctggatggttattaagaagaaacaagatcgcggacatatcttttaataacttcacgatggggagttcaggtccgagccaatgccttcaagggagtgtcaatctggtggagagctattcagctgaagtgaaccgtttaaatagtattcatccatgcttaaagaggaacttcccatgtgttgcttcgaatggacaatatcactcttcactgcatatcaattgcggcgacaaagaagcaactattaacggaactaaatatgaagccgacacaacacccaaaggggcatcattgttgtatgtgtccccaggcttgaactgggcattcagcagcaccgggaacttcatggacgacaacataaatgacgacaactacatagcaacaagtgcatcaaaattggccgtgcccaattcagatctgtacaacaaagcccgtctttctcctctttcgctcacatattatgggctttgcatgttaagtgggagctacacagttaatctccactttgctgaaattgttttcacaaatgacagcacatattatagccttggcaaaaggagattcaacgtgtttatacaggggagaatggtgctagaggatttcgatattgaacagtcatccggtgcggctgcaaaaccagttaccaagacttttcaaacatatgttacaaatcacactctagagattcagttctattgggcaggaagagggacaacaggcattccatatagaggttcttatggcccactgatatctgcaatatcagtaactccaaatttccaaattccattggctgttgaccctcccaaagctggaagtagggaaaaaaggagttcaagggcatctattgctttaggaattggaattcctattgtagcaatattcactgctctgattctcggcatttattgtattaagaagcagagaaagagttcgatgcatgaagaactcagagcccttgacctgcaaattggctccttcaccttgcgtcaaatcaaagcagcaactaggaacttcgatgcagctaacaagattggtgaaggaggatttggttcggtttacaagggtttattatccgatggcaccatcatcgctgtcaagcagttatcatcaaggtctaaacaagggaatcgggaatttgtgaacgagataggcatgatatctgcactccagcatccaaaccttgtcaaactctacggctgctgtacagaaggaaaccagctgtcgctagtttatgagtacatggaaaacaattgcctcgcacgagctcttttcgttgaacagtatagactgagaatggattggggaacaaggcataagatttgccttggaatagcgaaaggtctagcatatttgcatgaagagtctgcaataaggatcgtgcacagagatataaaggccagcaatatactgctcgacaaagatttgaatgccaagatctcagattttgggctagcaaagcttaatgaagatgatcacacccacataagcacaaaagtagctggaactatcggttacatggctcctgagtatgctatgcgtggttatttaacagataaagctgatgtatacagttttggtgttgttgttttggaaattgtcagtggaaaaagtaacacaaactacaggccgaaggaagactttgtttatcttttagattgggcttgtgttctacatgagagaggaactctactggaattggttgatccagatctaggatccaattactcgacagaagaagcgctcctcatgctgaatgttgccctgctatgcacaactgcggcgcctacactcagaccaaagatgtcaaaagttgttagcctgcttgaaggcagtgccccactgcagcctttgctgtcagacctcagccttgcagcaaatagcctgagctcaagtggtgtacgcaggaacttctggcaaaacccaggtgagagtcagagcctgacagcacaagcttcatgcagcgatactaatgaatcatccaccattgatatagatggtattctactggtaagttagatgtagtttgctgtgcatcatgaactaggtttacatgtaggaactactaagcataggccagcatgtttgtattaagttcaccagtgcaatgtaaatagcaagtagcatactaatgtctagtacaggtagagccctatgcattttacaccagtgcaatgtaaatagcaagtagcatactaatgtctagtacaggtaaagccctattcattttagtagtctctgtttcatattacatgggaatattaagatgtctgtgacagaacactggaagttctctatggactatagtctctgagctcctatccatcttttctttgatttctgaaaagataaaaatttgacattaatattttatctgatagcagttaaggatcaatttcaacttggagatgaaccggtaccgattaggtactcaataactcggctcacctcaatcatcctaccaaatataaaagcaccatcacaaaaatacagatgtcctcttcagcaaatgttctggaacacaacttataaggtagaagagtttgaggatatctcaagtgcctccccatgctaaattgaat

SEQ ID NO: 65625 - DNA, 3679 bp, Zea Mays
ctgatcgccaccactacctccacctggaacctggaagagagagagacaatggcgtgtaggccgccatgtccatgtggctgcttctgcttctacatggtgttcttcctcggcttgctgctcgtcgaggccgtccatggcacagggcggagcgaggtggccgcggccgctccgactccgagcctcgttccagctgaagcgagcgtccttcgccggatcgcggccaggcttggtgtgtccagctgggacttcaccgccggcgccggtccctgcgaccacggagactccggggtgcactgtgactgctccttctccaacggcaccgtctgccatgtcacagagatattcctcaaggggcagaacttctccggtgagctcccgcctgacttcgctgacctcccctacctcctccagctagatctaagcaggagcttgttccatggcggagtgcctcaccagtgggccaggatgaagttacaaggactgtcactgatggcgaatagattgtcagggccttttcccatggttctcacaaagatcacaaccctgactaacctgagcattgaaggcaatgagttctatgggccaatccctcctgaaattgggtatttaattagaatggaaaagctaatattatcaaccaatgagttcactggaccccttccagctgctctttcgctattcagtaatttaactgatttgaggatttctagcaccaatttttccggaaggatacctgatttttggggaaacttgaaaaggcttgacaaattgtgagacggcaaatagaaggatctttcttagaagggccaattccctcgagcctatctgaattgaaaaacctttctgatctgaggattagtgacctgagaggtagtggttcatctttccctgatttaagtggaatgacatacatgaacaaattggtactaaggaactgttccatcagtggaagcatacccccatacattggcacatggacatctcttaagcatctggatctcagctttaataaactgagtggagaaataccaccttcttttgctagcatgggagctgtagattacatatatctatctggaaattcactcaccgggaacatacctggatggttattaagaagaaacaagatcgcggacatatcttttaataacttcacgatggggagttcaggtccgagccaatgccttcaagggagtgtcaatctggtggagagctattcagctgaagtgaaccgtttaaatagtattcatccatgcttaaagaggaacttcccatgtgttgcttcgaatggacaatatcactcttcactgcatatcaattgcggcgacaaagaagcaactattaacggaactaaatatgaagccgacacaacacccaaaggggcatcattgttgtatgtgtccccaggcttgaactgggcattcagcagcaccgggaacttcatggacgacaacataaatgacgacaactacatagcaacaagtgcatcaaaattggccgtgcccaattcagatctgtacaacaaagcccgtctttctcctctttcgctcacatattatgggctttgcatgttaagtgggagctacacagttaatctccactttgctgaaattgttttcacaaatgacagcacatattatagccttggcaaaaggagattcaacgtgtttatacaggggagaatggtgctagaggatttcgatattgaacagtcatccggtgcggctgcaaaaccagttaccaagacttttcaaacatatgttacaaatcacactctagagattcagttctattgggcaggaagagggacaacaggcattccatatagaggttcttatggcccactgatatctgcaatatcagtaactccaaatttccaaattccattggctgttgaccctcccaaagctggaagtagggaaaaaaggagttcaagggcatctattgctttaggaattggaattcctattgtagcaatattcactgctctgattctcggcatttattgtattaagaagcagagaaagagttcgatgcatgaagaactcagagcccttgacctgcaaattggctccttcaccttgcgtcaaatcaaagcagcaactaggaacttcgatgcagctaacaagattggtgaaggaggatttggttcggtttacaagggtttattatccgatggcaccatcatcgctgtcaagcagttatcatcaaggtctaaacaagggaatcgggaatttgtgaacgagataggcatgatatctgcactccagcatccaaaccttgtcaaactctacggctgctgtacagaaggaaaccagctgtcgctagtttatgagtacatggaaaacaattgcctcgcacgagctcttttcgttgaacagtatagactgagaatggattggggaacaaggcataagatttgccttggaatagcgaaaggtctagcatatttgcatgaagagtctgcaataaggatcgtgcacagagatataaaggccagcaatatactgctcgacaaagatttgaatgccaagatctcagattttgggctagcaaagcttaatgaagatgatcacacccacataagcacaaaagtagctggaactatcggttacatggctcctgagtatgctatgcgtggttatttaacagataaagctgatgtatacagttttggtgttgttgttttggaaattgtcagtggaaaaagtaacacaaactacaggccgaaggaagactttgtttatcttttagattgggcttgtgttctacatgagagaggaactctactggaattggttgatccagatctaggatccaattactcgacagaagaagcgctcctcatgctgaatgttgccctgctatgcacaactgcggcgcctacactcagaccaaagatgtcaaaagttgttagcctgcttgaaggcagtgccccactgcagcctttgctgtcagacctcagccttgcagcaaatagcctgagctcaagtggtgtacgcaggaacttctggcaaaacccaggtgagagtcagagcctgacagcacaagcttcatgcagcgatactaatgaatcatccaccattgatatagatggtattctactggtaagttagatgtagtttgctgtgcatcatgaactaggtttacatgtaggaactactaagcataggccagcatgtttgtattaagttcaccagtgcaatgtaaatagcaagtagcatactaatgtctagtacaggtagagccctatgcattttacaccagtgcaatgtaaatagcaagtagcatactaatgtctagtacaggtaaagccctattcattttagtagtctctgtttcatattacatgggaatattaagatgtctgtgacagaacactggaagttctctatggactatagtctctgagctcctatccatcttttctttgatttctgaaaagataaaaatttgacattaatattttatctgatagcagttaaggatcaatttcaacttggagatgaaccggtaccgattaggtactcaataactcggctcacctcaatcatcctaccaaatataaaagcaccatcacaaaaatacagatgtcctcttcagcaaatgttctggaacacaacttataaggtagaagagtttgaggatatctcaagtgcctccccatgctaaattgaat

SEQ ID NO: 65626 - DNA, 2344 bp, Zea Mays
atgcagtttgtacccgggctttataccaggcttgcgtgttcattcgttgtgtcctcttcttctttctgttctccccgcgtgctctgtctctctcttcctctctgcctctctctctctctctcagcggcgactagggacagccgctgcctccctacgcctggtgcccaggtatcctttgccggcgacgagcacccggggtatgggaatggaggtcgttggtgctgaagcagcaccagcagaggtcaaaatatccgatggagaagtgaatctattccaagagaaggaaagcaaagcaactgcaaaagaacgtgaggaggcagctgtttttggttcagagacaactgcgaatgtcactgatctggcacctccaaaggatgcgaaggatgagtggcctgaaccgaagcaaacttatgtcttctacttcatcaagatccgctcatttgaggatcctaaactgagggtaaaactcgagcaggctgacaaagaattccagaagaagatccaagctcgttctaaacttattgaggcagtaagagccaagaaggcagagcgttccagtattatcgcagagttgaagccattgagtgctgagaacaaacaatataatgaagttgtgaatgagaagataaaagagatggagcctcttcgaaacagcttgggaaagtttcgtgaggaaaacaatgccatgagggcacagagtgcaggcttatgctcttccatcgaagagcttgacctaacgatgctgaatgatcgcatggtacatgaaagcatacctttatctgaggagaagcgtctagtgaaagaaattaaggaccttgagaaaaccagatcgaaagtcatctctaatgctgctaacagggctaaattgcaaggtacagtggttgaaaaagaggctatacaggaccaggtcaaaatcatcggggagggcattgatggaataaagaaggaaagacaggcagtaagatctaagattaaggtcctggaggatgagctaaaacttgttgatgctgagattggattgcttcaagaagatttagatgcagcaactgccagaaaggataaggcatatgaatcgttgcaagaattgagagcagtgcgtgatgcaaaaaacgcatcctccatgcataaccgtacagttttaaccagagctagggattattcttcaaggaatatgctgacagaattgcaagagctccacaaaactgaggtcgacaagttcatgacccaatggtgtgaaagtaaggccttcagagaggactacgagaagagaatcctcacatccctaaatagccgacagctgactcgagatggtcggatgaggaatcctgatgagaagcccatatttatcgagtcacaggcgccagctccagctccagagcccatccctgtaaaattgcctgcaaaacaagccaaggaagtgcctgctccccaggcagatgatgctcccaagactgaagctccttcgaaaggacctgtcaagtcgcacaaggcaaaagctgctcttgatgctgatgatgattatgaggccgagcccctgaaggagaaggcaaagcctacggaggctgatgtggctaagttgaaagagatcaagaggcaggaggagattgagaagaacaagcttgcattggagaggaagaagaagcaggctgagaagcaagcagcaaaagccgcggcccgggcacagaaggaagctgagaagaagctgaagaaagaggagaagaaagccaagaagaaatctggcgcagctgacactgatgagccctcagaatcggacgccaagtctgatgaagccatggaagccccagtggagcaggaagtggccccagcttccaccatgataaagaaggaacagaaggagagtgcccggcacaggaacgtggtcagcaaggccccaccacccaaggcgatcctgaagaggaagaaggcgcagtcctactggtcatgggctggcccagctgccatggtggctgccgtgctggttgccctcctcgcggtgctgggatactaccagtactacctcccagcgaatgccagcaactgagtgggcgaggtcggtgcactcgcggccaggccattcatttatgacgtggagaccaattttgcaggtgagaagaaagagtgcaaggtctgcttgagacgtgaaggaccagaggagagtcttgttcgctttcgatgttgttagttggagccgaagatacagttgtttttggttgcgactttgctagatctctctctatatactgcgactgatatatcccgtgtacttttgaagtgatgcgtatattgacatctggaataacaatgcctttcagtttcattatctcaataatggcccttcctgtgc

SEQ ID NO: 65627 - DNA, 2367 bp, Zea Mays
atgcagtttgtacccgggctttataccaggcttgcgtgttcattcgttgtgtcctcttcttctttctgttctccccgcgtgctctgtctctctcttcctctctgcctctctctctctctctcagcggcgactagggacagccgctgcctccctacgcctggtgcccaggtatcctttgccggcgacgagcacccggtaggggtatgggaatggaggtcgttggtgctgaagcagcaccagcagaggtcaaaatatccgatggagaagtgaatctattccaagagaaggaaagcaaagcaactgcaaaagaacgtgaggaggcagctgtttttggttcagagacaactgcgaatgtcactgatctggcacctccaaaggatgcgaaggatgagtggcctgaaccgaagcaaacttatgtcttctacttcatcaagatccgctcatttgaggatcctaaactgagggtaaaactcgagcaggctgacaaagaattccagaagaagatccaagctcgttctaaacttattgaggcagtaagagccaagaaggcagagcgttccagtattatcgcagagttgaagccattgagtgctgagaacaaacaatataatgaagttgtgaatgagaagataaaagagatggagcctcttcgaaacagcttgggaaagtttcgtgaggaaaacaatgccatgagggcacagagtgcaggcttatgctcttccatcgaagagcttgacctaacgatcaagatgctgaatgatcgcatggtacatgaaagcatacctttatctgaggagaagcgtctagtgaaagaaattaaggaccttgagaaaaccagatcgaaagtcatctctaatgctgctaacagggctaaattgcaaggtacagtggttgaaaaagaggctatacaggaccaggtcaaatctgaacatttagatcatcggggagggcattgatggaataaagaaggaaagacaggcagtaagatctaagattaaggtcctggaggatgagctaaaacttgttgatgctgagattggattgcttcaagaagatttagatgcagcaactgccagaaaggataaggcatatgaatcgttgcaagaattgagagcagtgcgtgatgcaaaaaacgcatcctccatgcataaccgtacagttttaaccagagctagggattattcttcaaggaatatgctgacagaattgcaagagctccacaaaactgaggtcgacaagttcatgacccaatggtgtgaaagtaaggccttcagagaggactacgagaagagaatcctcacatccctaaatagccgacagctgactcgagatggtcggatgaggaatcctgatgagaagcccatatttatcgagtcacaggcgccagctccagctccagagcccatccctgtaaaattgcctgcaaaacaagccaaggaagtgcctgctccccaggcagatgatgctcccaagactgaagctccttcgaaaggacctgtcaagtcgcacaaggcaaaagctgctcttgatgctgatgatgattatgaggccgagcccctgaaggagaaggcaaagcctacggaggctgatgtggctaagttgaaagagatcaagaggcaggaggagattgagaagaacaagcttgcattggagaggaagaagaagcaggctgagaagcaagcagcaaaagccgcggcccgggcacagaaggaagctgagaagaagctgaagaaagaggagaagaaagccaagaagaaatctggcgcagctgacactgatgagccctcagaatcggacgccaagtctgatgaagccatggaagccccagtggagcaggaagtggccccagcttccaccatgataaagaaggaacagaaggagagtgcccggcacaggaacgtggtcagcaaggccccaccacccaaggcgatcctgaagaggaagaaggcgcagtcctactggtcatgggctggcccagctgccatggtggctgccgtgctggttgccctcctcgcggtgctgggatactaccagtactacctcccagcgaatgccagcaactgagtgggcgaggtcggtgcactcgcggccaggccattcatttatgacgtggagaccaattttgcaggtgagaagaaagagtgcaaggtctgcttgagacgtgaaggaccagaggagagtcttgttcgctttcgatgttgttagttggagccgaagatacagttgtttttggttgcgactttgctagatctctctctatatactgcgactgatatatcccgtgtacttttgaagtgatgcgtatattgacatctggaataacaatgcctttcagtttcattatctcaataatggcccttcctgtgc

SEQ ID NO: 65628 - DNA, 2201 bp, Zea Mays
tggattcagtctgcgcgccagactaagaggatcggtggaagcgcgggggtatgggaatggaggtcgttggtgctgaagcagcaccagcagaggtcaaaatatccgatggagaagtgaatctattccaagagaaggaaagcaaagcaactgcaaaagaacgtgaggaggcagctgtttttggttcagagacaactgcgaatgtcactgatctggcacctccaaaggatgcgaaggatgagtggcctgaaccgaagcaaacttatgtcttctacttcatcaagatccgctcatttgaggatcctaaactgagggtaaaactcgagcaggctgacaaagaattccagaagaagatccaagctcgttctaaacttattgaggcagtaagagccaagaaggcagagcgttccagtattatcgcagagttgaagccattgagtgctgagaacaaacaatataatgaagttgtgaatgagaagataaaagagatggagcctcttcgaaacagcttgggaaagtttcgtgaggaaaacaatgccatgagggcacagagtgcaggcttatgctcttccatcgaagagcttgacctaacgatcaagatgctgaatgatcgcatggtacatgaaagcatacctttatctgaggagaagcgtctagtgaaagaaattaaggaccttgagaaaaccagatcgaaagtcatctctaatgctgctaacagggctaaattgcaaggtacagtggttgaaaaagaggctatacaggaccaggtcaaaatcatcggggagggcattgatggaataaagaaggaaagacaggcagtaagatctaagattaaggtcctggaggatgagctaaaacttgttgatgctgagattggattgcttcaagaagatttagatgcagcaactgccagaaaggataaggcatatgaatcgttgcaagaattgagagcagtgcgtgatgcaaaaaacgcatcctccatgcataaccgtacagttttaaccagagctagggattattcttcaaggaatatgctgacagaattgcaagagctccacaaaactgaggtcgacaagttcatgacccaatggtgtgaaagtaaggccttcagagaggactacgagaagagaatcctcacatccctaaatagccgacagctgactcgagatggtcggatgaggaatcctgatgagaagcccatatttatcgagtcacaggcgccagctccagctccagagcccatccctgtaaaattgcctgcaaaacaagccaaggaagtgcctgctccccaggcagatgatgctcccaagactgaagctccttcgaaaggacctgtcaagtcgcacaaggcaaaagctgctcttgatgctgatgatgattatgaggccgagcccctgaaggagaaggcaaagcctacggaggctgatgtggctaagttgaaagagatcaagaggcaggaggagattgagaagaacaagcttgcattggagaggaagaagaagcaggctgagaagcaagcagcaaaagccgcggcccgggcacagaaggaagctgagaagaagctgaagaaagaggagaagaaagccaagaagaaatctggcgcagctgacactgatgagccctcagaatcggacgccaagtctgatgaagccatggaagccccagtggagcaggaagtggccccagcttccaccatgataaagaaggaacagaaggagagtgcccggcacaggaacgtggtcagcaaggccccaccacccaaggcgatcctgaagaggaagaaggcgcagtcctactggtcatgggctggcccagctgccatggtggctgccgtgctggttgccctcctcgcggtgctgggatactaccagtactacctcccagcgaatgccagcaactgagtgggcgaggtcggtgcactcgcggccaggccattcatttatgacgtggagaccaattttgcaggtgagaagaaagagtgcaaggtctgcttgagacgtgaaggaccagaggagagtcttgttcgctttcgatgttgttagttggagccgaagatacagttgtttttggttgcgactttgctagatctctctctatatactgcgactgatatatcccgtgtacttttgaagtgatgcgtatattgacatctggaataacaatgcctttcagtttcattatctcaataatggcccttcctgtgc

SEQ ID NO: 65629 - DNA, 2214 bp, Zea Mays
cgcttttccacttcgggaaacagaaagaaataggaaagcgaactattacaaactgtaaggggtatgggaatggaggtcgttggtgctgaagcagcaccagcagaggtcaaaatatccgatggagaagtgaatctattccaagagaaggaaagcaaagcaactgcaaaagaacgtgaggaggcagctgtttttggttcagagacaactgcgaatgtcactgatctggcacctccaaaggatgcgaaggatgagtggcctgaaccgaagcaaacttatgtcttctacttcatcaagatccgctcatttgaggatcctaaactgagggtaaaactcgagcaggctgacaaagaattccagaagaagatccaagctcgttctaaacttattgaggcagtaagagccaagaaggcagagcgttccagtattatcgcagagttgaagccattgagtgctgagaacaaacaatataatgaagttgtgaatgagaagataaaagagatggagcctcttcgaaacagcttgggaaagtttcgtgaggaaaacaatgccatgagggcacagagtgcaggcttatgctcttccatcgaagagcttgacctaacgatcaagatgctgaatgatcgcatggtacatgaaagcatacctttatctgaggagaagcgtctagtgaaagaaattaaggaccttgagaaaaccagatcgaaagtcatctctaatgctgctaacagggctaaattgcaaggtacagtggttgaaaaagaggctatacaggaccaggtcaaaatcatcggggagggcattgatggaataaagaaggaaagacaggcagtaagatctaagattaaggtcctggaggatgagctaaaacttgttgatgctgagattggattgcttcaagaagatttagatgcagcaactgccagaaaggataaggcatatgaatcgttgcaagaattgagagcagtgcgtgatgcaaaaaacgcatcctccatgcataaccgtacagttttaaccagagctagggattattcttcaaggaatatgctgacagaattgcaagagctccacaaaactgaggtcgacaagttcatgacccaatggtgtgaaagtaaggccttcagagaggactacgagaagagaatcctcacatccctaaatagccgacagctgactcgagatggtcggatgaggaatcctgatgagaagcccatatttatcgagtcacaggcgccagctccagctccagagcccatccctgtaaaattgcctgcaaaacaagccaaggaagtgcctgctccccaggcagatgatgctcccaagactgaagctccttcgaaaggacctgtcaagtcgcacaaggcaaaagctgctcttgatgctgatgatgattatgaggccgagcccctgaaggagaaggcaaagcctacggaggctgatgtggctaagttgaaagagatcaagaggcaggaggagattgagaagaacaagcttgcattggagaggaagaagaagcaggctgagaagcaagcagcaaaagccgcggcccgggcacagaaggaagctgagaagaagctgaagaaagaggagaagaaagccaagaagaaatctggcgcagctgacactgatgagccctcagaatcggacgccaagtctgatgaagccatggaagccccagtggagcaggaagtggccccagcttccaccatgataaagaaggaacagaaggagagtgcccggcacaggaacgtggtcagcaaggccccaccacccaaggcgatcctgaagaggaagaaggcgcagtcctactggtcatgggctggcccagctgccatggtggctgccgtgctggttgccctcctcgcggtgctgggatactaccagtactacctcccagcgaatgccagcaactgagtgggcgaggtcggtgcactcgcggccaggccattcatttatgacgtggagaccaattttgcaggtgagaagaaagagtgcaaggtctgcttgagacgtgaaggaccagaggagagtcttgttcgctttcgatgttgttagttggagccgaagatacagttgtttttggttgcgactttgctagatctctctctatatactgcgactgatatatcccgtgtacttttgaagtgatgcgtatattgacatctggaataacaatgcctttcagtttcattatctcaataatggcccttcctgtgc

SEQ ID NO: 65630 - DNA, 226 bp, Zea Mays
ctcctcccttcctacatagcagcagccatgccccccatcacaccccaaccctagccgcccccaccatcttcccctctctaaggtgcagccctctctgcttggatctccttcgtgttgctgcaagccttcgattggagaattggtgggaggaagaagaaaagagggaaggaagaactcaaggtggtggacttccagatcgtacttagtgcttttcccaaatccccgg

SEQ ID NO: 65631 - DNA, 424 bp, Zea Mays
ctttctccactattgcagccgcccctctcccttctcctccctttctccatagcagcagccaccccccatcacaccccaaccctagcccccccaccactatcttcccctatcaaaggtgcagccctctccggttggatctccttcgtgttggtggaagccttcgattggagaattggtgggaggaagaagaaaataaggaaggaagaactcaagatgacgaaagtgcgacagtcgacaaccagatcacgatgaggatagagtgatggactgctagtggaggccagggctagcagcgagctattggtgcagggcgccgccgatgagctactggtggtgacttgtgaaggactgggccggtgatgagctactgttggactagagggcggggccgaccttgagctacatgtggaggcctggaccggtg

SEQ ID NO: 65632 - DNA, 1215 bp, Zea Mays
gcgctttcgggtgcgcccatgtagcaacctctgttccgctgcactgttcttctcttcattcaagggtcctgtactcctattgcaaggatggagaaattggctgcagatagaaaagaccaagtctttgataacaagttctgccagaagcttgcagaagaatttaatcgttctgttggccgtgctggaagtaaagcgttacaagctacacaggttcaaggatggtttcttaataagtttccagcatcagccactaaacctacttgtgtgcccactgcttcccaagaaaagacttcagcctcagaaataaatgtatcagtttctgaaaaaagatctgcagcttccgaagagaaacttttccctcttgatacaggtgtttcaaataatgaggatgaggtttctcctgtttttccattagaaactaaagatatgattcctgaacttgaagacctggagtttgaggccaagtctacaaaggattttgcctggtatgacattgccctattcttggcacacaggaggaacagggcgggtgaagtagaagtccgggtgagattcgagggttttggggcggatgaggatgagtgggtgaatgtcaagaagttcatccgccagcgttccattcctctggagtcctcacagtgcaaaagcgttgttgaaggtgaccttgttctctgcttcagggagggaaacgaggaggcattgcatttcgatgcacatgttcttgaggttcagcggaagcagcatgatattagggggtgcagatgtgtattccttgttgaatacgatcatgaccaaagccaggagagggttagcctgagaagattgtcccggcggccaaagtacttttgaaggctgctcctgttagcctgatgggcatatctattctggaactggaactaaccggagcgtgaaacttaggtgaagttagtttgtggcgtccttggtcatgtgtgtattagcaaccggcggcagcaagcatgggcttgcatctcaacccctttggcacaggactggctgactgaattttataaactcgttatcgtgcagaagagggaagagtacgcggcttgagcacttagggtgtcacttaggatgtgtttggttcgtgaagtcaccttatgcttcatgaggtgtatcatgaattcatcctataattttttgtggcatcaacctattcctcgtttatatattaattattagtttatgagttagtaa

SEQ ID NO: 65633 - DNA, 1278 bp, Zea Mays
cgcccatgtagcaacctctgttccgctgcactgttcttctcttcattcaagggtcctgtactcctctctcctactgtcccctcggcctcccgccggtgagcgatggagcggcggtcctccgtccgctttgtgccatccgagattgcaaggatggagaaattggctgcagatagaaaagaccaagtctttgataacaagttctgccagaagcttgcagaagaatttaatcgttctgttggccgtgctggaagtaaagcgttacaagctacacaggttcaaggatggtttcttaataagtttccagcatcagccactaaacctacttgtgtgcccactgcttcccaagaaaagacttcagcctcagaaataaatgtatcagtttctgaaaaaagatctgcagcttccgaagagaaacttttccctcttgatacaggtgtttcaaataatgaggatgaggtttctcctgtttttccattagaaactaaagatatgattcctgaacttgaagacctggagtttgaggccaagtctacaaaggattttgcctggtatgacattgccctattcttggcacacaggaggaacagggcgggtgaagtagaagtccgggtgagattcgagggttttggggcggatgaggatgagtgggtgaatgtcaagaagttcatccgccagcgttccattcctctggagtcctcacagtgcaaaagcgttgttgaaggtgaccttgttctctgcttcagggagggaaacgaggaggcattgcatttcgatgcacatgttcttgaggttcagcggaagcagcatgatattagggggtgcagatgtgtattccttgttgaatacgatcatgaccaaagccaggagagggttagcctgagaagattgtcccggcggccaaagtacttttgaaggctgctcctgttagcctgatgggcatatctattctggaactggaactaaccggagcgtgaaacttaggtgaagttagtttgtggcgtccttggtcatgtgtgtattagcaaccggcggcagcaagcatgggcttgcatctcaacccctttggcacaggactggctgactgaattttataaactcgttatcgtgcagaagagggaagagtacgcggcttgagcacttagggtgtcacttaggatgtgtttggttcgtgaagtcaccttatgcttcatgaggtgtatcatgaattcatcctataattttttgtggcatcaacctattcctcgtttatatattaattattagtttatgagttagtaa

SEQ ID NO: 65634 - DNA, 1225 bp, Zea Mays
tagcaacctctgttccgctgcactgttcttctcttcattcaagggtcctgtactcctctctcctactgtcccctcggcctcccgccggtgagcgatggagcggcggtcctccgtccgctttgtgccatccgagattgcaaggatggagaaattggctgcagatagaaaagaccaagtctttgataacaagttctgccagaagcttgcagaagaatttaatcgttctgttggccgtgctggaagtaaagcgttacaagctacacaggttcaaggatggtttcttaataagtttccagcatcagccactaaacctacttgtgtgcccactgcttcccaagaaaagacttcagcctcagaaataaatgtatcagtttctgaaaaaagatctgcagcttccgaagagaaacttttccctcttgatacagaaactaaagatatgattcctgaacttgaagacctggagtttgaggccaagtctacaaaggattttgcctggtatgacattgccctattcttggcacacaggaggaacagggcgggtgaagtagaagtccgggtgagattcgagggttttggggcggatgaggatgagtgggtgaatgtcaagaagttcatccgccagcgttccattcctctggagtcctcacagtgcaaaagcgttgttgaaggtgaccttgttctctgcttcagggagggaaacgaggaggcattgcatttcgatgcacatgttcttgaggttcagcggaagcagcatgatattagggggtgcagatgtgtattccttgttgaatacgatcatgaccaaagccaggagagggttagcctgagaagattgtcccggcggccaaagtacttttgaaggctgctcctgttagcctgatgggcatatctattctggaactggaactaaccggagcgtgaaacttaggtgaagttagtttgtggcgtccttggtcatgtgtgtattagcaaccggcggcagcaagcatgggcttgcatctcaacccctttggcacaggactggctgactgaattttataaactcgttatcgtgcagaagagggaagagtacgcggcttgagcacttagggtgtcacttaggatgtgtttggttcgtgaagtcaccttatgcttcatgaggtgtatcatgaattcatcctataattttttgtggcatcaacctattcctcgtttatatattaattattagtttatgagttagtaa

SEQ ID NO: 65635 - DNA, 1142 bp, Zea Mays
ctctgttccgctgcactgttcttctcttcattcaagggtcctgtactcctattgcaaggatggagaaattggctgcagatagaaaagaccaagtctttgataacaagttctgccagaagcttgcagaagaatttaatcgttctgttggccgtgctggaagtaaagcgttacaagctacacaggttcaaggatggtttcttaataagtttccagcatcagccactaaacctacttgtgtgcccactgcttcccaagaaaagacttcagcctcagaaataaatgtatcagtttctgaaaaaagatctgcagcttccgaagagaaacttttccctcttgatacagaaactaaagatatgattcctgaacttgaagacctggagtttgaggccaagtctacaaaggattttgcctggtatgacattgccctattcttggcacacaggaggaacagggcgggtgaagtagaagtccgggtgagattcgagggttttggggcggatgaggatgagtgggtgaatgtcaagaagttcatccgccagcgttccattcctctggagtcctcacagtgcaaaagcgttgttgaaggtgaccttgttctctgcttcagggagggaaacgaggaggcattgcatttcgatgcacatgttcttgaggttcagcggaagcagcatgatattagggggtgcagatgtgtattccttgttgaatacgatcatgaccaaagccaggagagggttagcctgagaagattgtcccggcggccaaagtacttttgaaggctgctcctgttagcctgatgggcatatctattctggaactggaactaaccggagcgtgaaacttaggtgaagttagtttgtggcgtccttggtcatgtgtgtattagcaaccggcggcagcaagcatgggcttgcatctcaacccctttggcacaggactggctgactgaattttataaactcgttatcgtgcagaagagggaagagtacgcggcttgagcacttagggtgtcacttaggatgtgtttggttcgtgaagtcaccttatgcttcatgaggtgtatcatgaattcatcctataattttttgtggcatcaacctattcctcgtttatatattaattattagtttatgagttagtaa

SEQ ID NO: 65636 - DNA, 1233 bp, Zea Mays
tttcttttcgtttctgttttcctcccacctccccctctccagctctcctactgtcccctcggcctcccgccggtgagcgatggagcggcggtcctccgtccgctttgtgccatccgagattgcaaggatggagaaattggctgcagatagaaaagaccaagtctttgataacaagttctgccagaagcttgcagaagaatttaatcgttctgttggccgtgctggaagtaaagcgttacaagctacacaggttcaaggatggtttcttaataagtttccagcatcagccactaaacctacttgtgtgcccactgcttcccaagaaaagacttcagcctcagaaataaatgtatcagtttctgaaaaaagatctgcagcttccgaagagaaacttttccctcttgatacaggtgtttcaaataatgaggatgagaaactaaagatatgattcctgaacttgaagacctggagtttgaggccaagtctacaaaggattttgcctggtatgacattgccctattcttggcacacaggaggaacagggcgggtgaagtagaagtccgggtgagattcgagggttttggggcggatgaggatgagtgggtgaatgtcaagaagttcatccgccagcgttccattcctctggagtcctcacagtgcaaaagcgttgttgaaggtgaccttgttctctgcttcagggagggaaacgaggaggcattgcatttcgatgcacatgttcttgaggttcagcggaagcagcatgatattagggggtgcagatgtgtattccttgttgaatacgatcatgaccaaagccaggagagggttagcctgagaagattgtcccggcggccaaagtacttttgaaggctgctcctgttagcctgatgggcatatctattctggaactggaactaaccggagcgtgaaacttaggtgaagttagtttgtggcgtccttggtcatgtgtgtattagcaaccggcggcagcaagcatgggcttgcatctcaacccctttggcacaggactggctgactgaattttataaactcgttatcgtgcagaagagggaagagtacgcggcttgagcacttagggtgtcacttaggatgtgtttggttcgtgaagtcaccttatgcttcatgaggtgtatcatgaattcatcctataattttttgtggcatcaacctattcctcgtttatatattaattattagtttatgagttagtaa

SEQ ID NO: 65637 - DNA, 1158 bp, Zea Mays
tttcttttcgtttctgttttcctcccacctccccctctccagctctcctactgtcccctcggcctcccgccggtgagcgatggagcggcggtcctccgtccgctttgtgccatccgagattgcaaggatggagaaattggctgcagatagaaaagaccaagtctttgataacaagttctgccagaagcttgcagaagaatttaatcgttctgttggccgtgctggaagtaaagcgttacaagctacacaggttcaaggatggtttcttaataagtttccagcatcagccactaaacctacttgtgtgcccactgcttcccaagaaaagacttcagcctcagaaataaatgtatcagtttctgaaaaaagatctgcagcttccgaagagaaacttttccctcttgatacagaaactaaagatatgattcctgaacttgaagacctggagtttgaggccaagtctacaaaggattttgcctggaagtccgggtgagattcgagggttttggggcggatgaggatgagtgggtgaatgtcaagaagttcatccgccagcgttccattcctctggagtcctcacagtgcaaaagcgttgttgaaggtgaccttgttctctgcttcagggagggaaacgaggaggcattgcatttcgatgcacatgttcttgaggttcagcggaagcagcatgatattagggggtgcagatgtgtattccttgttgaatacgatcatgaccaaagccaggagagggttagcctgagaagattgtcccggcggccaaagtacttttgaaggctgctcctgttagcctgatgggcatatctattctggaactggaactaaccggagcgtgaaacttaggtgaagttagtttgtggcgtccttggtcatgtgtgtattagcaaccggcggcagcaagcatgggcttgcatctcaacccctttggcacaggactggctgactgaattttataaactcgttatcgtgcagaagagggaagagtacgcggcttgagcacttagggtgtcacttaggatgtgtttggttcgtgaagtcaccttatgcttcatgaggtgtatcatgaattcatcctataattttttgtggcatcaacctattcctcgtttatatattaattattagtttatgagttagtaa

SEQ ID NO: 65638 - DNA, 1190 bp, Zea Mays
gttcatgcctcgaagatgcccaatagtaggggcaaaccgcaatgttggtttagattgcaaggatggagaaattggctgcagatagaaaagaccaagtctttgataacaagttctgccagaagcttgcagaagaatttaatcgttctgttggccgtgctggaagtaaagcgttacaagctacacaggttcaaggatggtttcttaataagtttccagcatcagccactaaacctacttgtgtgcccactgcttcccaagaaaagacttcagcctcagaaataaatgtatcagtttctgaaaaaagatctgcagcttccgaagagaaacttttccctcttgatacaggtgtttcaaataatgaggatgaggtttctcctgtttttccattagaaactaaagatatgattcctgaacttgaagacctggagtttgaggccaagtctacaaaggattttgcctggtatgacattgccctattcttggcacacaggaggaacagggcgggtgaagtagaagtccgggtgagattcgagggttttggggcggatgaggatgagtgggtgaatgtcaagaagttcatccgccagcgttccattcctctggagtcctcacagtgcaaaagcgttgttgaaggtgaccttgttctctgcttcagggagggaaacgaggaggcattgcatttcgatgcacatgttcttgaggttcagcggaagcagcatgatattagggggtgcagatgtgtattccttgttgaatacgatcatgaccaaagccaggagagggttagcctgagaagattgtcccggcggccaaagtacttttgaaggctgctcctgttagcctgatgggcatatctattctggaactggaactaaccggagcgtgaaacttaggtgaagttagtttgtggcgtccttggtcatgtgtgtattagcaaccggcggcagcaagcatgggcttgcatctcaacccctttggcacaggactggctgactgaattttataaactcgttatcgtgcagaagagggaagagtacgcggcttgagcacttagggtgtcacttaggatgtgtttggttcgtgaagtcaccttatgcttcatgaggtgtatcatgaattcatcctataattttttgtggcatcaacctattcctcgtttatatattaattattagtttatgagttagtaa

SEQ ID NO: 65639 - DNA, 1112 bp, Zea Mays
ggaatcctactaaaggagcctaatatgattgcaaggatggagaaattggctgcagatagaaaagaccaagtctttgataacaagttctgccagaagcttgcagaagaatttaatcgttctgttggccgtgctggaagtaaagcgttacaagctacacaggttcaaggatggtttcttaataagtttccagcatcagccactaaacctacttgtgtgcccactgcttcccaagaaaagacttcagcctcagaaataaatgtatcagtttctgaaaaaagatctgcagcttccgaagagaaacttttccctcttgatacaggtgtttcaaataatgaggatgaggtttctcctgtttttccattagaaactaaagatatgattcctgaacttgaagacctggagtttgaggccaagtctacaaaggattttgcctggaagtccgggtgagattcgagggttttggggcggatgaggatgagtgggtgaatgtcaagaagttcatccgccagcgttccattcctctggagtcctcacagtgcaaaagcgttgttgaaggtgaccttgttctctgcttcagggagggaaacgaggaggcattgcatttcgatgcacatgttcttgaggttcagcggaagcagcatgatattagggggtgcagatgtgtattccttgttgaatacgatcatgaccaaagccaggagagggttagcctgagaagattgtcccggcggccaaagtacttttgaaggctgctcctgttagcctgatgggcatatctattctggaactggaactaaccggagcgtgaaacttaggtgaagttagtttgtggcgtccttggtcatgtgtgtattagcaaccggcggcagcaagcatgggcttgcatctcaacccctttggcacaggactggctgactgaattttataaactcgttatcgtgcagaagagggaagagtacgcggcttgagcacttagggtgtcacttaggatgtgtttggttcgtgaagtcaccttatgcttcatgaggtgtatcatgaattcatcctataattttttgtggcatcaacctattcctcgtttatatattaattattagtttatgagttagtaa

SEQ ID NO: 65640 - DNA, 1949 bp, Zea Mays
gacaataatgtccttattttggagctcgcgccgcccgccgcccgccgccgcgcccgaacgcagccatcgattccccatttctttcccgcctcctcactcccgcctcttctactcccaaaatcccaaaaccctagctcgctaacgaccccaggcagacgcgccgtcctcccctcccccatggcgctcaagcagaaggacaccgacgccgccgccaccgccaccggtaccaagaagcgccgccgcgtcttcttctccgacaccgatgctggtgttgaggcaaatgagtgtatgaaagtgtttctagtatggaatccaggcgagggagggaaaggaataacagatctaaagcctgttcttcagaacatttttggagaaaacttggtagaaaaagaggaattcctgcatacattttcgaaggaatgtgaatatatcagaactgcagtgacaaatggtagtgccattaagcatgatggctcatatgaatcagatcctgcagttgagattgttcgagttgaactccaaggtgctgctgcatttctttattctcgtctggtacctcttgttcttcttctggttgaaggttccacgcctatagatattggagaacatggatgggaaatgcttctggtagtaaagaaggcaacacaagaggctggttcaaaatttgaactgctaggttttgcagctgtgcataacttctatcattatcctgagagtattcgcttacgaatcagccagggtgaaggccatggtcttggtcttcttgaagcaatcaattatattgcacagtctgagaacatttacgatgttacaatagaaagcccttctgattacctgcagtatgtgcgatcatccattgactgcctccgtttgctcatgtttgatccgatcaaacctgcactcggtgctattgtcttgtctctgaaggagaccaacctgtcaaaaagggcccaaagtttgagaatggttccaccagctgacctgatggagactgtccgtcagaagctgaagataaacaagaaacagttcctccggtgctgggaaattctgatcttcctaagcctcgactctcaggatcataagagcatggacaacttcagggcctgcatatatgaccgcatgaagggggagatccttggcagtgcctctggaactaacaggaagcgtctgttgcagatgccaaccagtttcaataaggaggcatcttttgctgtgtattggacacaggagattgaggatgaggatgaacaaactgttgagcagcagccagaggatctcaagacgcaggagcaacagctcaatgagctcgtggacatccaaatcgaggagattgctggggtcgccaagaacgtcacttcacgttgcaaggataagatgacagagctggtggttcaatgaatctggggctagttgatcgaggtcgggactcgatgtcaacgagagcatggttgaactcatggagttcggatagattcaaggatggaaagctccatgcttgatggcggcacattgaacctcaagggcgcgcagcatggcagccaggcgccagggcctttcggtgctttttcgttcttcaaatccataggctatataaaacataatactccctctatttataaatatatgacaccgttaattttttcaaaaagatttgatcactcaccttaattttaaaaaataatgagctatcatttatttgaattttatattttaaataaatattttgaataaaataaagtttttgaaaaaagtcaacggtgtcatatatttgttggaggtgtatatagtctattgttggaggtttagaggagatcgtcctccattgatggcgtttggttcagcaaacacggtggtaacgataacgtaaagaaaaaacaacgctatttgttacaatgtaatgattaaccgattttgtttggatgggtcaagtaacgcaatgatgttccttt

SEQ ID NO: 65641 - DNA, 2022 bp, Zea Mays
gacaataatgtccttattttggagctcgcgccgcccgccgcccgccgccgcgcccgaacgcagccatcgattccccatttctttcccgcctcctcactcccgcctcttctactcccaaaatcccaaaaccctagctcgctaacgaccccaggcagacgcgccgtcctcccctcccccatggcgctcaagcagaaggacaccgacgccgccgccaccgccaccggtaccaagaagcgccgccgcgtcttcttctccgacaccgatgctggtgttgaggcaaatgagtgtatgaaagtgtttctagtatggaatccaggcgagggagggaaaggaataacagatctaaagcctgttcttcagaacatttttggagaaaacttggtagaaaaagaggaattcctgcatacattttcgaaggaatgtgaatatatcagaactgcagtgacaaatggtagtgccattaagcatgatggctcatatgaatcagatcctgcagttgagattgttcgagttgaactccaaggtgctgctgcatttctttattctcgtctggtacctcttgttcttcttctggttgaaggttccacgcctatagatattggagaacatggatgggaaatgcttctggtagtaaagaaggcaacacaagaggctggttcaaaatttgaactgctaggttttgcagctgtgcataacttctatcattatcctgagagtattcgcttacgaatcagccagatacttgtgttgccaccttatcagggtgaaggccatggtcttggtcttcttgaagcaatcaattatattgcacagtctgagaacatttacgatgttacaatagaaagcccttctgattacctgcagtatgtgcgatcatccattgactgcctccgtttgctcatgtttgatccgatcaaacctgcactcggtgctattgtcttgtctctgaaggagaccaacctgtcaaaaagggcccaaagtttgagaatggttccaccagctgacctgatggagactgtccgtcagaagctgaagataaacaagaaacagttcctccggtgctgggaaattctgatcttcctaagcctcgactctcaggatcataagagcatggacaacttcagggcctgcatatatgaccgcatgaagggggagatccttggcagtgcctctggaactaacaggaagcgtctgttgcagatgccaaccagtttcaataaggaggcatcttttgctgtgtattggacacaggagattgaggatgaggatgaacaaactgttgagcagcagccagaggatctcaagacgcaggagcaacagctcaatgagctcgtggacatccaaatcgaggagattgctggggtcgccaagaacgtcacttcacgttgcaaggataagatgacagagctggtggttcaatgaatctgggtgaggttcctacttcaaacgatgttaaaatgctgtcgtagcttatctgggctagttgatcgaggtcgggactcgatgtcaacgagagcatggttgaactcatggagttcggatagattcaaggatggaaagctccatgcttgatggcggcacattgaacctcaagggcgcgcagcatggcagccaggcgccagggcctttcggtgctttttcgttcttcaaatccataggctatataaaacataatactccctctatttataaatatatgacaccgttaattttttcaaaaagatttgatcactcaccttaattttaaaaaataatgagctatcatttatttgaattttatattttaaataaatattttgaataaaataaagtttttgaaaaaagtcaacggtgtcatatatttgttggaggtgtatatagtctattgttggaggtttagaggagatcgtcctccattgatggcgtttggttcagcaaacacggtggtaacgataacgtaaagaaaaaacaacgctatttgttacaatgtaatgattaaccgattttgtttggatgggtcaagtaacgcaatgatgttccttt

SEQ ID NO: 65642 - DNA, 2135 bp, Zea Mays
gacaataatgtccttattttggagctcgcgccgcccgccgcccgccgccgcgcccgaacgcagccatcgattccccatttctttcccgcctcctcactcccgcctcttctactcccaaaatcccaaaaccctagctcgctaacgaccccaggcagacgcgccgtcctcccctcccccatggcgctcaagcagaaggacaccgacgccgccgccaccgccaccggtaccaagaagcgccgccgcgtcttcttctccgacaccgatgctggtgttgaggcaaatgagtgtatgaaagtgtttctagtatggaatccaggcgaggtgagctctgtagactgcactgctattcagccatttgacctaaaccatttttttggtgaagatggaaaaatatatggttacaaaaatcttaagataaatgtgtggataagtgcgaaatctttccatggatatgctgatgtttcatttgacgaaacatctgatggagggaaaggaataacagatctaaagcctgttcttcagaacatttttggagaaaacttggtagaaaaagaggaattcctgcatacattttcgaaggaatgtgaatatatcagaactgcagtgacaaatggtagtgccattaagcatgatggctcatatgaatcagatcctgcagttgagattgttcgagttgaactccaaggtgctgctgcatttctttattctcgtctggtacctcttgttcttcttctggttgaaggttccacgcctatagatattggagaacatggatgggaaatgcttctggtagtaaagaaggcaacacaagaggctggttcaaaatttgaactgctaggttttgcagctgtgcataacttctatcattatcctgagagtattcgcttacgaatcagccagatacttgtgttgccaccttatcagggtgaaggccatggtcttggtcttcttgaagcaatcaattatattgcacagtctgagaacatttacgatgttacaatagaaagcccttctgattacctgcagtatgtgcgatcatccattgactgcctccgtttgctcatgtttgatccgatcaaacctgcactcggtgctattgtcttgtctctgaaggagaccaacctgtcaaaaagggcccaaagtttgagaatggttccaccagctgacctgatggagactgtccgtcagaagctgaagataaacaagaaacagttcctccggtgctgggaaattctgatcttcctaagcctcgactctcaggatcataagagcatggacaacttcagggcctgcatatatgaccgcatgaagggggagatccttggcagtgcctctggaactaacaggaagcgtctgttgcagatgccaaccagtttcaataaggaggcatcttttgctgtgtattggacacaggagattgaggatgaggatgaacaaactgttgagcagcagccagaggatctcaagacgcaggagcaacagctcaatgagctcgtggacatccaaatcgaggagattgctggggtcgccaagaacgtcacttcacgttgcaaggataagatgacagagctggtggttcaatgaatctggggctagttgatcgaggtcgggactcgatgtcaacgagagcatggttgaactcatggagttcggatagattcaaggatggaaagctccatgcttgatggcggcacattgaacctcaagggcgcgcagcatggcagccaggcgccagggcctttcggtgctttttcgttcttcaaatccataggctatataaaacataatactccctctatttataaatatatgacaccgttaattttttcaaaaagatttgatcactcaccttaattttaaaaaataatgagctatcatttatttgaattttatattttaaataaatattttgaataaaataaagtttttgaaaaaagtcaacggtgtcatatatttgttggaggtgtatatagtctattgttggaggtttagaggagatcgtcctccattgatggcgtttggttcagcaaacacggtggtaacgataacgtaaagaaaaaacaacgctatttgttacaatgtaatgattaaccgattttgtttggatgggtcaagtaacgcaatgatgttccttt

SEQ ID NO: 65643 - DNA, 1001 bp, Zea Mays
cgctgaaggacagggagcggcagctagggtttcgcagtgcaaatattcgcggtgctgtggcggccggcggccgtcttctactatccgcggcgactgttgtctgctatccacgtgctgtggcggctggcctgtgctcctatccgcggttgccgagcactgctgtgttgtaccatgcgcttgaagctgacgaagatttatttccacacccccctctaggaaagtactatgttgttgatgctggatatccaaatagggatgggtacttggcctcgtacaaaggacaacggtatcatgttccggaatggagaaatggtcctccacctaatggtgagcaagagctcttcaatcatttacactcaagtctacggaatgttgttgaacgcacatttggtgtatggaagatgaaatggagaattcttcttaagatgccaacttatcctatggacaaacaaaaaatgattgttgttgctacaatgtgtcttcacaatttcatccgtgagaatagtgcattggatgaggattttcagagatgtgatcgagacccagattatatccctactattccatcccgttataggcgacatgtccctcagaatgcatcagatacatctaccacagggtcgagtagtaggaacatgaataggttctgcgatgatgtatcgaaggtactttgggagtcgaggtgattagaaaaggtggttcgtgtcatattttggatatcgtgtcgtgctagttttatgcaatttatggattaaacatttgagaccattttatgcactaatatgatgggaatattttatatgttattgtttcatattttttctgtatatgcatcttacttattggtttgtaacaaagttgaactacaaagggtaaaacagacaatcgccacagaccaccaactttcaacatacaagaatcagtttacttgtcaaacggttttaaaaatgattctgattctctaggagaatcaggaggatcagctcctcaggaggatcatg

SEQ ID NO: 65644 - DNA, 1334 bp, Zea Mays
cgctgaaggacagggagcggcagctagggtttcgcagtgcaaatattcgcggtgctgtggcggccggcggccgtcttctactatccgcggcgactgttgtctgctatccacgtgctgtggcggctggcctgtgctcctatccgcggttgccgagcaatatggattttaatgccattgggaggacattgggtgcaagatcaattgagcaaacttgtgacagcaagtgagaagagcacaacatccgttgagtctttggcaagaaaggaggacattgggtgctccattagagatatcatggcattggtgaaggagtgtggtgcagttctaggaacaaaagaacacttcatagcatctcaagtttttgtcaagagggcagagagggaaatgtttatgactttggacacactggaagaacgcttcaactggcttacaatgaaacatgattgggtcactaggatgattcactaggatctgtaattttttgtagcactgctgtgttgtaccatgcgcttgaagctgacgaagatttatttccacacccccctctaggaaagtactatgttgttgatgctggatatccaaatagggatgggtacttggcctcgtacaaaggacaacggtatcatgttccggaatggagaaatggtcctccacctaatggtgagcaagagctcttcaatcatttacactcaagtctacggaatgttgttgaacgcacatttggtgtatggaagatgaaatggagaattcttcttaagatgccaacttatcctatggacaaacaaaaaatgattgttgttgctacaatgtgtcttcacaatttcatccgtgagaatagtgcattggatgaggattttcagagatgtgatcgagacccagattatatccctactattccatcccgttataggcgacatgtccctcagaatgcatcagatacatctaccacagggtcgagtagtaggaacatgaataggttctgcgatgatgtatcgaaggtactttgggagtcgaggtgattagaaaaggtggttcgtgtcatattttggatatcgtgtcgtgctagttttatgcaatttatggattaaacatttgagaccattttatgcactaatatgatgggaatattttatatgttattgtttcatattttttctgtatatgcatcttacttattggtttgtaacaaagttgaactacaaagggtaaaacagacaatcgccacagaccaccaactttcaacatacaagaatcagtttacttgtcaaacggttttaaaaatgattctgattctctaggagaatcaggaggatcagctcctcaggaggatcatg

SEQ ID NO: 65645 - DNA, 1232 bp, Zea Mays
cgcagtgcaaatattcgcggtgctgtggcggccggcggccgtcttctactatccgcggcgactgttgtctgctatccacgtgctgtggcggctggcctgtgctcctatccgcggttgccgagtgagaagagcacaacatccgttgagtctttggcaagaaaggaggacattgggtgctccattagagatatcatggcattggtgaaggagtgtggtgcagttctaggaacaaaagaacacttcatagcatctcaagtttttgtcaagagggcagagagggaaatgtttatgactttggacacactggaagaacgcttcaactggcttacaatgaaacatgattgggtcactaggatgattcactaggatctgtaattttttgtagcactgctgtgttgtaccatgcgcttgaagctgacgaagatttatttccacacccccctctaggaaagtactatgttgttgatgctggatatccaaatagggatgggtacttggcctcgtacaaaggacaacggtatcatgttccggaatggagaaatggtcctccacctaatggtgagcaagagctcttcaatcatttacactcaagtctacggaatgttgttgaacgcacatttggtgtatggaagatgaaatggagaattcttcttaagatgccaacttatcctatggacaaacaaaaaatgattgttgttgctacaatgtgtcttcacaatttcatccgtgagaatagtgcattggatgaggattttcagagatgtgatcgagacccagattatatccctactattccatcccgttataggcgacatgtccctcagaatgcatcagatacatctaccacagggtcgagtagtaggaacatgaataggttctgcgatgatgtatcgaaggtactttgggagtcgaggtgattagaaaaggtggttcgtgtcatattttggatatcgtgtcgtgctagttttatgcaatttatggattaaacatttgagaccattttatgcactaatatgatgggaatattttatatgttattgtttcatattttttctgtatatgcatcttacttattggtttgtaacaaagttgaactacaaagggtaaaacagacaatcgccacagaccaccaactttcaacatacaagaatcagtttacttgtcaaacggttttaaaaatgattctgattctctaggagaatcaggaggatcagctcctcaggaggatcatg

SEQ ID NO: 65646 - DNA, 3781 bp, Zea Mays
atgagcatgatcgacgtgatcacgcgggtggacgccatctgcaagaagtacgagcggtacgacaccgacaagcacggcgaccccttctcgcgcctctacgctgccgtggacgccgggatcgacgccgccatcgaggtctccggtctcccctcccttggtcttcccttggctgccttaaagacgaaatcggcgagggccgcgaagaagaagaagaaccgggcggcctcggtgaccctggacgccgacgtacggcggaccaaggcgcggctcctggaggtggtggtcaagctacagaaggtagccgccaggaaggtgaacgggctctcgccggaggagaaggtgtcgcgggctggtctggtggccgcgctgccccacaggatccatgccatccccgacagccacggcggtgtaacacccgacactggctcaccacgtgatgggcctcgatgtcgcatggcccaactcggagcagcctaaaggcaggaccacaacggcaggagaggtattgaagacaaatcagaaatcggaaacagggttcgtcccttcgctcgtcttcctccacggagcggcatatcggtgcgtcaccagctcctcacgtcccggctcaccatcggcggctacggggacgtgacagttggtatcagaggtagtcgattctcgacattttcctcggtttcgtccttggtgctcgcgacgatggctgaggcggcacaacgggatgaagcgcgctgggagttggttatgaagaagctgagttgtctggtccagaagatggagtcgttggtggggggtcaggcagatctagcagcagcggtggcgcagcaagcggcggaggatctgcccgttctgcctcagttcgttcgatctgcgggcaataccacgacgccagtctttgacgagggacctgtcttcgacgacgagctgcccatcgacttcggttcccaggggaagaccgcgtccatggcggcagcaagcgccatggaggtccccggatccaccccgacgccctccgtccccttctacgacagcgtcgacatcttccacctcaatagtgaacccgtctacgacgtctacgatgacgacgaggatggcgattcgtcgcagcaggccgtggtgctcgctgcggacaagaactactaccccaccgctgaagagatgtacgggccgggcatggaggcgcttgtcatggacgaggtcgagcaaccgctggagcagcccatcgtcgcagacgcgcttgcgctgctcgaggagatgcgaggcaaggggtaccatgctgacgtgatgagggccttgtgcaagctgcgcgatgcagacaggacggtccaggtgctcggggagatgatggaggtcggcttcaggccatgggtcttgacattgacatacaactttgtggtggctgtgctcgtgaaggcaggaaggatggaggaggcactaaaggtgaaggatcagatgttgttggttgctggaaagaagatggatgtggttctcgcgacaacattgatgcatgggtattgcttgctcggtgaagttgggaaagcgttggatttatttaacgaggctgtcagggatggtgtgacagcaaccaatgtgacatatgcggttctgataaaaggttgtgatgcagaggggatgacagataaggcatatgagctatgtcgtcagatgatagagcagggattgctgtcaagcacacatgggttcaatttggtgataacaggtctgttaagagacaagcggtgggaggatgccatcagcttgcttgaggttatggttgatataccttctgccggtactgcggctaagtgtgaagagcttgatatcatgacagaatgtgttgctcaatgcaatcttgtcactgctgtgtcctctgattttcatcctgaattcatctgtctgtttgtcaaaaaatttggtggctctttggcagtatcaagcaagagagtattgtttctcagttggggctacatggaggagtatgaggttctgattccatttcagttgcttcaggttcgtgagagccaagtaaatgatgtttgccaggacatgggtgtgggagataagtgcttggctgccattcatgactttggcgatgttcagggtgtagatgaagcaaaggaggagcttgttgagatagtgagctgtctgcatggttcactgaactccaagaagcttggagcaaaattgccctggggtgtcctgcttgttggccctccaggaactggaaacactcttctagcatgggcagttgcaggagaggctggaattccatttttctatgtttctgctagtgagtttgttgaagcttttgttggaagaggtcttgcccgtgtcagggaattgttcaaggaagccaaagaagctgctccatccatcatttttattgatgaacttgatgttatgggtggaaatagaggtagaagttctaacgatgtgagggaccaaactctaaaccagctaattgcagaaatggatggttttgactcggacatgaaagttattgccatggctgctactaacaggccaaaagcactggatgttgctctttgtcggcctggtcacttctccaaaaaggtgtagtcttggagacttggtccttttactctaggagtaagtggtctgcaacttgggccatacatgaggagacaatgggatcctggtattacaaatgggcaattggtgatgagctgcgaggagctagctttgcagatcgcagtgttgcttggggacaagcaacatttcatcggggcgataatgtaacacccgacactggctcaccacgtgatgggcctcgatgtcgcaaggcccaactcggagcagcctaaaggcaggaccgcaacggcaggagaggtattgaagacaaatcagaaatcggaaacagggttcgtcccttcgctcgtcttcctccacggagcggcatatcggtgcgtcaccagctcctcacgtcccggctcaccatcggcggctacggggacgtgacaggcggcagcgccacagaccaggacgccggctggaatgctcggccggggatcgagctggacgattattcagctgaaagattagaagaggggtacttccagacaagtgaggagtcagagcagttcagacgagagtacgagatgcggcgaatgaagcagacaggatgaagggctggacttcgtctcgcaaggtctggacacgctcaagaatctggccgaggacatgaaccaggtggataaagctagtttagagatcaggaggactaatgtcagactaagacaaactgtcaaccagtttcggtcaaccaggaacttcacaattgatatcatcttgatctgcatcattcttggcattgcaacatacctctacaacattctctcccagtgaagtgactcttggccgatctaaatgatgcgctcggtaaatgcattttcaaacaactgtatagctatggcaacatcagcgtcgccggcgcagaaatgattttaggcagctgcatttttgcagagcccttagcatgtctccaggataacctatgtcagcatttgctgtaaagaaaaggaacctcacaaaaacaaaggacagacaacagtctttttgtccaaaaggctgtccgtaacttgtattgctgtcacaagaaccatacgcaaaggaaagttttgactgtccaagcaattgaaacaatgagcacatacacacaaaaacctaaggcaaggattaatggtggaatgcgtaaagcaataatttgcaaccgacttcaaatgcatacaaccaccaacggccttgtggcaatatgacagttttg

SEQ ID NO: 65647 - DNA, 3826 bp, Zea Mays
atgagcatgatcgacgtgatcacgcgggtggacgccatctgcaagaagtacgagcggtacgacaccgacaagcacggcgaccccttctcgcgcctctacgctgccgtggacgccgggatcgacgccgccatcgaggtctccggtctcccctcccttggtcttcccttggctgccttaaagacgaaatcggcgagggccgcgaagaagaagaagaaccgggcggcctcggtgaccctggacgccgacgtacggcggaccaaggcgcggctcctggaggtggtggtcaagctacagaaggtagccgccaggaaggtgaacgggctctcgccggaggagaaggtgtcgcgggctggtctggtggccgcgctgccccacaggatccatgccatccccgacagccacggcggtgtaacacccgacactggctcaccacgtgatgggcctcgatgtcgcatggcccaactcggagcagcctaaaggcaggaccacaacggcaggagaggtattgaagacaaatcagaaatcggaaacagggttcgtcccttcgctcgtcttcctccacggagcggcatatcggtgcgtcaccagctcctcacgtcccggctcaccatcggcggctacggggacgtgacagttggtatcagaggtagtcgattctcgacattttcctcggtttcgtccttggtgctcgcgacgatggctgaggcggcacaacgggatgaagcgcgctgggagttggttatgaagaagctgagttgtctggtccagaagatggagtcgttggtggggggtcaggcagatctagcagcagcggtggcgcagcaagcggcggaggatctgcccgttctgcctcagttcgttcgatctgcgggcaataccacgacgccagtctttgacgagggacctgtcttcgacgacgagctgcccatcgacttcggttcccaggggaagaccgcgtccatggcggcagcaagcgccatggaggtccccggatccaccccgacgccctccgtccccttctacgacagcgtcgacatcttccacctcaatagtgaacccgtctacgacgtctacgatgacgacgaggatggcgattcgtcgcagcaggccgtggtgctcgctgcggacaagaactactaccccaccgctgaagagatgtacgggccgggcatggaggcgcttgtcatggacgaggtcgagcaaccgctggagcagcccatcgtcgcagacgcgcttgcgctgctcgaggagatgcgaggcaaggggtaccatgctgacgtgatgagggccttgtgcaagctgcgcgatgcagacaggacggtccaggtgctcggggagatgatggaggtcggcttcaggccatgggtcttgacattgacatacaactttgtggtggctgtgctcgtgaaggcaggaaggatggaggaggcactaaaggtgaaggatcagatgttgttggttgctggaaagaagatggatgtggttctcgcgacaacattgatgcatgggtattgcttgctcggtgaagttgggaaagcgttggatttatttaacgaggctgtcagggatggtgtgacagcaaccaatgtgacatatgcggttctgataaaaggttgtgatgcagaggggatgacagataaggcatatgagctatgtcgtcagatgatagagcagggattgctgtcaagcacacatgggttcaatttggtgataacaggtctgttaagagacaagcggtgggaggatgccatcagcttgcttgaggttatggttgatataccttctgccggtactgcggctaagtgtgaagagcttgatatcatgacagaatgtgttgctcaatgcaatcttgtcactgctgtgtcctctgattttcatcctgaattcatctgtctgtttgtcaaaaaatttggtggctctttggcagtatcaagcaagagagtattgtttctcagttggggctacatggaggagtatgaggttctgattccatttcagttgcttcaggttcgtgagagccaagtaaatgatgtttgccaggacatgggtgtgggagataagtgcttggctgccattcatgactttggcgatgttcagggtgtagatgaagcaaaggaggagcttgttgagatagtgagctgtctgcatggttcactgaactccaagaagcttggagcaaaattgccctggggtgtcctgcttgttggccctccaggaactggaaacactcttctagcatgggcagttgcaggagaggctggaattccatttttctatgtttctgctagtgagtttgttgaagcttttgttggaagaggtcttgcccgtgtcagggaattgttcaaggaagccaaagaagctgctccatccatcatttttattgatgaacttgatgttatgggtggaaatagaggtagaagttctaacgatgtgagggaccaaactctaaaccagctaattgcagaaatggatggttttgactcggacatgaaagttattgccatggctgctactaacaggccaaaagcactggatgttgctctttgtcggcctggtcacttctccaaaaaggtgtagtcttggagacttggtccttttactctaggagtaagtggtctgcaacttgggccatacatgaggagacaatgggatcctggtattacaaatgggcaattggtgatgagctgcgaggagctagctttgcagatcgcagtgttgcttggggacaagcaacatttcatcggggcgataatgtaacacccgacactggctcaccacgtgatgggcctcgatgtcgcaaggcccaactcggagcagcctaaaggcaggaccgcaacggcaggagaggtattgaagacaaatcagaaatcggaaacagggttcgtcccttcgctcgtcttcctccacggagcggcatatcggtgcgtcaccagctcctcacgtcccggctcaccatcggcggctacggggacgtgacaggcggcagcgccacagaccaggacgccggctggaatgctcggccggggatcgagctggacgattattcagctgaaagattagaagaggggtacttccagacaagtgaggagtcagagcagttcagacgagagtacgagatgcggcgaatgaagcagacaggatgaagggctggacttcgtctcgcaaggtctggacacgctcaagaatctggccgaggacatgaaccaggaactggataggcaggtccctctcatagatgagattgacaccaaggtggataaagctagtttagagatcaggaggactaatgtcagactaagacaaactgtcaaccagtttcggtcaaccaggaacttcacaattgatatcatcttgatctgcatcattcttggcattgcaacatacctctacaacattctctcccagtgaagtgactcttggccgatctaaatgatgcgctcggtaaatgcattttcaaacaactgtatagctatggcaacatcagcgtcgccggcgcagaaatgattttaggcagctgcatttttgcagagcccttagcatgtctccaggataacctatgtcagcatttgctgtaaagaaaaggaacctcacaaaaacaaaggacagacaacagtctttttgtccaaaaggctgtccgtaacttgtattgctgtcacaagaaccatacgcaaaggaaagttttgactgtccaagcaattgaaacaatgagcacatacacacaaaaacctaaggcaaggattaatggtggaatgcgtaaagcaataatttgcaaccgacttcaaatgcatacaaccaccaacggccttgtggcaatatgacagttttg

SEQ ID NO: 65648 - DNA, 519 bp, Zea Mays
cttggatgggattctaagctagggactgtgattgcaagtgatgaatactggaagaaaaatacaaagaaactgaaatatggccctccagaaaatgaagatttcatgacacaaatgtttgaacatattgcagtggatggatctacatcatgcgctccaggtgaattttatgatgtggaaaatcatgagactgaggttgatggtattgatggagttgattttggcacatttgaggcagactgtgatgctcaatatgatgaatttgcgtctccttttgctagtggcagcaagtcaactcagtcgaagagaggcgtctcaactcagtcaaagaaaagagctagtcctactgttgttaatagcccactgaagcgctcaaagaatcccatggttaaggtcatgaataagattcataatactttggagatcaattgcaatatttcaaacaaagtaatgcttggtgagtataggtatgaatcaatcaagcaatgcatggaatgggctattgagtgtggagcaactgaa

SEQ ID NO: 65649 - DNA, 114 bp, Zea Mays
ctcagcgggacgcgaataacctagctggactactagctattgctgaggagaccttggcagagttcctgtcgaaagcaacaggaactgttgtcgattgggtgcaaatggttggga

SEQ ID NO: 65650 - DNA, 376 bp, Zea Mays
ccgccccctcttcttgggctgcccgcgtggccggcccaacgcgcgtgggcatggcaaaccgcacgttgtgccttgtggctgcgcctggaaaccaccatcattctctctccctttcccatcttctctccctgatgctcgcaactgccactacccctatcacctggtggttgccgatcacagcgcccaaatccaaagcaccccggcgagcgcccagacgcccagcttggctgtctcggcgcggcctcttcttctccggcgagtccttcgaccagtttgtgatccgtttccgagcttcgagagatcgaaggtcaagctttggtgaccaagtgatcaagctcctcgagctctacgagattgaagattctgagcatctgtt

SEQ ID NO: 65651 - DNA, 1536 bp, Zea Mays
agttgcaataggccaagaagagtctcgggagggagacttggacagacctgtgtcagccggtgatggaccatctggtaatctcggcccagtggaggaaggggaattgtctggaggggtagcccgggcccaggcacgggctggagtgtggatcgcctcgcacttaatggctatctccacgtcattgttgagctatgggacactgtcgattgcttcggagcaaatgcattctcctttacctcctgtggtggttgctcctccatgcaaaccatgtgttgtgatccccccccatgcgagtctacactcgcattccaaggagggctcgatgtctccaagcgaaagtgagagggatggcacctccgactgaagccttcatcagcaagatatccaagaaggtgaatggggtcctgcctaggcctcgtgccactgggaacaagataaaagtcgtgtccccaagcttcatccctcgccggagcagaagggtagctggaatgggggttgagcctcagcctcggcttcctgctcagaggcatgccaagatgacggtgttaaagaccattgctaacttccggattgatgataaggcagtcctctttcccaggattatggatgactatgcaaagttatttggtaatttgctgtttgattcacagacttctgctttggcggcgttgtttgggtgggcaattcctgctccccaggaggaacagccagccctagaggcttgagctttcgccacccctattggtagttgttttgtccctccatggatccttcaaacattttggtacggaatgtaaggggtcttaatgtcggagctcgtcaggatgttgttaggaatttagccggctccttgagatgtgatgtcattttcttacaagaaacaaaaatgactgaggtatttcgtttccttattgcatgaatgttaggtcctggtttctacaacttcgttgtcttgacttcggtgggcgccagtggaggtattttagttgcttggcgtgatcgtatcagccatcagggcatttacaaaattgattctcactcagtgtcagttcagtttggctcagcagaaggttctccttggtggcttaaatgtgtatacggccctcaaggaaatgaggctaagatttagtttttgcagtaactcagggaggagagggatgtgtgttctggtccttgggtggtggttggagattttaacttgatttttcaagatgaagacaagaatgattcaaatgtagaccgagctatgatggatagattacgaagatggattaatgatcttgctctcaaagaagtaccacttcgtggtagaaagtttacttggtctaatgggcaggttaatcccacattggtcagattggttagggtgttttgttctatggattgggaagagctttttcctaactgtctcctgcaaagttcagcttcacaagactctgaccattgccccttgtgttggggatgaatgattttaggcatggtaaaaagagacttcatttcgaagctttttggcctaagttggggggtcacttttta

SEQ ID NO: 65652 - DNA, 864 bp, Zea Mays
ggtaaatattgtgttgtggaacaattttgagaagtggcctgatcgataaaaaatggtatgcatctttagaaaaataaccatgcttgtagatgttgaacgtactaaaatcaatgtattaaacaaatcaaatgagatcaaaggatgaaaggaatatggatttagtataaaaacagagctaatgtctgtagtctatgacaaatcattggttcactctttttagtgtggtattgaacttattaaaattattgtgttaaactgataaaatgagatgaaaggaatatggttttagtattgttacaacttggtgcataaataataattgattttttggaagataattattggttgttagaatctttcacttattttaaagtcgggatttttctgtcatttcttataaaaatacaaaaaagatttattgggttgcatgtcatttcttttcggggctcgacagggaagacatgtaccttttttgtatttatatgtgcaaagaacaattttagtatgtcattgatctggaaatacatggtaaccaaacactcacctaagttcacttgtggagccacatttagcaagacgctcactaccagctaaatcaatcaagttaaggactacttggacatgttgctgtgtgtcgtgcaataaaaacagaatctttctagccctagtgaacaccctgtccctaaagtaattgtggcttagatggctttgacagggagggaggggggaatcacagccatgaaatcaaaccctccctttgagatgataatggttgctttatctactcaaagatctcaaataattcatgcatcatacccacaactactccaccagtcactggaattaacaatatcctatgccaag

SEQ ID NO: 65653 - DNA, 1469 bp, Zea Mays
gatataggatattaggagaaaaaaaccaaccacggggtcggggaggagaggaaaggagacgggaaacaaaaacacagcgcaggcagagagagacgtaaagccgccgcttcgtgcgcgtcgacgtcacctcgccgccggggggccagggctgtctcaccgcggtgtcccgtagggctcccttccctcgccggactgggcgggcgccggacggatcgggaggcgacgacctgaggggactggctgggatgaccgggaagaagcgcaaggcggaggcggcgcgcctggaggagacggaccaggcgctctacggggccttccggggcgccgcaaactcgctctcgcagctctacactctcgccatgggtgcgcagaaagcctcctttaacgccggcgaacgccacgccatggaaaaactttatgaatggatcctgaggcagcacgaaaatggtttgaggctaacagttgctgatgtagcttcccgtatccaggtaagtttgcaatcgttcccttatatgtttctatccaaatttaatatggaaactcgggtaaaaatctgggatatattgccacttcattgtttagttctaaattacatgctaagtggtactgacttgttgccttaatgaacaatgatttatgacaaatgagataagatgaacctgccgttcttgcagacttaacttagatcctgttcctatcatctgattatcttgtttgccatgccattttacatctccagctgtagtatgttcgcatacagtttcaccattgtccgtccttttgcacatattcaggcaacgaatgattacacacttatgtatcctctgtgtgtgtagcttgagattcagtatggaggtgacaatgcatcagcctctccaaggccacaataccctagccaaagcactgcacctacagtgcacatccccaacacaagcaaccagcaaccatcgccaagcttatttgctccaggaaaccctggtctgacacaatccaagaattccatggtcttttcaaacgcattatccagccccatccggcggagcctgcagccttaccacctagaacaggacggagacacagggtactttgtgaacggcgcaagccgcgacatgaaccccacggcttcgaacgattcatccatggacatgcactcggacagcccagttcatgactcctactgagcagctcccttcacggaaccggaagaacagcatttccagtcgaagaagtgccaggcctagtaggaatattcaatttaacaccttccgtagcctcttacactaagcgtgtgatgccttgtggcgttgttgctactacttaccacctgttgctttgccagaatactgaaatttgcatgtactatactgtaccatttgatttatctgtgcatattactagtgttggtacgtgacgagtgcaggaaacaaaccattggaaagaatttacaacgtgaacagtttgtgatggcc

SEQ ID NO: 65654 - DNA, 1016 bp, Zea Mays
gatataggatattaggagaaaaaaaccaaccacggggtcggggaggagaggaaaggagacgggaaacaaaaacacagcgcaggcagagagagacgtaaagccgccgcttcgtgcgcgacgacctgaggggactggctgggatgaccgggaagaagcgcaaggcggaggcggcgcgcctggaggagacggaccaggcgctctacggggccttccggggcgccgcaaactcgctctcgcagctctacactctcgccatgggtgcgcagaaagcctcctttaacgccggcgaacgccacgccatggaaaaactttatgaatggatcctgaggcagcacgaaaatggtttgaggctaacagttgctgatgtagcttcccgtatccagcttgagattcagtatggaggtgacaatgcatcagcctctccaaggccacaataccctagccaaagcactgcacctacagtgcacatccccaacacaagcaaccagcaaccatcgccaagcttatttgctccaggaaaccctggtctgacacaatccaagaattccatggtcttttcaaacgcattatccagccccatccggcggagcctgcagccttaccacctagaacaggacggagacacagggtactttgtgaacggcgcaagccgcgacatgaaccccacggcttcgaacgattcatccatggacatgcactcggacagcccagttcatgactcctactgagcagctcccttcacggaaccggaagaacagcatttccagtcgaagaagtgccaggcctagtaggaatattcaatttaacaccttccgtagcctcttacactaagcgtgtgatgccttgtggcgttgttgctactacttaccacctgttgctttgccagaatactgaaatttgcatgtactatactgtaccatttgatttatctgtgcatattactagtgttggtacgtgacgagtgcaggaaacaaaccattggaaagaatttacaacgtgaacagtttgtgatggcc

SEQ ID NO: 65655 - DNA, 3158 bp, Zea Mays
gttttgtggaatttcaaccgcttggcgggaggcaagagtcgaggggtaaagcatataaaagcgggtaaagtggaacgtatccgcccctgacgtctccatctacacccggattcgccttttttttctgaacgtcttcacggctctccttccttcgccgccgcccgcccggccatggattccccgaggggtcccgcgagcttcgcaacgcaggccaacgccctcctccgcaagaacctctgcgttcagaaacggaacctcaagacaaacatcggcatcactttcttcccaatcctgatttgcgtgcttctcatcgtgctccagaacgtcatcaacagcgagcttgacaagcccaagtacaaatgcggttgcgtctgcctcgagaccagtgccaacggaaggtgcgtaaggaaagagtgtggcattcagtactcgacgctggatcaggtggggagctgtccgattcccagcccgccacagtggccagccctgattcagatcccccgtgctgatttccgggctgcaaggacgttctcccaaccgtttaatgatttgcctgatccattttgccgtgactcctggtcttgccctgcaactgtccttgtcactgggaaggacagagcggttgcagaagctatatcaagagggctgtttcctgtcctttctccgtctttgaatgcaacagatttactggatctcttctccaagatagtcgctggctcagatacacagccatggtacacacagttgctagagcctgcatttttctctggtcgtacattgtatgtgatccagcctgagtgcacacctgtcatgtcacagaccattacatataatactgggggcataccctttcagctcaatatacagtgtgttgaaggtgctccgttatggcgtgaaactgcatcaattatcaaccatgaatttttaaagggttatagacaacgaggaggacaaataaacgaatttattgcaggttatgacttcttgggcacaacacagtatggcctcggtgtaaatgtttggtacaactctacttacaatgataacaatgcatattcatttatctcaacattgcgggttccacgcttggtgaatgcagtatccaacgcttatctgaaattaatcaaagggactggggtagacatgctacttgagtttgtaaaagatatgcccaaagttgggacaagttttcagttggatctgtcttctcttctgagtgtcttattcttcacatggatcatcgaacttcttttcccagttatgttgacatatctggtgtatgagaagcagcagaagctaaggattatgatgaaaatgcacggtctgaaggatgggccttactggctgatatcttattcttatttccttgctctatcaatcgtctatatgttattctttatgatttttggctccttgattggtctcaattttttcagagtaaatgaatatagcatacaagctgtttttttcttcgtctgtataaatttgcagattgcacttgcattttttgtggcatctttctttttgtctgtcaagatggccacagtgattggctacatgtatgtatttggctctggcttacttggtgcatttcttttccgtttctttgttgaggacaaaacttttccctatggttggacattagtcatggagattgtcccaggattttccctctatcggggcctatatgaacttggtcagtatgcattctcgggaagcagtataggaactactgatgtttacagaagaaatgtgcaacatcattgcatgaacctagctttgtccaacaggattccaaagtcattctcgatatggagaaatctgatgttgctctagaaagaaaagtagttgagcaatttttgatagatcccaatgcaaaccaagctatcatctgtgataacctcaggaaggtttatcatggaagggatggaaaccctgacaagctggctgttagaggtttatctcttgtccttcaaaagggccagtgctttggaatgcttggtccaaatggagccgggaaaacatctttcattaatatgatgattggactcattaaacctacatctggtactgcttatgtccacggaatggatataaatatggacatgggtgacatatatacaaatatgggagtgtgcccacaacagaacttgctttgggaaacactgactggaaaagaacatcttttcttttatggtaagttgaagaatcttaaaggttctgcattaatgaaggctgttgaccactctctgaagagtgtaaatctatctcatggtaatgttggtgataagcaagtgaagaaatacagcggaggcatgaaaagaaggctcagcgtggcaatctcattgattggggaccctaaagttgtcttcatggatgagccaagcacaggaatggacccagcatcaagaaataacctatggaatgttgtgaaggaggccaagaaaaaccgtgcaattattcttactactcactcaatggaagaggcagaggtattgtgtgaccggcttggcatctttgttgatggcgatttccaatgccttggaaaccctaaagagctaaaggctagatatggggggacatacatattcacagtgacaacacccccagaccaagagatggaggttgaacatctagtgcgtcagttctcgcccagcgcaaacaagatctaccatctatctggaactcagaaattcgagctgccgaagcaagaggtgaaaatagcccatgtttttgacatggtcgagaaggcgaagcgccggctctcaatacatgcctggggactggtcgacacgaccttagaggacgtcttcatcaaggtcgccagaggagcacaagtgttcaacgagtttgcgtagataacacctttaggactgccttcgtagcaagcacgggaccccaattattggatgggcggactgcatagagaatcttgtggttttgtaggtatttttcattagtgagtcattcttgtgtggaaaataggctccatatgcttggtttacgtggttgtacataaataaatacatttttgagactgcagttgcagaatagaataattgtccagttgtgtccatatatattttttctttttcatgtgtggtgctcatgttttacttactccgtatctttaatcagcttattcgattggccttaat

SEQ ID NO: 65656 - DNA, 3198 bp, Zea Mays
gttttgtggaatttcaaccgcttggcgggaggcaagagtcgaggggtaaagcatataaaagcgggtaaagtggaacgtatccgcccctgacgtctccatctacacccggattcgccttttttttctgaacgtcttcacggctctccttccttcgccgccgcccgcccggccatggattccccgaggggtcccgcgagcttcgcaacgcaggccaacgccctcctccgcaagaacctctgcgttcagaaacggaacctcaagacaaacatcggcatcactttcttcccaatcctgatttgcgtgcttctcatcgtgctccagaacgtcatcaacagcgagcttgacaagcccaagtacaaatgcggttgcgtctgcctcgagaccagtgccaacggaaggtgcgtaaggaaagagtgtggcattcagtactcgacgctggatcaggtggggagctgtccgattcccagcccgccacagtggccagccctgattcagatcccccgtgctgatttccgggctgcaaggacgttctcccaaccgtttaatgatttgcctgatccattttgccgtgactcctggtcttgccctgcaactgtccttgtcactgggaaggacagagcggttgcagaagctatatcaagagggctgtttcctgtcctttctccgtctttgaatgcaacagatttactggatctcttctccaagatagtcgctgtgagctccctcaattaccaaccaaatatacagtgtgttgaaggtgctccgttatggcgtgaaactgcatcaattatcaaccatgaatttttaaagggttatagacaacgaggaggacaaataaacgaatttattgcaggttatgacttcttgggcacaacacagtatggcctcggtgtaaatgtttggtacaactctacttacaatgataacaatgcatattcatttatctcaacattgcgggttccacgcttggtgaatgcagtatccaacgcttatctgaaattaatcaaagggactggggtagacatgctacttgagtttgtaaaagatatgcccaaagttgggacaagttttcagttggatctgtcttctcttctgagtgtcttattcttcacatggatcatcgaacttcttttcccagttatgttgacatatctggtgtatgagaagcagcagaagctaaggattatgatgaaaatgcacggtctgaaggatgggccttactggctgatatcttattcttatttccttgctctatcaatcgtctatatgttattctttatgatttttggctccttgattggtctcaattttttcagagtaaatgaatatagcatacaagctgtttttttcttcgtctgtataaatttgcagattgcacttgcattttttgtggcatctttctttttgtctgtcaagatggccacagtgattggctacatgtatgtatttggctctggcttacttggtgcatttcttttccgtttctttgttgaggacaaaacttttccctatggttggacattagtcatggagattgtcccaggattttccctctatcggggcctatatgaacttggtcagtatgcattctcgggaagcagtataggaactactggtatgacctggagaagtctgaaagatcccctcaatggaatgcgtgatgttatgatcgtaatgagtgtagaatgggcagtgctgctcatattagcattctatttagatcaaacctctttgctaggcggtggtgtcaggaaaaatccttttttctgcttcagatgtttacagaagaaatgtgcaacatcattgcatgaacctagctttgtccaacaggattccaaagtcattctcgatatggagaaatctgatgttgctctagaaagaaaagtagttgagcaatttttgatagatcccaatgcaaaccaagctatcatctgtgataacctcaggaaggtttatcatggaagggatggaaaccctgacaagctggctgttagaggtttatctcttgtccttcaaaagggccagtgctttggaatgcttggtccaaatggagccgggaaaacatctttcattaatatgatgattggactcattaaacctacatctggtactgcttatgtccacggaatggatataaatatggacatgggtgacatatatacaaatatgggagtgtgcccacaacagaacttgctttgggaaacactgactggaaaagaacatcttttcttttatggtaagttgaagaatcttaaaggttctgcattaatgaaggctgttgaccactctctgaagagtgtaaatctatctcatggtaatgttggtgataagcaagtgaagaaatacagcggaggcatgaaaagaaggctcagcgtggcaatctcattgattggggaccctaaagttgtcttcatggatgagccaagcacaggaatggacccagcatcaagaaataacctatggaatgttgtgaaggaggccaagaaaaaccgtgcaattattcttactactcactcaatggaagaggcagaggtattgtgtgaccggcttggcatctttgttgatggcgatttccaatgccttggaaaccctaaagagctaaaggctagatatggggggacatacatattcacagtgacaacacccccagaccaagagatggaggttgaacatctagtgcgtcagttctcgcccagcgcaaacaagatctaccatctatctggaactcagaaattcgagctgccgaagcaagaggtgaaaatagcccatgtttttgacatggtcgagaaggcgaagcgccggctctcaatacatgcctggggactggtcgacacgaccttagaggacgtcttcatcaaggtcgccagaggagcacaagtgttcaacgagtttgcgtagataacacctttaggactgccttcgtagcaagcacgggaccccaattattggatgggcggactgcatagagaatcttgtggttttgtaggtatttttcattagtgagtcattcttgtgtggaaaataggctccatatgcttggtttacgtggttgtacataaataaatacatttttgagactgcagttgcagaatagaataattgtccagttgtgtccatatatattttttctttttcatgtgtggtgctcatgttttacttactccgtatctttaatcagcttattcgattggccttaat

SEQ ID NO: 65657 - DNA, 3066 bp, Zea Mays
ataaaagcgggtaaagtggaacgtatccgcccctgacgtctccatctacacccggattcgccttttttttctgaacgtcttcacggctctccttccttcgccgccgcccgcccggccatggattccccgaggggtcccgcgagcttcgcaacgcaggccaacgccctcctccgcaagaacctctgcgttcagaaacggaacctcaagacaaacatcggcatcactttcttcccaatcctgatttgcgtgcttctcatcgtgctccagaacgtcatcaacagcgagcttgacaagcccaagtacaaatgcggttgcgtctgcctcgagaccagtgccaacggaaggtgcgtaaggaaagagtgtggcattcagtactcgacgctggatcaggtggggagctgtccgattcccagcccgccacagtggccagccctgattcagatcccccgtgctgatttccgggctgcaaggacgttctcccaaccgtttaatgatttgcctgatccattttgccgtgactcctggtcttgccctgcaactgtccttgtcactgggaaggacagagcggttgcagaagctatatcaagagggctgtttcctgtcctttctccgtctttgaatgcaacagatttactggatctcttctccaagatagtcgctggctcagatacacagccatggtacacacagttgctagagcctgcatttttctctggtcgtacattgtatgtgatccagcctgagtgcacacctgtcatgtcacagaccattacatataatactgggggcataccctttcagctcaatatacagtgtgttgaaggtgctccgttatggcgtgaaactgcatcaattatcaaccatgaatttttaaagggttatagacaacgaggaggacaaataaacgaatttattgcaggttatgacttcttgggcacaacacagtatggcctcggtgtaaatgtttggtacaactctacttacaatgataacaatgcatattcatttatctcaacattgcgggttccacgcttggtgaatgcagtatccaacgcttatctgaaattaatcaaagggactggggtagacatgctacttgagtttgtaaaagatatgcccaaagttgggacaagttttcagttggatctgtcttctcttctgagtgtcttattcttcacatggatcatcgaacttcttttcccagttatgttgacatatctggtgtatgagaagcagcagaagctaaggattatgatgaaaatgcacggtctgaaggatgggccttactggctgatatcttattcttatttccttgctctatcaatcgtctatatgttattctttatgatttttggctccttgattggtctcaattttttcagagtaaatgaatatagcatacaagctgtttttttcttcgtctgtataaatttgcagattgcacttgcattttttgtggcatctttctttttgtctgtcaagatggccacagtgattggctacatgtatgtatttggctctggcttacttggtgcatttcttttccgtttctttgttgaggacaaaacttttccctatggttggacattagtcatggagattgtcccaggattttccctctatcggggcctatatgaacttggtcagtatgcattctcgggaagcagtataggaactactgatgtttacagaagaaatgtgcaacatcattgcatgaacctagctttgtccaacaggattccaaagtcattctcgatatggagaaatctgatgttgctctagaaagaaaagtagttgagcaatttttgatagatcccaatgcaaaccaagctatcatctgtgataacctcaggaaggtttatcatggaagggatggaaaccctgacaagctggctgttagaggtttatctcttgtccttcaaaagggccagtgctttggaatgcttggtccaaatggagccgggaaaacatctttcattaatatgatgattggactcattaaacctacatctggtactgcttatgtccacggaatggatataaatatggacatgggtgacatatatacaaatatgggagtgtgcccacaacagaacttgctttgggaaacactgactggaaaagaacatcttttcttttatggctgttgaccactctctgaagagtgtaaatctatctcatggtaatgttggtgataagcaagtgaagaaatacagcggaggcatgaaaagaaggctcagcgtggcaatctcattgattggggaccctaaagttgtcttcatggatgagccaagcacaggaatggacccagcatcaagaaataacctatggaatgttgtgaaggaggccaagaaaaaccgtgcaattattcttactactcactcaatggaagaggcagaggtattgtgtgaccggcttggcatctttgttgatggcgatttccaatgccttggaaaccctaaagagctaaaggctagatatggggggacatacatattcacagtgacaacacccccagaccaagagatggaggttgaacatctagtgcgtcagttctcgcccagcgcaaacaagatctaccatctatctggaactcagaaattcgagctgccgaagcaagaggtgaaaatagcccatgtttttgacatggtcgagaaggcgaagcgccggctctcaatacatgcctggggactggtcgacacgaccttagaggacgtcttcatcaaggtcgccagaggagcacaagtgttcaacgagtttgcgtagataacacctttaggactgccttcgtagcaagcacgggaccccaattattggatgggcggactgcatagagaatcttgtggttttgtaggtatttttcattagtgagtcattcttgtgtggaaaataggctccatatgcttggtttacgtggttgtacataaataaatacatttttgagactgcagttgcagaatagaataattgtccagttgtgtccatatatattttttctttttcatgtgtggtgctcatgttttacttactccgtatctttaatcagcttattcgattggccttaat

SEQ ID NO: 65658 - DNA, 3333 bp, Zea Mays
tctccatctacacccggattcgccttttttttctgaacgtcttcacggctctccttccttcgccgccgcccgcccggccatggattccccgaggggtcccgcgagcttcgcaacgcaggccaacgccctcctccgcaagaacctctgcgttcagaaacggaacctcaagacaaacatcggcatcactttcttcccaatcctgatttgcgtgcttctcatcgtgctccagaacgtcatcaacagcgagcttgacaagcccaagtacaaatgcggttgcgtctgcctcgagaccagtgccaacggaaggtgcgtaaggaaagagtgtggcattcagtactcgacgctggatcaggtggggagctgtccgattcccagcccgccacagtggccagccctgattcagatcccccgtgctgatttccgggctgcaaggacgttctcccaaccgtttaatgatttgcctgatccattttgccgtgactcctggtcttgccctgcaactgtccttgtcactgggaaggacagagcggttgcagaagctatatcaagagggctgtttcctgtcctttctccgtctttgaatgcaacagatttactggatctcttctccaagatagtcgctggctcagatacacagccatggtacacacagttgctagagcctgcatttttctctggtcgtacattgtatgtgatccagcctgagtgcacacctgtcatgtcacagaccattacatataatactgggggcataccctttcagctcagttatgacttcttgggcacaacacagtatggcctcggtgtaaatgtttggtacaactctacttacaatgataacaatgcatattcatttatctcaacattgcgggttccacgcttggtgaatgcagtatccaacgcttatctgaaattaatcaaagggactggggtagacatgctacttgagtttgtaaaagatatgcccaaagttgggacaagttttcagttggatctgtcttctcttctgagtgtcttattcttcacatggatcatcgaacttcttttcccagttatgttgacatatctggtgtatgagaagcagcagaagctaaggattatgatgaaaatgcacggtctgaaggatgggccttactggctgatatcttattcttatttccttgctctatcaatcgtctatatgttattctttatgatttttggctccttgattggtaattgtattacaacgttactcatgaatattctgttgtggcaaataaatcttcattgtcttgactagccttcttctgttcaggtctcaattttttcagagtaaatgaatatagcatacaagctgtttttttcttcgtctgtataaatttgcagattgcacttgcattttttgtggcatctttctttttgtctgtcaagatggccacaggttaataactcaaaccttttaccttcaagtcagaactttattttttgaaagtgacagagggaatttcattttgctccttctgcagtgattggctacatgtatgtatttggctctggcttacttggtgcatttcttttccgtttctttgttgaggacaaaacttttccctatggttggacattagtcatggagattgtcccaggattttccctctatcggggcctatatgaacttggtcagtatgcattctcgggaagcagtataggaactactggtatgacctggagaagtctgaaagatcccctcaatggaatgcgtgatgttatgatcgtaatgagtgtagaatgggcagtgctgctcatattagcattctatttagatcaaacctctttgctaggcggtggtgtcaggaaaaatccttttttctgcttcagatgtttacagaagaaatgtgcaacatcattgcatgaacctagctttgtccaacaggattccaaagtcattctcgatatggagaaatctgatgttgctctagaaagaaaagtagttgagcaatttttgatagatcccaatgcaaaccaagctatcatctgtgataacctcaggaaggtttatcatggaagggatggaaaccctgacaagctggctgttagaggtttatctcttgtccttcaaaagggccagtgctttggaatgcttggtccaaatggagccgggaaaacatctttcattaatatgcttgctttgggaaacactgactggaaaagaacatcttttcttttatggtaagttgaagaatcttaaaggttctgcattaatgaaggtacatccaatccagataccactgtttgaacattatattcactttttggttttcaacggttctaaaagctatgtcatttactcttcagttttctttttggaaattatccagctatctcagagcatgttacaatcatattttctctgaacttttccactgccaggctgttgaccactctctgaagagtgtaaatctatctcatggtaatgttggtgataagcaagtgaagaaatacagcggaggcatgaaaagaaggctcagcgtggcaatctcattgattggggaccctaaagttgtcttcatggatgagccaagcacaggaatggacccagcatcaagaaataacctatggaatgttgtgaaggaggccaagaaaaaccgtgcaattattcttactactcactcaatggaagaggcagaggtattgtgtgaccggcttggcatctttgttgatggcgatttccaatgccttggaaaccctaaagagctaaaggctagatatggggggacatacatattcacagtgacaacacccccagaccaagagatggaggttgaacatctagtgcgtcagttctcgcccagcgcaaacaagatctaccatctatctggaactcagaaattcgagctgccgaagcaagaggtgaaaatagcccatgtttttgacatggtcgagaaggcgaagcgccggctctcaatacatgcctggggactggtcgacacgaccttagaggacgtcttcatcaaggtcgccagaggagcacaagtgttcaacgagtttgcgtagataacacctttaggactgccttcgtagcaagcacgggaccccaattattggatgggcggactgcatagagaatcttgtggttttgtaggtatttttcattagtgagtcattcttgtgtggaaaataggctccatatgcttggtttacgtggttgtacataaataaatacatttttgagactgcagttgcagaatagaataattgtccagttgtgtccatatatattttttctttttcatgtgtggtgctcatgttttacttactccgtatctttaatcagcttattcgattggccttaat

SEQ ID NO: 65659 - DNA, 3010 bp, Zea Mays
tctccatctacacccggattcgccttttttttctgaacgtcttcacggctctccttccttcgccgccgcccgcccggccatggattccccgaggggtcccgcgagcttcgcaacgcaggccaacgccctcctccgcaagaacctctgcgttcagaaacggaacctcaagacaaacatcggcatcactttcttcccaatcctgatttgcgtgcttctcatcgtgctccagaacgtcatcaacagcgagcttgacaagcccaagtacaaatgcggttgcgtctgcctcgagaccagtgccaacggaaggtgcgtaaggaaagagtgtggcattcagtactcgacgctggatcaggtggggagctgtccgattcccagcccgccacagtggccagccctgattcagatcccccgtgctgatttccgggctgcaaggacgttctcccaaccgtttaatgatttgcctgatccattttgccgtgactcctggtcttgccctgcaactgtccttgtcactgggaaggacagagcggttgcagaagctatatcaagagggctgtttcctgtcctttctccgtctttgaatgcaacagatttactggatctcttctccaagatagtcgctatatacagtgtgttgaaggtgctccgttatggcgtgaaactgcatcaattatcaaccatgaatttttaaagggttatagacaacgaggaggacaaataaacgaatttattgcaggttatgacttcttgggcacaacacagtatggcctcggtgtaaatgtttggtacaactctacttacaatgataacaatgcatattcatttatctcaacattgcgggttccacgcttggtgaatgcagtatccaacgcttatctgaaattaatcaaagggactggggtagacatgctacttgagtttgtaaaagatatgcccaaagttgggacaagttttcagttggatctgtcttctcttctgagtgtcttattcttcacatggatcatcgaacttcttttcccagttatgttgacatatctggtgtatgagaagcagcagaagctaaggattatgatgaaaatgcacggtctgaaggatgggccttactggctgatatcttattcttatttccttgctctatcaatcgtctatatgttattctttatgatttttggctccttgattgattgcacttgcattttttgtggcatctttctttttgtctgtcaagatggccacagtgattggctacatgtatgtatttggctctggcttacttggtgcatttcttttccgtttctttgttgaggacaaaacttttccctatggttggacattagtcatggagattgtcccaggattttccctctatcggggcctatatgaacttggtcagtatgcattctcgggaagcagtataggaactactggtatgacctggagaagtctgaaagatcccctcaatggaatgcgtgatgttatgatcgtaatgagtgtagaatgggcagtgctgctcatattagcattctatttagatcaaacctctttgctaggcggtggtgtcaggaaaaatccttttttctgcttcagatgtttacagaagaaatgtgcaacatcattgcatgaacctagctttgtccaacaggattccaaagtcattctcgatatggagaaatctgatgttgctctagaaagaaaagtagttgagcaatttttgatagatcccaatgcaaaccaagctatcatctgtgataacctcaggaaggtttatcatggaagggatggaaaccctgacaagctggctgttagaggtttatctcttgtccttcaaaagggccagtgctttggaatgcttggtccaaatggagccgggaaaacatctttcattaatatgatgattggactcattaaacctacatctggtactgcttatgtccacggaatggatataaatatggacatgggtgacatatatacaaatatgggagtgtgcccacaacagaacttgctttgggaaacactgactggaaaagaacatcttttcttttatggtaagttgaagaatcttaaaggttctgcattaatgaaggctgttgaccactctctgaagagtgtaaatctatctcatggtaatgttggtgataagcaagtgaagaaatacagcggaggcatgaaaagaaggctcagcgtggcaatctcattgattggggaccctaaagttgtcttcatggatgagccaagcacaggaatggacccagcatcaagaaataacctatggaatgttgtgaaggaggccaagaaaaaccgtgcaattattcttactactcactcaatggaagaggcagaggtattgtgtgaccggcttggcatctttgttgatggcgatttccaatgccttggaaaccctaaagagctaaaggctagatatggggggacatacatattcacagtgacaacacccccagaccaagagatggaggttgaacatctagtgcgtcagttctcgcccagcgcaaacaagatctaccatctatctggaactcagaaattcgagctgccgaagcaagaggtgaaaatagcccatgtttttgacatggtcgagaaggcgaagcgccggctctcaatacatgcctggggactggtcgacacgaccttagaggacgtcttcatcaaggtcgccagaggagcacaagtgttcaacgagtttgcgtagataacacctttaggactgccttcgtagcaagcacgggaccccaattattggatgggcggactgcatagagaatcttgtggttttgtaggtatttttcattagtgagtcattcttgtgtggaaaataggctccatatgcttggtttacgtggttgtacataaataaatacatttttgagactgcagttgcagaatagaataattgtccagttgtgtccatatatattttttctttttcatgtgtggtgctcatgttttacttactccgtatctttaatcagcttattcgattggccttaat

SEQ ID NO: 65660 - DNA, 3244 bp, Zea Mays
ctccatctacacccggattcgccttttttttctgaacgtcttcacggctctccttccttcgccgccgcccgcccggccatggattccccgaggggtcccgcgagcttcgcaacgcaggccaacgccctcctccgcaagaacctctgcgttcagaaacggaacctcaagacaaacatcggcatcactttcttcccaatcctgatttgcgtgcttctcatcgtgctccagaacgtcatcaacagcgagcttgacaagcccaagtacaaatgcggttgcgtctgcctcgagaccagtgccaacggaaggtgcgtaaggaaagagtgtggcattcagtactcgacgctggatcaggtggggagctgtccgattcccagcccgccacagtggccagccctgattcagatcccccgtgctgatttccgggctgcaaggacgttctcccaaccgtttaatgatttgcctgatccattttgccgtgactcctggtcttgccctgcaactgtccttgtcactgggaaggacagagcggttgcagaagctatatcaagagggctgtttcctgtcctttctccgtctttgaatgcaacagatttactggatctcttctccaagatagtcgctggctcagatacacagccatggtacacacagttgctagagcctgcatttttctctggtcgtacattgtatgtgatccagcctgagtgcacacctgtcatgtcacagaccattacatataatactgggggcataccctttcagctcaatatacagtgtgttgaaggtgctccgttatggcgtgaaactgcatcaattatcaaccatgaatttttaaagggttatagacaacgaggaggacaaataaacgaatttattgcagtatggcctcggtgtaaatgtttggtacaactctacttacaatgataacaatgcatattcatttatctcaacattgcgggttccacgcttggtgaatgcagtatccaacgcttatctgaaattaatcaaagggactggggtagacatgctacttgagtttgtaaaagatatgcccaaagttgggacaagttttcagttggatctgtcttctcttctgagtgtcttattcttcacatggatcatcgaacttcttttcccagttatgttgacatatctggtgtatgagaagcagcagaagctaaggattatgatgaaaatgcacggtctgaaggatgggccttactggctgatatcttattcttatttccttgctctatcaatcgtctatatgttattctttatgatttttggctccttgattggtaattgtattacaacgttactcatgaatattctgttgtggcaaataaatcttcattgtcttgactagccttcttctgttcaggtctcaattttttcagagtaaatgaatatagcatacaagctgtttttttcttcgtctgtataaatttgcagattgcacttgcattttttgtggcatctttctttttgtctgtcaagatggccacagtgattggctacatgtatgtatttggctctggcttacttggtgcatttcttttccgtttctttgttgaggacaaaacttttccctatggttggacattagtcatggagattgtcccaggattttccctctatcggggcctatatgaacttggtcagtatgcattctcgggaagcagtataggaactactggtatgacctggagaagtctgaaagatcccctcaatggaatgcgtgatgttatgatcgtaatgagtgtagaatgggcagtgctgctcatattagcattctatttagatcaaacctctttgctaggcggtggtgtcaggaaaaatccttttttctgcttcagatgtttacagaagaaatgtgcaacatcattgcatgaacctagctttgtccaacaggattccaaagtcattctcgatatggagaaatctgatgttgctctagaaagaaaagtagttgagcaatttttgatagatcccaatgcaaaccaagctatcatctgtgataacctcaggaaggtttatcatggaagggatggaaaccctgacaagctggctgttagaggtttatctcttgtccttcaaaagggccagtgctttggaatgcttggtccaaatggagccgggaaaacatctttcattaatatgatgattggactcattaaacctacatctggtactgcttatgtccacggaatggatataaatatggacatgggtgacatatatacaaatatgggagtgtgcccacaacagaacttgctttgggaaacactgactggaaaagaacatcttttcttttatggctgttgaccactctctgaagagtgtaaatctatctcatggtaatgttggtgataagcaagtgaagaaatacagcggaggcatgaaaagaaggctcagcgtggcaatctcattgattggggaccctaaagttgtcttcatggatgagccaagcacaggaatggacccagcatcaagaaataacctatggaatgttgtgaaggaggccaagaaaaaccgtgcaattattcttactactcactcaatggaagaggcagaggtattgtgtgaccggcttggcatctttgttgatggcgatttccaatgccttggaaaccctaaagagctaaaggctagatatggggggacatacatattcacagtgacaacacccccagaccaagagatggaggttgaacatctagtgcgtcagttctcgcccagcgcaaacaagatctaccatctatctggaactcagaaattcgagctgccgaagcaagaggtgaaaatagcccatgtttttgacatggtcgagaaggcgaagcgccggctctcaatacatgcctggggactggtcgacacgaccttagaggacgtcttcatcaaggtcgccagaggagcacaagtgttcaacgagtttgcgtagataacacctttaggactgccttcgtagcaagcacgggaccccaattattggatgggcggactgcatagagaatcttgtggttttgtaggtatttttcattagtgagtcattcttgtgtggaaaataggctccatatgcttggtttacgtggttgtacataaataaatacatttttgagactgcagttgcagaatagaataattgtccagttgtgtccatatatattttttctttttcatgtgtggtgctcatgttttacttactccgtatctttaatcagcttattcgattggccttaat

SEQ ID NO: 65661 - DNA, 3029 bp, Zea Mays
ctccatctacacccggattcgccttttttttctgaacgtcttcacggctctccttccttcgccgccgcccgcccggccatggattccccgaggggtcccgcgagcttcgcaacgcaggccaacgccctcctccgcaagaacctctgcgttcagaaacggaacctcaagacaaacatcggcatcactttcttcccaatcctgatttgcgtgcttctcatcgtgctccagaacgtcatcaacagcgagcttgacaagcccaagtacaaatgcggttgcgtctgcctcgagaccagtgccaacggaaggtgcgtaaggaaagagtgtggcattcagtactcgacgctggatcaggtggggagctgtccgattcccagcccgccacagtggccagccctgattcagatcccccgtgctgatttccgggctgcaaggacgttctcccaaccgtttaatgatttgcctgatccattttgccgtgactcctggtcttgccctgcaactgtccttgtcactgggaaggacagagcggttgcagaagatttactggatctcttctccaagatagtcgctatatacagtgtgttgaaggtgctccgttatggcgtgaaactgcatcaattatcaaccatgaatttttaaagggttatagacaacgaggaggacaaataaacgaatttattgcaggttatgacttcttgggcacaacacagtatggcctcggtgtaaatgtttggtacaactctacttacaatgataacaatgcatattcatttatctcaacattgcgggttccacgcttggtgaatgcagtatccaacgcttatctgaaattaatcaaagggactggggtagacatgctacttgagtttgtaaaagatatgcccaaagttgggacaagttttcagttggatctgtcttctcttctgagtgtcttattcttcacatggatcatcgaacttcttttcccagttatgttgacatatctggtgtatgagaagcagcagaagctaaggattatgatgaaaatgcacggtctgaaggatgggccttactggctgatatcttattcttatttccttgctctatcaatcgtctatatgttattctttatgatttttggctccttgattggtctcaattttttcagagtaaatgaatatagcatacaagctgtttttttcttcgtctgtataaatttgcagattgcacttgcattttttgtggcatctttctttttgtctgtcaagatggccacagtgattggctacatgtatgtatttggctctggcttacttggtgcatttcttttccgtttctttgttgaggacaaaacttttccctatggttggacattagtcatggagattgtcccaggattttccctctatcggggcctatatgaacttggtcagtatgcattctcgggaagcagtataggaactactggtatgacctggagaagtctgaaagatcccctcaatggaatgcgtgatgttatgatcgtaatgagtgtagaatgggcagtgctgctcatattagcattctatttagatcaaacctctttgctaggcggtggtgtcaggaaaaatccttttttctgcttcagatgtttacagaagaaatgtgcaacatcattgcatgaacctagctttgtccaacaggattccaaagtcattctcgatatggagaaatctgatgttgctctagaaagaaaagtagttgagcaatttttgatagatcccaatgcaaaccaagctatcatctgtgataacctcaggaaggtttatcatggaagggatggaaaccctgacaagctggctgttagaggtttatctcttgtccttcaaaagggccagtgctttggaatgcttggtccaaatggagccgggaaaacatctttcattaatatgatgattggactcattaaacctacatctggtactgcttatgtccacggaatggatataaatatggacatgggtgacatatatacaaatatgggagtgtgcccacaacagaacttgctttgggaaacactgactggaaaagaacatcttttcttttatggtaagttgaagaatcttaaaggttctgcattaatgaaggctgttgaccactctctgaagagtgtaaatctatctcatggtaatgttggtgataagcaagtgaagaaatacagcggaggcatgaaaagaaggctcagcgtggcaatctcattgattggggaccctaaagttgtcttcatggatgagccaagcacaggaatggacccagcatcaagaaataacctatggaatgttgtgaaggaggccaagaaaaaccgtgcaattattcttactactcactcaatggaagaggcagaggtattgtgtgaccggcttggcatctttgttgatggcgatttccaatgccttggaaaccctaaagagctaaaggctagatatggggggacatacatattcacagtgacaacacccccagaccaagagatggaggttgaacatctagtgcgtcagttctcgcccagcgcaaacaagatctaccatctatctggaactcagaaattcgagctgccgaagcaagaggtgaaaatagcccatgtttttgacatggtcgagaaggcgaagcgccggctctcaatacatgcctggggactggtcgacacgaccttagaggacgtcttcatcaaggtcgccagaggagcacaagtgttcaacgagtttgcgtagataacacctttaggactgccttcgtagcaagcacgggaccccaattattggatgggcggactgcatagagaatcttgtggttttgtaggtatttttcattagtgagtcattcttgtgtggaaaataggctccatatgcttggtttacgtggttgtacataaataaatacatttttgagactgcagttgcagaatagaataattgtccagttgtgtccatatatattttttctttttcatgtgtggtgctcatgttttacttactccgtatctttaatcagcttattcgattggccttaat

SEQ ID NO: 65662 - DNA, 3213 bp, Zea Mays
tctacacccggattcgccttttttttctgaacgtcttcacggctctccttccttcgccgccgcccgcccggccatggattccccgaggggtcccgcgagcttcgcaacgcaggccaacgccctcctccgcaagaacctctgcgttcagaaacggaacctcaagacaaacatcggcatcactttcttcccaatcctgatttgcgtgcttctcatcgtgctccagaacgtcatcaacagcgagcttgacaagcccaagtacaaatgcggttgcgtctgcctcgagaccagtgccaacggaaggtgcgtaaggaaagagtgtggcattcagtactcgacgctggatcaggtggggagctgtccgattcccagcccgccacagtggccagccctgattcagatcccccgtgctgatttccgggctgcaaggacgttctcccaaccgtttaatgatttgcctgatccattttgccgtgactcctggtcttgccctgcaactgtccttgtcactgggaaggacagagcggttgcagaagctatatcaagagggctgtttcctgtcctttctccgtctttgaatgcaacagatttactggatctcttctccaagatagtcgctatacacagccatggtacacacagttgctagagcctgcatttttctctggtcgtacattgtatgtgatccagcctgagtgcacacctgtcatgtcacagaccattacatataatactgggggcataccctttcagctcaatatacagtgtgttgaaggtgctccgttatggcgtgaaactgcatcaattatcaaccatgaatttttaaagggttatagacaacgaggaggacaaataaacgaatttattgcaggttatgacttcttgggcacaacacagtatggcctcggtgtaaatgtttggtacaactctacttacaatgataacaatgcatattcatttatctcaacattgcgggttccacgcttggtgaatgcagtatccaacgcttatctgaaattaatcaaagggactggggtagacatgctacttgagtttgtaaaagatatgcccaaagttgggacaagttttcagttggatctgtcttctcttctgagtgtcttattcttcacatggatcatcgaacttcttttcccagttatgttgacatatctggtgtatgagaagcagcagaagctaaggattatgatgaaaatgcacggtctgaaggatgggccttactggctgatatcttattcttatttccttgctctatcaatcgtctatatgttattctttatgatttttggctccttgattggtctcaattttttcagagtaaatgaatatagcatacaagctgtttttttcttcgtctgtataaatttgcagattgcacttgcattttttgtggcatctttctttttgtctgtcaagatggccacagtgattggctacatgtatgtatttggctctggcttacttggtgcatttcttttccgtttctttgttgaggacaaaacttttccctatggttggacattagtcatggagattgtcccaggattttccctctatcggggcctatatgaacttggtcagtatgcattctcgggaagcagtataggaactactggtatgacctggagaagtctgaaagatcccctcaatggaatgcgtgatgttatgatcgtaatgagtgtagaatgggcagtgctgctcatattagcattctatttagatcaaacctctttgctaggcggtggtgtcaggaaaaatccttttttctgcttcagatgtttacagaagaaatgtgcaacatcattgcatgaacctagctttgtccaacaggattccaaagtcattctcgatatggagaaatctgatgttgctctagaaagaaaagtagttgagcaatttttgatagatcccaatgcaaaccaagctatcatctgtgataacctcaggaaggtttatcatggaagggatggaaaccctgacaagctggctgttagaggtttatctcttgtccttcaaaagggccagtgctttggaatgcttggtccaaatggagccgggaaaacatctttcattaatatgatgattggactcattaaacctacatctggtactgcttatgtccacggaatggatataaatatggacatgggtgacatatatacaaatatgggagtgtgcccacaacagaacttgctttgggaaacactgactggaaaagaacatcttttcttttatggtaagttgaagaatcttaaaggttctgcattaatgaaggctgttgaccactctctgaagagtgtaaatctatctcatggtaatgttggtgataagcaagtgaagaaatacagcggaggcatgaaaagaaggctcagcgtggcaatctcattgattggggaccctaaagttgtcttcatggatgagccaagcacaggaatggacccagcatcaagaaataacctatggaatgttgtgaaggaggccaagaaaaaccgtgcaattattcttactactcactcaatggaagaggcagaggtattgtgtgaccggcttggcatctttgttgatggcgatttccaatgccttggaaaccctaaagagctaaaggctagatatggggggacatacatattcacagtgacaacacccccagaccaagagatggaggttgaacatctagtgcgtcagttctcgcccagcgcaaacaagatctaccatctatctggaactcagaaattcgagctgccgaagcaagaggtgaaaatagcccatgtttttgacatggtcgagaaggcgaagcgccggctctcaatacatgcctggggactggtcgacacgaccttagaggacgtcttcatcaaggtcgccagaggagcacaagtgttcaacgagtttgcgtagataacacctttaggactgccttcgtagcaagcacgggaccccaattattggatgggcggactgcatagagaatcttgtggttttgtaggtatttttcattagtgagtcattcttgtgtggaaaataggctccatatgcttggtttacgtggttgtacataaataaatacatttttgagactgcagttgcagaatagaataattgtccagttgtgtccatatatattttttctttttcatgtgtggtgctcatgttttacttactccgtatctttaatcagcttattcgattggccttaat

SEQ ID NO: 65663 - DNA, 3119 bp, Zea Mays
ctacacccggattcgccttttttttctgaacgtcttcacggctctccttccttcgccgccgcccgcccggccatggattccccgaggggtcccgcgagcttcgcaacgcaggccaacgccctcctccgcaagaacctctgcgttcagaaacggaacctcaagacaaacatcggcatcactttcttcccaatcctgatttgcgtgcttctcatcgtgctccagaacgtcatcaacagcgagcttgacaagcccaagtacaaatgcggttgcgtctgcctcgagaccagtgccaacggaaggtgcgtaaggaaagagtgtggcattcagtactcgacgctggatcaggtggggagctgtccgattcccagcccgccacagtggccagccctgattcagatcccccgtgctgatttccgggctgcaaggacgttctcccaaccgtttaatgatttgcctgatccattttgccgtgactcctggtcttgccctgcaactgtccttgtcactgggaaggacagagcggttgcagaagctatatcaagagggctgtttcctgtcctttctccgtctttgaatgcaacagatttactggatctcttctccaagatagtcgctatatacagtgtgttgaaggtgctccgttatggcgtgaaactgcatcaattatcaaccatgaatttttaaagggttatagacaacgaggaggacaaataaacgaatttattgcaggttatgacttcttgggcacaacacagtatggcctcggtgtaaatgtttggtacaactctacttacaatgataacaatgcatattcatttatctcaacattgcgggttccacgcttggtgaatgcagtatccaacgcttatctgaaattaatcaaagggactggggtagacatgctacttgagtttgtaaaagatatgcccaaagttgggacaagttttcagttggatctgtcttctcttctgagtgtcttattcttcacatggatcatcgaacttcttttcccagttatgttgacatatctggtgtatgagaagcagcagaagctaaggattatgatgaaaatgcacggtctgaaggatgggccttactggctgatatcttattcttatttccttgctctatcaatcgtctatatgttattctttatgatttttggctccttgattggtaattgtattacaacgttactcatgaatattctgttgtggcaaataaatcttcattgtcttgactagccttcttctgttcaggtctcaattttttcagagtaaatgaatatagcatacaagctgtttttttcttcgtctgtataaatttgcagattgcacttgcattttttgtggcatctttctttttgtctgtcaagatggccacagtgattggctacatgtatgtatttggctctggcttacttggtgcatttcttttccgtttctttgttgaggacaaaacttttccctatggttggacattagtcatggagattgtcccaggattttccctctatcggggcctatatgaacttggtcagtatgcattctcgggaagcagtataggaactactggtatgacctggagaagtctgaaagatcccctcaatggaatgcgtgatgttatgatcgtaatgagtgtagaatgggcagtgctgctcatattagcattctatttagatcaaacctctttgctaggcggtggtgtcaggaaaaatccttttttctgcttcagatgtttacagaagaaatgtgcaacatcattgcatgaacctagctttgtccaacaggattccaaagtcattctcgatatggagaaatctgatgttgctctagaaagaaaagtagttgagcaatttttgatagatcccaatgcaaaccaagctatcatctgtgataacctcaggaaggtttatcatggaagggatggaaaccctgacaagctggctgttagaggtttatctcttgtccttcaaaagggccagtgctttggaatgcttggtccaaatggagccgggaaaacatctttcattaatatgatgattggactcattaaacctacatctggtactgcttatgtccacggaatggatataaatatggacatgggtgacatatatacaaatatgggagtgtgcccacaacagaacttgctttgggaaacactgactggaaaagaacatcttttcttttatggctgttgaccactctctgaagagtgtaaatctatctcatggtaatgttggtgataagcaagtgaagaaatacagcggaggcatgaaaagaaggctcagcgtggcaatctcattgattggggaccctaaagttgtcttcatggatgagccaagcacaggaatggacccagcatcaagaaataacctatggaatgttgtgaaggaggccaagaaaaaccgtgcaattattcttactactcactcaatggaagaggcagaggtattgtgtgaccggcttggcatctttgttgatggcgatttccaatgccttggaaaccctaaagagctaaaggctagatatggggggacatacatattcacagtgacaacacccccagaccaagagatggaggttgaacatctagtgcgtcagttctcgcccagcgcaaacaagatctaccatctatctggaactcagaaattcgagctgccgaagcaagaggtgaaaatagcccatgtttttgacatggtcgagaaggcgaagcgccggctctcaatacatgcctggggactggtcgacacgaccttagaggacgtcttcatcaaggtcgccagaggagcacaagtgttcaacgagtttgcgtagataacacctttaggactgccttcgtagcaagcacgggaccccaattattggatgggcggactgcatagagaatcttgtggttttgtaggtatttttcattagtgagtcattcttgtgtggaaaataggctccatatgcttggtttacgtggttgtacataaataaatacatttttgagactgcagttgcagaatagaataattgtccagttgtgtccatatatattttttctttttcatgtgtggtgctcatgttttacttactccgtatctttaatcagcttattcgattggccttaat

SEQ ID NO: 65664 - DNA, 3181 bp, Zea Mays
cccggattcgccttttttttctgaacgtcttcacggctctccttccttcgccgccgcccgcccggccatggattccccgaggggtcccgcgagcttcgcaacgcaggccaacgccctcctccgcaagaacctctgcgttcagaaacggaacctcaagacaaacatcggcatcactttcttcccaatcctgatttgcgtgcttctcatcgtgctccagaacgtcatcaacagcgagcttgacaagcccaagtacaaatgcggttgcgtctgcctcgagaccagtgccaacggaaggtgcgtaaggaaagagtgtggcattcagtactcgacgctggatcaggtggggagctgtccgattcccagcccgccacagtggccagccctgattcagatcccccgtgctgatttccgggctgcaaggacgttctcccaaccgtttaatgatttgcctgatccattttgccgtgactcctggtcttgccctgcaactgtccttgtcactgggaaggacagagcggttgcagaagctatatcaagagggctgtttcctgtcctttctccgtctttgaatgcaacagatttactggatctcttctccaagatagtcgctggctcagatacacagccatggtacacacagttgctagagcctgcatttttctctggtcgtacattgtatgtgatccagcctgagtgcacacctgtcatgtcacagaccattacatataatactgggggcataccctttcagctcaatatacagtgtgttgaaggtgctccgttatggcgtgaaactgcatcaattatcaaccatgaatttttaaagggttatagacaacgaggaggacaaataaacgaatttattgcaggttatgacttcttgggcacaacacagtatggcctcggtgtaaatgtttggtacaactctacttacaatgataacaatgcatattcatttatctcaacattgcgggttccacgcttggtgaatgcagtatccaacgcttatctgaaattaatcaaagggactggggtagacatgctacttgagtttgtaaaagatatgcccaaagttgggacaagttttcagttggatctgtcttctcttctgagtgtcttattcttcacatggatcatcgaacttcttttcccagttatgttgacatatctggtgtatgagaagcagcagaagctaaggattatgatgaaaatgcacggtctgaaggatgggccttactggctgatatcttattcttatttccttgctctatcaatcgtctatatgttattctttatgatttttggctccttgattggtctcaattttttcagagtaaatgaatatagcatacaagctgtttttttcttcgtctgtataaatttgcagattgcacttgcattttttgtggcatctttctttttgtctgtcaagatggccacagtgattggctacatgtatgtatttggctctggcttacttggtgcatttcttttccgtttctttgttgaggacaaaacttttccctatggttggacattagtcatggagattgtcccaggattttccctctatcggggcctatatgaacttggtcagtatgcattctcgggaagcagtataggaactactggtatgacctggagaagtctgaaagatcccctcaatggaatgcgtgatgttatgatcgtaatgagtgtagaatgggcagtgctgctcatattagcattctatttagatcaaacctctttgctaggcggtggtgtcaggaaaaatccttttttctgcttcagatgtttacagaagaaatgtgcaacatcattgcatgaacctagctttgtccaacaggattccaaagtcattctcgatatggagaaatctgatgttgctctagaaagaaaagtagttgagcaatttttgatagatcccaatgcaaaccaagctatcatctgtgataacctcaggaaggtttatcatggaagggatggaaaccctgacaagctggctgttagaggtttatctcttgtccttcaaaagggccagtgctttggaatgcttggtccaaatggagccgggaaaacatctttcattaatatggtatgatgattggactcattaaacctacatctggtactgcttatgtccacggaatggatataaatatggacatgggtgacatatatacaaatatgggagtgtgcccacaacagaacttgctttgggaaacactgactggaaaagaacatcttttcttttatggctgttgaccactctctgaagagtgtaaatctatctcatggtaatgttggtgataagcaagtgaagaaatacagcggaggcatgaaaagaaggctcagcgtggcaatctcattgattggggaccctaaagttgtcttcatggatgagccaagcacaggaatggacccagcatcaagaaataacctatggaatgttgtgaaggaggccaagaaaaaccgtgcaattattcttactactcactcaatggaagaggcagaggtattgtgtgaccggcttggcatctttgttgatggcgatttccaatgccttggaaaccctaaagagctaaaggctagatatggggggacatacatattcacagtgacaacacccccagaccaagagatggaggttgaacatctagtgcgtcagttctcgcccagcgcaaacaagatctaccatctatctggaactcagaaattcgagctgccgaagcaagaggtgaaaatagcccatgtttttgacatggtcgagaaggcgaagcgccggctctcaatacatgcctggggactggtcgacacgaccttagaggacgtcttcatcaaggtcgccagaggagcacaagtgttcaacgagtttgcgtagataacacctttaggactgccttcgtagcaagcacgggaccccaattattggatgggcggactgcatagagaatcttgtggttttgtaggtatttttcattagtgagtcattcttgtgtggaaaataggctccatatgcttggtttacgtggttgtacataaataaatacatttttgagactgcagttgcagaatagaataattgtccagttgtgtccatatatattttttctttttcatgtgtggtgctcatgttttacttactccgtatctttaatcagcttattcgattggccttaat

SEQ ID NO: 65665 - DNA, 3125 bp, Zea Mays
cccggattcgccttttttttctgaacgtcttcacggctctccttccttcgccgccgcccgcccggccatggattccccgaggggtcccgcgagcttcgcaacgcaggccaacgccctcctccgcaagaacctctgcgttcagaaacggaacctcaagacaaacatcggcatcactttcttcccaatcctgatttgcgtgcttctcatcgtgctccagaacgtcatcaacagcgagcttgacaagcccaagtacaaatgcggttgcgtctgcctcgagaccagtgccaacggaaggtgcgtaaggaaagagtgtggcattcagtactcgacgctggatcaggtggggagctgtccgattcccagcccgccacagtggccagccctgattcagatcccccgtgctgatttccgggctgcaaggacgttctcccaaccgtttaatgatttgcctgatccattttgccgtgactcctggtcttgccctgcaactgtccttgtcactgggaaggacagagcggttgcagaagctatatcaagagggctgtttcctgtcctttctccgtctttgaatgcaacagatttactggatctcttctccaagatagtcgctgtgagctccctcaattaccaaccaaggctcagatacacagccatggtacacacagttgctagagcctgcatttttctctggtcgtacattgtatgtgatccagcctgagtgcacacctgtcatgtcacagaccattacatataatactgggggcataccctttcagctcagttatgacttcttgggcacaacacagtatggcctcggtgtaaatgtttggtacaactctacttacaatgataacaatgcatattcatttatctcaacattgcgggttccacgcttggtgaatgcagtatccaacgcttatctgaaattaatcaaagggactggggtagacatgctacttgagtttgtaaaagatatgcccaaagttgggacaagttttcagttggatctgtcttctcttctgagtgtcttattcttcacatggatcatcgaacttcttttcccagttatgttgacatatctggtgtatgagaagcagcagaagctaaggattatgatgaaaatgcacggtctgaaggatgggccttactggctgatatcttattcttatttccttgctctatcaatcgtctatatgttattctttatgatttttggctccttgattggtctcaattttttcagagtaaatgaatatagcatacaagctgtttttttcttcgtctgtataaatttgcagattgcacttgcattttttgtggcatctttctttttgtctgtcaagatggccacagtgattggctacatgtatgtatttggctctggcttacttggtgcatttcttttccgtttctttgttgaggacaaaacttttccctatggttggacattagtcatggagattgtcccaggattttccctctatcggggcctatatgaacttggtcagtatgcattctcgggaagcagtataggaactactggtatgacctggagaagtctgaaagatcccctcaatggaatgcgtgatgttatgatcgtaatgagtgtagaatgggcagtgctgctcatattagcattctatttagatcaaacctctttgctaggcggtggtgtcaggaaaaatccttttttctgcttcagatgtttacagaagaaatgtgcaacatcattgcatgaacctagctttgtccaacaggattccaaagtcattctcgatatggagaaatctgatgttgctctagaaagaaaagtagttgagcaatttttgatagatcccaatgcaaaccaagctatcatctgtgataacctcaggaaggtttatcatggaagggatggaaaccctgacaagctggctgttagaggtttatctcttgtccttcaaaagggccagtgctttggaatgcttggtccaaatggagccgggaaaacatctttcattaatatgatgattggactcattaaacctacatctggtactgcttatgtccacggaatggatataaatatggacatgggtgacatatatacaaatatgggagtgtgcccacaacagaacttgctttgggaaacactgactggaaaagaacatcttttcttttatggtaagttgaagaatcttaaaggttctgcattaatgaaggctgttgaccactctctgaagagtgtaaatctatctcatggtaatgttggtgataagcaagtgaagaaatacagcggaggcatgaaaagaaggctcagcgtggcaatctcattgattggggaccctaaagttgtcttcatggatgagccaagcacaggaatggacccagcatcaagaaataacctatggaatgttgtgaaggaggccaagaaaaaccgtgcaattattcttactactcactcaatggaagaggcagaggtattgtgtgaccggcttggcatctttgttgatggcgatttccaatgccttggaaaccctaaagagctaaaggctagatatggggggacatacatattcacagtgacaacacccccagaccaagagatggaggttgaacatctagtgcgtcagttctcgcccagcgcaaacaagatctaccatctatctggaactcagaaattcgagctgccgaagcaagaggtgaaaatagcccatgtttttgacatggtcgagaaggcgaagcgccggctctcaatacatgcctggggactggtcgacacgaccttagaggacgtcttcatcaaggtcgccagaggagcacaagtgttcaacgagtttgcgtagataacacctttaggactgccttcgtagcaagcacgggaccccaattattggatgggcggactgcatagagaatcttgtggttttgtaggtatttttcattagtgagtcattcttgtgtggaaaataggctccatatgcttggtttacgtggttgtacataaataaatacatttttgagactgcagttgcagaatagaataattgtccagttgtgtccatatatattttttctttttcatgtgtggtgctcatgttttacttactccgtatctttaatcagcttattcgattggccttaat

SEQ ID NO: 65666 - DNA, 3646 bp, Zea Mays
cccggattcgccttttttttctgaacgtcttcacggctctccttccttcgccgccgcccgcccggccatggattccccgaggggtcccgcgagcttcgcaacgcaggccaacgccctcctccgcaagaacctctgcgttcagaaacggaacctcaagacaaacatcggcatcactttcttcccaatcctgatttgcgtgcttctcatcgtgctccagaacgtcatcaacagcgagcttgacaagcccaagtacaaatgcggttgcgtctgcctcgagaccagtgccaacggaaggtgcgtaaggaaagagtgtggcattcagtactcgacgctggatcaggtggggagctgtccgattcccagcccgccacagtggccagccctgattcagatcccccgtgctgatttccgggctgcaaggacgttctcccaaccgtttaatgatttgcctgatccattttgccgtgactcctggtcttgccctgcaactgtccttgtcactgggaaggacagagcggttgcagaagctatatcaagagggctgtttcctgtcctttctccgtctttgaatgcaacagatttactggatctcttctccaagatagtcgctgtgagctccctcaattaccaaccaagtaacccgcctgtaaattttgctgcttcatgttttggtttatgtggttatcgttggcttcattttgtcctagggctcagatacacagccatggtacacacagttgctagagcctgcatttttctctggtcgtacattgtatgtgatccagcctgagtgcacacctgtcatgtcacagaccattacatataatactgggggcataccctttcagctcaatatacagtgtgttgaaggtgctccgttatggcgtgaaactgcatcaattatcaaccatgaatttttaaagggttatagacaacgaggaggacaaataaacgaatttattgcaggttatgacttcttgggcacaacacagtatggcctcggtgtaaatgtttggtacaactctacttacaatgataacaatgcatattcatttatctcaacattgcgggttccacgcttggtgaatgcagtatgtatccaacgcttatctgaaattaatcaaagggactggggtagacatgctacttgagtttgtaaaagatatgcccaaagttgggacaagttttcagttggatctgtcttctcttctgagtgtcttattcttcacatggatcatcgaacttcttttcccagttatgttgacatatctggtgtatgagaagcagcagaagctaaggattatgatgaaaatgcacggtctgaaggatgggccttactggctgatatcttattcttatttccttgctctatcaatcgtctatatgttattctttatgatttttggctccttgattggtaattgtattacaacgttactcatgaatattctgttgtggcaaataaatcttcattgtcttgactagccttcttctgttcaggtctcaattttttcagagtaaatgaatatagcatacaagctgtttttttcttcgtctgtataaatttgcagattgcacttgcattttttgtggcatctttctttttgtctgtcaagatggccacaggttaataactcaaaccttttaccttcaagtcagaactttattttttgaaagtgacagagggaatttcattttgctccttctgcagtgattggctacatgtatgtatttggctctggcttacttggtgcatttcttttccgtttctttgttgaggacaaaacttttccctatggttggacattagtcatggagattgtcccaggattttccctctatcggggcctatatgaacttggtcagtatgcattctcgggaagcagtataggaactactggtatgacctggagaagtctgaaagatcccctcaatggaatgcgtgatgttatgatcgtaatgagtgtagaatgggcagtgctgctcatattagcattctatttagatcaaacctctttgctaggcggtggtgtcaggaaaaatccttttttctgcttcagatgtttacagaagaaatgtgcaacatcattgcatgaacctagctttgtccaacaggattccaaagtcattctcgatatggagaaatctgatgttgctctagaaagaaaagtagttgagcaatttttgatagatcccaatgcaaaccaagctatcatctgtgataacctcaggaaggtttatcatggaagggatggaaaccctgacaagctggctgttagaggtttatctcttgtccttcaaaagggccagtgctttggaatgcttggtccaaatggagccgggaaaacatctttcattaatatgatgattggactcattaaacctacatctggtactgcttatgtccacggaatggatataaatatggacatgggtgacatatatacaaatatgggagtgtgcccacaacagaacttgctttgggaaacactgactggaaaagaacatcttttcttttatggtaagttgaagaatcttaaaggttctgcattaatgaaggtacatccaatccagataccactgtttgaacattatattcactttttggttttcaacggttctaaaagctatgtcatttactcttcagttttctttttggaaattatccagctatctcagagcatgttacaatcatattttctctgaacttttccactgccaggctgttgaccactctctgaagagtgtaaatctatctcatggtaatgttggtgataagcaagtgaagaaatacagcggaggcatgaaaagaaggctcagcgtggcaatctcattgattggggaccctaaagttgtcttcatggatgagccaagcacaggaatggacccagcatcaagaaataacctatggaatgttgtgaaggaggccaagaaaaaccgtgcaattattcttactactcactcaatggaagaggcagaggtattgtgtgaccggcttggcatctttgttgatggcgatttccaatgccttggaaaccctaaagagctaaaggctagatatggggggacatacatattcacagtgacaacacccccagaccaagagatggaggttgaacatctagtgcgtcagttctcgcccagcgcaaacaagatctaccatctatctggaactcagaaattcgagctgccgaagcaagaggtgaaaatagcccatgtttttgacatggtcgagaaggcgaagcgccggctctcaatacatgcctggggactggtcgacacgaccttagaggacgtcttcatcaaggtcgccagaggagcacaagtgttcaacgagtttgcgtagataacacctttaggactgccttcgtagcaagcacgggaccccaattattggatgggcggactgcatagagaatcttgtggttttgtaggtatttttcattagtgagtcattcttgtgtggaaaataggctccatatgcttggtttacgtggttgtacataaataaatacatttttgagactgcagttgcagaatagaataattgtccagttgtgtccatatatattttttctttttcatgtgtggtgctcatgttttacttactccgtatctttaatcagcttattcgattggccttaat

SEQ ID NO: 65667 - DNA, 3302 bp, Zea Mays
cccggattcgccttttttttctgaacgtcttcacggctctccttccttcgccgccgcccgcccggccatggattccccgaggggtcccgcgagcttcgcaacgcaggccaacgccctcctccgcaagaacctctgcgttcagaaacggaacctcaagacaaacatcggcatcactttcttcccaatcctgatttgcgtgcttctcatcgtgctccagaacgtcatcaacagcgagcttgacaagcccaagtacaaatgcggttgcgtctgcctcgagaccagtgccaacggaaggtgcgtaaggaaagagtgtggcattcagtactcgacgctggatcaggtggggagctgtccgattcccagcccgccacagtggccagccctgattcagatcccccgtgctgatttccgggctgcaaggacgttctcccaaccgtttaatgatttgcctgatccattttgccgtgactcctggtcttgccctgcaactgtccttgtcactgggaaggacagagcggttgcagaagctatatcaagagggctgtttcctgtcctttctccgtctttgaatgcaacagatttactggatctcttctccaagataggctcagatacacagccatggtacacacagttgctagagcctgcatttttctctggtcgtacattgtatgtgatccagcctgagtgcacacctgtcatgtcacagaccattacatataatactgggggcataccctttcagctcaatatacagtgtgttgaaggtgctccgttatggcgtgaaactgcatcaattatcaaccatgaatttttaaagggttatagacaacgaggaggacaaataaacgaatttattgcaggttatgacttcttgggcacaacacagtatggcctcggtgtaaatgtttggtacaactctacttacaatgataacaatgcatattcatttatctcaacattgcgggttccacgcttggtgaatgcagtatccaacgcttatctgaaattaatcaaagggactggggtagacatgctacttgagtttgtaaaagatatgcccaaagttgggacaagttttcagttggatctgtcttctcttctgagtgtcttattcttcacatggatcatcgaacttcttttcccagttatgttgacatatctggtgtatgagaagcagcagaagctaaggattatgatgaaaatgcacggtctgaaggatgggccttactggctgatatcttattcttatttccttgctctatcaatcgtctatatgttattctttatgatttttggctccttgattggtaattgtattacaacgttactcatgaatattctgttgtggcaaataaatcttcattgtcttgactagccttcttctgttcaggtctcaattttttcagagtaaatgaatatagcatacaagctgtttttttcttcgtctgtataaatttgcagattgcacttgcattttttgtggcatctttctttttgtctgtcaagatggccacaggttaataactcaaaccttttaccttcaagtcagaactttattttttgaaagtgacagagggaatttcattttgctccttctgcagtgattggctacatgtatgtatttggctctggcttacttggtgcatttcttttccgtttctttgttgaggacaaaacttttccctatggttggacattagtcatggagattgtcccaggattttccctctatcggggcctatatgaacttggtcagtatgcattctcgggaagcagtataggaactactgatgtttacagaagaaatgtgcaacatcattgcatgaacctagctttgtccaacaggattccaaagtcattctcgatatggagaaatctgatgttgctctagaaagaaaagtagttgagcaatttttgatagatcccaatgcaaaccaagctatcatctgtgataacctcaggaaggtttatcatggaagggatggaaaccctgacaagctggctgttagaggtttatctcttgtccttcaaaagggccagtgctttggaatgcttggtccaaatggagccgggaaaacatctttcattaatatgatgattggactcattaaacctacatctggtactgcttatgtccacggaatggatataaatatggacatgggtgacatatatacaaatatgggagtgtgcccacaacagaacttgctttgggaaacactgactggaaaagaacatcttttcttttatggctgttgaccactctctgaagagtgtaaatctatctcatggtaatgttggtgataagcaagtgaagaaatacagcggaggcatgaaaagaaggctcagcgtggcaatctcattgattggggaccctaaagttgtcttcatggatgagccaagcacaggaatggacccagcatcaagaaataacctatggaatgttgtgaaggaggccaagaaaaaccgtgcaattattcttactagtaaggatcctttcctatccactcatgtatctaaattctagaatcgtactccgtttatttattgcatctgaatgtaagaagagtgattagtgaatgagcaagtaactaaatgtgatgccgccagctcactcaatggaagaggcagaggtattgtgtgaccggcttggcatctttgttgatggcgatttccaatgccttggaaaccctaaagagctaaaggctagatatggggggacatacatattcacagtgacaacacccccagaccaagagatggaggttgaacatctagtgcgtcagttctcgcccagcgcaaacaagatctaccatctatctggaactcagaaattcgagctgccgaagcaagaggtgaaaatagcccatgtttttgacatggtcgagaaggcgaagcgccggctctcaatacatgcctggggactggtcgacacgaccttagaggacgtcttcatcaaggtcgccagaggagcacaagtgttcaacgagtttgcgtagataacacctttaggactgccttcgtagcaagcacgggaccccaattattggatgggcggactgcatagagaatcttgtggttttgtaggtatttttcattagtgagtcattcttgtgtggaaaataggctccatatgcttggtttacgtggttgtacataaataaatacatttttgagactgcagttgcagaatagaataattgtccagttgtgtccatatatattttttctttttcatgtgtggtgctcatgttttacttactccgtatctttaatcagcttattcgattggccttaat

SEQ ID NO: 65668 - DNA, 3009 bp, Zea Mays
cccggattcgccttttttttctgaacgtcttcacggctctccttccttcgccgccgcccgcccggccatggattccccgaggggtcccgcgagcttcgcaacgcaggccaacgccctcctccgcaagaacctctgcgttcagaaacggaacctcaagacaaacatcggcatcactttcttcccaatcctgatttgcgtgcttctcatcgtgctccagaacgtcatcaacagcgagcttgacaagcccaagtacaaatgcggttgcgtctgcctcgagaccagtgccaacggaaggtgcgtaaggaaagagtgtggcattcagtactcgacgctggatcaggtggggagctgtccgattcccagcccgccacagtggccagccctgattcagatcccccgtgctgatttccgggctgcaaggacgttctcccaaccgtttaatgatttgcctgatccattttgccgtgactcctggtcttgccctgcaactgtccttgtcactgggaaggacagagcggttgcagaagctatatcaagagggctgtttcctgtcctttctccgtctttgaatgcaacagatttactggatctcttctccaagatagtcgctatacacagccatggtacacacagttgctagagcctgcatttttctctggtcgtacattgtatgtgatccagcctgagtgcacacctgtcatgtcacagaccattacatataatactgggggcataccctttcagctcaatatacagtgtgttgaaggtgctccgttatggcgtgaaactgcatcaattatcaaccatgaatttttaaagggttatagacaacgaggaggacaaataaacgaatttattgcaggttatgacttcttgggcacaacacagtatggcctcggtgtaaatgtttggtacaactctacttacaatgataacaatgcatattcatttatctcaacattgcgggttccacgcttggtgaatgcagtatccaacgcttatctgaaattaatcaaagggactggggtagacatgctacttgagtttgtaaaagatatgcccaaagttgggacaagttttcagttggatctgtcttctcttctgagtgtcttattcttcacatggatcatcgaacttcttttcccagttatgttgacatatctggtgtatgagaagcagcagaagctaaggattatgatgaaaatgcacggtctgaaggatgggccttactggctgatatcttattcttatttccttgctctatcaatcgtctatatgttattctttatgatttttggctccttgattggtctcaattttttcagagtaaatgaatatagcatacaagctgtttttttcttcgtctgtataaatttgcagattgcacttgcattttttgtggcatctttctttttgtctgtcaagatggccacagtgattggctacatgtatgtatttggctctggcttacttggtgcatttcttttccgtttctttgttgaggacaaaacttttccctatggttggacattagtcatggagattgtcccaggattttccctctatcggggcctatatgaacttggtcagtatgcattctcgggaagcagtataggaactactgatgtttacagaagaaatgtgcaacatcattgcatgaacctagctttgtccaacaggattccaaagtcattctcgatatggagaaatctgatgttgctctagaaagaaaagtagttgagcaatttttgatagatcccaatgcaaaccaagctatcatctgtgataacctcaggaaggtttatcatggaagggatggaaaccctgacaagctggctgttagaggtttatctcttgtccttcaaaagggccagtgctttggaatgcttggtccaaatggagccgggaaaacatctttcattaatatgatgattggactcattaaacctacatctggtactgcttatgtccacggaatggatataaatatggacatgggtgacatatatacaaatatgggagtgtgcccacaacagaacttgctttgggaaacactgactggaaaagaacatcttttcttttatggctgttgaccactctctgaagagtgtaaatctatctcatggtaatgttggtgataagcaagtgaagaaatacagcggaggcatgaaaagaaggctcagcgtggcaatctcattgattggggaccctaaagttgtcttcatggatgagccaagcacaggaatggacccagcatcaagaaataacctatggaatgttgtgaaggaggccaagaaaaaccgtgcaattattcttactactcactcaatggaagaggcagaggtattgtgtgaccggcttggcatctttgttgatggcgatttccaatgccttggaaaccctaaagagctaaaggctagatatggggggacatacatattcacagtgacaacacccccagaccaagagatggaggttgaacatctagtgcgtcagttctcgcccagcgcaaacaagatctaccatctatctggaactcagaaattcgagctgccgaagcaagaggtgaaaatagcccatgtttttgacatggtcgagaaggcgaagcgccggctctcaatacatgcctggggactggtcgacacgaccttagaggacgtcttcatcaaggtcgccagaggagcacaagtgttcaacgagtttgcgtagataacacctttaggactgccttcgtagcaagcacgggaccccaattattggatgggcggactgcatagagaatcttgtggttttgtaggtatttttcattagtgagtcattcttgtgtggaaaataggctccatatgcttggtttacgtggttgtacataaataaatacatttttgagactgcagttgcagaatagaataattgtccagttgtgtccatatatattttttctttttcatgtgtggtgctcatgttttacttactccgtatctttaatcagcttattcgattggccttaat

SEQ ID NO: 65669 - DNA, 3628 bp, Zea Mays
ccggattcgccttttttttctgaacgtcttcacggctctccttccttcgccgccgcccgcccggccatggattccccgaggggtcccgcgagcttcgcaacgcaggccaacgccctcctccgcaagaacctctgcgttcagaaacggaacctcaagacaaacatcggcatcactttcttcccaatcctgatttgcgtgcttctcatcgtgctccagaacgtcatcaacagcgagcttgacaagcccaagtacaaatgcggttgcgtctgcctcgagaccagtgccaacggaaggtgcgtaaggaaagagtgtggcattcagtactcgacgctggatcaggtggggagctgtccgattcccagcccgccacagtggccagccctgattcagatcccccgtgctgatttccgggctgcaaggacgttctcccaaccgtttaatgatttgcctgatccattttgccgtgactcctggtcttgccctgcaactgtccttgtcactgggaaggacagagcggttgcagaagctatatcaagagggctgtttcctgtcctttctccgtctttgaatgcaacagatttactggatctcttctccaagatagtcgctggctcagatacacagccatggtacacacagttgctagagcctgcatttttctctggtcgtacattgtatgtgatccagcctgagtgcacacctgtcatgtcacagaccattacatataatactgggggcataccctttcagctcaatatacagtgtgttgaaggtgctccgttatggcgtgaaactgcatcaattatcaaccatgaatttttaaagggttatagacaacgaggaggacaaataaacgaatttattgcaggttatatatcttgatgttacaattcttttatatgtgaattttgaaggacttcatatgtcaatgataatttgcaaaaaaataaaaaatgacagcccacgaaccaatggacccttggatactgccaatgtaatcagtaaccttattgactataatactatatatcagtttttgatataaaatgacacaaaaaagatcattcatacacaaatggtattggcatactttatgatcgccttcatttctgcaggttatgacttcttgggcacaacacagtatggcctcggtgtaaatgtttggtacaactctacttacaatgataacaatgcatattcatttatctcaacattgcgggttccacgcttggtgaatgcagtatccaacgcttatctgaaattaatcaaagggactggggtagacatgctacttgagtttgtaaaagatatgcccaaagttgggacaagttttcagttggatctgtcttctcttctgagtgtcttattcttcacatggatcatcgaacttcttttcccagttatgttgacatatctggtgtatgagaagcagcagaagctaaggattatgatgaaaatgcacggtctgaaggatgggccttactggctgatatcttattcttatttccttgctctatcaatcgtctatatgttattctttatgatttttggctccttgattggtaattgtattacaacgttactcatgaatattctgttgtggcaaataaatcttcattgtcttgactagccttcttctgttcaggtctcaattttttcagagtaaatgaatatagcatacaagctgtttttttcttcgtctgtataaatttgcagattgcacttgcattttttgtggcatctttctttttgtctgtcaagatggccacaggttaataactcaaaccttttaccttcaagtcagaactttattttttgaaagtgacagagggaatttcattttgctccttctgcagtgattggctacatgtatgtatttggctctggcttacttggtgcatttcttttccgtttctttgttgaggacaaaacttttccctatggttggacattagtcatggagattgtcccaggattttccctctatcggggcctatatgaacttggtcagtatgcattctcgggaagcagtataggaactactggtatgacctggagaagtctgaaagatcccctcaatggaatgcgtgatgttatgatcgtaatgagtgtagaatgggcagtgctgctcatattagcattctatttagatcaaacctctttgctaggcggtggtgtcaggaaaaatccttttttctgcttcagatgtttacagaagaaatgtgcaacatcattgcatgaacctagctttgtccaacaggattccaaagtcattctcgatatggagaaatctgatgttgctctagaaagaaaagtagttgagcaatttttgatagatcccaatgcaaaccaagctatcatctgtgataacctcaggaaggtttatcatggaagggatggaaaccctgacaagctggctgttagaggtttatctcttgtccttcaaaagggccagtgctttggaatgcttggtccaaatggagccgggaaaacatctttcattaatatgatgattggactcattaaacctacatctggtactgcttatgtccacggaatggatataaatatggacatgggtgacatatatacaaatatgggagtgtgcccacaacagaacttgctttgggaaacactgactggaaaagaacatcttttcttttatggtaagttgaagaatcttaaaggttctgcattaatgaaggctgttgaccactctctgaagagtgtaaatctatctcatggtaatgttggtgataagcaagtgaagaaatacagcggaggcatgaaaagaaggctcagcgtggcaatctcattgattggggaccctaaagttgtcttcatggatgagccaagcacaggaatggacccagcatcaagaaataacctatggaatgttgtgaaggaggccaagaaaaaccgtgcaattattcttactactcactcaatggaagaggcagaggtattgtgtgaccggcttggcatctttgttgatggcgatttccaatgccttggaaaccctaaagagctaaaggctagatatggggggacatacatattcacagtgacaacacccccagaccaagagatggaggttgaacatctagtgcgtcagttctcgcccagcgcaaacaagatctaccatctatctggaactcagaaattcgagctgccgaagcaagaggtgaaaatagcccatgtttttgacatggtcgagaaggcgaagcgccggctctcaatacatgcctggggactggtcgacacgaccttagaggacgtcttcatcaaggtcgccagaggagcacaagtgttcaacgagtttgcgtagataacacctttaggactgccttcgtagcaagcacgggaccccaattattggatgggcggactgcatagagaatcttgtggttttgtaggtatttttcattagtgagtcattcttgtgtggaaaataggctccatatgcttggtttacgtggttgtacataaataaatacatttttgagactgcagttgcagaatagaataattgtccagttgtgtccatatatattttttctttttcatgtgtggtgctcatgttttacttactccgtatctttaatcagcttattcgattggccttaat

SEQ ID NO: 65670 - DNA, 3068 bp, Zea Mays
ccggattcgccttttttttctgaacgtcttcacggctctccttccttcgccgccgcccgcccggccatggattccccgaggggtcccgcgagcttcgcaacgcaggccaacgccctcctccgcaagaacctctgcgttcagaaacggaacctcaagacaaacatcggcatcactttcttcccaatcctgatttgcgtgcttctcatcgtgctccagaacgtcatcaacagcgagcttgacaagcccaagtacaaatgcggttgcgtctgcctcgagaccagtgccaacggaaggtgcgtaaggaaagagtgtggcattcagtactcgacgctggatcaggtggggagctgtccgattcccagcccgccacagtggccagccctgattcagatcccccgtgctgatttccgggctgcaaggacgttctcccaaccgtttaatgatttgcctgatccattttgccgtgactcctggtcttgccctgcaactgtccttgtcactgggaaggacagagcggttgcagaagctatatcaagagggctgtttcctgtcctttctccgtctttgaatgcaacagatttactggatctcttctccaagatagtcgctatatacagtgtgttgaaggtgctccgttatggcgtgaaactgcatcaattatcaaccatgaatttttaaagggttatagacaacgaggaggacaaataaacgaatttattgcaggttatgacttcttgggcacaacacagtatggcctcggtgtaaatgtttggtacaactctacttacaatgataacaatgcatattcatttatctcaacattgcgggttccacgcttggtgaatgcagtatccaacgcttatctgaaattaatcaaagggactggggtagacatgctacttgagtttgtaaaagatatgcccaaagttgggacaagttttcagttggatctgtcttctcttctgagtgtcttattcttcacatggatcatcgaacttcttttcccagttatgttgacatatctggtgtatgagaagcagcagaagctaaggattatgatgaaaatgcacggtctgaaggatgggccttactggctgatatcttattcttatttccttgctctatcaatcgtctatatgttattctttatgatttttggctccttgattggtctcaattttttcagagtaaatgaatatagcatacaagctgtttttttcttcgtctgtataaatttgcagattgcacttgcattttttgtggcatctttctttttgtctgtcaagatggccacagtgattggctacatgtatgtatttggctctggcttacttggtgcatttcttttccgtttctttgttgaggacaaaacttttccctatggttggacattagtcatggagattgtcccaggattttccctctatcggggcctatatgaacttggtcagtatgcattctcgggaagcagtataggaactactggtatgacctggagaagtctgaaagatcccctcaatggaatgcgtgatgttatgatcgtaatgagtgtagaatgggcagtgctgctcatattagcattctatttagatcaaacctctttgctaggcggtggtgtcaggaaaaatccttttttctgcttcagatgtttacagaagaaatgtgcaacatcattgcatgaacctagctttgtccaacaggattccaaagtcattctcgatatggagaaatctgatgttgctctagaaagaaaagtagttgagcaatttttgatagatcccaatgcaaaccaagctatcatctgtgataacctcaggaaggtttatcatggaagggatggaaaccctgacaagctggctgttagaggtttatctcttgtccttcaaaagggccagtgctttggaatgcttggtccaaatggagccgggaaaacatctttcattaatatgatgattggactcattaaacctacatctggtactgcttatgtccacggaatggatataaatatggacatgggtgacatatatacaaatatgggagtgtgcccacaacagaacttgctttgggaaacactgactggaaaagaacatcttttcttttatggtaagttgaagaatcttaaaggttctgcattaatgaaggctgttgaccactctctgaagagtgtaaatctatctcatggtaatgttggtgataagcaagtgaagaaatacagcggaggcatgaaaagaaggctcagcgtggcaatctcattgattggggaccctaaagttgtcttcatggatgagccaagcacaggaatggacccagcatcaagaaataacctatggaatgttgtgaaggaggccaagaaaaaccgtgcaattattcttactactcactcaatggaagaggcagaggtattgtgtgaccggcttggcatctttgttgatggcgatttccaatgccttggaaaccctaaagagctaaaggctagatatggggggacatacatattcacagtgacaacacccccagaccaagagatggaggttgaacatctagtgcgtcagttctcgcccagcgcaaacaagatctaccatctatctggaactcagaaattcgagctgccgaagcaagaggtgaaaatagcccatgtttttgacatggtcgagaaggcgaagcgccggctctcaatacatgcctggggactggtcgacacgaccttagaggacgtcttcatcaaggtcgccagaggagcacaagtgttcaacgagtttgcgtagataacacctttaggactgccttcgtagcaagcacgggaccccaattattggatgggcggactgcatagagaatcttgtggttttgtaggtatttttcattagtgagtcattcttgtgtggaaaataggctccatatgcttggtttacgtggttgtacataaataaatacatttttgagactgcagttgcagaatagaataattgtccagttgtgtccatatatattttttctttttcatgtgtggtgctcatgttttacttactccgtatctttaatcagcttattcgattggccttaat

SEQ ID NO: 65671 - DNA, 3372 bp, Zea Mays
ccggattcgccttttttttctgaacgtcttcacggctctccttccttcgccgccgcccgcccggccatggattccccgaggggtcccgcgagcttcgcaacgcaggccaacgccctcctccgcaagaacctctgcgttcagaaacggaacctcaagacaaacatcggcatcactttcttcccaatcctgatttgcgtgcttctcatcgtgctccagaacgtcatcaacagcgagcttgacaagcccaagtacaaatgcggttgcgtctgcctcgagaccagtgccaacggaaggtgcgtaaggaaagagtgtggcattcagtactcgacgctggatcaggtggggagctgtccgattcccagcccgccacagtggccagccctgattcagatcccccgtgctgatttccgggctgcaaggacgttctcccaaccgtttaatgatttgcctgatccattttgccgtgactcctggtcttgccctgcaactgtccttgtcactgggaaggacagagcggttgcagaagctatatcaagagggctgtttcctgtcctttctccgtctttgaatgcaacagatttactggatctcttctccaagatagtcgctggctcagatacacagccatggtacacacagttgctagagcctgcatttttctctggtcgtacattgtatgtgatccagcctgagtgcacacctgtcatgtcacagaccattacatataatactgggggcataccctttcagctcaatatacagtgtgttgaaggtgctccgttatggcgtgaaactgcatcaattatcaaccatgaatttttaaagggttatagacaacgaggaggacaaataaacgaatttattgcaggttatgacttcttgggcacaacacagtatggcctcggtgtaaatgtttggtacaactctacttacaatgataacaatgcatattcatttatctcaacattgcgggttccacgcttggtatccaacgcttatctgaaattaatcaaagggactggggtagacatgctacttgagtttgtaaaagatatgcccaaagttgggacaagttttcagttggatctgtcttctcttctgagtgtcttattcttcacatggatcatcgaacttcttttcccagttatgttgacatatctggtgtatgagaagcagcagaagctaaggattatgatgaaaatgcacggtctgaaggatgggccttactggctgatatcttattcttatttccttgctctatcaatcgtctatatgttattctttatgatttttggctccttgattggtaattgtattacaacgttactcatgaatattctgttgtggcaaataaatcttcattgtcttgactagccttcttctgttcaggtctcaattttttcagagtaaatgaatatagcatacaagctgtttttttcttcgtctgtataaatttgcagattgcacttgcattttttgtggcatctttctttttgtctgtcaagatggccacaggttaataactcaaaccttttaccttcaagtcagaactttattttttgaaagtgacagagggaatttcattttgctccttctgcagtgattggctacatgtatgtatttggctctggcttacttggtgcatttcttttccgtttctttgttgaggacaaaacttttccctatggttggacattagtcatggagattgtcccaggattttccctctatcggggcctatatgaacttggtcagtatgcattctcgggaagcagtataggaactactggtatgacctggagaagtctgaaagatcccctcaatggaatgcgtgatgttatgatcgtaatgagtgtagaatgggcagtgctgctcatattagcattctatttagatcaaacctctttgctaggcggtggtgtcaggaaaaatccttttttctgcttcagatgtttacagaagaaatgtgcaacatcattgcatgaacctagctttgtccaacaggattccaaagtcattctcgatatggagaaatctgatgttgctctagaaagaaaagtagttgagcaatttttgatagatcccaatgcaaaccaagctatcatctgtgataacctcaggaaggtttatcatggaagggatggaaaccctgacaagctggctgttagaggtttatctcttgtccttcaaaagggccagtgctttggaatgcttggtccaaatggagccgggaaaacatctttcattaatatgatgattggactcattaaacctacatctggtactgcttatgtccacggaatggatataaatatggacatgggtgacatatatacaaatatgggagtgtgcccacaacagaacttgctttgggaaacactgactggaaaagaacatcttttcttttatggtaagttgaagaatcttaaaggttctgcattaatgaaggctgttgaccactctctgaagagtgtaaatctatctcatggtaatgttggtgataagcaagtgaagaaatacagcggaggcatgaaaagaaggctcagcgtggcaatctcattgattggggaccctaaagttgtcttcatggatgagccaagcacaggaatggacccagcatcaagaaataacctatggaatgttgtgaaggaggccaagaaaaaccgtgcaattattcttactactcactcaatggaagaggcagaggtattgtgtgaccggcttggcatctttgttgatggcgatttccaatgccttggaaaccctaaagagctaaaggctagatatggggggacatacatattcacagtgacaacacccccagaccaagagatggaggttgaacatctagtgcgtcagttctcgcccagcgcaaacaagatctaccatctatctggaactcagaaattcgagctgccgaagcaagaggtgaaaatagcccatgtttttgacatggtcgagaaggcgaagcgccggctctcaatacatgcctggggactggtcgacacgaccttagaggacgtcttcatcaaggtcgccagaggagcacaagtgttcaacgagtttgcgtagataacacctttaggactgccttcgtagcaagcacgggaccccaattattggatgggcggactgcatagagaatcttgtggttttgtaggtatttttcattagtgagtcattcttgtgtggaaaataggctccatatgcttggtttacgtggttgtacataaataaatacatttttgagactgcagttgcagaatagaataattgtccagttgtgtccatatatattttttctttttcatgtgtggtgctcatgttttacttactccgtatctttaatcagcttattcgattggccttaat

SEQ ID NO: 65672 - DNA, 3120 bp, Zea Mays
ccggattcgccttttttttctgaacgtcttcacggctctccttccttcgccgccgcccgcccggccatggattccccgaggggtcccgcgagcttcgcaacgcaggccaacgccctcctccgcaagaacctctgcgttcagaaacggaacctcaagacaaacatcggcatcactttcttcccaatcctgatttgcgtgcttctcatcgtgctccagaacgtcatcaacagcgagcttgacaagcccaagtacaaatgcggttgcgtctgcctcgagaccagtgccaacggaaggtgcgtaaggaaagagtgtggcattcagtactcgacgctggatcaggtggggagctgtccgattcccagcccgccacagtggccagccctgattcagatcccccgtgctgatttccgggctgcaaggacgttctcccaaccgtttaatgatttgcctgatccattttgccgtgactcctggtcttgccctgcaactgtccttgtcactgggaaggacagagcggttgcagaagctatatcaagagggctgtttcctgtcctttctccgtctttgaatgcaacagatttactggatctcttctccaagatagtcgctatatacagtgtgttgaaggtgctccgttatggcgtgaaactgcatcaattatcaaccatgaatttttaaagggttatagacaacgaggaggacaaataaacgaatttattgcaggttatgacttcttgggcacaacacagtatggcctcggtgtaaatgtttggtacaactctacttacaatgataacaatgcatattcatttatctcaacattgcgggttccacgcttggtgaatgcagtatccaacgcttatctgaaattaatcaaagggactggggtagacatgctacttgagtttgtaaaagatatgcccaaagttgggacaagttttcagttggatctgtcttctcttctgagtgtcttattcttcacatggatcatcgaacttcttttcccagttatgttgacatatctggtgtatgagaagcagcagaagctaaggattatgatgaaaatgcacggtctgaaggatgggccttactggctgatatcttattcttatttccttgctctatcaatcgtctatatgttattctttatgatttttggctccttgattggtctcaattttttcagagtaaatgaatatagcatacaagctgtttttttcttcgtctgtataaatttgcagattgcacttgcattttttgtggcatctttctttttgtctgtcaagatggccacaggttaataactcaaaccttttaccttcaagtcagaactttattttttgaaagtgacagagggaatttcattttgctccttctgcagtgattggctacatgtatgtatttggctctggcttacttggtgcatttcttttccgtttctttgttgaggacaaaacttttccctatggttggacattagtcatggagattgtcccaggattttccctctatcggggcctatatgaacttggtcagtatgcattctcgggaagcagtataggaactactggtatgacctggagaagtctgaaagatcccctcaatggaatgcgtgatgttatgatcgtaatgagtgtagaatgggcagtgctgctcatattagcattctatttagatcaaacctctttgctaggcggtggtgtcaggaaaaatccttttttctgcttcagatgtttacagaagaaatgtgcaacatcattgcatgaacctagctttgtccaacaggattccaaagtcattctcgatatggagaaatctgatgttgctctagaaagaaaagtagttgagcaatttttgatagatcccaatgcaaaccaagctatcatctgtgataacctcaggaaggtttatcatggaagggatggaaaccctgacaagctggctgttagaggtttatctcttgtccttcaaaagggccagtgctttggaatgcttggtccaaatggagccgggaaaacatctttcattaatatggtatgatgattggactcattaaacctacatctggtactgcttatgtccacggaatggatataaatatggacatgggtgacatatatacaaatatgggagtgtgcccacaacagaacttgctttgggaaacactgactggaaaagaacatcttttcttttatggctgttgaccactctctgaagagtgtaaatctatctcatggtaatgttggtgataagcaagtgaagaaatacagcggaggcatgaaaagaaggctcagcgtggcaatctcattgattggggaccctaaagttgtcttcatggatgagccaagcacaggaatggacccagcatcaagaaataacctatggaatgttgtgaaggaggccaagaaaaaccgtgcaattattcttactactcactcaatggaagaggcagaggtattgtgtgaccggcttggcatctttgttgatggcgatttccaatgccttggaaaccctaaagagctaaaggctagatatggggggacatacatattcacagtgacaacacccccagaccaagagatggaggttgaacatctagtgcgtcagttctcgcccagcgcaaacaagatctaccatctatctggaactcagaaattcgagctgccgaagcaagaggtgaaaatagcccatgtttttgacatggtcgagaaggcgaagcgccggctctcaatacatgcctggggactggtcgacacgaccttagaggacgtcttcatcaaggtcgccagaggagcacaagtgttcaacgagtttgcgtagataacacctttaggactgccttcgtagcaagcacgggaccccaattattggatgggcggactgcatagagaatcttgtggttttgtaggtatttttcattagtgagtcattcttgtgtggaaaataggctccatatgcttggtttacgtggttgtacataaataaatacatttttgagactgcagttgcagaatagaataattgtccagttgtgtccatatatattttttctttttcatgtgtggtgctcatgttttacttactccgtatctttaatcagcttattcgattggccttaat

SEQ ID NO: 65673 - DNA, 3549 bp, Zea Mays
ccggattcgccttttttttctgaacgtcttcacggctctccttccttcgccgccgcccgcccggccatggattccccgaggggtcccgcgagcttcgcaacgcaggccaacgccctcctccgcaagaacctctgcgttcagaaacggaacctcaagacaaacatcggcatcactttcttcccaatcctgatttgcgtgcttctcatcgtgctccagaacgtcatcaacagcgagcttgacaagcccaagtacaaatgcggttgcgtctgcctcgagaccagtgccaacggaaggtgcgtaaggaaagagtgtggcattcagtactcgacgctggatcaggtggggagctgtccgattcccagcccgccacagtggccagccctgattcagatcccccgtgctgatttccgggctgcaaggacgttctcccaaccgtttaatgatttgcctgatccattttgccgtgactcctggtcttgccctgcaactgtccttgtcactgggaaggacagagcggttgcagaagctatatcaagagggctgtttcctgtcctttctccgtctttgaatgcaacagatttactggatctcttctccaagatagtcgctatacacagccatggtacacacagttgctagagcctgcatttttctctggtcgtacattgtatgtgatccagcctgagtgcacacctgtcatgtcacagaccattacatataatactgggggcataccctttcagctcaatatacagtgtgttgaaggtgctccgttatggcgtgaaactgcatcaattatcaaccatgaatttttaaagggttatagacaacgaggaggacaaataaacgaatttattgcaggttatatatcttgatgttacaattcttttatatgtgaattttgaaggacttcatatgtcaatgataatttgcaaaaaaataaaaaatgacagcccacgaaccaatggacccttggatactgccaatgtaatcagtaaccttattgactataatactatatatcagtttttgatataaaatgacacaaaaaagatcattcatacacaaatggtattggcatactttatgatcgccttcatttctgcaggttatgacttcttgggcacaacacagtatggcctcggtgtaaatgtttggtacaactctacttacaatgataacaatgcatattcatttatctcaacattgcgggttccacgcttggtgaatgcagtatccaacgcttatctgaaattaatcaaagggactggggtagacatgctacttgagtttgtaaaagatatgcccaaagttgggacaagttttcagttggatctgtcttctcttctgagtgtcttattcttcacatggatcatcgaacttcttttcccagttatgttgacatatctggtgtatgagaagcagcagaagctaaggattatgatgaaaatgcacggtctgaaggatgggccttactggctgatatcttattcttatttccttgctctatcaatcgtctatatgttattctttatgatttttggctccttgattggtctcaattttttcagagtaaatgaatatagcatacaagctgtttttttcttcgtctgtataaatttgcagattgcacttgcattttttgtggcatctttctttttgtctgtcaagatggccacagtgattggctacatgtatgtatttggctctggcttacttggtgcatttcttttccgtttctttgttgaggacaaaacttttccctatggttggacattagtcatggagattgtcccaggattttccctctatcggggcctatatgaacttggtcagtatgcattctcgggaagcagtataggaactactggtatgacctggagaagtctgaaagatcccctcaatggaatgcgtgatgttatgatcgtaatgagtgtagaatgggcagtgctgctcatattagcattctatttagatcaaacctctttgctaggcggtggtgtcaggaaaaatccttttttctgcttcagatgtttacagaagaaatgtgcaacatcattgcatgaacctagctttgtccaacaggattccaaagtcattctcgatatggagaaatctgatgttgctctagaaagaaaagtagttgagcaatttttgatagatcccaatgcaaaccaagctatcatctgtgataacctcaggaaggtttatcatggaagggatggaaaccctgacaagctggctgttagaggtttatctcttgtccttcaaaagggccagtgctttggaatgcttggtccaaatggagccgggaaaacatctttcattaatatgatgattggactcattaaacctacatctggtactgcttatgtccacggaatggatataaatatggacatgggtgacatatatacaaatatgggagtgtgcccacaacagaacttgctttgggaaacactgactggaaaagaacatcttttcttttatggtaagttgaagaatcttaaaggttctgcattaatgaaggctgttgaccactctctgaagagtgtaaatctatctcatggtaatgttggtgataagcaagtgaagaaatacagcggaggcatgaaaagaaggctcagcgtggcaatctcattgattggggaccctaaagtagtttcctttttttcttgattctataattttggtcatttcatgtaatgctgtccagccccagatgggttatgcaacttaacaaatgttcatcaggttgtcttcatggatgagccaagcacaggaatggacccagcatcaagaaataacctatggaatgttgtgaaggaggccaagaaaaaccgtgcaattattcttactactcactcaatggaagaggcagaggtattgtgtgaccggcttggcatctttgttgatggcgatttccaatgccttggaaaccctaaagagctaaaggctagatatggggggacatacatattcacagtgacaacacccccagaccaagagatggaggttgaacatctagtgcgtcagttctcgcccagcgcaaacaagatctaccatctatctggaactcagaaattcgagctgccgaagcaagaggtgaaaatagcccatgtttttgacatggtcgagaaggcgaagcgccggctctcaatacatgcctggggactggtcgacacgaccttagaggacgtcttcatcaaggtcgccagaggagcacaagtgttcaacgagtttgcgtagataacacctttaggactgccttcgtagcaagcacgggaccccaattattggatgggcggactgcatagagaatcttgtggttttgtaggtatttttcattagtgagtcattcttgtgtggaaaataggctccatatgcttggtttacgtggttgtacataaataaatacatttttgagactgcagttgcagaatagaataattgtccagttgtgtccatatatattttttctttttcatgtgtggtgctcatgttttacttactccgtatctttaatcagcttattcgattggccttaat

SEQ ID NO: 65674 - DNA, 2890 bp, Zea Mays
attcgccttttttttctgaacgtcttcacggctctccttccttcgccgccgcccgcccggccatggattccccgaggggtcccgcgagcttcgcaacgcaggccaacgccctcctccgcaagaacctctgcgttcagaaacggaacctcaagacaaacatcggcatcactttcttcccaatcctgatttgcgtgcttctcatcgtgctccagaacgtcatcaacagcgagcttgacaagcccaagtacaaatgcggttgcgtctgcctcgagaccagtgccaacggaaggtgcgtaaggaaagagtgtggcattcagtactcgacgctggatcaggtggggagctgtccgattcccagcccgccacagtggccagccctgattcagatcccccgtgctgatttccgggctgcaaggacgttctcccaaccgtttaatgatttgcctgatccattttgccgtgactcctggtcttgccctgcaactgtccttgtcactgggaaggacagagcggttgcagaagctatatcaagagggctgtttcctgtcctttctccgtctttgaatgcaacagatttactggatctcttctccaagatagtcgctatacacagccatggtacacacagttgctagagcctgcatttttctctggtcgtacattgtatgtgatccagcctgagtgcacacctgtcatgtcacagaccattacatataatactgggggcataccctttcagctcagttatgacttcttgggcacaacacagtatggcctcggtgtaaatgtttggtacaactctacttacaatgataacaatgcatattcatttatctcaacattgcgggttccacgcttggtgaatgcagtatccaacgcttatctgaaattaatcaaagggactggggtagacatgctacttgagtttgtaaaagatatgcccaaagttgggacaagttttcagttggatctgtcttctcttctgagtgtcttattcttcacatggatcatcgaacttcttttcccagttatgttgacatatctggtgtatgagaagcagcagaagctaaggattatgatgaaaatgcacggtctgaaggatgggccttactggctgatatcttattcttatttccttgctctatcaatcgtctatatgttattctttatgatttttggctccttgattggtctcaattttttcagagtaaatgaatatagcatacaagctgtttttttcttcgtctgtataaatttgcagattgcacttgcattttttgtggcatctttctttttgtctgtcaagatggccacagtgattggctacatgtatgtatttggctctggcttacttggtgcatttcttttccgtttctttgttgaggacaaaacttttccctatggttggacattagtcatggagattgtcccaggattttccctctatcggggcctatatgaacttggtcagtatgcattctcgggaagcagtataggaactactgatgtttacagaagaaatgtgcaacatcattgcatgaacctagctttgtccaacaggattccaaagtcattctcgatatggagaaatctgatgttgctctagaaagaaaagtagttgagcaatttttgatagatcccaatgcaaaccaagctatcatctgtgataacctcaggaaggtttatcatggaagggatggaaaccctgacaagctggctgttagaggtttatctcttgtccttcaaaagggccagtgctttggaatgcttggtccaaatggagccgggaaaacatctttcattaatatgatgattggactcattaaacctacatctggtactgcttatgtccacggaatggatataaatatggacatgggtgacatatatacaaatatgggagtgtgcccacaacagaacttgctttgggaaacactgactggaaaagaacatcttttcttttatggctgttgaccactctctgaagagtgtaaatctatctcatggtaatgttggtgataagcaagtgaagaaatacagcggaggcatgaaaagaaggctcagcgtggcaatctcattgattggggaccctaaagttgtcttcatggatgagccaagcacaggaatggacccagcatcaagaaataacctatggaatgttgtgaaggaggccaagaaaaaccgtgcaattattcttactactcactcaatggaagaggcagaggtattgtgtgaccggcttggcatctttgttgatggcgatttccaatgccttggaaaccctaaagagctaaaggctagatatggggggacatacatattcacagtgacaacacccccagaccaagagatggaggttgaacatctagtgcgtcagttctcgcccagcgcaaacaagatctaccatctatctggaactcagaaattcgagctgccgaagcaagaggtgaaaatagcccatgtttttgacatggtcgagaaggcgaagcgccggctctcaatacatgcctggggactggtcgacacgaccttagaggacgtcttcatcaaggtcgccagaggagcacaagtgttcaacgagtttgcgtagataacacctttaggactgccttcgtagcaagcacgggaccccaattattggatgggcggactgcatagagaatcttgtggttttgtaggtatttttcattagtgagtcattcttgtgtggaaaataggctccatatgcttggtttacgtggttgtacataaataaatacatttttgagactgcagttgcagaatagaataattgtccagttgtgtccatatatattttttctttttcatgtgtggtgctcatgttttacttactccgtatctttaatcagcttattcgattggccttaat

SEQ ID NO: 65675 - DNA, 3269 bp, Zea Mays
atggattccccgaggggtcccgcgagcttcgcaacgcaggccaacgccctcctccgcaagaacctctgcgttcagaaacggaacctcaagacaaacatcggcatcactttcttcccaatcctgatttgcgtgcttctcatcgtgctccagaacgtcatcaacagcgagcttgacaagcccaagtacaaatgcggttgcgtctgcctcgagaccagtgccaacggaaggtgcgtaaggaaagagtgtggcattcagtactcgacgctggatcaggtggggagctgtccgattcccagcccgccacagtggccagccctgattcagatcccccgtgctgatttccgggctgcaaggacgttctcccaaccgtttaatgatttgcctgatccattttgccgtgactcctggtcttgccctgcaactgtccttgtcactgggaaggacagagcggttgcagaagctatatcaagagggctgtttcctgtcctttctccgtctttgaatgcaacagatttactggatctcttctccaagatagtcgctggctcagatacacagccatggtacacacagttgctagagcctgcatttttctctggtcgtacattgtatgtgatccagcctgagtgcacacctgtcatgtcacagaccattacatataatactgggggcataccctttcagctcatgtgttgaaggtgctccgttatggcgtgaaactgcatcaattatcaaccatgaatttttaaagggttatagacaacgaggaggacaaataaacgaatttattgcaggttatgacttcttgggcacaacacagtatggcctcggtgtaaatgtttggtacaactctacttacaatgataacaatgcatattcatttatctcaacattgcgggttccacgcttggtgaatgcagtatccaacgcttatctgaaattaatcaaagggactggggtagacatgctacttgagtttgtaaaagatatgcccaaagttgggacaagttttcagttggatctgtcttctcttctgagtgtcttattcttcacatggatcatcgaacttcttttcccagttatgttgacatatctggtgtatgagaagcagcagaagctaaggattatgatgaaaatgcacggtctgaaggatgggccttactggctgatatcttattcttatttccttgctctatcaatcgtctatatgttattctttatgatttttggctccttgattggtaattgtattacaacgttactcatgaatattctgttgtggcaaataaatcttcattgtcttgactagccttcttctgttcaggtctcaattttttcagagtaaatgaatatagcatacaagctgtttttttcttcgtctgtataaatttgcagattgcacttgcattttttgtggcatctttctttttgtctgtcaagatggccacaggttaataactcaaaccttttaccttcaagtcagaactttattttttgaaagtgacagagggaatttcattttgctccttctgcagtgattggctacatgtatgtatttggctctggcttacttggtgcatttcttttccgtttctttgttgaggacaaaacttttccctatggttggacattagtcatggagattgtcccaggattttccctctatcggggcctatatgaacttggtcagtatgcattctcgggaagcagtataggaactactggtatgacctggagaagtctgaaagatcccctcaatggaatgcgtgatgttatgatcgtaatgagtgtagaatgggcagtgctgctcatattagcattctatttagatcaaacctctttgctaggcggtggtgtcaggaaaaatccttttttctgcttcagatgtttacagaagaaatgtgcaacatcattgcatgaacctagctttgtccaacaggattccaaagtcattctcgatatggagaaatctgatgttgctctagaaagaaaagtagttgagcaatttttgatagatcccaatgcaaaccaagctatcatctgtgataacctcaggaaggtttatcatggaagggatggaaaccctgacaagctggctgttagaggtttatctcttgtccttcaaaagggccagtgctttggaatgcttggtccaaatggagccgggaaaacatctttcattaatatgatgattggactcattaaacctacatctggtactgcttatgtccacggaatggatataaatatggacatgggtgacatatatacaaatatgggagtgtgcccacaacagaacttgctttgggaaacactgactggaaaagaacatcttttcttttatggctgttgaccactctctgaagagtgtaaatctatctcatggtaatgttggtgataagcaagtgaagaaatacagcggaggcatgaaaagaaggctcagcgtggcaatctcattgattggggaccctaaagttgtcttcatggatgagccaagcacaggaatggacccagcatcaagaaataacctatggaatgttgtgaaggaggccaagaaaaaccgtgcaattattcttactactcactcaatggaagaggcagaggtattgtgtgaccggcttggcatctttgttgatggcgatttccaatgccttggaaaccctaaagagctaaaggctagatatggggggacatacatattcacagtgacaacacccccagaccaagagatggaggttgaacatctagtgcgtcagttctcgcccagcgcaaacaagatctaccatctatctggaactcagaaattcgagctgccgaagcaagaggtgaaaatagcccatgtttttgacatggtcgagaaggcgaagcgccggctctcaatacatgcctggggactggtcgacacgaccttagaggacgtcttcatcaaggtcgccagaggagcacaagtgttcaacgagtttgcgtagataacacctttaggactgccttcgtagcaagcacgggaccccaattattggatgggcggactgcatagagaatcttgtggttttgtaggtatttttcattagtgagtcattcttgtgtggaaaataggctccatatgcttggtttacgtggttgtacataaataaatacatttttgagactgcagttgcagaatagaataattgtccagttgtgtccatatatattttttctttttcatgtgtggtgctcatgttttacttactccgtatctttaatcagcttattcgattggccttaat

SEQ ID NO: 65676 - DNA, 1035 bp, Zea Mays
atgttgtttcgttcttttaacgaaagcttgctttgggaaacactgactggaaaagaacatcttttcttttatggtaagttgaagaatcttaaaggttctgcattaatgaaggctgttgaccactctctgaagagtgtaaatctatctcatggtaatgttggtgataagcaagtgaagaaatacagcggaggcatgaaaagaaggctcagcgtggcaatctcattgattggggaccctaaagttgtcttcatggatgagccaagcacaggaatggacccagcatcaagaaataacctatggaatgttgtgaaggaggccaagaaaaaccgtgcaattattcttactactcactcaatggaagaggcagaggtattgtgtgaccggcttggcatctttgttgatggcgatttccaatgccttggaaaccctaaagagctaaaggctagatatggggggacatacatattcacagtgacaacacccccagaccaagagatggaggttgaacatctagtgcgtcagttctcgcccagcgcaaacaagatctaccatctatctggaactcagaaattcgagctgccgaagcaagaggtgaaaatagcccatgtttttgacatggtcgagaaggcgaagcgccggctctcaatacatgcctggggactggtcgacacgaccttagaggacgtcttcatcaaggtcgccagaggagcacaagtgttcaacgagtttgcgtagataacacctttaggactgccttcgtagcaagcacgggaccccaattattggatgggcggactgcatagagaatcttgtggttttgtaggtatttttcattagtgagtcattcttgtgtggaaaataggctccatatgcttggtttacgtggttgtacataaataaatacatttttgagactgcagttgcagaatagaataattgtccagttgtgtccatatatattttttctttttcatgtgtggtgctcatgttttacttactccgtatctttaatcagcttattcgattggccttaat

SEQ ID NO: 65677 - DNA, 1237 bp, Zea Mays
gtaaccggcccatagcgacgagcgttcttgtgttctgatgacatcttccactcttcctttctgcggcgcacccttctttctccatccacttgtgtactttcgacgtcgtcttcctcagtagcgcccccttctttctccacccgccgtcgacgcagctgccttccagccatctccatatccgtttcgccgtccccttcctcctcatcagtggctcgtcaagcgcgtcgtcgggatgcatgggggctccgtcacctaccttgtcgaccccggcaacaacgactcctcctccagaaccgtcgtggtcatgcatttttcctgtagtcaaggatggtgaaggtccaatcatgtgcatatcattggtttcctcttgttatgatgaagagatctggattcaatacttgatttttcatttgtttttaaatatttgttaactgttatggtgtatgtcaatggaatttgggcattggttgctttgactgtttcttggaatgcagataaactacgcctatgctcgagacaatgaaacactatttgatattattagtgtgaagatgaacctctcaattgacaagcgatgcaggataaataatttgtccacaagcatgattgcattatcctagttctttcgttgcggagatggcagcggcggcggggccgtacaaagagatgctggaagtggtgaacgcgtgcgcgacccggatccggtggcgcctcagtccagcttccaagcgccgcctcctcaacggttgcgtcctgtggtactggtcgactatggtggcacaatgcctcagctacaagaaaatctttgtggcctgctatatcttgcccgacagttcaagctctacaaggttaggtctgttcagtttggctagaaaggcatcccctacctgaacacctacgacgaccgcaccatccgctaccccgaccctctcatcaaggccaacgacaccatcaagatcgatctggagaccaacaagatcatggacttcatcaagttgtatttgccctttcatggacttcatcaagttatatacttagttaggctcaatgttagcacaaacagttgatgagcaagtttaaatttagagtacacttatgtatgagttatttgacaatgcttatttatgagatattgaatattatttatctatattatattaattatagtgttattaaatatatgtgtatgtatttttctcttttaaattattataatgtgataatttaagaatatact

SEQ ID NO: 65678 - DNA, 1991 bp, Zea Mays
gtaaccggcccatagcgacgagcgttcttgtgttctgatgacatcttccactcttcctttctgcggcgcacccttctttctccatccacttgtgtactttcgacgtcgtcttcctcagtagcgcccccttctttctccacccgccgtcgacgcagctgccttccagccatctccatatccgtttcgccgtccccttcctcctcatcaggacccgcgcaagtggctcgtcaagcgcgtcgtcgggatgcatgggggctccgtcacctaccttgtcgaccccggcaacaacgactcctcctccagaaccgtcgtgataaactacgcctatgctcgagacaatgaaacactatttgatattattagtgtgaagatgaacctctcaattgacaagcgatgcaggataaataatttgtccacaagcatgattgcattatcctaggtgcttatgaaagtttttaccttttcttcaatatgaagtctgaatgtgtggtgtggcttgtctgatctatctagcaggtttagtggtactcgcatcagctaaaccttaaacttgttttcttcttaatgcctccgtgatcggtttaagttctttcgttgcggagatggcagcggcggcggggccgtacaaagagatgctggaagtggtgaacgcgtgcgcgacccggatccggtggcgcctcagtccagcttccaagcgccgcctcctcaacggtcagtgcccactcgcttgctgctttctcttagtagttgtagtcgttttttaacgggaaatacaacagggaagccaccagcccaccactatgtaggattttattaattgaaaaatagtgttgtagttgttattatctctatttaggacttgttgttggcaattgtcctatttcttgcttaattcgctaccgccatgctgtctttctgttctactgctaaaacacttattttttgtggtcgttgaatgaattgttaaccaaactcaattgcagaagacattcatccactaatcgtcacatgatccaccttagttcataagtttataccaccgtagttataggtcacttggtcagtagctgcaacttgcaagtgatttagggtttaataaaaaatttctggtagtaaagttgaaaggtatggtttgaggagagtgaatggtatcatgtcgaattacagtacattacaatttacaagtaaattgattagtcctctggtcttttgattggtagcatgtttttcctatgtaattgcctctgttcttctttaggggctaggttcgttgtaatcatttgaccgtggggatgtttgtactaaattcttatttctcttaaggaaaatcatgctaatgcacgaccacgaagaaaaagtaaattcatgaacaaatctacctaacttatgatttctgttggattttaactctagtctacctctttgaaattaaaaggttgtgctgtggttgttgatgaacaaacccagttgttgccaaatatcctgtttctctgcactaggttgcgtcctgtggtactggtcgactatggtggcacaatgcctcagctacaagaaaatctttgtggcctgctatatcttgcccgacagttcaagctctacaaggttaggtctgttcagtttggctagaaaggcatcccctacctgaacacctacgacgaccgcaccatccgctaccccgaccctctcatcaaggccaacgacaccatcaagatcgatctggagaccaacaagatcatggacttcatcaagttgtatttgccctttcatggacttcatcaagttatatacttagttaggctcaatgttagcacaaacagttgatgagcaagtttaaatttagagtacacttatgtatgagttatttgacaatgcttatttatgagatattgaatattatttatctatattatattaattatagtgttattaaatatatgtgtatgtatttttctcttttaaattattataatgtgataatttaagaatatact

SEQ ID NO: 65679 - DNA, 3207 bp, Zea Mays
catagcgacgagcgttcttgtgttctgatgacatcttccactcttcctttctgcggcgcacccttctttctccatccacttgtgtactttcgacgtcgtcttcctcagtagcgcccccttctttctccacccgccgtcgacgcagctgccttccagccatctccatatccgtttcgccgtccccttcctcctcatcaggacccgcgcaagtggctcgtcaagcgcgtcgtcgggatgcatgggggctccgtcacctaccttgtcgaccccggcaacaacgactcctcctccagaaccgtcgtggtgagttggtcactactgggctgggcttttgggttcctactgcttgttaggtgctgcctccgtgatccgatttgtgctcaactgattgatgctgagcattgttggtcttaatggagtttcagtagttgtttttagcgacgggcttagggggtgtttgggaacacagttttttacagtattggaacaatactgtggtatttgagaataccatggtataatatacagaaaggtgtttggaaatgtaggtaaaatctctgtatttaaaactaaagtattatcaatactgcagctgtttcaaagtattgtaaactttgctctccaccaaagttttcttctgtaaacaagcttgtgagcgtgcggtaccggcgatggcgtgggaccgagctgggttctgcggacacaatgccgaaaaggctgtcactggtgtacctatcgctcgttccaaacttccaatgctgcacggggctgtatgagtatgacagcttgggtgtacgtacgtgtacccaatggttcagctttcatatgattttagctttattagttgcaataaccaactaccgctagctttagattgtatgatatttgttatctagaaggaagacttcaatttatggaataactcaaccatgcggctgttactaaccttagggaatttagaagataattccaataggggaacagagagcctcacatggtatatactttgttcccaaacacctccatgtattcaaaattgtggtattctaaaactgtggtattgaaaactgagatcatgtcatggcatttgtatactgtggtatttgaaataccatggttttgaaaaactgtgtttccaaacacccccttagtacttgtcagtacattttacatgcttcgaattgagatgcataggaattaggagacgtgcgttttttagtaattggtacctacttgcgcctgagactctagtctaggcaccaaagtcagggaggtgtttctctgagctctgcttcaaaactgtattatctgatgtttgtctgagccacaagtcatgaattttgcctgtagtcaaggatggtgaaggtccaatcatgtgcatatcattggtttcctcttgttatgatgaccaaacttgtatctaatatattgatttgaatatgatgacctctatattgtaagtttctgaatttttgcaacacaggtcatgcatttttcctgtagtcaaggatggtgaaggtccaatcatgtgcatatcattggtttcctcttgttatgatgaagagatctggattcaatacttgatttttcatttgtttttaaatatttgttaactgttatggtgtatgtcaatggaatttgggcattggttgctttgactgtttcttggaatgcagataaactacgcctatgctcgagacaatgaaacactatttgatattattagtgtgaagatgaacctctcaattgacaagcgatgcaggataaataatttgtccacaagcatgattgcattatcctagttctttcgttgcggagatggcagcggcggcggggccgtacaaagagatgctggaagtggtgaacgcgtgcgcgacccggatccggtggcgcctcagtccagcttccaagcgccgcctcctcaacggtcagtgcccactcgcttgctgctttctcttagtagttgtagtcgttttttaacgggaaatacaacagggaagccaccagcccaccactatgtaggattttattaattgaaaaatagtgttgtagttgttattatctctatttaggacttgttgttggcaattgtcctatttcttgcttaattcgctaccgccatgctgtctttctgttctactgctaaaacacttattttttgtggtcgttgaatgaattgttaaccaaactcaattgcagaagacattcatccactaatcgtcacatgatccaccttagttcataagtttataccaccgtagttataggtcacttggtcagtagctgcaacttgcaagtgatttagggtttaataaaaaatttctggtagtaaagttgaaaggtatggtttgaggagagtgaatggtatcatgtcgaattacagtacattacaatttacaagtaaattgattagtcctctggtcttttgattggtagcatgtttttcctatgtaattgcctctgttcttctttaggggctaggttcgttgtaatcatttgaccgtggggatgtttgtactaaattcttatttctcttaaggaaaatcatgctaatgcacgaccacgaagaaaaagtaaattcatgaacaaatctacctaacttatgatttctgttggattttaactctagtctacctctttgaaattaaaaggttgtgctgtggttgttgatgaacaaacccagttgttgccaaatatcctgtttctctgcactaggttgcgtcctgtggtactggtcgactatggtggcacaatgcctcagctacaagaaaatctttgtggcctgctatatcttgcccgacagttcaagctctacaaggttaggtctgttcagtttggctagaaaggcatcccctacctgaacacctacgacgaccgcaccatccgctaccccgaccctctcatcaaggccaacgacaccatcaagatcgatctggagaccaacaagatcatggacttcatcaagttgtatttgccctttcatggacttcatcaagttatatacttagttaggctcaatgttagcacaaacagttgatgagcaagtttaaatttagagtacacttatgtatgagttatttgacaatgcttatttatgagatattgaatattatttatctatattatattaattatagtgttattaaatatatgtgtatgtatttttctcttttaaattattataatgtgataatttaagaatatact

SEQ ID NO: 65680 - DNA, 1827 bp, Zea Mays
gcgttcttgtgttctgatgacatcttccactcttcctttctgcggcgcacccttctttctccatccacttgtgtactttcgacgtcgtcttcctcagtagcgcccccttctttctccacccgccgtcgacgcagctgccttccagccatctccatatccgtttcgccgtccccttcctcctcatcaggtaaacctaattcccttcctctctccccatcaattcgcccctaacctaattcgtgctgatgatctcccccgaggacccgcgcaagtggctcgtcaagcgcgtcgtcgggatgcatgggggctccgtcacctaccttgtcgaccccggcaacaacgactcctcctccagaaccgtcgtgataaactacgcctatgctcgagacaatgaaacactatttgatattattagtgtgaagttctttcgttgcggagatggcagcggcggcggggccgtacaaagagatgctggaagtggtgaacgcgtgcgcgacccggatccggtggcgcctcagtccagcttccaagcgccgcctcctcaacggtcagtgcccactcgcttgctgctttctcttagtagttgtagtcgttttttaacgggaaatacaacagggaagccaccagcccaccactatgtaggattttattaattgaaaaatagtgttgtagttgttattatctctatttaggacttgttgttggcaattgtcctatttcttgcttaattcgctaccgccatgctgtctttctgttctactgctaaaacacttattttttgtggtcgttgaatgaattgttaaccaaactcaattgcagaagacattcatccactaatcgtcacatgatccaccttagttcataagtttataccaccgtagttataggtcacttggtcagtagctgcaacttgcaagtgatttagggtttaataaaaaatttctggtagtaaagttgaaaggtatggtttgaggagagtgaatggtatcatgtcgaattacagtacattacaatttacaagtaaattgattagtcctctggtcttttgattggtagcatgtttttcctatgtaattgcctctgttcttctttaggggctaggttcgttgtaatcatttgaccgtggggatgtttgtactaaattcttatttctcttaaggaaaatcatgctaatgcacgaccacgaagaaaaagtaaattcatgaacaaatctacctaacttatgatttctgttggattttaactctagtctacctctttgaaattaaaaggttgtgctgtggttgttgatgaacaaacccagttgttgccaaatatcctgtttctctgcactaggttgcgtcctgtggtactggtcgactatggtggcacaatgcctcagctacaagaaaatctttgtggcctgctatatcttgcccgacagttcaagctctacaaggttaggtctgttcagtttggctagaaaggcatcccctacctgaacacctacgacgaccgcaccatccgctaccccgaccctctcatcaaggccaacgacaccatcaagatcgatctggagaccaacaagatcatggacttcatcaagttgtatttgccctttcatggacttcatcaagttatatacttagttaggctcaatgttagcacaaacagttgatgagcaagtttaaatttagagtacacttatgtatgagttatttgacaatgcttatttatgagatattgaatattatttatctatattatattaattatagtgttattaaatatatgtgtatgtatttttctcttttaaattattataatgtgataatttaagaatatact

SEQ ID NO: 65681 - DNA, 2385 bp, Zea Mays
gcgttcttgtgttctgatgacatcttccactcttcctttctgcggcgcacccttctttctccatccacttgtgtactttcgacgtcgtcttcctcagtagcgcccccttctttctccacccgccgtcgacgcagctgccttccagccatctccatatccgtttcgccgtccccttcctcctcatcaggacccgcgcaagtggctcgtcaagcgcgtcgtcgggatgcatgggggctccgtcacctaccttgtcgaccccggcaacaacgactcctcctccagaaccgtcgtggtgagttggtcactactgggctgggcttttgggttcctactgcttgttaggtgctgcctccgtgatccgatttgtgctcaactgattgatgctgagcattgttggtcttaatggagtttcagtagttgtttttagcgacgggcttagggggtgtttgggaacacagttttttacagtattggaacaatactgtggtatttgagaataccatggtataatatacagaaaggtgtttggaaatgtaggtaaaatctctgtatttaaaactaaagtattatcaatactgcagctgtttcaaagtattgtaaactttgctctccaccaaagttttcttctgtaaacaagcttgtgagcgtgcggtaccggcgatggcgtgggaccgagctgggttctgcggacacaatgccgaaaaggctgtcactggtgtacctatcgctcgttccaaacttccaatgctgcacggggctgtatgagtatgacagcttgggtgtacgtacgtgtacccaatggttcagctttcatatgattttagctttattagttgcaataaccaactaccgctagctttagattgtatgatatttgttatctagaaggaagacttcaatttatggaataactcaaccatgcggctgttactaaccttagggaatttagaagataattccaataggggaacagagagcctcacatggtatatactttgttcccaaacacctccatgtattcaaaattgtggtattctaaaactgtggtattgaaaactgagatcatgtcatggcatttgtatactgtggtatttgaaataccatggttttgaaaaactgtgtttccaaacacccccttagtacttgtcagtacattttacatgcttcgaattgagatgcataggaattaggagacgtgcgttttttagtaattggtacctacttgcgcctgagactctagtctaggcaccaaagtcagggaggtgtttctctgagctctgcttcaaaactgtattatctgatgtttgtctgagccacaagtcatgaattttgcctgtagtcaaggatggtgaaggtccaatcatgtgcatatcattggtttcctcttgttatgatgaccaaacttgtatctaatatattgatttgaatatgatgacctctatattgtaagtttctgaatttttgcaacacaggtcatgcatttttcctgtagtcaaggatggtgaaggtccaatcatgtgcatatcattggtttcctcttgttatgatgaagagatctggattcaatacttgatttttcatttgtttttaaatatttgttaactgttatggtgtatgtcaatggaatttgggcattggttgctttgactgtttcttggaatgcagataaactacgcctatgctcgagacaatgaaacactatttgatattattagtgtgaagatgaacctctcaattgacaagcgatgcaggataaataatttgtccacaagcatgattgcattatcctagcggcggcggggccgtacaaagagatgctggaagtggtgaacgcgtgcgcgacccggatccggtggcgcctcagtccagcttccaagcgccgcctcctcaacggttgcgtcctgtggtactggtcgactatggtggcacaatgcctcagctacaagaaaatctttgtggcctgctatatcttgcccgacagttcaagctctacaaggttaggtctgttcagtttggctagaaaggcatcccctacctgaacacctacgacgaccgcaccatccgctaccccgaccctctcatcaaggccaacgacaccatcaagatcgatctggagaccaacaagatcatggacttcatcaagttgtatttgccctttcatggacttcatcaagttatatacttagttaggctcaatgttagcacaaacagttgatgagcaagtttaaatttagagtacacttatgtatgagttatttgacaatgcttatttatgagatattgaatattatttatctatattatattaattatagtgttattaaatatatgtgtatgtatttttctcttttaaattattataatgtgataatttaagaatatact

SEQ ID NO: 65682 - DNA, 998 bp, Zea Mays
gttcttgtgttctgatgacatcttccactcttcctttctgcggcgcacccttctttctccatccacttgtgtactttcgacgtcgtcttcctcagtagcgcccccttctttctccacccgccgtcgacgcagctgccttccagccatctccatatccgtttcgccgtccccttcctcctcatcagtggctcgtcaagcgcgtcgtcgggatgcatgggggctccgtcacctaccttgtcgaccccggcaacaacgactcctcctccagaaccgtcgtgataaactacgcctatgctcgagacaatgaaacactatttgatattattagtgtgaagatgaacctctcaattgacaagcgatgcaggataaataatttgtccacaagcatgattgcattatcctagcggcggcggggccgtacaaagagatgctggaagtggtgaacgcgtgcgcgacccggatccggtggcgcctcagtccagcttccaagcgccgcctcctcaacggttgcgtcctgtggtactggtcgactatggtggcacaatgcctcagctacaagaaaatctttgtggcctgctatatcttgcccgacagttcaagctctacaaggttaggtctgttcagtttggctagaaaggcatcccctacctgaacacctacgacgaccgcaccatccgctaccccgaccctctcatcaaggccaacgacaccatcaagatcgatctggagaccaacaagatcatggacttcatcaagttgtatttgccctttcatggacttcatcaagttatatacttagttaggctcaatgttagcacaaacagttgatgagcaagtttaaatttagagtacacttatgtatgagttatttgacaatgcttatttatgagatattgaatattatttatctatattatattaattatagtgttattaaatatatgtgtatgtatttttctcttttaaattattataatgtgataatttaagaatatact

SEQ ID NO: 65683 - DNA, 1205 bp, Zea Mays
gttcttgtgttctgatgacatcttccactcttcctttctgcggcgcacccttctttctccatccacttgtgtactttcgacgtcgtcttcctcagtagcgcccccttctttctccacccgccgtcgacgcagctgccttccagccatctccatatccgtttcgccgtccccttcctcctcatcaggacccgcgcaagtggctcgtcaagcgcgtcgtcgggatgcatgggggctccgtcacctaccttgtcgaccccggcaacaacgactcctcctccagaaccgtcgtggtcatgcatttttcctgtagtcaaggatggtgaaggtccaatcatgtgcatatcattggtttcctcttgttatgatgaagagatctggattcaatacttgatttttcatttgtttttaaatatttgttaactgttatggtgtatgtcaatggaatttgggcattggttgctttgactgtttcttggaatgcagataaactacgcctatgctcgagacaatgaaacactatttgatattattagtgtgaagatggcagcggcggcggggccgtacaaagagatgctggaagtggtgaacgcgtgcgcgacccggatccggtggcgcctcagtccagcttccaagcgccgcctcctcaacggttgtgctgtggttgttgatgaacaaacccagttgttgccaaatatcctgtttctctgcactaggttgcgtcctgtggtactggtcgactatggtggcacaatgcctcagctacaagaaaatctttgtggcctgctatatcttgcccgacagttcaagctctacaaggttaggtctgttcagtttggctagaaaggcatcccctacctgaacacctacgacgaccgcaccatccgctaccccgaccctctcatcaaggccaacgacaccatcaagatcgatctggagaccaacaagatcatggacttcatcaagttgtatttgccctttcatggacttcatcaagttatatacttagttaggctcaatgttagcacaaacagttgatgagcaagtttaaatttagagtacacttatgtatgagttatttgacaatgcttatttatgagatattgaatattatttatctatattatattaattatagtgttattaaatatatgtgtatgtatttttctcttttaaattattataatgtgataatttaagaatatact

SEQ ID NO: 65684 - DNA, 1025 bp, Zea Mays
gttctgatgacatcttccactcttcctttctgcggcgcacccttctttctccatccacttgtgtactttcgacgtcgtcttcctcagtagcgcccccttctttctccacccgccgtcgacgcagctgccttccagccatctccatatccgtttcgccgtccccttcctcctcatcaggacccgcgcaagtggctcgtcaagcgcgtcgtcgggatgcatgggggctccgtcacctaccttgtcgaccccggcaacaacgactcctcctccagaaccgtcgtgataaactacgcctatgctcgagacaatgaaacactatttgatattattagtgtgaagatgaacctctcaattgacaagcgatgcaggataaataatttgtccacaagcatgattgcattatcctagttctttcgttgcggagatggcagcggcggcggggccgtacaaagagatgctggaagtggtgaacgcgtgcgcgacccggatccggtggcgcctcagtccagcttccaagcgccgcctcctcaacggttgcgtcctgtggtactggtcgactatggtggcacaatgcctcagctacaagaaaatctttgtggcctgctatatcttgcccgacagttcaagctctacaaggttaggtctgttcagtttggctagaaaggcatcccctacctgaacacctacgacgaccgcaccatccgctaccccgaccctctcatcaaggccaacgacaccatcaagatcgatctggagaccaacaagatcatggacttcatcaagttgtatttgccctttcatggacttcatcaagttatatacttagttaggctcaatgttagcacaaacagttgatgagcaagtttaaatttagagtacacttatgtatgagttatttgacaatgcttatttatgagatattgaatattatttatctatattatattaattatagtgttattaaatatatgtgtatgtatttttctcttttaaattattataatgtgataatttaagaatatact

SEQ ID NO: 65685 - DNA, 3151 bp, Zea Mays
gttctgatgacatcttccactcttcctttctgcggcgcacccttctttctccatccacttgtgtactttcgacgtcgtcttcctcagtagcgcccccttctttctccacccgccgtcgacgcagctgccttccagccatctccatatccgtttcgccgtccccttcctcctcatcagtggctcgtcaagcgcgtcgtcgggatgcatgggggctccgtcacctaccttgtcgaccccggcaacaacgactcctcctccagaaccgtcgtggtgagttggtcactactgggctgggcttttgggttcctactgcttgttaggtgctgcctccgtgatccgatttgtgctcaactgattgatgctgagcattgttggtcttaatggagtttcagtagttgtttttagcgacgggcttagggggtgtttgggaacacagttttttacagtattggaacaatactgtggtatttgagaataccatggtataatatacagaaaggtgtttggaaatgtaggtaaaatctctgtatttaaaactaaagtattatcaatactgcagctgtttcaaagtattgtaaactttgctctccaccaaagttttcttctgtaaacaagcttgtgagcgtgcggtaccggcgatggcgtgggaccgagctgggttctgcggacacaatgccgaaaaggctgtcactggtgtacctatcgctcgttccaaacttccaatgctgcacggggctgtatgagtatgacagcttgggtgtacgtacgtgtacccaatggttcagctttcatatgattttagctttattagttgcaataaccaactaccgctagctttagattgtatgatatttgttatctagaaggaagacttcaatttatggaataactcaaccatgcggctgttactaaccttagggaatttagaagataattccaataggggaacagagagcctcacatggtatatactttgttcccaaacacctccatgtattcaaaattgtggtattctaaaactgtggtattgaaaactgagatcatgtcatggcatttgtatactgtggtatttgaaataccatggttttgaaaaactgtgtttccaaacacccccttagtacttgtcagtacattttacatgcttcgaattgagatgcataggaattaggagacgtgcgttttttagtaattggtacctacttgcgcctgagactctagtctaggcaccaaagtcagggaggtgtttctctgagctctgcttcaaaactgtattatctgatgtttgtctgagccacaagtcatgaattttgcctgtagtcaaggatggtgaaggtccaatcatgtgcatatcattggtttcctcttgttatgatgaccaaacttgtatctaatatattgatttgaatatgatgacctctatattgtaagtttctgaatttttgcaacacaggtcatgcatttttcctgtagtcaaggatggtgaaggtccaatcatgtgcatatcattggtttcctcttgttatgatgaagagatctggattcaatacttgatttttcatttgtttttaaatatttgttaactgttatggtgtatgtcaatggaatttgggcattggttgctttgactgtttcttggaatgcagataaactacgcctatgctcgagacaatgaaacactatttgatattattagtgtgaagatgaacctctcaattgacaagcgatgcaggataaataatttgtccacaagcatgattgcattatcctagcggcggcggggccgtacaaagagatgctggaagtggtgaacgcgtgcgcgacccggatccggtggcgcctcagtccagcttccaagcgccgcctcctcaacggtcagtgcccactcgcttgctgctttctcttagtagttgtagtcgttttttaacgggaaatacaacagggaagccaccagcccaccactatgtaggattttattaattgaaaaatagtgttgtagttgttattatctctatttaggacttgttgttggcaattgtcctatttcttgcttaattcgctaccgccatgctgtctttctgttctactgctaaaacacttattttttgtggtcgttgaatgaattgttaaccaaactcaattgcagaagacattcatccactaatcgtcacatgatccaccttagttcataagtttataccaccgtagttataggtcacttggtcagtagctgcaacttgcaagtgatttagggtttaataaaaaatttctggtagtaaagttgaaaggtatggtttgaggagagtgaatggtatcatgtcgaattacagtacattacaatttacaagtaaattgattagtcctctggtcttttgattggtagcatgtttttcctatgtaattgcctctgttcttctttaggggctaggttcgttgtaatcatttgaccgtggggatgtttgtactaaattcttatttctcttaaggaaaatcatgctaatgcacgaccacgaagaaaaagtaaattcatgaacaaatctacctaacttatgatttctgttggattttaactctagtctacctctttgaaattaaaaggttgtgctgtggttgttgatgaacaaacccagttgttgccaaatatcctgtttctctgcactaggttgcgtcctgtggtactggtcgactatggtggcacaatgcctcagctacaagaaaatctttgtggcctgctatatcttgcccgacagttcaagctctacaaggttaggtctgttcagtttggctagaaaggcatcccctacctgaacacctacgacgaccgcaccatccgctaccccgaccctctcatcaaggccaacgacaccatcaagatcgatctggagaccaacaagatcatggacttcatcaagttgtatttgccctttcatggacttcatcaagttatatacttagttaggctcaatgttagcacaaacagttgatgagcaagtttaaatttagagtacacttatgtatgagttatttgacaatgcttatttatgagatattgaatattatttatctatattatattaattatagtgttattaaatatatgtgtatgtatttttctcttttaaattattataatgtgataatttaagaatatact

SEQ ID NO: 65686 - DNA, 956 bp, Zea Mays
gttctgatgacatcttccactcttcctttctgcggcgcacccttctttctccatccacttgtgtactttcgacgtcgtcttcctcagtagcgcccccttctttctccacccgccgtcgacgcagctgccttccagccatctccatatccgtttcgccgtccccttcctcctcatcaggacccgcgcaagtggctcgtcaagcgcgtcgtcgggatgcatgggggctccgtcacctaccttgtcgaccccggcaacaacgactcctcctccagaaccgtcgtgataaactacgcctatgctcgagacaatgaaacactatttgatattattagtgtgaagttctttcgttgcggagatggcagcggcggcggggccgtacaaagagatgctggaagtggtgaacgcgtgcgcgacccggatccggtggcgcctcagtccagcttccaagcgccgcctcctcaacggttgcgtcctgtggtactggtcgactatggtggcacaatgcctcagctacaagaaaatctttgtggcctgctatatcttgcccgacagttcaagctctacaaggttaggtctgttcagtttggctagaaaggcatcccctacctgaacacctacgacgaccgcaccatccgctaccccgaccctctcatcaaggccaacgacaccatcaagatcgatctggagaccaacaagatcatggacttcatcaagttgtatttgccctttcatggacttcatcaagttatatacttagttaggctcaatgttagcacaaacagttgatgagcaagtttaaatttagagtacacttatgtatgagttatttgacaatgcttatttatgagatattgaatattatttatctatattatattaattatagtgttattaaatatatgtgtatgtatttttctcttttaaattattataatgtgataatttaagaatatact

SEQ ID NO: 65687 - DNA, 1724 bp, Zea Mays
cttccactcttcctttctgcggcgcacccttctttctccatccacttgtgtactttcgacgtcgtcttcctcagtagcgcccccttctttctccacccgccgtcgacgcagctgccttccagccatctccatatccgtttcgccgtccccttcctcctcatcaggtaaacctaattcccttcctctctccccatcaattcgcccctaacctaattcgtgctgatgatctcccccgaggacccgcgcaagtggctcgtcaagcgcgtcgtcgggatgcatgggggctccgtcacctaccttgtcgaccccggcaacaacgactcctcctccagaaccgtcgtgcggcggcggggccgtacaaagagatgctggaagtggtgaacgcgtgcgcgacccggatccggtggcgcctcagtccagcttccaagcgccgcctcctcaacggtcagtgcccactcgcttgctgctttctcttagtagttgtagtcgttttttaacgggaaatacaacagggaagccaccagcccaccactatgtaggattttattaattgaaaaatagtgttgtagttgttattatctctatttaggacttgttgttggcaattgtcctatttcttgcttaattcgctaccgccatgctgtctttctgttctactgctaaaacacttattttttgtggtcgttgaatgaattgttaaccaaactcaattgcagaagacattcatccactaatcgtcacatgatccaccttagttcataagtttataccaccgtagttataggtcacttggtcagtagctgcaacttgcaagtgatttagggtttaataaaaaatttctggtagtaaagttgaaaggtatggtttgaggagagtgaatggtatcatgtcgaattacagtacattacaatttacaagtaaattgattagtcctctggtcttttgattggtagcatgtttttcctatgtaattgcctctgttcttctttaggggctaggttcgttgtaatcatttgaccgtggggatgtttgtactaaattcttatttctcttaaggaaaatcatgctaatgcacgaccacgaagaaaaagtaaattcatgaacaaatctacctaacttatgatttctgttggattttaactctagtctacctctttgaaattaaaaggttgtgctgtggttgttgatgaacaaacccagttgttgccaaatatcctgtttctctgcactaggttgcgtcctgtggtactggtcgactatggtggcacaatgcctcagctacaagaaaatctttgtggcctgctatatcttgcccgacagttcaagctctacaaggttaggtctgttcagtttggctagaaaggcatcccctacctgaacacctacgacgaccgcaccatccgctaccccgaccctctcatcaaggccaacgacaccatcaagatcgatctggagaccaacaagatcatggacttcatcaagttgtatttgccctttcatggacttcatcaagttatatacttagttaggctcaatgttagcacaaacagttgatgagcaagtttaaatttagagtacacttatgtatgagttatttgacaatgcttatttatgagatattgaatattatttatctatattatattaattatagtgttattaaatatatgtgtatgtatttttctcttttaaattattataatgtgataatttaagaatatact

SEQ ID NO: 65688 - DNA, 2373 bp, Zea Mays
cttccactcttcctttctgcggcgcacccttctttctccatccacttgtgtactttcgacgtcgtcttcctcagtagcgcccccttctttctccacccgccgtcgacgcagctgccttccagccatctccatatccgtttcgccgtccccttcctcctcatcagtggctcgtcaagcgcgtcgtcgggatgcatgggggctccgtcacctaccttgtcgaccccggcaacaacgactcctcctccagaaccgtcgtggtgagttggtcactactgggctgggcttttgggttcctactgcttgttaggtgctgcctccgtgatccgatttgtgctcaactgattgatgctgagcattgttggtcttaatggagtttcagtagttgtttttagcgacgggcttagggggtgtttgggaacacagttttttacagtattggaacaatactgtggtatttgagaataccatggtataatatacagaaaggtgtttggaaatgtaggtaaaatctctgtatttaaaactaaagtattatcaatactgcagctgtttcaaagtattgtaaactttgctctccaccaaagttttcttctgtaaacaagcttgtgagcgtgcggtaccggcgatggcgtgggaccgagctgggttctgcggacacaatgccgaaaaggctgtcactggtgtacctatcgctcgttccaaacttccaatgctgcacggggctgtatgagtatgacagcttgggtgtacgtacgtgtacccaatggttcagctttcatatgattttagctttattagttgcaataaccaactaccgctagctttagattgtatgatatttgttatctagaaggaagacttcaatttatggaataactcaaccatgcggctgttactaaccttagggaatttagaagataattccaataggggaacagagagcctcacatggtatatactttgttcccaaacacctccatgtattcaaaattgtggtattctaaaactgtggtattgaaaactgagatcatgtcatggcatttgtatactgtggtatttgaaataccatggttttgaaaaactgtgtttccaaacacccccttagtacttgtcagtacattttacatgcttcgaattgagatgcataggaattaggagacgtgcgttttttagtaattggtacctacttgcgcctgagactctagtctaggcaccaaagtcagggaggtgtttctctgagctctgcttcaaaactgtattatctgatgtttgtctgagccacaagtcatgaattttgcctgtagtcaaggatggtgaaggtccaatcatgtgcatatcattggtttcctcttgttatgatgaccaaacttgtatctaatatattgatttgaatatgatgacctctatattgtaagtttctgaatttttgcaacacaggtcatgcatttttcctgtagtcaaggatggtgaaggtccaatcatgtgcatatcattggtttcctcttgttatgatgaagagatctggattcaatacttgatttttcatttgtttttaaatatttgttaactgttatggtgtatgtcaatggaatttgggcattggttgctttgactgtttcttggaatgcagataaactacgcctatgctcgagacaatgaaacactatttgatattattagtgtgaagatgaacctctcaattgacaagcgatgcaggataaataatttgtccacaagcatgattgcattatcctagttctttcgttgcggagatggcagcggcggcggggccgtacaaagagatgctggaagtggtgaacgcgtgcgcgacccggatccggtggcgcctcagtccagcttccaagcgccgcctcctcaacggttgcgtcctgtggtactggtcgactatggtggcacaatgcctcagctacaagaaaatctttgtggcctgctatatcttgcccgacagttcaagctctacaaggttaggtctgttcagtttggctagaaaggcatcccctacctgaacacctacgacgaccgcaccatccgctaccccgaccctctcatcaaggccaacgacaccatcaagatcgatctggagaccaacaagatcatggacttcatcaagttgtatttgccctttcatggacttcatcaagttatatacttagttaggctcaatgttagcacaaacagttgatgagcaagtttaaatttagagtacacttatgtatgagttatttgacaatgcttatttatgagatattgaatattatttatctatattatattaattatagtgttattaaatatatgtgtatgtatttttctcttttaaattattataatgtgataatttaagaatatact

SEQ ID NO: 65689 - DNA, 2285 bp, Zea Mays
ccactcttcctttctgcggcgcacccttctttctccatccacttgtgtactttcgacgtcgtcttcctcagtagcgcccccttctttctccacccgccgtcgacgcagctgccttccagccatctccatatccgtttcgccgtccccttcctcctcatcagtggctcgtcaagcgcgtcgtcgggatgcatgggggctccgtcacctaccttgtcgaccccggcaacaacgactcctcctccagaaccgtcgtggtgagttggtcactactgggctgggcttttgggttcctactgcttgttaggtgctgcctccgtgatccgatttgtgctcaactgattgatgctgagcattgttggtcttaatggagtttcagtagttgtttttagcgacgggcttagggggtgtttgggaacacagttttttacagtattggaacaatactgtggtatttgagaataccatggtataatatacagaaaggtgtttggaaatgtaggtaaaatctctgtatttaaaactaaagtattatcaatactgcagctgtttcaaagtattgtaaactttgctctccaccaaagttttcttctgtaaacaagcttgtgagcgtgcggtaccggcgatggcgtgggaccgagctgggttctgcggacacaatgccgaaaaggctgtcactggtgtacctatcgctcgttccaaacttccaatgctgcacggggctgtatgagtatgacagcttgggtgtacgtacgtgtacccaatggttcagctttcatatgattttagctttattagttgcaataaccaactaccgctagctttagattgtatgatatttgttatctagaaggaagacttcaatttatggaataactcaaccatgcggctgttactaaccttagggaatttagaagataattccaataggggaacagagagcctcacatggtatatactttgttcccaaacacctccatgtattcaaaattgtggtattctaaaactgtggtattgaaaactgagatcatgtcatggcatttgtatactgtggtatttgaaataccatggttttgaaaaactgtgtttccaaacacccccttagtacttgtcagtacattttacatgcttcgaattgagatgcataggaattaggagacgtgcgttttttagtaattggtacctacttgcgcctgagactctagtctaggcaccaaagtcagggaggtgtttctctgagctctgcttcaaaactgtattatctgatgtttgtctgagccacaagtcatgaattttgcctgtagtcaaggatggtgaaggtccaatcatgtgcatatcattggtttcctcttgttatgatgaccaaacttgtatctaatatattgatttgaatatgatgacctctatattgtaagtttctgaatttttgcaacacaggtcatgcatttttcctgtagtcaaggatggtgaaggtccaatcatgtgcatatcattggtttcctcttgttatgatgaagagatctggattcaatacttgatttttcatttgtttttaaatatttgttaactgttatggtgtatgtcaatggaatttgggcattggttgctttgactgtttcttggaatgcagataaactacgcctatgctcgagacaatgaaacactatttgatattattagtgtgaagatggcagcggcggcggggccgtacaaagagatgctggaagtggtgaacgcgtgcgcgacccggatccggtggcgcctcagtccagcttccaagcgccgcctcctcaacggttgcgtcctgtggtactggtcgactatggtggcacaatgcctcagctacaagaaaatctttgtggcctgctatatcttgcccgacagttcaagctctacaaggttaggtctgttcagtttggctagaaaggcatcccctacctgaacacctacgacgaccgcaccatccgctaccccgaccctctcatcaaggccaacgacaccatcaagatcgatctggagaccaacaagatcatggacttcatcaagttgtatttgccctttcatggacttcatcaagttatatacttagttaggctcaatgttagcacaaacagttgatgagcaagtttaaatttagagtacacttatgtatgagttatttgacaatgcttatttatgagatattgaatattatttatctatattatattaattatagtgttattaaatatatgtgtatgtatttttctcttttaaattattataatgtgataatttaagaatatact

SEQ ID NO: 65690 - DNA, 3158 bp, Zea Mays
ccactcttcctttctgcggcgcacccttctttctccatccacttgtgtactttcgacgtcgtcttcctcagtagcgcccccttctttctccacccgccgtcgacgcagctgccttccagccatctccatatccgtttcgccgtccccttcctcctcatcagtggctcgtcaagcgcgtcgtcgggatgcatgggggctccgtcacctaccttgtcgaccccggcaacaacgactcctcctccagaaccgtcgtggtgagttggtcactactgggctgggcttttgggttcctactgcttgttaggtgctgcctccgtgatccgatttgtgctcaactgattgatgctgagcattgttggtcttaatggagtttcagtagttgtttttagcgacgggcttagggggtgtttgggaacacagttttttacagtattggaacaatactgtggtatttgagaataccatggtataatatacagaaaggtgtttggaaatgtaggtaaaatctctgtatttaaaactaaagtattatcaatactgcagctgtttcaaagtattgtaaactttgctctccaccaaagttttcttctgtaaacaagcttgtgagcgtgcggtaccggcgatggcgtgggaccgagctgggttctgcggacacaatgccgaaaaggctgtcactggtgtacctatcgctcgttccaaacttccaatgctgcacggggctgtatgagtatgacagcttgggtgtacgtacgtgtacccaatggttcagctttcatatgattttagctttattagttgcaataaccaactaccgctagctttagattgtatgatatttgttatctagaaggaagacttcaatttatggaataactcaaccatgcggctgttactaaccttagggaatttagaagataattccaataggggaacagagagcctcacatggtatatactttgttcccaaacacctccatgtattcaaaattgtggtattctaaaactgtggtattgaaaactgagatcatgtcatggcatttgtatactgtggtatttgaaataccatggttttgaaaaactgtgtttccaaacacccccttagtacttgtcagtacattttacatgcttcgaattgagatgcataggaattaggagacgtgcgttttttagtaattggtacctacttgcgcctgagactctagtctaggcaccaaagtcagggaggtgtttctctgagctctgcttcaaaactgtattatctgatgtttgtctgagccacaagtcatgaattttgcctgtagtcaaggatggtgaaggtccaatcatgtgcatatcattggtttcctcttgttatgatgaccaaacttgtatctaatatattgatttgaatatgatgacctctatattgtaagtttctgaatttttgcaacacaggtcatgcatttttcctgtagtcaaggatggtgaaggtccaatcatgtgcatatcattggtttcctcttgttatgatgaagagatctggattcaatacttgatttttcatttgtttttaaatatttgttaactgttatggtgtatgtcaatggaatttgggcattggttgctttgactgtttcttggaatgcagataaactacgcctatgctcgagacaatgaaacactatttgatattattagtgtgaagatgaacctctcaattgacaagcgatgcaggataaataatttgtccacaagcatgattgcattatcctagttctttcgttgcggagatggcagcggcggcggggccgtacaaagagatgctggaagtggtgaacgcgtgcgcgacccggatccggtggcgcctcagtccagcttccaagcgccgcctcctcaacggtcagtgcccactcgcttgctgctttctcttagtagttgtagtcgttttttaacgggaaatacaacagggaagccaccagcccaccactatgtaggattttattaattgaaaaatagtgttgtagttgttattatctctatttaggacttgttgttggcaattgtcctatttcttgcttaattcgctaccgccatgctgtctttctgttctactgctaaaacacttattttttgtggtcgttgaatgaattgttaaccaaactcaattgcagaagacattcatccactaatcgtcacatgatccaccttagttcataagtttataccaccgtagttataggtcacttggtcagtagctgcaacttgcaagtgatttagggtttaataaaaaatttctggtagtaaagttgaaaggtatggtttgaggagagtgaatggtatcatgtcgaattacagtacattacaatttacaagtaaattgattagtcctctggtcttttgattggtagcatgtttttcctatgtaattgcctctgttcttctttaggggctaggttcgttgtaatcatttgaccgtggggatgtttgtactaaattcttatttctcttaaggaaaatcatgctaatgcacgaccacgaagaaaaagtaaattcatgaacaaatctacctaacttatgatttctgttggattttaactctagtctacctctttgaaattaaaaggttgtgctgtggttgttgatgaacaaacccagttgttgccaaatatcctgtttctctgcactaggttgcgtcctgtggtactggtcgactatggtggcacaatgcctcagctacaagaaaatctttgtggcctgctatatcttgcccgacagttcaagctctacaaggttaggtctgttcagtttggctagaaaggcatcccctacctgaacacctacgacgaccgcaccatccgctaccccgaccctctcatcaaggccaacgacaccatcaagatcgatctggagaccaacaagatcatggacttcatcaagttgtatttgccctttcatggacttcatcaagttatatacttagttaggctcaatgttagcacaaacagttgatgagcaagtttaaatttagagtacacttatgtatgagttatttgacaatgcttatttatgagatattgaatattatttatctatattatattaattatagtgttattaaatatatgtgtatgtatttttctcttttaaattattataatgtgataatttaagaatatact

SEQ ID NO: 65691 - DNA, 2354 bp, Zea Mays
ccactcttcctttctgcggcgcacccttctttctccatccacttgtgtactttcgacgtcgtcttcctcagtagcgcccccttctttctccacccgccgtcgacgcagctgccttccagccatctccatatccgtttcgccgtccccttcctcctcatcagtggctcgtcaagcgcgtcgtcgggatgcatgggggctccgtcacctaccttgtcgaccccggcaacaacgactcctcctccagaaccgtcgtggtgagttggtcactactgggctgggcttttgggttcctactgcttgttaggtgctgcctccgtgatccgatttgtgctcaactgattgatgctgagcattgttggtcttaatggagtttcagtagttgtttttagcgacgggcttagggggtgtttgggaacacagttttttacagtattggaacaatactgtggtatttgagaataccatggtataatatacagaaaggtgtttggaaatgtaggtaaaatctctgtatttaaaactaaagtattatcaatactgcagctgtttcaaagtattgtaaactttgctctccaccaaagttttcttctgtaaacaagcttgtgagcgtgcggtaccggcgatggcgtgggaccgagctgggttctgcggacacaatgccgaaaaggctgtcactggtgtacctatcgctcgttccaaacttccaatgctgcacggggctgtatgagtatgacagcttgggtgtacgtacgtgtacccaatggttcagctttcatatgattttagctttattagttgcaataaccaactaccgctagctttagattgtatgatatttgttatctagaaggaagacttcaatttatggaataactcaaccatgcggctgttactaaccttagggaatttagaagataattccaataggggaacagagagcctcacatggtatatactttgttcccaaacacctccatgtattcaaaattgtggtattctaaaactgtggtattgaaaactgagatcatgtcatggcatttgtatactgtggtatttgaaataccatggttttgaaaaactgtgtttccaaacacccccttagtacttgtcagtacattttacatgcttcgaattgagatgcataggaattaggagacgtgcgttttttagtaattggtacctacttgcgcctgagactctagtctaggcaccaaagtcagggaggtgtttctctgagctctgcttcaaaactgtattatctgatgtttgtctgagccacaagtcatgaattttgcctgtagtcaaggatggtgaaggtccaatcatgtgcatatcattggtttcctcttgttatgatgaccaaacttgtatctaatatattgatttgaatatgatgacctctatattgtaagtttctgaatttttgcaacacaggtcatgcatttttcctgtagtcaaggatggtgaaggtccaatcatgtgcatatcattggtttcctcttgttatgatgaagagatctggattcaatacttgatttttcatttgtttttaaatatttgttaactgttatggtgtatgtcaatggaatttgggcattggttgctttgactgtttcttggaatgcagataaactacgcctatgctcgagacaatgaaacactatttgatattattagtgtgaagatgaacctctcaattgacaagcgatgcaggataaataatttgtccacaagcatgattgcattatcctagatggcagcggcggcggggccgtacaaagagatgctggaagtggtgaacgcgtgcgcgacccggatccggtggcgcctcagtccagcttccaagcgccgcctcctcaacggttgcgtcctgtggtactggtcgactatggtggcacaatgcctcagctacaagaaaatctttgtggcctgctatatcttgcccgacagttcaagctctacaaggttaggtctgttcagtttggctagaaaggcatcccctacctgaacacctacgacgaccgcaccatccgctaccccgaccctctcatcaaggccaacgacaccatcaagatcgatctggagaccaacaagatcatggacttcatcaagttgtatttgccctttcatggacttcatcaagttatatacttagttaggctcaatgttagcacaaacagttgatgagcaagtttaaatttagagtacacttatgtatgagttatttgacaatgcttatttatgagatattgaatattatttatctatattatattaattatagtgttattaaatatatgtgtatgtatttttctcttttaaattattataatgtgataatttaagaatatact

SEQ ID NO: 65692 - DNA, 2278 bp, Zea Mays
ccactcttcctttctgcggcgcacccttctttctccatccacttgtgtactttcgacgtcgtcttcctcagtagcgcccccttctttctccacccgccgtcgacgcagctgccttccagccatctccatatccgtttcgccgtccccttcctcctcatcagtggctcgtcaagcgcgtcgtcgggatgcatgggggctccgtcacctaccttgtcgaccccggcaacaacgactcctcctccagaaccgtcgtggtgagttggtcactactgggctgggcttttgggttcctactgcttgttaggtgctgcctccgtgatccgatttgtgctcaactgattgatgctgagcattgttggtcttaatggagtttcagtagttgtttttagcgacgggcttagggggtgtttgggaacacagttttttacagtattggaacaatactgtggtatttgagaataccatggtataatatacagaaaggtgtttggaaatgtaggtaaaatctctgtatttaaaactaaagtattatcaatactgcagctgtttcaaagtattgtaaactttgctctccaccaaagttttcttctgtaaacaagcttgtgagcgtgcggtaccggcgatggcgtgggaccgagctgggttctgcggacacaatgccgaaaaggctgtcactggtgtacctatcgctcgttccaaacttccaatgctgcacggggctgtatgagtatgacagcttgggtgtacgtacgtgtacccaatggttcagctttcatatgattttagctttattagttgcaataaccaactaccgctagctttagattgtatgatatttgttatctagaaggaagacttcaatttatggaataactcaaccatgcggctgttactaaccttagggaatttagaagataattccaataggggaacagagagcctcacatggtatatactttgttcccaaacacctccatgtattcaaaattgtggtattctaaaactgtggtattgaaaactgagatcatgtcatggcatttgtatactgtggtatttgaaataccatggttttgaaaaactgtgtttccaaacacccccttagtacttgtcagtacattttacatgcttcgaattgagatgcataggaattaggagacgtgcgttttttagtaattggtacctacttgcgcctgagactctagtctaggcaccaaagtcagggaggtgtttctctgagctctgcttcaaaactgtattatctgatgtttgtctgagccacaagtcatgaattttgcctgtagtcaaggatggtgaaggtccaatcatgtgcatatcattggtttcctcttgttatgatgaccaaacttgtatctaatatattgatttgaatatgatgacctctatattgtaagtttctgaatttttgcaacacaggtcatgcatttttcctgtagtcaaggatggtgaaggtccaatcatgtgcatatcattggtttcctcttgttatgatgaagagatctggattcaatacttgatttttcatttgtttttaaatatttgttaactgttatggtgtatgtcaatggaatttgggcattggttgctttgactgtttcttggaatgcagataaactacgcctatgctcgagacaatgaaacactatttgatattattagtgtgaagcggcggcggggccgtacaaagagatgctggaagtggtgaacgcgtgcgcgacccggatccggtggcgcctcagtccagcttccaagcgccgcctcctcaacggttgcgtcctgtggtactggtcgactatggtggcacaatgcctcagctacaagaaaatctttgtggcctgctatatcttgcccgacagttcaagctctacaaggttaggtctgttcagtttggctagaaaggcatcccctacctgaacacctacgacgaccgcaccatccgctaccccgaccctctcatcaaggccaacgacaccatcaagatcgatctggagaccaacaagatcatggacttcatcaagttgtatttgccctttcatggacttcatcaagttatatacttagttaggctcaatgttagcacaaacagttgatgagcaagtttaaatttagagtacacttatgtatgagttatttgacaatgcttatttatgagatattgaatattatttatctatattatattaattatagtgttattaaatatatgtgtatgtatttttctcttttaaattattataatgtgataatttaagaatatact

SEQ ID NO: 65693 - DNA, 2347 bp, Zea Mays
ccactcttcctttctgcggcgcacccttctttctccatccacttgtgtactttcgacgtcgtcttcctcagtagcgcccccttctttctccacccgccgtcgacgcagctgccttccagccatctccatatccgtttcgccgtccccttcctcctcatcagtggctcgtcaagcgcgtcgtcgggatgcatgggggctccgtcacctaccttgtcgaccccggcaacaacgactcctcctccagaaccgtcgtggtgagttggtcactactgggctgggcttttgggttcctactgcttgttaggtgctgcctccgtgatccgatttgtgctcaactgattgatgctgagcattgttggtcttaatggagtttcagtagttgtttttagcgacgggcttagggggtgtttgggaacacagttttttacagtattggaacaatactgtggtatttgagaataccatggtataatatacagaaaggtgtttggaaatgtaggtaaaatctctgtatttaaaactaaagtattatcaatactgcagctgtttcaaagtattgtaaactttgctctccaccaaagttttcttctgtaaacaagcttgtgagcgtgcggtaccggcgatggcgtgggaccgagctgggttctgcggacacaatgccgaaaaggctgtcactggtgtacctatcgctcgttccaaacttccaatgctgcacggggctgtatgagtatgacagcttgggtgtacgtacgtgtacccaatggttcagctttcatatgattttagctttattagttgcaataaccaactaccgctagctttagattgtatgatatttgttatctagaaggaagacttcaatttatggaataactcaaccatgcggctgttactaaccttagggaatttagaagataattccaataggggaacagagagcctcacatggtatatactttgttcccaaacacctccatgtattcaaaattgtggtattctaaaactgtggtattgaaaactgagatcatgtcatggcatttgtatactgtggtatttgaaataccatggttttgaaaaactgtgtttccaaacacccccttagtacttgtcagtacattttacatgcttcgaattgagatgcataggaattaggagacgtgcgttttttagtaattggtacctacttgcgcctgagactctagtctaggcaccaaagtcagggaggtgtttctctgagctctgcttcaaaactgtattatctgatgtttgtctgagccacaagtcatgaattttgcctgtagtcaaggatggtgaaggtccaatcatgtgcatatcattggtttcctcttgttatgatgaccaaacttgtatctaatatattgatttgaatatgatgacctctatattgtaagtttctgaatttttgcaacacaggtcatgcatttttcctgtagtcaaggatggtgaaggtccaatcatgtgcatatcattggtttcctcttgttatgatgaagagatctggattcaatacttgatttttcatttgtttttaaatatttgttaactgttatggtgtatgtcaatggaatttgggcattggttgctttgactgtttcttggaatgcagataaactacgcctatgctcgagacaatgaaacactatttgatattattagtgtgaagatgaacctctcaattgacaagcgatgcaggataaataatttgtccacaagcatgattgcattatcctagcggcggcggggccgtacaaagagatgctggaagtggtgaacgcgtgcgcgacccggatccggtggcgcctcagtccagcttccaagcgccgcctcctcaacggttgcgtcctgtggtactggtcgactatggtggcacaatgcctcagctacaagaaaatctttgtggcctgctatatcttgcccgacagttcaagctctacaaggttaggtctgttcagtttggctagaaaggcatcccctacctgaacacctacgacgaccgcaccatccgctaccccgaccctctcatcaaggccaacgacaccatcaagatcgatctggagaccaacaagatcatggacttcatcaagttgtatttgccctttcatggacttcatcaagttatatacttagttaggctcaatgttagcacaaacagttgatgagcaagtttaaatttagagtacacttatgtatgagttatttgacaatgcttatttatgagatattgaatattatttatctatattatattaattatagtgttattaaatatatgtgtatgtatttttctcttttaaattattataatgtgataatttaagaatatact

SEQ ID NO: 65694 - DNA, 2301 bp, Zea Mays
ccactcttcctttctgcggcgcacccttctttctccatccacttgtgtactttcgacgtcgtcttcctcagtagcgcccccttctttctccacccgccgtcgacgcagctgccttccagccatctccatatccgtttcgccgtccccttcctcctcatcagtggctcgtcaagcgcgtcgtcgggatgcatgggggctccgtcacctaccttgtcgaccccggcaacaacgactcctcctccagaaccgtcgtggtgagttggtcactactgggctgggcttttgggttcctactgcttgttaggtgctgcctccgtgatccgatttgtgctcaactgattgatgctgagcattgttggtcttaatggagtttcagtagttgtttttagcgacgggcttagggggtgtttgggaacacagttttttacagtattggaacaatactgtggtatttgagaataccatggtataatatacagaaaggtgtttggaaatgtaggtaaaatctctgtatttaaaactaaagtattatcaatactgcagctgtttcaaagtattgtaaactttgctctccaccaaagttttcttctgtaaacaagcttgtgagcgtgcggtaccggcgatggcgtgggaccgagctgggttctgcggacacaatgccgaaaaggctgtcactggtgtacctatcgctcgttccaaacttccaatgctgcacggggctgtatgagtatgacagcttgggtgtacgtacgtgtacccaatggttcagctttcatatgattttagctttattagttgcaataaccaactaccgctagctttagattgtatgatatttgttatctagaaggaagacttcaatttatggaataactcaaccatgcggctgttactaaccttagggaatttagaagataattccaataggggaacagagagcctcacatggtatatactttgttcccaaacacctccatgtattcaaaattgtggtattctaaaactgtggtattgaaaactgagatcatgtcatggcatttgtatactgtggtatttgaaataccatggttttgaaaaactgtgtttccaaacacccccttagtacttgtcagtacattttacatgcttcgaattgagatgcataggaattaggagacgtgcgttttttagtaattggtacctacttgcgcctgagactctagtctaggcaccaaagtcagggaggtgtttctctgagctctgcttcaaaactgtattatctgatgtttgtctgagccacaagtcatgaattttgcctgtagtcaaggatggtgaaggtccaatcatgtgcatatcattggtttcctcttgttatgatgaccaaacttgtatctaatatattgatttgaatatgatgacctctatattgtaagtttctgaatttttgcaacacaggtcatgcatttttcctgtagtcaaggatggtgaaggtccaatcatgtgcatatcattggtttcctcttgttatgatgaagagatctggattcaatacttgatttttcatttgtttttaaatatttgttaactgttatggtgtatgtcaatggaatttgggcattggttgctttgactgtttcttggaatgcagataaactacgcctatgctcgagacaatgaaacactatttgatattattagtgtgaagttctttcgttgcggagatggcagcggcggcggggccgtacaaagagatgctggaagtggtgaacgcgtgcgcgacccggatccggtggcgcctcagtccagcttccaagcgccgcctcctcaacggttgcgtcctgtggtactggtcgactatggtggcacaatgcctcagctacaagaaaatctttgtggcctgctatatcttgcccgacagttcaagctctacaaggttaggtctgttcagtttggctagaaaggcatcccctacctgaacacctacgacgaccgcaccatccgctaccccgaccctctcatcaaggccaacgacaccatcaagatcgatctggagaccaacaagatcatggacttcatcaagttgtatttgccctttcatggacttcatcaagttatatacttagttaggctcaatgttagcacaaacagttgatgagcaagtttaaatttagagtacacttatgtatgagttatttgacaatgcttatttatgagatattgaatattatttatctatattatattaattatagtgttattaaatatatgtgtatgtatttttctcttttaaattattataatgtgataatttaagaatatact

SEQ ID NO: 65695 - DNA, 1058 bp, Zea Mays
ctcttcctttctgcggcgcacccttctttctccatccacttgtgtactttcgacgtcgtcttcctcagtagcgcccccttctttctccacccgccgtcgacgcagctgccttccagccatctccatatccgtttcgccgtccccttcctcctcatcaggtaaacctaattcccttcctctctccccatcaattcgcccctaacctaattcgtgctgatgatctcccccgaggacccgcgcaagtggctcgtcaagcgcgtcgtcgggatgcatgggggctccgtcacctaccttgtcgaccccggcaacaacgactcctcctccagaaccgtcgtgataaactacgcctatgctcgagacaatgaaacactatttgatattattagtgtgaagatggcagcggcggcggggccgtacaaagagatgctggaagtggtgaacgcgtgcgcgacccggatccggtggcgcctcagtccagcttccaagcgccgcctcctcaacggttgtgctgtggttgttgatgaacaaacccagttgttgccaaatatcctgtttctctgcactaggttgcgtcctgtggtactggtcgactatggtggcacaatgcctcagctacaagaaaatctttgtggcctgctatatcttgcccgacagttcaagctctacaaggttaggtctgttcagtttggctagaaaggcatcccctacctgaacacctacgacgaccgcaccatccgctaccccgaccctctcatcaaggccaacgacaccatcaagatcgatctggagaccaacaagatcatggacttcatcaagttgtatttgccctttcatggacttcatcaagttatatacttagttaggctcaatgttagcacaaacagttgatgagcaagtttaaatttagagtacacttatgtatgagttatttgacaatgcttatttatgagatattgaatattatttatctatattatattaattatagtgttattaaatatatgtgtatgtatttttctcttttaaattattataatgtgataatttaagaatatact

SEQ ID NO: 65696 - DNA, 1071 bp, Zea Mays
ttcctttctgcggcgcacccttctttctccatccacttgtgtactttcgacgtcgtcttcctcagtagcgcccccttctttctccacccgccgtcgacgcagctgccttccagccatctccatatccgtttcgccgtccccttcctcctcatcaggtaaacctaattcccttcctctctccccatcaattcgcccctaacctaattcgtgctgatgatctcccccgaggacccgcgcaagtggctcgtcaagcgcgtcgtcgggatgcatgggggctccgtcacctaccttgtcgaccccggcaacaacgactcctcctccagaaccgtcgtgataaactacgcctatgctcgagacaatgaaacactatttgatattattagtgtgaagttctttcgttgcggagatggcagcggcggcggggccgtacaaagagatgctggaagtggtgaacgcgtgcgcgacccggatccggtggcgcctcagtccagcttccaagcgccgcctcctcaacggttgtgctgtggttgttgatgaacaaacccagttgttgccaaatatcctgtttctctgcactaggttgcgtcctgtggtactggtcgactatggtggcacaatgcctcagctacaagaaaatctttgtggcctgctatatcttgcccgacagttcaagctctacaaggttaggtctgttcagtttggctagaaaggcatcccctacctgaacacctacgacgaccgcaccatccgctaccccgaccctctcatcaaggccaacgacaccatcaagatcgatctggagaccaacaagatcatggacttcatcaagttgtatttgccctttcatggacttcatcaagttatatacttagttaggctcaatgttagcacaaacagttgatgagcaagtttaaatttagagtacacttatgtatgagttatttgacaatgcttatttatgagatattgaatattatttatctatattatattaattatagtgttattaaatatatgtgtatgtatttttctcttttaaattattataatgtgataatttaagaatatact

SEQ ID NO: 65697 - DNA, 1180 bp, Zea Mays
ctttctccatccacttgtgtactttcgacgtcgtcttcctcagtagcgcccccttctttctccacccgccgtcgacgcagctgccttccagccatctccatatccgtttcgccgtccccttcctcctcatcagtggctcgtcaagcgcgtcgtcgggatgcatgggggctccgtcacctaccttgtcgaccccggcaacaacgactcctcctccagaaccgtcgtgataaactacgcctatgctcgagacaatgaaacactatttgatattattagtgtgaagatgaacctctcaattgacaagcgatgcaggataaataatttgtccacaagcatgattgcattatcctaggtgcttatgaaagtttttaccttttcttcaatatgaagtctgaatgtgtggtgtggcttgtctgatctatctagcaggtttagtggtactcgcatcagctaaaccttaaacttgttttcttcttaatgcctccgtgatcggtttaagttctttcgttgcggagatggcagcggcggcggggccgtacaaagagatgctggaagtggtgaacgcgtgcgcgacccggatccggtggcgcctcagtccagcttccaagcgccgcctcctcaacggttgtgctgtggttgttgatgaacaaacccagttgttgccaaatatcctgtttctctgcactaggttgcgtcctgtggtactggtcgactatggtggcacaatgcctcagctacaagaaaatctttgtggcctgctatatcttgcccgacagttcaagctctacaaggttaggtctgttcagtttggctagaaaggcatcccctacctgaacacctacgacgaccgcaccatccgctaccccgaccctctcatcaaggccaacgacaccatcaagatcgatctggagaccaacaagatcatggacttcatcaagttgtatttgccctttcatggacttcatcaagttatatacttagttaggctcaatgttagcacaaacagttgatgagcaagtttaaatttagagtacacttatgtatgagttatttgacaatgcttatttatgagatattgaatattatttatctatattatattaattatagtgttattaaatatatgtgtatgtatttttctcttttaaattattataatgtgataatttaagaatatact

SEQ ID NO: 65698 - DNA, 1315 bp, Zea Mays
ctttctccatccacttgtgtactttcgacgtcgtcttcctcagtagcgcccccttctttctccacccgccgtcgacgcagctgccttccagccatctccatatccgtttcgccgtccccttcctcctcatcaggtaaacctaattcccttcctctctccccatcaattcgcccctaacctaattcgtgctgatgatctcccccgaggacccgcgcaagtggctcgtcaagcgcgtcgtcgggatgcatgggggctccgtcacctaccttgtcgaccccggcaacaacgactcctcctccagaaccgtcgtggtcatgcatttttcctgtagtcaaggatggtgaaggtccaatcatgtgcatatcattggtttcctcttgttatgatgaagagatctggattcaatacttgatttttcatttgtttttaaatatttgttaactgttatggtgtatgtcaatggaatttgggcattggttgctttgactgtttcttggaatgcagataaactacgcctatgctcgagacaatgaaacactatttgatattattagtgtgaagcaggtttagtggtactcgcatcagctaaaccttaaacttgttttcttcttaatgcctccgtgatcggtttaagttctttcgttgcggagatggcagcggcggcggggccgtacaaagagatgctggaagtggtgaacgcgtgcgcgacccggatccggtggcgcctcagtccagcttccaagcgccgcctcctcaacggttgtgctgtggttgttgatgaacaaacccagttgttgccaaatatcctgtttctctgcactaggttgcgtcctgtggtactggtcgactatggtggcacaatgcctcagctacaagaaaatctttgtggcctgctatatcttgcccgacagttcaagctctacaaggttaggtctgttcagtttggctagaaaggcatcccctacctgaacacctacgacgaccgcaccatccgctaccccgaccctctcatcaaggccaacgacaccatcaagatcgatctggagaccaacaagatcatggacttcatcaagttgtatttgccctttcatggacttcatcaagttatatacttagttaggctcaatgttagcacaaacagttgatgagcaagtttaaatttagagtacacttatgtatgagttatttgacaatgcttatttatgagatattgaatattatttatctatattatattaattatagtgttattaaatatatgtgtatgtatttttctcttttaaattattataatgtgataatttaagaatatact

SEQ ID NO: 65699 - DNA, 1015 bp, Zea Mays
ctttctccatccacttgtgtactttcgacgtcgtcttcctcagtagcgcccccttctttctccacccgccgtcgacgcagctgccttccagccatctccatatccgtttcgccgtccccttcctcctcatcagtggctcgtcaagcgcgtcgtcgggatgcatgggggctccgtcacctaccttgtcgaccccggcaacaacgactcctcctccagaaccgtcgtggtcatgcatttttcctgtagtcaaggatggtgaaggtccaatcatataaactacgcctatgctcgagacaatgaaacactatttgatattattagtgtgaaggtttagtggtactcgcatcagctaaaccttaaacttgttttcttcttaatgcctccgtgatcggtttaagttctttcgttgcggagatggcagcggcggcggggccgtacaaagagatgctggaagtggtgaacgcgtgcgcgacccggatccggtggcgcctcagtccagcttccaagcgccgcctcctcaacggttgcgtcctgtggtactggtcgactatggtggcacaatgcctcagctacaagaaaatctttgtggcctgctatatcttgcccgacagttcaagctctacaaggttaggtctgttcagtttggctagaaaggcatcccctacctgaacacctacgacgaccgcaccatccgctaccccgaccctctcatcaaggccaacgacaccatcaagatcgatctggagaccaacaagatcatggacttcatcaagttgtatttgccctttcatggacttcatcaagttatatacttagttaggctcaatgttagcacaaacagttgatgagcaagtttaaatttagagtacacttatgtatgagttatttgacaatgcttatttatgagatattgaatattatttatctatattatattaattatagtgttattaaatatatgtgtatgtatttttctcttttaaattattataatgtgataatttaagaatatact

SEQ ID NO: 65700 - DNA, 2090 bp, Zea Mays
gctgagcattgttggtcttaatggagtttcagtagttgtttttagcgacgggcttagggggtgtttgggaacacagttttttacagtattggaacaatactgtggtatttgagaataccatggtataatatacagaaaggtgtttggaaatgtaggtaaaatctctgtatttaaaactaaagtattatcaatactgcagctgtttcaaagtattgtaaactttgctctccaccaaagttttcttctgtaaacaagcttgtgagcgtgcggtaccggcgatggcgtgggaccgagctgggttctgcggacacaatgccgaaaaggctgtcactggtgtacctatcgctcgttccaaacttccaatgctgcacggggctgtatgagtatgacagcttgggtgtacgtacgtgtacccaatggttcagctttcatatgattttagctttattagttgcaataaccaactaccgctagctttagattgtatgatatttgttatctagaaggaagacttcaatttatggaataactcaaccatgcggctgttactaaccttagggaatttagaagataattccaataggggaacagagagcctcacatggtatatactttgttcccaaacacctccatgtattcaaaattgtggtattctaaaactgtggtattgaaaactgagatcatgtcatggcatttgtatactgtggtatttgaaataccatggttttgaaaaactgtgtttccaaacacccccttagtacttgtcagtacattttacatgcttcgaattgagatgcataggaattaggagacgtgcgttttttagtaattggtacctacttgcgcctgagactctagtctaggcaccaaagtcagggaggtgtttctctgagctctgcttcaaaactgtattatctgatgtttgtctgagccacaagtcatgaattttgcctgtagtcaaggatggtgaaggtccaatcatgtgcatatcattggtttcctcttgttatgatgaccaaacttgtatctaatatattgatttgaatatgatgacctctatattgtaagtttctgaatttttgcaacacaggtcatgcatttttcctgtagtcaaggatggtgaaggtccaatcatgtgcatatcattggtttcctcttgttatgatgaagagatctggattcaatacttgatttttcatttgtttttaaatatttgttaactgttatggtgtatgtcaatggaatttgggcattggttgctttgactgtttcttggaatgcagataaactacgcctatgctcgagacaatgaaacactatttgatattattagtgtgaagatgaacctctcaattgacaagcgatgcaggataaataatttgtccacaagcatgattgcattatcctagttctttcgttgcggagatggcagcggcggcggggccgtacaaagagatgctggaagtggtgaacgcgtgcgcgacccggatccggtggcgcctcagtccagcttccaagcgccgcctcctcaacggttgtgctgtggttgttgatgaacaaacccagttgttgccaaatatcctgtttctctgcactaggttgcgtcctgtggtactggtcgactatggtggcacaatgcctcagctacaagaaaatctttgtggcctgctatatcttgcccgacagttcaagctctacaaggttaggtctgttcagtttggctagaaaggcatcccctacctgaacacctacgacgaccgcaccatccgctaccccgaccctctcatcaaggccaacgacaccatcaagatcgatctggagaccaacaagatcatggacttcatcaagttgtatttgccctttcatggacttcatcaagttatatacttagttaggctcaatgttagcacaaacagttgatgagcaagtttaaatttagagtacacttatgtatgagttatttgacaatgcttatttatgagatattgaatattatttatctatattatattaattatagtgttattaaatatatgtgtatgtatttttctcttttaaattattataatgtgataatttaagaatatact

SEQ ID NO: 65701 - DNA, 2031 bp, Zea Mays
aataccatggttttgaaaaactgtgtttccaaacacccccttagtacttgtcagtacattttacatgcttcgaattgagatgcataggaattaggagacgtgcgttttttagtaattggtacctacttgcgcctgagactctagtctaggcaccaaagtcagggaggtgtttctctgagctctgcttcaaaactgtattatctgatgtttgtctgagccacaagtcatgaattttgcctgtagtcaaggatggtgaaggtccaatcatgtgcatatcattggtttcctcttgttatgatgaccaaacttgtatctaatatattgatttgaatatgatgacctctatattgtaagtttctgaatttttgcaacacaggtcatgcatttttcctgtagtcaaggatggtgaaggtccaatcatgtgcatatcattggtttcctcttgttatgatgaagagatctggattcaatacttgatttttcatttgtttttaaatatttgttaactgttatggtgtatgtcaatggaatttgggcattggttgctttgactgtttcttggaatgcagataaactacgcctatgctcgagacaatgaaacactatttgatattattagtgtgaagttctttcgttgcggagatggcagcggcggcggggccgtacaaagagatgctggaagtggtgaacgcgtgcgcgacccggatccggtggcgcctcagtccagcttccaagcgccgcctcctcaacggtcagtgcccactcgcttgctgctttctcttagtagttgtagtcgttttttaacgggaaatacaacagggaagccaccagcccaccactatgtaggattttattaattgaaaaatagtgttgtagttgttattatctctatttaggacttgttgttggcaattgtcctatttcttgcttaattcgctaccgccatgctgtctttctgttctactgctaaaacacttattttttgtggtcgttgaatgaattgttaaccaaactcaattgcagaagacattcatccactaatcgtcacatgatccaccttagttcataagtttataccaccgtagttataggtcacttggtcagtagctgcaacttgcaagtgatttagggtttaataaaaaatttctggtagtaaagttgaaaggtatggtttgaggagagtgaatggtatcatgtcgaattacagtacattacaatttacaagtaaattgattagtcctctggtcttttgattggtagcatgtttttcctatgtaattgcctctgttcttctttaggggctaggttcgttgtaatcatttgaccgtggggatgtttgtactaaattcttatttctcttaaggaaaatcatgctaatgcacgaccacgaagaaaaagtaaattcatgaacaaatctacctaacttatgatttctgttggattttaactctagtctacctctttgaaattaaaaggttgtgctgtggttgttgatgaacaaacccagttgttgccaaatatcctgtttctctgcactaggttgcgtcctgtggtactggtcgactatggtggcacaatgcctcagctacaagaaaatctttgtggcctgctatatcttgcccgacagttcaagctctacaaggttaggtctgttcagtttggctagaaaggcatcccctacctgaacacctacgacgaccgcaccatccgctaccccgaccctctcatcaaggccaacgacaccatcaagatcgatctggagaccaacaagatcatggacttcatcaagttgtatttgccctttcatggacttcatcaagttatatacttagttaggctcaatgttagcacaaacagttgatgagcaagtttaaatttagagtacacttatgtatgagttatttgacaatgcttatttatgagatattgaatattatttatctatattatattaattatagtgttattaaatatatgtgtatgtatttttctcttttaaattattataatgtgataatttaagaatatact

SEQ ID NO: 65702 - DNA, 4465 bp, Zea Mays
gcagtgcagtgctctcgctgcggccctctcctctccctcaccctgtctctctcactcttcccatccaatctttatttccacaatccattattccttcccccttcgcttcgcttattcccccactcacttcccttccacaccgccgcctccggagaagggtccacggcggcgtccttcctcgggaggcgctcggctcggattcgctcctgctcggcggcggcgtcgccggctggtgggctcgcgcgcgcacctggtgctgggctccgcgggcgctcctcgtgcgtgacacgcgcccgatgcgtcaggatcgcgcggccggcgcccggggcctgccgtgattctgcggggaggctggatctcggtgcttccgcgtgcgggaaccagtgagttttctttttgtcttctcttccccggcggctagcggcgggccgcttggtgcacgtcagcgcgggaggccggaggttagccgatctggtgctctcgccgcccggagaggtggtgctgggcccactgccgggttctgcttagtaggaggcggaggaggtaagtccctcgtctcatggggctcgcgccgccggagctgggccagttcgacgggtgggagagctccggggaggaggagcgggagcgggagcgttggggctggtgccgccgcagccgccgcggcagcagcaggcgccgcgcggcccccaagggcaccgacgacgacaccgcggtcgacaccggctgctgcatccgcctctggcccgtcgggacatgccctccgccgccgcagaggtccaaggtcgacacctccaccagcagcgccagcacgcacgggggtagacgtctctttctctcctgtcacctggatactcactcgcattgtgctttctttgctgtcttgctcgcgtggtagatgggatttgctcctctaagtgaccataattgcgacgccgtactgttagccttgatctcgttctgggtaatgatgttacgcacgtcgcactttatctcctgatgttgagcttgcagctgattgatcgtaaatgctgaggacgtgttctgtttttggtagttagtatgctgctgtttgtgggagatatgtgaggctgcatctgggaggcttggaacaacaactcttttggttatatccttgtattgagcattgaatttgtggatggactggtattgattgccttctgcatatacaaaacataaggatcaccaatctgttgccaaatcctgtacaacaagcatctttcttgctgagcagcagcacacatgatagtttgggttctggaggagcatgtgtgagtggaccagcgtcattagttgtttcctgagtatctatttttagaatagcataagcatgtgctgattttgcctcaatactgttcacactagatgtacagcaaacttggggttactgtacgaaagaatgctattgccttctccattgcaaatagttgttagtgcgttagattcatacacgtgactttgattttgatgctgtaatctcagcatcaggtgtggtgtttgaagttgtggttttgtcggatgaataaagtaaaattcagaaggactgcgggtattagcttgtttatcaagacatgcggctgcagtttggttgctatttactgtttgttatgctcagtatggtggtgtgtctcatatagacatagaagcccagtttgccaattcatgtactgtattatgctatgccagggaacctactaacttaggtgttcagtcccagccatgtgttacataagtgttatgctaatgagtaaaaattgacatattggttaattaatatttccaaaagtaaaataagaaaaaatgctgtaaaagatcacttcaaagacaaattcatctttagaaggtttttcaccatctgcgcgatagatcgtctaacaactgtatgcaccaagaaggatttgtatttctatggagtatagttagcaattaaatcattctagaatgaatcgaaacacccccttcataatcggaactaaatgactaataaacttaaaagtacggaggatatgtgatgaatgatggcagttagcattttgatacttttaataggagcataaagtgctcgtttttgtatttgcaaaagggatttaaatgaaaataatgaatcgatgcacctcttgtaagttggtacattagcatgatgatctactgcatttattggatgctacggaagtcattgttaacatggactacccggttgtgcgatgttcatgtgatatccttttttttatattttgctttgcttttaagcaagacactatgtgaacttcatatatacttcagtgatctttgtcaggtgctttcaaggaagcaggctgaaatatgcataaagtcgtactcaaactgtgcagatggagcttttgcttttctttgttgagatcatattgtcagaagactctcttttgtcagtatgacatactaaaatattgtaatttcatgtaacagcagagaagtcaacagaaaatggtagtaggaatcaaccggtggcattggtagtctcaggttctacaactactagtaatgctgaaagcagttcatctgcatctaaagtcggagaagagataaaagttgcctcccagctgcgcaagtttgcattcaatgatctaaaatgtgctacccggaacttcaggcctgaaagtctccttggagaagggggttttggatgtgtttttaaagggtggattgaagaaaatggaactgcacctgtgaaacctggtacaggtctcacagttgctgtcaagacgctgaaccatgacgggcttcaagggcataaagaatgggtggctgaagttgattttcttggaaatcttcaccatcccaatttggtcagattgattggatattgtgttgaagatgaccaaaggttgctggtctatgaattcatgcctcgtggcagtttggataaccatctttttagaaggtctcttcctctcccatgggcaatcagaatgaaggttgcactcggagcagcaaagggtctggctttccttcatgaagaagcagaaagaccagtcatttatcgcgattttaaaacatctaatatactgctggatgcggagtataacgcaaagctctctgattttgggcttgcgaaagacggacctgtaggtgataaaactcatgtttctactcgagtaatgggaacctatggatatgcagcaccagaatatgtcatgactggtcatctgacatcaaagagtgatgtctacagcttcggggtggtgcttcttgagatgatgtcagggcgcaggtcgatggacaagaaccgcccgaacggggagcacaacctggtggaatgggcgcgccccctcctaggcgagaggcagcggttctacaagctaatcgaccctcgcctggagggcaacttctcggtgaagggcgcgcagaaggcggcgcagctagcgcgcgtgtgcctgagccgggaccccaaggcgcggcccctgatgagccaggtggtggaggtcctgaagccgctgcagaacctcaaggacatggcgagcgcctcctacttcttccagacgatgcaggccgagcggatggcgcactcgagcagcatgaacgggaggagcagcatgaacggcggcttcaagacgcagagcccgtttgggcggcatgggcagccgcctcccgtgaggagcctctctgacgggccccgcgcgtctccgttccgctactcgccgaagcctaacgtgaagtgagcggagtggtggaggcgcggttttctgccggctggaaggcacggcccctggatgaaacctggtttgttgggggtgactggttcgggccgtgcatttgcattgcattgcattgatgtgtgtgctgtagattgacatgtgcacaaagtaaaaggatataggcgaaaaagggtggtgtaggtatcggagtttgcttggcggatgtttgctctgaggttttaactgaatgaatgcggatgcaccgttgctatatattttttttgccccaaacaagtatggtaggcttaggtgattttccttggccttgcagtgtgcgggcgcctcatgaatcttgatggtcgcagttgctcgtgttcggtggtctgatgaagagaaatgcttcgatccctgcctttcgaagcaagcaagcaaacgttcttggcaacgtgggtgggggttgctcagctgtgtgtgtctgctccggtcttcgtcgccaagaaatcgacggaaatggcaatcgccgtctcctgtgccagatcgtcgtcctccattgctattgctattcgagaacagaagagcactgacttgtgagttcctaggctaacgtgcactcctcggaatcacagaaaggactggtgaggttaccacatttatttcatccaagaaaaagaaaataggcttatttctttgtagaacaaggaaagaggtctttgagatatatcaccacaaaagaatagcagtgaaaagaaaattgttacctgcatttgttt

SEQ ID NO: 65703 - DNA, 382 bp, Zea Mays
atgcccaaacttgggtgtacaataagcttcattcaagaaatactagcagtaattcttgttatggaaaagcactctgtactgatgaatgatattggccaagcttttgctacaaattgcaattacacaacgacgagctcgacacaagcagctcatgagcgcaccaacaacctgcctgatcaaaattacaggcgcatggatgcagagagcagcaaggtgccaagccaaggtcaagggcacaggctacgcaggcttctgatcgcgcaagtagcgcacagcggctgcggctcgcgcgtcaccgacaacccgaactggttccaagcgtccagtgctacgcgtatgtatttactgtgacacgcacatgagctggcgaggctgactggtg

SEQ ID NO: 65704 - DNA, 1195 bp, Zea Mays
gtattaggacagaagtcgattctttaagaccagcatctggagctgctccaaacgcagccctaattttccggcgctacttccaaatagtcgccctctcaacttttgttgggtccgtctgtggattgtccccggcctccttaccgtcgcgtccaaatcatcctcacaccccgcagcatctccacgccgccacacctcgtcgcgtcgcgtcgtctccgccgagaagatggtcggaccaggcctctacaccgagatcggcaagaagaccagggatctgctgtacaaggactaccagacagaccacaagttcaccctcactacctacagctccaatggcgttgctgtcactgctactagcacaaagaaagctgacctgatcttcagtgagatccattcacagataaagaacaagaacatgaccgtagatgtgaaagcaaactcagagtcaaatatcattactacagttactgtcaatgagattgcaacaccaggactgaagactatcttaagctttgctgttcctgatcagagatctggaaaggttgagcttcagtatttgcatgattatgctggagttaatgcaagcgttagtctgacagccaatcctgtagccaacctctctgctgcctttggcactaaggctctcgcagttggtgcagaaatctcatttgattctgccactgggaacttcaccaaatacaatgctggattgatgttcactcatgaagaccttatcgcatcccttaatatgaacaacaagggagacaaccttactggagcttactaccacaagcacactctggacccactaaccgtcttgaaggtcagctggggaaaacaaaactgttggggttaccggcatcttttggtcgttgcagtctgttgatttcatgaactgcgaaatgtttcattgaggaaatttttgggtcatctgcttagcgctctgttaaatgagcaacttccaaaataattcgagcccagtagaattctgaacttgtttacaatggttgatggtgacattgtcaattgaggtaggggtggttcagttttctaactgcgttttttggaccggtttgtttcatcttttttctgacaagcttttctaataatctaagaatttatctgtggagaatatggttgtgagaagaattagagcatcatgagaattatgtgcagagtaagatgaagaagtctatat

SEQ ID NO: 65705 - DNA, 2087 bp, Zea Mays
agcgaataacggttgtgccacttatccccatgcggatcttctcttatctcttctcgcgactcacgaaggaggcgcgacgtgcgcgtgccgctgtgctgcactgctagtgttcctgcgcgccgtgctgtccggcccgcccgcgccgcgcaccgatgccgccaccgtcttcctcgcgctactccccgggccggctgctcgccgcgcgcccggcgtccgccaccacggtggggagatgggcgcgcttgtcgtgctcgctgtccatgaacgggtgcgcgccgggcgccggggaccgcggcgcggtgtgcgtgcgcgagacgcgggcgctgccggccgcgccggcgccgcacgacgcagtggggcggctcagggccgccgtggacgcgctctggtccaacgcagcgccaccggccgcgccctccggcatcatccgcatcgaggtgcccatcacgcagcgggtggacgccgtggagtggctgcacgcgcagaccacgctgccccgctgcttcttctcggcccgggcgccgttgcccgacgcgcccgccctcgccggcaacggcaacggcaacggcagtgtccatcggcagcagccggtgagtgtcgcgggcgtgggttcggcggtcttcttccgagggacggagcccttttctctagctgattggcgcgcaatcaagagatttcttccaagggactgtccactggtccgcgcatatggcgccatccgtttcgacgccacgagtgacgcttccgttgaatgggaggactacggctcattctacttcgttgttcctcaagtcgagttcaatgagctcgaggagagctcagtcctcgcgacgaccatcgcgtgggacgactcgctctcatggacatggcacaacgccgtggaggagctccaatcgactctgcgaaagatatcgccttgctcttctgttcaagcgaacaaggccagcctacagacagccatcgtaagtctcaatcatgtcccgaccaaggcgtcttgggatcttgcagttactaaagctctccatatgatcaagggcaggcaaagagaattggtaaaggttgtactggcaaggtgtagcagatacattactgacacttgcattgaccctgtggaactgctggcttgcttgaaggctgagggccaaaatgcttatcaattctgcatacagccaccgggtgctcctgcgtttgtcggaaatagcagcaactatttcatcggaagtacttgaacatttccagcgaggctctagctggtactcgggcaagagggaagacaagggcagatgactttcaaatcggtcaggatttgcttctaagtagcaaagaggacatcgaattcactatagtacgggacagcatcaagaacaagctggagatgatctgtgatgaggtggttgtccatcccagcaaggctctgcggaaacttccaagagtccagcatctgtcagcgcagttagctgcgcgaataaggaacgaagatgatgagtttgagattctaaacaccctccatccgagtccagctgtttgtggcttgcccactgaagaggcacgccaattcatacgggattgtgaaatttttgaccgtggaatgtatgctggtcctgttggctggcttggaggagctgagtgcgagttcgctgtcgggattagatcagcgttacttggaaaaggtcacagcactctggtgtacgccggtgcggggatcgttgaaggtacaaacccatcttttgaatgggatgagcttgatctcaaagcatctcagtttgcaaagctgttgcggtaccaagaacgacctattcgctaccaagaggctgaaaatctgggaacggtgatctgaatagagaagtacagaagaaactagaaagtcatcacaaagttcggcattcatttagcgagttatttatacaattgtttgtttgatatagtaagctagaagggggattcagttggatttgtgtaattatggaatccagaacagcggcagtgctgaaaaatacattgattgaacctgaatgggaaattgttcaatgtaacaaaaatatgtttacaacataaactatttgattgaatcagtgcgtgaatgtgac

SEQ ID NO: 65706 - DNA, 2058 bp, Zea Mays
gtgccacttatccccatgcggatcttctcttatctcttctcgcgactcacgaaggaggcgcgacgtgcgcgtgccgctgtgctgcactgctagtgttcctgcgcgccgtgctgtccggcccgcccgcgccgcgcaccgatgccgccaccgtcttcctcgcgctactccccgggccggctgctcgccgcgcgcccggcgtccgccaccacggtggggagatgggcgcgcttgtcgtgctcgctgtccatgaacgggtgcgcgccgggcgccggggaccgcggcgcggtgtgcgtgcgcgagacgcgggcgctgccggccgcgccggcgccgcacgacgcagtggggcggctcagggccgccgtggacgcgctctggtccaacgcagcgccaccggccgcgccctccggcatcatccgcatcgaggtgcccatcacgcagcgggtggacgccgtggagtggctgcacgcgcagaccacgctgccccgctgcttcttctcggcccgggcgccgttgcccgacgcgcccgccctcgccggcaacggcaacggcaacggcagtgtccatcggcagcagccggtgagtgtcgcgggcgtgggttcggcggtcttcttccgagggacggagcccttttctctagctgattggcgcgcaatcaagagatttcttccaagggactgtccactggtccgcgcatatggcgccatccgtttcgacgccacgagtgacgcttccgttgaatgggaggactacggctcattctacttcgttgttcctcaagtcgagttcaatgagctcgaggagagctcagtcctcgcgacgaccatcgcgtgggacgactcgctctcatggacatggcacaacgccgtggaggagctccaatcgactctgcgaaagatatcgccttgctcttctgttcaagcgaacaaggccagcctacagacagccatcgtaagtctcaatcatgtcccgaccaaggcgtcttgggatcttgcagttactaaagctctccatatgatcaagggcaggcaaagagaattggtaaaggttgtactggcaaggtgtagcagatacattactgacacttgcattgaccctgtggaactgctggcttgcttgaaggctgagggccaaaatgcttatcaattctgcatacagccaccgggtgctcctgcgtttgtcggaaatagcccagagcaactatttcatcggaagtacttgaacatttccagcgaggctctagctggtactcgggcaagagggaagacaagggcagatgactttcaaatcgtagcaaagaggacatcgaattcactatagtacgggacagcatcaagaacaagctggagatgatctgtgatgaggtggttgtccatcccagcaaggctctgcggaaacttccaagagtccagcatctgtcagcgcagttagctgcgcgaataaggaacgaagatgatgagtttgagattctaaacaccctccatccgagtccagctgtttgtggcttgcccactgaagaggcacgccaattcatacgggattgtgaaatttttgaccgtggaatgtatgctggtcctgttggctggcttggaggagctgagtgcgagttcgctgtcgggattagatcagcgttacttggaaaaggtcacagcactctggtgtacgccggtgcggggatcgttgaaggtacaaacccatcttttgaatgggatgagcttgatctcaaagcatctcagtttgcaaagctgttgcggtaccaagaacgacctattcgctaccaagaggctgaaaatctgggaacggtgatctgaatagagaagtacagaagaaactagaaagtcatcacaaagttcggcattcatttagcgagttatttatacaattgtttgtttgatatagtaagctagaagggggattcagttggatttgtgtaattatggaatccagaacagcggcagtgctgaaaaatacattgattgaacctgaatgggaaattgttcaatgtaacaaaaatatgtttacaacataaactatttgattgaatcagtgcgtgaatgtgac

SEQ ID NO: 65707 - DNA, 2132 bp, Zea Mays
cacttatccccatgcggatcttctcttatctcttctcgcgactcacgaaggaggcgcgacgtgcgcgtgccgctgtgctgcactgctagtgttcctgcgcgccgtgctgtccggcccgcccgcgccgcgcaccgatgccgccaccgtcttcctcgcgctactccccgggccggctgctcgccgcgcgcccggcgtccgccaccacggtggggagatgggcgcgcttgtcgtgctcgctgtccatgaacgggtgcgcgccgggcgccggggaccgcggcgcggtgtgcgtgcgcgagacgcgggcgctgccggccgcgccggcgccgcacgacgcagtggggcggctcagggccgccgtggacgcgctctggtccaacgcagcgccaccggccgcgccctccggcatcatccgcatcgaggtgcccatcacgcagcgggtggacgccgtggagtggctgcacgcgcagaccacgctgccccgctgcttcttctcggcccgggcgccgttgcccgacgcgcccgccctcgccggcaacggcaacggcaacggcagtgtccatcggcagcagccggtgagtgtcgcgggcgtgggttcggcggtcttcttccgagggacggagcccttttctctagctgattggcgcgcaatcaagagatttcttccaagggactgtccactggtccgcgcatatggcgccatccgtttcgacgccacgagtgacgcttccgttgaatgggaggactacggctcattctacttcgttgttcctcaagtcgagttcaatgagctcgaggagagctcagtcctcgcgacgaccatcgcgtgggacgactcgctctcatggacatggcacaacgccgtggaggagctccaatcgactctgcgaaagatatcgccttgctcttctgttcaagcgaacaaggccagcctacagacagccatcgtaagtctcaatcatgtcccgaccaaggcgtcttgggatcttgcagttactaaagctctccatatgatcaagggcaggcaaagagaattggtaaaggttgtactggcaaggtgtagcagatacattactgacacttgcattgaccctgtggaactgctggcttgcttgaaggctgagggccaaaatgcttatcaattctgcatacagccaccgggtgctcctgcgtttgtcggaaatagcagcaactatttcatcggaagtacttgaacatttccagcgaggctctagctggtactcgggcaagagggaagacaagggcagatgactttcaaatcgtagcaaagaggacatcgaattcactatagtacgggacagcatcaagaacaagctggagatgatctgtgatgaggtggttgtccatcccagcaaggctctgcggaaacttccaagagtccagcatctgtcagcgcagttagctgcgcgaataaggaacgaagatgatgaggtgacctatgacaaaacttctactacttgagttgggtgaacatcatataaggtaacgatagcaacttgtgctggcgatgcagtttgagattctaaacaccctccatccgagtccagctgtttgtggcttgcccactgaagaggcacgccaattcatacgggattgtgaaatttttgaccgtggaatgtatgctggtcctgttggctggcttggaggagctgagtgcgagttcgctgtcgggattagatcagcgttacttggaaaaggtcacagcactctggtgtacgccggtgcggggatcgttgaaggtacaaacccatcttttgaatgggatgagcttgatctcaaagcatctcagtttgcaaagctgttgcggtaccaagaacgacctattcgctaccaagaggctgaaaatctgggaacggtgatctgaatagagaagtacagaagaaactagaaagtcatcacaaagttcggcattcatttagcgagttatttatacaattgtttgtttgatatagtaagctagaagggggattcagttggatttgtgtaattatggaatccagaacagcggcagtgctgaaaaatacattgattgaacctgaatgggaaattgttcaatgtaacaaaaatatgtttacaacataaactatttgattgaatcagtgcgtgaatgtgac

SEQ ID NO: 65708 - DNA, 2080 bp, Zea Mays
ggatcttctcttatctcttctcgcgactcacgaaggaggcgcgacgtgcgcgtgccgctgtgctgcactgctagtgttcctgcgcgccgtgctgtccggcccgcccgcgccgcgcaccgatgccgccaccgtcttcctcgcgctactccccgggccggctgctcgccgcgcgcccggcgtccgccaccacggtggggagatgggcgcgcttgtcgtgctcgctgtccatgaacgggtgcgcgccgggcgccggggaccgcggcgcggtgtgcgtgcgcgagacgcgggcgctgccggccgcgccggcgccgcacgacgcagtggggcggctcagggccgccgtggacgcgctctggtccaacgcagcgccaccggccgcgccctccggcatcatccgcatcgaggtgcccatcacgcagcgggtggacgccgtggagtggctgcacgcgcagaccacgctgccccgctgcttcttctcggcccgggcgccgttgcccgacgcgcccgccctcgccggcaacggcaacggcaacggcagtgtccatcggcagcagccggtgagtgtcgcgggcgtgggttcggcggtcttcttccgagggacggagcccttttctctagctgattggcgcgcaatcaagagatttcttccaagggactgtccactggtccgcgcatatggcgccatccgtttcgacgccacgagtgacgcttccgttgaatgggaggactacggctcattctacttcgttgttcctcaagtcgagttcaatgagctcgaggagagctcagtcctcgcgacgaccatcgcgtgggacgactcgctctcatggacatggcacaacgccgtggaggagctccaatcgactctgcgaaagatatcgccttgctcttctgttcaagcgaacaaggccagcctacagacagccatcgtaagtctcaatcatgtcccgaccaaggcgtcttgggatcttgcagttactaaagctctccatatgatcaagggcaggcaaagagaattggtaaaggttgtactggcaaggtgtagcagatacattactgacacttgcattgaccctgtggaactgctggcttgcttgaaggctgagggccaaaatgcttatcaattctgcatacagccaccgggtgctcctgcgtttgtcggaaatagccgaggctctagctggtactcgggcaagagggaagacaagggcagatgactttcaaatcgtagcaaagaggacatcgaattcactatagtacgggacagcatcaagaacaagctggagatgatctgtgatgaggtggttgtccatcccagcaaggctctgcggaaacttccaagagtccagcatctgtcagcgcagttagctgcgcgaataaggaacgaagatgatgaggtgacctatgacaaaacttctactacttgagttgggtgaacatcatataaggtaacgatagcaacttgtgctggcgatgcagtttgagattctaaacaccctccatccgagtccagctgtttgtggcttgcccactgaagaggcacgccaattcatacgggattgtgaaatttttgaccgtggaatgtatgctggtcctgttggctggcttggaggagctgagtgcgagttcgctgtcgggattagatcagcgttacttggaaaaggtcacagcactctggtgtacgccggtgcggggatcgttgaaggtacaaacccatcttttgaatgggatgagcttgatctcaaagcatctcagtttgcaaagctgttgcggtaccaagaacgacctattcgctaccaagaggctgaaaatctgggaacggtgatctgaatagagaagtacagaagaaactagaaagtcatcacaaagttcggcattcatttagcgagttatttatacaattgtttgtttgatatagtaagctagaagggggattcagttggatttgtgtaattatggaatccagaacagcggcagtgctgaaaaatacattgattgaacctgaatgggaaattgttcaatgtaacaaaaatatgtttacaacataaactatttgattgaatcagtgcgtgaatgtgac

SEQ ID NO: 65709 - DNA, 2210 bp, Zea Mays
gactcacgaaggaggcgcgacgtgcgcgtgccgctgtgctgcactgctagtgttcctgcgcgccgtgctgtccggcccgcccgcgccgcgcaccgatgccgccaccgtcttcctcgcgctactccccgggccggctgctcgccgcgcgcccggcgtccgccaccacggtggggagatgggcgcgcttgtcgtgctcgctgtccatgaacgggtgcgcgccgggcgccggggaccgcggcgcggtgtgcgtgcgcgagacgcgggcgctgccggccgcgccggcgccgcacgacgcagtggggcggctcagggccgccgtggacgcgctctggtccaacgcagcgccaccggccgcgccctccggcatcatccgcatcgaggtgcccatcacgcagcgggtggacgccgtggagtggctgcacgcgcagaccacgctgccccgctgcttcttctcggcccgggcgccgttgcccgacgcgcccgccctcgccggcaacggcaacggcaacggcagtgtccatcggcagcagccggtgagtgtcgcgggcgtgggttcggcggtcttcttccgagggacggagcccttttctctagctgattggcgcgcaatcaagagatttcttccaagggactgtccactggtccgcgcatatggcgccatccgtttcgacgccacgagtgacgcttccgttgaatgggaggactacggctcattctacttcgttgttcctcaatatgttggtgcaggtcgagttcaatgagctcgaggagagctcagtcctcgcgacgaccatcgcgtgggacgactcgctctcatggacatggcacaacgccgtggaggagctccaatcgactctgcgaaaggtgttgcgcgttcctcgtcgtccggttttttaaccgtctgctagaagactgtaacagcctgtagtactttttttccctcagatatcgccttgctcttctgttcaagcgaacaaggccagcctacagacagccatcgtaagtctcaatcatgtcccgaccaaggcgtcttgggatcttgcagttactaaagctctccatatgatcaagggcaggcaaagagaattggtaaaggttgtactggcaaggtgtagcagatacattactgacacttgcattgaccctgtggaactgctggcttgcttgaaggctgagggccaaaatgcttatcaattctgcatacagccaccgggtgctcctgcgtttgtcggaaatagcccagagcaactatttcatcggaagtacttgaacatttccagcgaggctctagctggtactcgggcaagagggaagacaagggcagatgactttcaaatcggtcaggatttgcttctaagtagcaaagaggacatcgaattcactatagtacgggacagcatcaagaacaagctggagatgatctgtgatgaggtggttgtccatcccagcaaggctctgcggaaacttccaagagtccagcatctgtcagcgcagttagctgcgcgaataaggaacgaagatgatgaggtgacctatgacaaaacttctactacttgagttgggtgaacatcatataaggtaacgatagcaacttgtgctggcgatgcagtttgagattctaaacaccctccatccgagtccagctgtttgtggcttgcccactgaagaggcacgccaattcatacgggattgtgaaatttttgaccgtggaatgtatgctggtcctgttggctggcttggaggagctgagtgcgagttcgctgtcgggattagatcagcgttacttggaaaaggtcacagcactctggtgtacgccggtgcggggatcgttgaaggtacaaacccatcttttgaatgggatgagcttgatctcaaagcatctcagtttgcaaagctgttgcggtaccaagaacgacctattcgctaccaagaggctgaaaatctgggaacggtgatctgaatagagaagtacagaagaaactagaaagtcatcacaaagttcggcattcatttagcgagttatttatacaattgtttgtttgatatagtaagctagaagggggattcagttggatttgtgtaattatggaatccagaacagcggcagtgctgaaaaatacattgattgaacctgaatgggaaattgttcaatgtaacaaaaatatgtttacaacataaactatttgattgaatcagtgcgtgaatgtgac

SEQ ID NO: 65710 - DNA, 6917 bp, Zea Mays
tccagcagcattgcctgccactctgctggtctgtctgccctctgcccctgcatgcctgccccggaatgcgtcggttcacatgatccaattcttttgcgcgatccgcggggttctccgacgaccttttcatcgtccccccctccgcccctccccggttccgatcactctctcccagtcaacgcaccaccactaaataacgcactctctcccgagtccgatcccaactcaacccaaggcagtctcactgacagagtgtgtcgaccgacgacctgatctcggtcgatcgagacagagagagaacaacgacgagaatcatgcagagactgcccacggcaacggccgccggcgccggcatgacgtcgttgctggtggtgctgctgctcgtctcagtcttgccgggcgccagtggtgccgactctgggccgctcgacggcaggaagatggtgttcgccggggagaccgcaggagtacttgcccgctattccttcaacaaggacgcgaatgtcgaaacggcatcaccgccgccgccggcgttggccggttcggcggcgcagttccgtgggcaggcgcagctcccgcgcttcgccgcgccgcgccgctacgacctgcgcctgcgccccgacctcgtcacctgcacattctcgggcactgctgccgtcaccgtcgctgtctccgcgccaacccgcttcctcgtcctcaactctgctgacctctcaatcgacagcgcctccatccgtttccgggatttggcgcctaaggaggtggtgtttttcgcggacgacgagatcctggtgctcggattctccaaggacctggtgctcggtgagggcgtgctcagtatgaagttcaacggcacgctcaacgaccagatgagggggttctaccggagcaagtaccagtataagggaaagatgaagaatatggcagtgacacaatttgagtctgtggatgctcggcggtgcttcccatgctgggatgagcctgcattcaaggctaagttcaagctaacacttgaagtaaatgttgggatggtggcattgtccaatatgccaatagctaatcagacagttgctggtcctatcaggactgttcactatgtggaatcacctcttatgtctacttatttagtggctatagttattggtttgtttgaatatatagagggtgtaacaccagaagttgcaaagtcgtatgtggagcatgccttggtcgtgctagtgttgagcatgtcgtgctgcagtggtcggtaggtgtgtccatgccattgagtacaacatagttggtagacagtataacaacttgtactttataatacctttgggtacacccaccaccataggcgtgattacaatgacacctgcacctgcacatctaatatagtggtattggttcgcttgcgccacgagcattgatgccttttgaccataacatcgaccataacattgctttaaatatgatgtacaagagccttctctcaacagctaggagtcacgtgattgatcgggtcagagtcgcacgaggcaccggtgtcgtcacacgacactgggctgtacaacatgtggccttcctgcctcgtgggtgtcttggagagttggaggatcctggcgtgagggcctccggtcctgcagggctccaggatctgccgcttctagggcttggcctaatggtttccaagctacatgtccaatgatgttgagctagcactagtcggacccactacaggtcttccttcatgtggcaaaatttctcggaggacgttttgccagtattaggggattgaaggaccggtgaggcgactagagggggggggtggtgaatgggagcccctaaaaatttctcaatcaagagcttgtggcttgattccccgacccaatccaacctccggggacaccaaaaacacttctcaaaagaatagctcaaccgcgaattgattgattgctcctaccaagttccagagaggaataagagctcaaatggacaaaagaacttgatttggaacccaaactttcaaaagaaactccaaagaacaccctcaaggaccaccagaagttctgggaaaagtccgaaaaaatcgtcgagaagtagtgccgctcgacaaaattttgtcagaacgacttcaaattttgcaggcatcaagatacgagggagtagaggtgaaccgtgaagtttgagcaagaaaggatcaaagtaccttgcgcgacagtgcccgatagaggagcggcagcgccgcttgggcaaaaatgcttagaacctcttcaaactttacagacaatttgcgtagagggaaggaagtctatccgtgaagtatgaacgtgagctactcaaaacttcaagcgcagattcaaaatctcagttgtgattggggttttgttggggttttctcaaatgaactcaaactgaggaagaatgaaacttgcccatgatctgctcaaacctgagacttaaaatgatcaagggatggtcttccaacagttggtgtccccaaaacaaactcccaacacaaagggaaagaacacaagagcaaaatgactcagaaacttcatccaagacaaaaactgagattgagagccaacaaaacctgtgggcgggactggccaccctttatcagattaaacaatgaagattacaaaatcacagacgaagagttcaaatccctgtggacctctagctacaaagctagagctattctaggaattgaaaacaaatactgctaaaactctaagccaaagagatggttataataacagcccacccatctatttatagagggttattactacttcctaaactacccctagatacgtagtgcctatccatttagccggggcgaaatggaccaactcctgggatattgatctgacggctacgcgctccacacgaagttgcttctcctcgacgcaccctccgtgatgacgccacatgccgcctccgattcctgtcggaaccgccaccaccgagttttgaggccgatctcggtcgaaaacccgccgtccgtagcgctggttgttttttcgaggatcagccactaaaccaccgtgagtattgcaccgcgtgcgcgtcccccacgtcctggacacgtgtcccgtcagtcctcgaccgcgccggcaacacgacctgctccaccacgtcctcgcgcaagtgcgttctcaggtgtcagccaccatggctagtcacccgacaatcctggtccctcggtcaagtcctagcgcggcaacgctcgttcttcaccgctcctggtccatcaacacgaacccgcatgtccttcaccttcggcatcgaccactgtccctgtgctccacacctgcacaccacaaaccgaaagacatggttgcacacacataatcacgcctcgtgtagtccacgactcaacctgagacactacacgttgacaatcactcatcatcatagttgtcaaggcgtcgccttagcgtcgcctaagcgctaaggcgaggcttaggtccaaggcgtcctgctcgccttactttcttggctagggcgtcgccctagcgcttcataggaagacaaggcattgccctgcagacgcgtttggccggattgtaaagttttccactccccaaacccttatgttcgctgctgttagctgtccacgtactagactcgcggttagggcttcacgtgagattcgggcggcggcggcggccccctaccgcgagcccgcaacctctccctacccggcgaagtcctcttgccctgctccctggtgaggctccgccccctcccccttccgcggtcagtgatggagagcacaggctctgctctcgcttctgtgcctgtggattcaaacactgaccctatggcagatccaaagcgcagagcgaagtctaatgatcctagatggaactatggatattggatagagattgggaatcgagataaggtcacatgcaacctttgcaagaccgtgacaatgggaggaatcaagaggttaaaagaacatcttgctggtggttatgcggacacattaatgtgttctaagactacaactgagattagaaaagaagtgaaggcatatttggacaagaacaagaggactaggcctactttccttgatgatgatgatcatgatggtcaggggcagcaaggcgaagaggattccaccacatctatgcaacaacctagctcggggacaactgccaaaaggaagagagctgcatttcagtttagaacaactgcacagccacagacatcaaacaaggaaaagaaaaagggaaaattgcaaccatgcttcgaagaactactgaacaagttgtggatgagaggcgctcctcagggtcacaccaccaaaccaccatggaagcatgcactaagtctaaggctgacaaagattatgtcaacaagcaatgagctatgtagttctatgagtgtggtgtaccttttaatgccattaattctagacagtttcacattgcttgtgaggccactgctcaacatggtactgaatatgttcctcctagtattcatgaggcatggaaggatccttagtggaatgagggagcaaacaggtggcatggacctagttagacctggagccactaggtttgtcacttgcttccttactttgaagagcctacataagcatagaaatcatttgaaggagctaagtagctactttaatgatgtgcttgaaagaatggaaccggatgatgctattcggtctaagattgatgaatttgcaatgcattctgaggaacaatgtagccctatcttctcaagcaaattggcacttgcaaacattgaaacaaaaagccctcatgcacacaaaaaggaggaatcgattgctaacaaaaggctaaatgacttagtctttgtatcatacaaccggaagatgcaaaataggttccaaaagaggagggagacgggtggcacaagttatgacccattagtgcttgacgattttgattgggacaatgagtgggtacactcatcggttgtacatgctggtagggatgatgatgagcataacttgacatgggaacaagttgatgaagccattagagcatctgagtcccttcgaggccgcaactttcaagacaagctcatgagtaatctagctgtaaattctttctttccgcaatggaatatctggacacaatttcttgatgacacaaccgctggtctcaaattggattcacttgaagagtctcaccctattgagaaagcgttggcttcatatataagaaaatttgcctactcaaatgctaaaaccgaggacctttgggctgttcttgaagagaattctggtgaacctatcaagaatatgatgactacatggacaaagcaacaagggtaccctgttattaatgcaaagcttcaagggaattatctggaacttgaacaggcacagtttttgttagatgggtcctctggccccagaatgtggattgttcctataactgcagactgtggttcatattatacacagaaaaaaattctactgaaaggcaaaagtgataggctggatataagagacattgcttcacagtgtggtaaccaagagaagggtggaaacttttggattaagttgaacattaatcaaacaggattttatagagtccaatatgacgataaacttgcagctgcacttcaaaatgcattgcaggccaagaagctgtctgtaatggataaaattggcattgtggaagattcactggccttatctatggcctgcaaacaaaccttaacatcgttgctacgtttactgtatgcttaccgcgaggaggctgattacagtgttctttcacacataaatactgcgagtttaagtattgctaaaatatcggttgatgctactcctggattggtcggtgacatcaaacaacttctgatcaagcttcttctgccacctgctgtaaaattaggttgggacctcaagaatggtgagagccacctggactcgttgcttagaccagtgctcttggttgctcttgtcaaacttgggcatgataagagtataaatgagggagctaggcgtttcagtatctttgtacatgatcggaacacttctcttcttcgtcctgataccagaaaggctgcatacctagctgcaatgcagaatgtaactgcttcatacagatctgcttataatgatcttctgaaagtctacagggagtcagatgaagcagaggaaagggggcgtgtcctaagcacactgtgcttttgtaaggacgagaatattgttcttgaatcactgaatcttctttttaccaatgagtttcgcaagcaagatgcatattatgtacttcaaggtcttgacgtggagacgcgtgataccgcatgggtgtggttgaaggataactgggatcgtgtgacaaggaaatacggggacacacaagcaggaggttttatcagatacgtcgtcacattgttcacctccaacgagaaggcagcagagttctcccgcttcttcgcaacccgcaagaagcctgaattcgagagaacactaaagcagagccttgagaacgtccggatcagcgcaaggtggatccagggcatcaagagcgaaccgaggctcgctcaaacggtgcaggagctgctgcgtagaccctgatctgccctcggttgagttgcaggtgtggccggaaataagctggtcgtagatgacatacgctttgtacattctcagtgtgtaaaaggttacctctcttagtgttcatggcagcatgcaaatgtaagctattgggttgaatttttagcccaagcatgtgctagcagtgatctcgtgtctaatttgagaagcgtagaggtttaaaagaagattaaagtgcatttccgattcttaaatttgtgcggctgtgttaatctgatctataaacttttaaaatatatctcttaaaggctcaatatttgttttggtgtttgttacgtgcaaacggacccaaacagatccggtaagtcca

SEQ ID NO: 65711 - DNA, 5245 bp, Zea Mays
caattcttttgcgcgatccgcggggttctccgacgaccttttcatcgtccccccctccgcccctccccggttccgatcactctctcccagtcaacgcaccaccactaaataacgcactctctcccgagtccgatcccaactcaacccaaggcagtctcactgacagagtgtgtcgaccgacgacctgatctcggtcgatcgagacagagagagaacaacgacgagaatcatgcagagactgcccacggcaacggccgccggcgccggcatgacgtcgttgctggtggtgctgctgctcgtctcagtcttgccgggcgccagtggtgccgactctgggccgctcgacggcaggaagatggtgttcgccggggagaccgcaggagtacttgcccgctattccttcaacaaggacgcgaatgtcgaaacggcatcaccgccgccgccggcgttggccggttcggcggcgcagttccgtgggcaggcgcagctcccgcgcttcgccgcgccgcgccgctacgacctgcgcctgcgccccgacctcgtcacctgcacattctcgggcactgctgccgtcaccgtcgctgtctccgcgccaacccgcttcctcgtcctcaactctgctgacctctcaatcgacagcgcctccatccgtttccgggatttggcgcctaaggaggtggtgtttttcgcggacgacgagatcctggtgctcggattctccaaggacctggtgctcggtgagggcgtgctcagtatgaagttcaacggcacgctcaacgaccagatgagggggttctaccggagcaagtaccagtataagggaaagatgaagaatatggcagtgacacaatttgagtctgtggatgctcggcggtgcttcccatgctgggatgagcctgcattcaaggctaagttcaagctaacacttgaagtaaatgttgggatggtggcattgtccaatatgccaatagctaatcagacagttgctggtcctatcaggactgttcactatgtggaatcacctcttatgtctacttatttagtggctatagttattggtttgtttgaatatatagagggtgtaacaccagaagttgcaaagtcgtatgtggagcatgccttggtcgtgctagtgttgagcatgtcgtgctgcagtggtcggtcagtgatggagagcacaggctctgctctcgcttctgtgcctgtggattcaaacactgaccctatggcagatccaaagcgcagagcgaagtctaatgatcctagatggaactatggatattggatagagattgggaatcgagataaggtcacatgcaacctttgcaagaccgtgacaatgggaggaatcaagaggttaaaagaacatcttgctggtggttatgcggacacattaatgtgttctaagactacaactgagattagaaaagaagtgaaggcatatttggacaagaacaagaggactaggcctactttccttgatgatgatgatcatgatggtcaggggcagcaaggcgaagaggattccaccacatctatgcaacaacctagctcggggacaactgccaaaaggaagagagctgcatttcagtttagaacaactgcacagccacagacatcaaacaaggaaaagaaaaagggaaaattgcaaccatgcttcgaagaactactgaacaagttgtggatgagaggcgctcctcagggtcacaccaccaaaccaccatggaagcatgcactaagtctaaggctgacaaagattatgtcaacaagcaatgagctatgtagttctatgagtgtggtgtaccttttaatgccattaattctagacagtttcacattgcttgtgaggccactgctcaacatggtactgaatatgttcctcctagtattcatgaggttaaagagcctttacttgctgaatgtgtcaaagatgtgactaacttgagggtttatcatgagttagcttggaagacttatggttgcacacatatgtcaaatggatggactgacaggaggggacatcagttgatcaactttcttgtgaacaatcctgaggggacttacttcttagagtctgttgatgcttcaagtgaagcacatagtgctactatgcatggtgatttgcttgagaagaggattgataatattggcagagacaaagtggttcaagtagtgacagataatggcgccaattataaggctgcaggcaagattctcatggatcgaattccaacattgttttggagtccttgtgcagctcattgcttggatctaatgctagaagatattggaaagtagaaagatttcaaggaaacaattgctctagccaaacgagtcaccacttttatttataggcatggaaggatccttagtggaatgagggagcaaacaggtggcatggacctagttagacctggagccactaggtttgtcacttgcttccttactttgaagagcctacataagcatagaaatcatttgaagggtgggaagggatgcatggaagtcaaacaagtagtcaaaaacagaggctgggaagggagtttatgacattgttctagcctcaatgttttggagcacagttgaagattgccttagagcttcagcaccacttcttattgtccttagggcgatcgatggtgatgagaagcttgccatggtggaagttgcaacactaatggatagtgcaaaagagaggataaagcttagctttacataaaaaaaagcaagctttgctaaaaagagtcttgagtattgttgagcgtcgatgggtgtcgcaaatggaccatccattgtatggtgctgcattgtatttgaatccgggaaaattctttgccattaaaaacaaaggagatgatatgtatgttgcagagctaagtagctactttaatgatgtgcttgaaagaatggaaccggatgatgctattcggtctaagattgatgaatttgcaatgcattctgaggaacaatgtagccctatcttctcaagcaaattggcacttgcaaacattgaaacaaaaagccctcgtttgcaaagcgtgtggctagtctatgtgcttcatcacccagttgtgagaggagttggagtacctttgaatttatgcacacaaaaaggaggaatcgattgctaacaaaaggctaaatgacttagtctttgtatcatacaaccggaagatgcaaaataggttccaaaagaggagggagacgggtggcacaagttatgacccattagtgcttgacgattttgattgggacaatgagtgggtacactcatcggttgtacatgctggtagggatgatgatgagcataacttgacatgggaacaagttgatgaagccattagagcatctgagtcccttcgaggccgcaactttcaagacaagctcatgagtaatctagctgtaaattctttctttccgcaatggaatatctggacacaatttcttgatgacacaaccgctggtctcaaattggattcacttgaagagtctcaccctattgagaaagcgttggcttcatatataagaaaatttgcctactcaaatgctaaaaccgaggacctttgggctgttcttgaagagaattctggtgaacctatcaagaatatgatgactacatggacaaagcaacaagggtaccctgttattaatgcaaagcttcaagggaattatctggaacttgaacaggcacagtttttgttagatgggtcctctggccccagaatgtggattgttcctataactgcagactgtggttcatattatacacagaaaaaaattctactgaaaggcaaaagtgataggctggatataagagacattgcttcacagtgtggtaaccaagagaagggtggaaacttttggattaagttgaacattaatcaaacaggattttatagagtccaatatgacgataaacttgcagctgcacttcaaaatgcattgcaggccaagaagctgtctgtaatggataaaattggcattgtggaagattcactggccttatctatggcctgcaaacaaaccttaacatcgttgctacgtttactgtatgcttaccgcgaggaggctgattacagtgttctttcacacataaatactgcgagtttaagtattgctaaaatatcggttgatgctactcctggattggtcggtgacatcaaacaacttctgatcaagcttcttctgccacctgctgtaaaattaggttgggacctcaagaatggtgagagccacctggactcgttgcttagaccagtgctcttggttgctcttgtcaaacttgggcatgataagagtataaatgagggagctaggcgtttcagtatctttgtacatgatcggaacacttctcttcttcgtcctgataccagaaaggctgcatacctagctgcaatgcagaatgtaactgcttcatacagatctgcttataatgatcttctgaaagtctacagggagtcagatgaagcagaggaaagggggcgtgtcctaagcacactgtgcttttgtaaggacgagaatattgttcttgaatcactgaatcttctttttaccaatgagtttcgcaagcaagatgcatattatgtacttcaaggtcttgacgtggagacgcgtgataccgcatgggtgtggttgaaggataactgggatcgtgtgacaaggaaatacggggacacacaagcaggaggttttatcagatacgtcgtcacattgttcacctccaacgagaaggcagcagagttctcccgcttcttcgcaacccgcaagaagcctgaattcgagagaacactaaagcagagccttgagaacgtccggatcagcgcaaggtggatccagggcatcaagagcgaaccgaggctcgctcaaacggtgcaggagctgctgcgtagaccctgatctgccctcggttgagttgcaggtgtggccggaaataagctggtcgtagatgacatacgctttgtacattctcagtgtgtaaaaggttacctctcttagtgttcatggcagcatgcaaatgtaagctattgggttgaatttttagcccaagcatgtgctagcagtgatctcgtgtctaatttgagaagcgtagaggtttaaaagaagattaaagtgcatttccgattcttaaatttgtgcggctgtgttaatctgatctataaacttttaaaatatatctcttaaaggctcaatatttgttttggtgtttgttacgtgcaaacggacccaaacagatccggtaagtcca

SEQ ID NO: 65712 - DNA, 4647 bp, Zea Mays
ccgatcactctctcccagtcaacgcaccaccactaaataacgcactctctcccgagtccgatcccaactcaacccaaggcagtctcactgacagagtgtgtcgaccgacgacctgatctcggtcgatcgagacagagagagaacaacgacgagaatcatgcagagactgcccacggcaacggccgccggcgccggcatgacgtcgttgctggtggtgctgctgctcgtctcagtcttgccgggcgccagtggtgccgactctgggccgctcgacggcaggaagatggtgttcgccggggagaccgcaggagtacttgcccgctattccttcaacaaggacgcgaatgtcgaaacggcatcaccgccgccgccggcgttggccggttcggcggcgcagttccgtgggcaggcgcagctcccgcgcttcgccgcgccgcgccgctacgacctgcgcctgcgccccgacctcgtcacctgcacattctcgggcactgctgccgtcaccgtcgctgtctccgcgccaacccgcttcctcgtcctcaactctgctgacctctcaatcgacagcgcctccatccgtttccgggatttggcgcctaaggaggtggtgtttttcgcggacgacgagatcctggtgctcggattctccaaggacctggtgctcggtgagggcgtgctcagtatgaagttcaacggcacgctcaacgaccagatgagggggttctaccggagcaagtaccagtataagggaaagatgaagaatatggcagtgacacaatttgagtctgtggatgctcggcggtgcttcccatgctgggatgagcctgcattcaaggctaagttcaagctaacacttgaagtaaatgttgggatggtggcattgtccaatatgccaatagctaatcagacagttgctggtcctatcaggactgttcactatgtggaatcacctcttatgtctacttatttagtggctatagttattggtttgtttgaatatatagagggtgtaacaccagaaggtcagtgatggagagcacaggctctgctctcgcttctgtgcctgtggattcaaacactgaccctatggcagatccaaagcgcagagcgaagtctaatgatcctagatggaactatggatattggatagagattgggaatcgagataaggtcacatgcaacctttgcaagaccgtgacaatgggaggaatcaagaggttaaaagaacatcttgctggtggttatgcggacacattaatgtgttctaagactacaactgagattagaaaagaagtgaaggcatatttggacaagaacaagaggactaggcctactttccttgatgatgatgatcatgatggtcaggggcagcaaggcgaagaggattccaccacatctatgcaacaacctagctcggggacaactgccaaaaggaagagagctgcatttcagtttagaacaactgcacagccacagacatcaaacaaggaaaagaaaaagggaaaattgcaaccatgcttcgaagaactactgaacaagttgtggatgagaggcgctcctcagggtcacaccaccaaaccaccatggaagcatgcactaagtctaaggctgacaaagattatgtcaacaagcaatgagctatgtagttctatgagtgtggtgtaccttttaatgccattaattctagacagtttcacattgcttgtgaggccactgctcaacatggtactgaatatgttcctcctagtattcatgaggttaaagagcctttacttgctgaatgtgtcaaagatgtgactaacttgagggtttatcatgagttagcttggaagacttatggttgcacacatatgtcaaatggatggactgacaggaggggacatcagttgatcaactttcttgtgaacaatcctgaggggacttacttcttagagtctgttgatgcttcaagtgaagcacatagtgctactatgcatggtgatttgcttgagaagaggattgataatattggcagagacaaagtggttcaagtagtgacagataatggcgccaattataaggctgcaggcaagattctcatggatcgaattccaacattgttttggagtccttgtgcagctcattgcttggatctaatgctagaagatattggaaagtagaaagatttcaaggaaacaattgctctagccaaacgagtcaccacttttatttataggcatggaaggatccttagtggaatgagggagcaaacaggtggcatggacctagttagacctggagccactaggtttgtcacttgcttccttactttgaagagcctacataagcatagaaatcatttgaaggagctaagtagctactttaatgatgtgcttgaaagaatggaaccggatgatgctattcggtctaagattgatgaatttgcaatgcattctgaggaacaatgtagccctatcttctcaagcaaattggcacttgcaaacattgaaacaaaaagccctcatgcacacaaaaaggaggaatcgattgctaacaaaaggctaaatgacttagtctttgtatcatacaaccggaagatgcaaaataggttccaaaagaggagggagacgggtggcacaagttatgacccattagtgcttgacgattttgattgggacaatgagtgggtacactcatcggttgtacatgctggtagggatgatgatgagcataacttgacatgggaacaagttgatgaagccattagagcatctgagtcccttcgaggccgcaactttcaagacaagctcatgagtaatctagctgtaaattctttctttccgcaatggaatatctggacacaatttcttgatgacacaaccgctggtctcaaattggattcacttgaagagtctcaccctattgagaaagcgttggcttcatatataagaaaatttgcctactcaaatgctaaaaccgaggacctttgggctgttcttgaagagaattctggtgaacctatcaagaatatgatgactacatggacaaagcaacaagggtaccctgttattaatgcaaagcttcaagggaattatctggaacttgaacaggcacagtttttgttagatgggtcctctggccccagaatgtggattgttcctataactgcagactgtggttcatattatacacagaaaaaaattctactgaaaggcaaaagtgataggctggatataagagacattgcttcacagtgtggtaaccaagagaagggtggaaacttttggattaagttgaacattaatcaaacaggattttatagagtccaatatgacgataaacttgcagctgcacttcaaaatgcattgcaggccaagaagctgtctgtaatggataaaattggcattgtggaagattcactggccttatctatggcctgcaaacaaaccttaacatcgttgctacgtttactgtatgcttaccgcgaggaggctgattacagtgttctttcacacataaatactgcgagtttaagtattgctaaaatatcggttgatgctactcctggattggtcggtgacatcaaacaacttctgatcaagcttcttctgccacctgctgtaaaattaggttgggacctcaagaatggtgagagccacctggactcgttgcttagaccagtgctcttggttgctcttgtcaaacttgggcatgataagagtataaatgagggagctaggcgtttcagtatctttgtacatgatcggaacacttctcttcttcgtcctgataccagaaaggctgcatacctagctgcaatgcagaatgtaactgcttcatacagatctgcttataatgatcttctgaaagtctacagggagtcagatgaagcagaggaaagggggcgtgtcctaagcacactgtgcttttgtaaggacgagaatattgttcttgaatcactgaatcttctttttaccaatgagtttcgcaagcaagatgcatattatgtacttcaaggtcttgacgtggagacgcgtgataccgcatgggtgtggttgaaggataactgggatcgtgtgacaaggaaatacggggacacacaagcaggaggttttatcagatacgtcgtcacattgttcacctccaacgagaaggcagcagagttctcccgcttcttcgcaacccgcaagaagcctgaattcgagagaacactaaagcagagccttgagaacgtccggatcagcgcaaggtggatccagggcatcaagagcgaaccgaggctcgctcaaacggtgcaggagctgctgcgtagaccctgatctgccctcggttgagttgcaggtgtggccggaaataagctggtcgtagatgacatacgctttgtacattctcagtgtgtaaaaggttacctctcttagtgttcatggcagcatgcaaatgtaagctattgggttgaatttttagcccaagcatgtgctagcagtgatctcgtgtctaatttgagaagcgtagaggtttaaaagaagattaaagtgcatttccgattcttaaatttgtgcggctgtgttaatctgatctataaacttttaaaatatatctcttaaaggctcaatatttgttttggtgtttgttacgtgcaaacggacccaaacagatccggtaagtcca

SEQ ID NO: 65713 - DNA, 7863 bp, Zea Mays
caacgcaccaccactaaataacgcactctctcccgagtccgatcccaactcaacccaaggcagtctcactgacagagtgtgtcgaccgacgacctgatctcggtcgatcgagacagagagagaacaacgacgagaatcatgcagagactgcccacggcaacggccgccggcgccggcatgacgtcgttgctggtggtgctgctgctcgtctcagtcttgccgggcgccagtggtgccgactctgggccgctcgacggcaggaagatggtgttcgccggggagaccgcaggagtacttgcccgctattccttcaacaaggacgcgaatgtcgaaacggcatcaccgccgccgccggcgttggccggttcggcggcgcagttccgtgggcaggcgcagctcccgcgcttcgccgcgccgcgccgctacgacctgcgcctgcgccccgacctcgtcacctgcacattctcgggcactgctgccgtcaccgtcgctgtctccgcgccaacccgcttcctcgtcctcaactctgctgacctctcaatcgacagcgcctccatccgtttccgggtacgtacgcgctgaccttactatctcgaaggaagaaaaatgttgccatatatttgtccttgccttggcgccaaatatcatctcggatgccggttgccggtccggggccggtttttgaaggatttggcgcctaaggaggtggtgtttttcgcggacgacgagatcctggtgctcggattctccaaggacctggtgctcggtgagggcgtgctcagtatgaagttcaacggcacgctcaacgaccagatgagggggttctaccggagcaagtaccagtataagggaaagatgaagaatatggcagtgacacaatttgagtctgtggatgctcggcggtgcttcccatgctgggatgagcctgcattcaaggctaagttcaagctaacacttgaagtaaatgttgggatggtggcattgtccaatatgccaatagctaatcagacagttgctggtcctatcaggactgttcactatgtggaatcacctcttatgtctacttatttagtggctatagttattggtttgtttgaatatatagagggtgtaacaccagaagttgcaaagtcgtatgtggagcatgccttggtcgtgctagtgttgagcatgtcgtgctgcagtggtcggtaggtgtgtccatgccattgagtacaacatagttggtagacagtataacaacttgtactttataatacctttgggtacacccaccaccataggcgtgattacaatgacacctgcacctgcacatctaatatagtggtattggttcgcttgcgccacgagcattgatgccttttgaccataacatcgaccataacattgctttaaatatgatgtacaagagccttctctcaacagctaggagtcacgtgattgatcgggtcagagtcgcacgaggcaccggtgtcgtcacacgacactgggctgtacaacatgtggccttcctgcctcgtgggtgtcttggagagttggaggatcctggcgtgagggcctccggtcctgcagggctccaggatctgccgcttctagggcttggcctaatggtttccaagctacatgtccaatgatgttgagctagcactagtcggacccactacaggtcttccttcatgtggcaaaatttctcggaggacgttttgccagtattaggggattgaaggaccggtgaggcgactagagggggggggtggtgaatgggagcccctaaaaatttctcaatcaagagcttgtggcttgattccccgacccaatccaacctccggggacaccaaaaacacttctcaaaagaatagctcaaccgcgaattgattgattgctcctaccaagttccagagaggaataagagctcaaatggacaaaagaacttgatttggaacccaaactttcaaaagaaactccaaagaacaccctcaaggaccaccagaagttctgggaaaagtccgaaaaaatcgtcgagaagtagtgccgctcgacaaaattttgtcagaacgacttcaaattttgcaggcatcaagatacgagggagtagaggtgaaccgtgaagtttgagcaagaaaggatcaaagtaccttgcgcgacagtgcccgatagaggagcggcagcgccgcttgggcaaaaatgcttagaacctcttcaaactttacagacaatttgcgtagagggaaggaagtctatccgtgaagtatgaacgtgagctactcaaaacttcaagcgcagattcaaaatctcagttgtgattggggttttgttggggttttctcaaatgaactcaaactgaggaagaatgaaacttgcccatgatctgctcaaacctgagacttaaaatgatcaagggatggtcttccaacagttggtgtccccaaaacaaactcccaacacaaagggaaagaacacaagagcaaaatgactcagaaacttcatccaagacaaaaactgagattgagagccaacaaaacctgtgggcgggactggccaccctttatcagattaaacaatgaagattacaaaatcacagacgaagagttcaaatccctgtggacctctagctacaaagctagagctattctaggaattgaaaacaaatactgctaaaactctaagccaaagagatggttataataacagcccacccatctatttatagagggttattactacttcctaaactacccctagatacgtagtgcctatccatttagccggggcgaaatggaccaactcctgggatattgatctgacggctacgcgctccacacgaagttgcttctcctcgacgcaccctccgtgatgacgccacatgccgcctccgattcctgtcggaaccgccaccaccgagttttgaggccgatctcggtcgaaaacccgccgtccgtagcgctggttgttttttcgaggatcagccactaaaccaccgtgagtattgcaccgcgtgcgcgtcccccacgtcctggacacgtgtcccgtcagtcctcgaccgcgccggcaacacgacctgctccaccacgtcctcgcgcaagtgcgttctcaggtgtcagccaccatggctagtcacccgacaatcctggtccctcggtcaagtcctagcgcggcaacgctcgttcttcaccgctcctggtccatcaacacgaacccgcatgtccttcaccttcggcatcgaccactgtccctgtgctccacacctgcacaccacaaaccgaaagacatggttgcacacacataatcacgcctcgtgtagtccacgactcaacctgagacactacacgttgacaatcactcatcatcatagttgtcaaggcgtcgccttagcgtcgcctaagcgctaaggcgaggcttaggtccaaggcgtcctgctcgccttactttcttggctagggcgtcgccctagcgcttcataggaagacaaggcattgccctgcagacgcgtttggccggattgtaaagttttccactccccaaacccttatgttcgctgctgttagctgtccacgtactagactcgcggttagggcttcacgtgagattcgggcggcggcggcggccccctaccgcgagcccgcaacctctccctacccggcgaagtcctcttgccctgctccctggtgaggctccgccccctcccccttccgcggtgagctccccctccccctcagctgatctgctctctgcctctttatccagttcagttgtttagttgttcccaattacctttgtaggtcagtgatggagagcacaggctctgctctcgcttctgtgcctgtggattcaaacactgaccctatggcagatccaaagcgcagagcgaagtctaatgatcctagatggaactatggatattggatagagattgggaatcgagataaggtcacatgcaacctttgcaagaccgtgacaatgggaggaatcaagaggttaaaagaacatcttgctggtggttatgcggacacattaatgtgttctaagactacaactgagattagaaaagaagtgaaggcatatttggacaagaacaagaggactaggcctactttccttgatgatgatgatcatgatggtcaggggcagcaaggcgaagaggattccaccacatctatgcaacaacctagctcggggacaactgccaaaaggaagagagctgcatttcagtttagaacaactgcacagccacagacatcaaacaaggaaaagaaaaagggaaaattgcaaccatgcttcgaagaactactgaacaagttgtggatgagaggcgctcctcagggtcacaccaccaaaccaccatggaagcatgcactaagtctaaggctgacaaagattatgtcaacaagcaatgagctatgtagttctatgagtgtggtgtaccttttaatgccattaattctagacagtttcacattgcttgtgaggccactgctcaacatggtactgaatatgttcctcctagtattcatgaggttaaagagcctttacttgctgaatgtgtcaaagatgtgactaacttgagggtttatcatgagttagcttggaagacttatggttgcacacatatgtcaaatggatggactgacaggaggggacatcagttgatcaactttcttgtgaacaatcctgaggggacttacttcttagagtctgttgatgcttcaagtgaagcacatagtgctactatgcatggtgatttgcttgagaagaggattgataatattggcagagacaaagtggttcaagtagtgacagataatggcgccaattataaggctgcaggcaagattctcatggatcgaattccaacattgttttggagtccttgtgcagctcattgcttggatctaatgctagaagatattggaaagtagaaagatttcaaggaaacaattgctctagccaaacgagtcaccacttttatttataggcatggaaggatccttagtggaatgagggagcaaacaggtggcatggacctagttagacctggagccactaggtttgtcacttgcttccttactttgaagagcctacataagcatagaaatcatttgaagggtgggaagggatgcatggaagtcaaacaagtagtcaaaaacagaggctgggaagggagtttatgacattgttctagcctcaatgttttggagcacagttgaagattgccttagagcttcagcaccacttcttattgtccttagggcgatcgatggtgatgagaagcttgccatggtggaagttgcaacactaatggatagtgcaaaagagaggataaagcttagctttacataaaaaaaagcaagctttgctaaaaagagtcttgagtattgttgagcgtcgatgggtgtcgcaaatggaccatccattgtatggtgctgcattgtatttgaatccgggaaaattctttgccattaaaaacaaaggagatgatatgtatgttgcagagctaagtagctactttaatgatgtgcttgaaagaatggaaccggatgatgctattcggtctaagattgatgaatttgcaatgcattctgaggaacaatgtagccctatcttctcaagcaaattggcacttgcaaacattgaaacaaaaagccctcgtttgcaaagcgtgtggctagtctatgtgcttcatcacccagttgtgagaggagttggagtacctttgaatttatgcacacaaaaaggaggaatcgattgctaacaaaaggctaaatgacttagtctttgtatcatacaaccggaagatgcaaaataggttccaaaagaggagggagacgggtggcacaagttatgacccattagtgcttgacgattttgattgggacaatgagtgggtacactcatcggttgtacatgctggtagggatgatgatgagcataacttgacatgggaacaagttgatgaagccattagagcatctgagtcccttcgaggccgcaactttcaagacaagctcatgagtaatctagctgtaaattctttctttccgcaatggaatatctggacacaatttcttgatgacacaaccgctggtctcaaattggattcacttgaagagtctcaccctattgagaaagcgttggcttcatatataagaaaatttgcctactcaaatgctaaaaccgaggacctttgggctgttcttgaagagaattctggtgaacctatcaagaatatgatgactacatggacaaagcaacaagggtaccctgttattaatgcaaagcttcaagggaattatctggaacttgaacaggcacagtttttgttagatgggtcctctggccccagaatgtggattgttcctataactgcagactgtggttcatattatacacagaaaaaaattctactgaaaggcaaaagtgataggctggatataagagacattgcttcacagtgtggtaaccaagagaagggtggaaacttttggattaagttgaacattaatcaaacaggattttatagagtccaatatgacgataaacttgcagctgcacttcaaaatgcattgcaggccaagaagctgtctgtaatggataaaattggcattgtggaagattcactggccttatctatggcctgcaaacaaaccttaacatcgttgctacgtttactgtatgcttaccgcgaggaggctgattacagtgttctttcacacataaatactgcgagtttaagtattgctaaaatatcggttgatgctactcctggattggtcggtgacatcaaacaacttctgatcaagcttcttctgccacctgctgtaaaattaggttgggacctcaagaatggtgagagccacctggactcgttgcttagaccagtgctcttggttgctcttgtcaaacttgggcatgataagagtataaatgagggagctaggcgtttcagtatctttgtacatgatcggaacacttctcttcttcgtcctgataccagaaaggctgcatacctagctgcaatgcagaatgtaactgcttcatacagatctgcttataatgatcttctgaaagtctacagggagtcagatgaagcagaggaaagggggcgtgtcctaagcacactgtgcttttgtaaggacgagaatattgttcttgaatcactgaatcttctttttaccaatgagtttcgcaagcaagatgcatattatgtacttcaaggtcttgacgtggagacgcgtgataccgcatgggtgtggttgaaggataactgggatcgtgtgacaaggaaatacggggacacacaagcaggaggttttatcagatacgtcgtcacattgttcacctccaacgagaaggcagcagagttctcccgcttcttcgcaacccgcaagaagcctgaattcgagagaacactaaagcagagccttgagaacgtccggatcagcgcaaggtggatccagggcatcaagagcgaaccgaggctcgctcaaacggtgcaggagctgctgcgtagaccctgatctgccctcggttgagttgcaggtgtggccggaaataagctggtcgtagatgacatacgctttgtacattctcagtgtgtaaaaggttacctctcttagtgttcatggcagcatgcaaatgtaagctattgggttgaatttttagcccaagcatgtgctagcagtgatctcgtgtctaatttgagaagcgtagaggtttaaaagaagattaaagtgcatttccgattcttaaatttgtgcggctgtgttaatctgatctataaacttttaaaatatatctcttaaaggctcaatatttgttttggtgtttgttacgtgcaaacggacccaaacagatccggtaagtcca

SEQ ID NO: 65714 - DNA, 2047 bp, Zea Mays
aagggagaactatgggcttgttactttccgcgaagtggctttgctttttgatgaggagtcttcaatggaatccagcaaacagagtattgcaattactgtagcacatgagctggctcatcagtggtttggcaatcttgtaaccatggagtggtggacccacttgtggctaaatgaaggttttgctacatggatgagtaatctagctgtaaattctttctttccgcaatggaatatctggacacaatttcttgatgacacaaccgctggtctcaaattggattcacttgaagagtctcaccctattgagaagcgttggcttcatatataagaaaatttgcctactcaaatgctaaaaccgaggacctttgggctgttcttgaagagaattctggtgaacctatcaagaatatgatgactacatggacaaagcaacaagggtaccctgttattaatgcaaagcttcaagggaattatctggaacttgaacaggcacagtttttgttagatgggtcctctggccccagaatgtggattgttcctataactgcagactgtggttcatattatacacagaaaaaaattctactgaaaggcaaaagtgataggctggatataagagacattgcttcacagtgtggtaaccaagagaagggtggaaacttttggattaagttgaacattaatcaaacaggattttatagagtccaatatgacgataaacttgcagctgcacttcaaaatgcattgcaggccaagaagctgtctgtaatggataaaattggcattgtggaagattcactggccttatctatggcctgcaaacaaaccttaacatcgttgctacgtttactgtatgcttaccgcgaggaggctgattacagtgttctttcacacataaatactgcgagtttaagtattgctaaaatatcggttgatgctactcctggattggtcggtgacatcaaacaacttctgatcaagcttcttctgccacctgctgtaaaattaggttgggacctcaagaatggtgagagccacctggactcgttgcttagaccagtgctcttggttgctcttgtcaaacttgggcatgataagagtataaatgagggagctaggcgtttcagtatctttgtacatgatcggaacacttctcttcttcgtcctgataccagaaaggctgcatacctagctgcaatgcagaatgtaactgcttcatacagatctgcttataatgatcttctgaaagtctacagggagtcagatgaagcagaggaaagggggcgtgtcctaagcacactgtgcttttgtaaggacgagaatattgttcttgaatcactgaatcttctttttaccaatgagtttcgcaagcaagatgcatattatgtacttcaaggtcttgacgtggagacgcgtgataccgcatgggtgtggttgaaggataactgggatcgtgtgacaaggaaatacggggacacacaagcaggaggttttatcagatacgtcgtcacattgttcacctccaacgagaaggcagcagagttctcccgcttcttcgcaacccgcaagaagcctgaattcgagagaacactaaagcagagccttgagaacgtccggatcagcgcaaggtggatccagggcatcaagagcgaaccgaggctcgctcaaacggtgcaggagctgctgcgtagaccctgatctgccctcggttgagttgcaggtgtggccggaaataagctggtcgtagatgacatacgctttgtacattctcagtgtgtaaaaggttacctctcttagtgttcatggcagcatgcaaatgtaagctattgggttgaatttttagcccaagcatgtgctagcagtgatctcgtgtctaatttgagaagcgtagaggtttaaaagaagattaaagtgcatttccgattcttaaatttgtgcggctgtgttaatctgatctataaacttttaaaatatatctcttaaaggctcaatatttgttttggtgtttgttacgtgcaaacggacccaaacagatccggtaagtcca

SEQ ID NO: 65715 - DNA, 2048 bp, Zea Mays
aagggagaactatgggcttgttactttccgcgaagtggctttgctttttgatgaggagtcttcaatggaatccagcaaacagagtattgcaattactgtagcacatgagctggctcatcagtggtttggcaatcttgtaaccatggagtggtggacccacttgtggctaaatgaaggttttgctacatggatgagtaatctagctgtaaattctttctttccgcaatggaatatctggacacaatttcttgatgacacaaccgctggtctcaaattggattcacttgaagagtctcaccctattgagaaagcgttggcttcatatataagaaaatttgcctactcaaatgctaaaaccgaggacctttgggctgttcttgaagagaattctggtgaacctatcaagaatatgatgactacatggacaaagcaacaagggtaccctgttattaatgcaaagcttcaagggaattatctggaacttgaacaggcacagtttttgttagatgggtcctctggccccagaatgtggattgttcctataactgcagactgtggttcatattatacacagaaaaaaattctactgaaaggcaaaagtgataggctggatataagagacattgcttcacagtgtggtaaccaagagaagggtggaaacttttggattaagttgaacattaatcaaacaggattttatagagtccaatatgacgataaacttgcagctgcacttcaaaatgcattgcaggccaagaagctgtctgtaatggataaaattggcattgtggaagattcactggccttatctatggcctgcaaacaaaccttaacatcgttgctacgtttactgtatgcttaccgcgaggaggctgattacagtgttctttcacacataaatactgcgagtttaagtattgctaaaatatcggttgatgctactcctggattggtcggtgacatcaaacaacttctgatcaagcttcttctgccacctgctgtaaaattaggttgggacctcaagaatggtgagagccacctggactcgttgcttagaccagtgctcttggttgctcttgtcaaacttgggcatgataagagtataaatgagggagctaggcgtttcagtatctttgtacatgatcggaacacttctcttcttcgtcctgataccagaaaggctgcatacctagctgcaatgcagaatgtaactgcttcatacagatctgcttataatgatcttctgaaagtctacagggagtcagatgaagcagaggaaagggggcgtgtcctaagcacactgtgcttttgtaaggacgagaatattgttcttgaatcactgaatcttctttttaccaatgagtttcgcaagcaagatgcatattatgtacttcaaggtcttgacgtggagacgcgtgataccgcatgggtgtggttgaaggataactgggatcgtgtgacaaggaaatacggggacacacaagcaggaggttttatcagatacgtcgtcacattgttcacctccaacgagaaggcagcagagttctcccgcttcttcgcaacccgcaagaagcctgaattcgagagaacactaaagcagagccttgagaacgtccggatcagcgcaaggtggatccagggcatcaagagcgaaccgaggctcgctcaaacggtgcaggagctgctgcgtagaccctgatctgccctcggttgagttgcaggtgtggccggaaataagctggtcgtagatgacatacgctttgtacattctcagtgtgtaaaaggttacctctcttagtgttcatggcagcatgcaaatgtaagctattgggttgaatttttagcccaagcatgtgctagcagtgatctcgtgtctaatttgagaagcgtagaggtttaaaagaagattaaagtgcatttccgattcttaaatttgtgcggctgtgttaatctgatctataaacttttaaaatatatctcttaaaggctcaatatttgttttggtgtttgttacgtgcaaacggacccaaacagatccggtaagtcca

SEQ ID NO: 65716 - DNA, 1972 bp, Zea Mays
gagaactatgggcttgttactttccgcgaagtggctttgctttttgatgaggagtcttcaatggaatccagcaaacagagtattgcaattactgtagcacatgagctggctcatcagtggtttggcaatcttgtaaccatggagtggtggacccacttgtggctaaatgaaggttttgctacatggatgagtaatctagctgtaaattctttctttccgcaatggaatatctggacacaatttcttgatgacacaaccgctggtctcaaattggattcacttgaagagtctcaccctattgagaaagcgttggcttcatatataagaaaatttgcctactcaaatgctaaaaccgaggacctttgggctgttcttgaagagaattctggtgaacctatcaagaatatgatgactacatggacaaagcaacaagggtaccctgttattaatgcaaagcttcaagggaattatctggaacttgaacaggcacagtttttgttagatgggtcctctggccccagaatgtggattgttcctataactgcagactgtggttcatattatacacagaaaaaaattctactgaaaggcaaaagtgataggctggatataagagacattgcttcacagtgtggtaaccaagagaagggtggaaacttttggattaagttgaacattaatcaaacaggattttatagagtccaatatgacgataaacttgcagctgcacttcaaaatgcattgcaggccaagaagctgtctgtaatggataaaattggcattgtggaagattcactggccttatctatggcctgcaaacaaaccttaacatcgttgctacgtttactgtatgcttaccgcgaggaggctgattacagtgttctttcacacataaatactgcgagtttaagtattgctaaaatatcggttgatgctactcctggattggtcggtgacatcaaacaacttctgatcaagcttcttctgccacctgctgtaaaattaggttgggacctcaagaatggtgagagccacctggactcgttgcttagaccagtgctcttggttgctcttgtcaaacttgggcatgataagagtataaatgagggagctaggcgtttcagtatctttgtacatgatcggaacacttctcttcttcgtcctgataccagaaagggagtcagatgaagcagaggaaagggggcgtgtcctaagcacactgtgcttttgtaaggacgagaatattgttcttgaatcactgaatcttctttttaccaatgagtttcgcaagcaagatgcatattatgtacttcaaggtcttgacgtggagacgcgtgataccgcatgggtgtggttgaaggtaaagataactgggatcgtgtgacaaggaaatacggggacacacaagcaggaggttttatcagatacgtcgtcacattgttcacctccaacgagaaggcagcagagttctcccgcttcttcgcaacccgcaagaagcctgaattcgagagaacactaaagcagagccttgagaacgtccggatcagcgcaaggtggatccagggcatcaagagcgaaccgaggctcgctcaaacggtgcaggagctgctgcgtagaccctgatctgccctcggttgagttgcaggtgtggccggaaataagctggtcgtagatgacatacgctttgtacattctcagtgtgtaaaaggttacctctcttagtgttcatggcagcatgcaaatgtaagctattgggttgaatttttagcccaagcatgtgctagcagtgatctcgtgtctaatttgagaagcgtagaggtttaaaagaagattaaagtgcatttccgattcttaaatttgtgcggctgtgttaatctgatctataaacttttaaaatatatctcttaaaggctcaatatttgttttggtgtttgttacgtgcaaacggacccaaacagatccggtaagtcca

SEQ ID NO: 65717 - DNA, 2039 bp, Zea Mays
aactatgggcttgttactttccgcgaagtggctttgctttttgatgaggagtcttcaatggaatccagcaaacagagtattgcaattactgtagcacatgagctggctcatcagtggtttggcaatcttgtaaccatggagtggtggacccacttgtggctaaatgaaggttttgctacatggatgagtaatctagctgtaaattctttctttccgcaatggaatatctggacacaatttcttgatgacacaaccgctggtctcaaattggattcacttgaagagtctcaccctattgagaaagcgttggcttcatatataagaaaatttgcctactcaaatgctaaaaccgaggacctttgggctgttcttgaagagaattctggtgaacctatcaagaatatgatgactacatggacaaagcaacaagggtaccctgttattaatgcaaagcttcaagggaattatctggaacttgaacaggcacagtttttgttagatgggtcctctggccccagaatgtggattgttcctataactgcagactgtggttcatattatacacagaaaaaaattctactgaaaggcaaaagtgataggctggatataagagacattgcttcacagtgtggtaaccaagagaagggtggaaacttttggattaagttgaacattaatcaaacaggattttatagagtccaatatgacgataaacttgcagctgcacttcaaaatgcattgcaggccaagaagctgtctgtaatggataaaattggtaagaaccacatgtgatactaataattttcttgtcactactttagtgacaagtatcataaaattaacattgcaggcattgtggaagattcactggccttatctatggcctgcaaacaaaccttaacatcgttgctacgtttactgtatgcttaccgcgaggaggctgattacagtgttctttcacacataaatactgcgagtttaagtattgctaaaatatcggttgatgctactcctggattggtcggtgacatcaaacaacttctgatcaagcttcttctgccacctgctgtaaaattaggttgggacctcaagaatggtgagagccacctggactcgttgcttagaccagtgctcttggttgctcttgtcaaacttgggcatgataagagtataaatgagggagctaggcgtttcagtatctttgtacatgatcggaacacttctcttcttcgtcctgataccagaaagggagtcagatgaagcagaggaaagggggcgtgtcctaagcacactgtgcttttgtaaggacgagaatattgttcttgaatcactgaatcttctttttaccaatgagtttcgcaagcaagatgcatattatgtacttcaaggtcttgacgtggagacgcgtgataccgcatgggtgtggttgaaggataactgggatcgtgtgacaaggaaatacggggacacacaagcaggaggttttatcagatacgtcgtcacattgttcacctccaacgagaaggcagcagagttctcccgcttcttcgcaacccgcaagaagcctgaattcgagagaacactaaagcagagccttgagaacgtccggatcagcgcaaggtggatccagggcatcaagagcgaaccgaggctcgctcaaacggtgcaggagctgctgcgtagaccctgatctgccctcggttgagttgcaggtgtggccggaaataagctggtcgtagatgacatacgctttgtacattctcagtgtgtaaaaggttacctctcttagtgttcatggcagcatgcaaatgtaagctattgggttgaatttttagcccaagcatgtgctagcagtgatctcgtgtctaatttgagaagcgtagaggtttaaaagaagattaaagtgcatttccgattcttaaatttgtgcggctgtgttaatctgatctataaacttttaaaatatatctcttaaaggctcaatatttgttttggtgtttgttacgtgcaaacggacccaaacagatccggtaagtcca

SEQ ID NO: 65718 - DNA, 2263 bp, Zea Mays
actatgggcttgttactttccgcgaagtggctttgctttttgatgaggagtcttcaatggaatccagcaaacagagtgtacctttcgttactcagactctttgttcacaactttccaccatctagctttcacttgttataaatgacaagttgctaccatatttgggaatcagataatattatttctgtaataaaaatacaggattgcattgaattcatagttagattggtcatttcaggcgatcaaataccagatgtagagaagtccttgctttaaccacctcaaatttctttgttttagattgcaattactgtagcacatgagctggctcatcagtggtttggcaatcttgtaaccatggagtggtggacccacttgtggctaaatgaaggttttgctacatggatgagtaatctagctgtaaattctttctttccgcaatggaatatctggacacaatttcttgatgacacaaccgctggtctcaaattggattcacttgaagagtctcaccctattgagaaagcgttggcttcatatataagaaaatttgcctactcaaatgctaaaaccgaggacctttgggctgttcttgaagagaattctggtgaacctatcaagaatatgatgactacatggacaaagcaacaagggtaccctgttattaatgcaaagcttcaagggaattatctggaacttgaacaggcacagtttttgttagatgggtcctctggccccagaatgtggattgttcctataactgcagactgtggttcatattatacacagaaaaaaattctactgaaaggcaaaagtgataggctggatataagagacattgcttcacagtgtggtaaccaagagaagggtggaaacttttggattaagttgaacattaatcaaacaggattttatagagtccaatatgacgataaacttgcagctgcacttcaaaatgcattgcaggccaagaagctgtctgtaatggataaaattggcattgtggaagattcactggccttatctatggcctgcaaacaaaccttaacatcgttgctacgtttactgtatgcttaccgcgaggaggctgattacagtgttctttcacacataaatactgcgagtttaagtattgctaaaatatcggttgatgctactcctggattggtcggtgacatcaaacaacttctgatcaagcttcttctgccacctgctgtaaaattaggttgggacctcaagaatggtgagagccacctggactcgttgcttagaccagtgctcttggttgctcttgtcaaacttgggcatgataagagtataaatgagggagctaggcgtttcagtatctttgtacatgatcggaacacttctcttcttcgtcctgataccagaaaggctgcatacctagctgcaatgcagaatgtaactgcttcatacagatctgcttataatgatcttctgaaagtctacagggagtcagatgaagcagaggaaagggggcgtgtcctaagcacactgtgcttttgtaaggacgagaatattgttcttgaatcactgaatcttctttttaccaatgagtttcgcaagcaagatgcatattatgtacttcaaggtcttgacgtggagacgcgtgataccgcatgggtgtggttgaaggataactgggatcgtgtgacaaggaaatacggggacacacaagcaggaggttttatcagatacgtcgtcacattgttcacctccaacgagaaggcagcagagttctcccgcttcttcgcaacccgcaagaagcctgaattcgagagaacactaaagcagagccttgagaacgtccggatcagcgcaaggtggatccagggcatcaagagcgaaccgaggctcgctcaaacggtgcaggagctgctgcgtagaccctgatctgccctcggttgagttgcaggtgtggccggaaataagctggtcgtagatgacatacgctttgtacattctcagtgtgtaaaaggttacctctcttagtgttcatggcagcatgcaaatgtaagctattgggttgaatttttagcccaagcatgtgctagcagtgatctcgtgtctaatttgagaagcgtagaggtttaaaagaagattaaagtgcatttccgattcttaaatttgtgcggctgtgttaatctgatctataaacttttaaaatatatctcttaaaggctcaatatttgttttggtgtttgttacgtgcaaacggacccaaacagatccggtaagtcca

SEQ ID NO: 65719 - DNA, 4140 bp, Zea Mays
actcctctgctccttatcctttcacgccaatttctccgtacagatttttccagccgcttgcgttatcttctacgcgcggccgtcccagctcctcgtcctggccacggtactcctctccctcgacgtggagctctcacggcgctccattttcccagcgcgcgctcttctccctctccctggttccacgcgggcgcgcgccctgctccctaacgaggccccatggcgcggtcgcctctccctggtgcctcgcccagcctctgctcctcttctccccggcgcctggtcggatgtggatcctctgctcgaagctcccagcgccggattccctgcaagcttcagcttccctgcgcgccgacttcactgctcgcgccgtcgcccagcctgttggcgcgcgcatgctccctgccgcgttcctgctcggcgcccggatcccctgcttctctccctgcaggcgcgctcaatttccagtgctcgctggacgctccagccatggagtccctacgcgccctcccctctgttcgcttgtcgccatgactcgccgcggtgcccgtccctctgcgcgcagccgcgtgctccctgctcgccactaccctgctgtacgccattgtctacagtggagaagctaagcccctccgccaacgcccttgcctgccactccgtggcctcgcctgatacacagtggtcgccttcccttgacagcggcgttgctggccaccgtgttgctcatctcggccatgttcctcttcgtgctcagcacctaggcgtcgcgtccgaccccggtaccctaaatcctcagcagtcgccttggctcctgcagccgcgtccatgacgtgctcgccatcctagcgactcgtttccctgctgcgcgctacctatgctgagtccagtagttgtatttcatcgacggaggagagaaatcaccagaatgtgtggagaagcgtagtcccatacgacatccgctaggtgctcgataaaatatcagaacatgggattatcgtcgtttccgcatactccgagtcgatttggttatggtgagctgacctgttgtcccttcttattggtttattggttgagctgattgaattattaatgcgagaaggatagatttagtgtctctaacatttagctgatatgtgtgtgttgtcagtgttgttatggtgagattagtttgtatagtgaagtcggtgctctattttagtagttaggatactctacgtttattgatcgagttcttgttttaggtgaatgttaatggttactctaagtatttggagtagcgtcaacaagctaattttaattaaattccaaaaaaaatcccacgctcagaggtgtatataagtattaattaaattccaaaaaaaatcccacgctcagaggtgtatataagtattttaggttcttgggtttcttagtcgtgatcttgtagaattctataatcctcgataatattatctacacgatagatatagaataatgtaatgttcatataattggcatgttatgcaatatagtttggtcggtggtttagaaaattagttaatgtgcttctttccttatttttaatttagatgtctagaattaatgaatctaggtctgttaatctgctggagtttggctttaactaaagaaggtaaagcgtatgcatagtttattaatttctaatgtttaatttaagtctagttaagttaagaaaaacattaatgttgtacttagtggtatattaatatcttgtattgtttgagtgttgtaatgcctcgccactaaatatttaatcctctttggtgtagcaataattagtcatgtgctattcctatttatattcattcatgtgcattatacagcttattaggtgcgctagttgatcgcgtaatacggaagacgagccaagtcgaccccaagatgtcgtaaattgcaaactactccacgagatgatgtaagtggatcaatctgaagatggacaggcgaatcaagtgctaggacagggatgatcatcaaaagatcgtcgtctaacaaacactaacatagtgtttattctaggcaagccccggtgcatttgccccttccttgtgttttaaatgcttttcaccttatctgatgcattaggtgataggagttgtgtgataaacaattgatgcattaccattccttagaaactccttaatcccgattttaaaaaagaactgataatgcttagccctgcttagaaactgaaaaatcatttgttttcaaaaataatgattgtggaacattggttatgggcctttcgtttcaaaaatcaaagcaaacttatggtgatgattccacttcggccggagtgggttcatcatttggaaaagagtacccctgtcgggtaccaaaaatggaaaaatggtttgaatacatctggaccagacgctgagcggacgtggtcgcccgtctgtgtcgattaaggaccgttcgatgtaggcctgttgtggtggagaccttgcaactagccacatgctccggtaagcctgaacccggctattccatacgtgaaaagacaaccgcgcactgggcgtgggagatggtgggagtagcgtgtaccctcctggctagaggctggatggaggagtactgtgctcccgggtagcgcggaccggttcacgttgtggaggatctgtgggaacggttgacatatgcaaggattaagtgctacatatgtcgtgtggttagggatccccagctgggtataatcggttcgaatcgtcgtttctcctcggtcatggagactctaccctccgaccactcatcgtagttgacaagtgaaatatgaattggctaaaagaaagctagaccaggacaagtggatgctctagattaggcaaatctagattcaggaaaaatactaaacttgtgaagtaaaattttggcataaggatttactactagtaagctcttctgcaaaacagagtctttgattcttgataagccataccttgaatccctctagccagcatacccttgagagtcttttcttttgtcgggtaagtcttgctgagtaattccatactcagggttttattccctgttgtttttcaggttatagttttgtgctgctgttgattgtgtttacttaatcctgtggtcctggttgttagtggtttatccggggtccttggggcactcggacggatcctgttatgttatttggtgcacatgcataaccgtctgaggtctttgagacaaggacaggtgcatgtgggcccaataacttgggaggttctgccacatttactcaacacatacacttgtgatatattatcacatgtggtttagtttgagaaaaaggcaccaaacttgaggagcaaggtcttaatctagtgttaatcatcctagaagtcatatcctagccccttcccaaggtaggaaaaatgcacaaaacttaaaatgaccctaaatgagccatttaagcacaaaggaaaaggttgtgaaaaatcatgaaaaacccaaaatcatgatgatgaccaaataacaaagttatagtatactaaataagctacaaagcatagtaagaaatatttttaagaaaggctctgcaaaattctcaaaataaccattcaagtgagaactctatagaaaattcagaaatctgaattttaaccccttcccaaagttcagatgtgttctctgttttccaaagctcaaatccacaaagtccaaatatcaaagtggcgccaaaataccctaggaacactttggtgaagtttgaaatcaaaccaaaatcgtttgacatgatttggcatgggttttgtctcaggctgaatagtgcagacaaagctgacttcacaccaccatatcttcccacccagaccatatctctactcgggactcacacaagacagaaagcccttggcacggtgaagagatgatacacaggatccttggcaagatatgcacgtttaggttgaccaacaagcgtttgaacaagggcaaaaacaaacctccacgtgttcgatcgcgtgctcaagcgctcggccgcgcactggccgctctctgcgtgcgcgctgcacacgatcagctcctgtcccccgcacctgcgcccagccatgcccgagggcgcctataagtgcccctggtgtgcaacagtccacccctcactctgcctcactccccgagcag

SEQ ID NO: 65720 - DNA, 565 bp, Zea Mays
ccaaacgtcctggccacacaaatgcaatgaaaaatattatgtgagtacacaatgcataattctatctcacaaatatatataattagaagtagagattggaactaaaaatatcagcgaaacagtgttgctttattaataattcagatcccgtttgccaacattacatgtaaacccactcctctgtttcaaaattcgacgactccaaactcaaattatccgtcaaaagagtagcaaaatcactggttccaaccaggaacagctccgaacatgccaacccacaccccacacaaatagcccaacaactctatttccacaccaggaacacaacttcagattttagaatcaagcacataagatttagaccatattataattttcccaaccagtaagtcaccagtatcgggacacctcagtcttgggaggaggtgaaacaacttcattaacaggtggtacaagaacatgatcttcaactggtgccatttcctcttcaagaggagcaggctcaagaatttcctctggttctttaggtttgtatgtaagaagcagcctctcaagatgttactga

SEQ ID NO: 65721 - DNA, 2867 bp, Zea Mays
gtttttgtcaaaactaattcaatatagtgaacataatgataggagctagattaatcaatatcaataatggacacatgtgctactataagtttaaataaaacagagctagtaaaaataatgagttccatgcaagcaaactgaaaataatagctttagcaggccaacatatcaatcggagcagtatattagagcacaaagattacataaaaacaaacacattatttcagactggggttaaaaaatcccctcgcctgccaccacaccaaagcacgggtcgaagaccaaaaccatagtcacaagaaatgggtacagtggtagcgaccctcgacccgggtacgcaaggtcatttttgttcccaccatgtaaaaatctctcacacgtagcgtacgatgttcctcaaccctatcgatccacaaactttgtgactatgacccggaccaggtcgcggtcgctcacgtgggcaaggttgttttggcatgtatgagaggtcttctctatcacacaatgctcggaggttgtcttagccccgcaagtcaagtttttataagtgtccgatcataatcaaatgtattttcatttcaataataaacattcacgtaagtgacagtaccaatttactgtctctctttaccaaagaagcatgttatggattctgcttgttagatgaccagtcacgacagacatcttgtacgtgctggtgagaagaagtgaaattggcataaaactgtcttaacaaagatgacaacattgttggggaataggcagcaggtgaagctttaggcatatataatcaggttccgtatgaaatatttaccttcttgcttaaattcactcacaaaatggaagcttgaatccccaatgtgttctcggagtttatagatgcacaactacaaaaaatggtataaaaacatattctaaaatgatacaaatgaccacccttcgaccaattcgtaagactgacaagatctaaccagaccacttgttgtcccaacagctaaagtcatgcttaatgaacaaaaggctagagatcatacagaagcattagctccatccaaattaacatcagcaacctgtagtaaagaatagttacaacttgattggggttaacccgttagttataaaccaatgaggaataatgcaagtaatactacaaatatacaaatgagactgacattaccatccaagacaaacattggcattagaacaggaaatgttgcatcccatatactcacagaaccatcttggtagcctgcaatttatattctttcaacagcatgatcttcgttcagtgacatctcatttggaaccccaccagtcaaaggtcatttcatgttctctgatatgaaatgcccaacatttttcctagcacaaaatttctacagaaaatccacagcgatatggtcttacataagtaatgatgatgtctagatagagtaaaatatccaaatttgagcagaatgcaccttcagtgaaatatttggaaattcacttttggttagcgaataaagaccagtgaccgttatgttgggatcaagggtaggaattgcgacttgaaatttctgtgcttcaggaagaggatttccctcttttgagttttgcacagaaaatagagagccaccgtcataaaaattcagctatccaggatttgtcaaaacaaaaggtgcagaattctgcttttatcaagaaccccagtatcaggaataagaatcatgtcagcaaatgatccatcaagtttgagatcagttcgtgacatgcatctcactgattctaatccagcagttgattccaagctaagaacctgcaagagaatgcgaaattttgtcattgatggaggctgagttttctgcagtgcaatatttcggaaacaattatcttcttccatgtttagggaagtgattatgataggtatgtatacattatttggatgctgagacctgaactaaaaatatcttcagaattgtttgggtcgacaacatgggttctgcctgaggaaacaattcttatacttgcaggaaactctcatggttgatcatgtttcatgcaaacccgggttgccctatcgccatgtcaagctagtactgtgtctctacactaaacacatgtcataggctcacagccaggtgaccatgatttcagttcaggaagctaggaattcactttaccaaatttgtaaagcagcaaacctaagaaggcatattgtgtgcacagcagcctttaagatggcaagcaaaagaaattgtaataatgagtaagaaaaaataggcaaaccatgagaacttcttcagatcccatatcatcgccgccataaacaaaaagatgccctcctttattagaatgtactgctgacccagcagaccaatgcaagacaataacaggcagcctactactccctgagactagttgtagcttaacaacattagatgaaacatcactttgcttctcttgtctggaggattttgtagtcatatcccatagaagtgtgtcacctgttatatagcccaccgcaacaattgagccatctcttgaagcccaacaaagaaagcaaatttctcttacttcttcactgtcatcaatagtagtatttagttgatctgcaccagaatccccctgagcaccattgatttgacccttcatgcgtaaatccccatagcctctgacagaaactgcatggtcctcagatacatcccaaagaaccaacaatccgctctcatatgcaattagcatcctgcattaaggctattattcttgagtgcctatgaatgagacctaccaggagtcctcgtcatgcttcggataccgcctcctctcccgaccacggtctgcttgcgatacacgggatccccttctatggagagggtgggcgagga

SEQ ID NO: 65722 - DNA, 2637 bp, Zea Mays
ctcagctcggcgtcaccaccgttggtcgcttctccaacctcgtattgggagagatccgctcgccgcctcccccgcggcttcctcttcctccgcgcaaactcgccgtggcagagttatctcgcgccggtaccgcacgcatcgggggaaaaacaaggtttttgggatgccgggggccggtgtggagccgccgtcgccgccagccgaggccgcggcatggctaccgccgcgcaggttgagacctgggagggtctccgccaagcggtgctggccgcccgggtgcggtcggttcccttcgcccccgccagcgccggcctctgcggccgaggcaggtcctgaggtgaagggcgtggatggcgcctccaccatcgtcgtcggcagagccgatgagaagcccgcccccgccgtcatttcgccttcggctcagaatggatgcccagataaggtggaggcccccgcccccgtttcacctgcgcctgagagcggcgccccgcctgctgataaggtggaggaggtggctgaccccgccgccgtttcacctgcgtgtcagaactgcgccccgcctcagcaagaggaaaataaggtggaagttgtcgctgctattttgcctgcagcgcacagcagcgccctcccacatgccctgactgagaaggatcagcagaatgtagtcatccgggagaatggagaggcacaattgctgggcgatgcaggcaagctgtcattggatggtcagcaagggaacaatgtggtgcaggtagcagtactgggtagttcgagcaccgttggtgctagttatttgcagaacggtgacaaggggggtggattgttggtggctgaggagaagggacgtggtggcagcagtgatgtggggcaggaggttgctgttaatggggatgtctcagagattgcaaacaaaacgggcactggtgagttacagagaaaggaaaatggaactgcaggaagcagaacaaaacggtggtttgtatcctctctgaatcctccacccaagaggagggaagtctcagccgtacgtagatttccacctggctgtgggaggactgctgttaccaccacagacagcggtgttttggaggtctcacctataagcacatttgctcctggtcatgggagatctggtgttaataccacaggcagtggaaatgaggggttgccttcagaagccacccctgtcaacaataatgatgccttggtggcaagttcggttttaggagagttggcttctccaacttcagcactagaggcctccaataagaaattggaaagcaagagaatagtgggtgaaggacatagcaaggctcacaataaggtccaagttcaagatgattttgccggtaccaaacaagatggtggccagcgaaatgttgttccaaaagctacgccgaggagtgtttctgatgggaagatgaaggggaaactcccagcacataaagcgaatcaggtagcacaagaagtgatggttggtaagatgaaaaataaacttgatggaagctttcaaagaagtaatcttaggacgcctttgagcaatcccattgatgcaaagacaaaagtaaagaggtcggatagtgacaagatgaatgctggagtgcatggtaatgcaggggcctctgcaggtgggaagatggaaaataagactttgagtgctaaaaaggaagtggggttcccaaatatgaacacaaagcaaaagaaggttgctcctaagttgaagggtgatgtcataggcaaggataatatgcatttgtccgccagggagctcaagcttggaaaatatgttgcaactgatcatactgaagagcctaagaagcaaataattgttcaagcattgatggctcctgacaattgcccttgggcacgaggaagaaagtcaattgctagtgctttcaagtctcttggtcctatgaacaaggcaaaggggaaggatgctagtgcttccaaacaatgttcaagaaaatgttaggcgctagccaggtgttaggctactgaccagcgtctaggaagtttaaacgtagattaagcatgcttaatcattcttttgtagattttgtgctgctgagagcaagctgatcatctatgagggatatctcaatattgtacatgcacagccaagcttccaaacaacagggcagcatcacaaggcaaaggatcacaagaaaatatacacaaaaaaacactcacagttcatcacatgccttaatgatttaagttattccaaagaataggtctatagatccttgtcccttgtattggagaagagttatttgatgattggtgggagaagattatttttgtttaactacaggaaggcctcaactcgcttgtgattcttaggatctggaccattttagatcaccgcaatatatttgtttttgatagtatacatccctgtttggctagaaccttgttattgcttgttagcaaggaaattcagttgtgggtttgttgggactaaatgtatcttttacctttttgcccagtcgcctgagtatgtttgttcttaggttacatacccttctgtttcttgtcgcgaaagtgatttgtagctttttttttgtatatgtggtgttgtgtaaggattctcttttttattaatacaacgatatgcgattcttctgtgtccgagag

SEQ ID NO: 65723 - DNA, 2509 bp, Zea Mays
cgcttctccaacctcgtattgggagagatccgctcgccgcctcccccgcggcttcctcttcctccgcgcaaactcgccgtggcagagttatctcgcgccggtaccgcacgcatcgggggaaaaacaaggtttttgggatgccgggggccggtgtggagccgccgtcgccgccagccgaggccgcggcatggctaccgccgcgcaggttgagacctgggagggtctccgccaagcggtgctggccgcccgggtgcggtcggttcccttcgcccccgccagcgccggcctctgcggccgaggcaggtcctgaggtggaggcccccgcccccgtttcacctgcgcctgagagcggcgccccgcctgctgataaggtggaggaggtggctgaccccgccgccgtttcacctgcgtgtcagaactgcgccccgcctcagcaagaggaaaataaggtggaagttgtcgctgctattttgcctgcagcgcacagcagcgccctcccacatgccctgactgagaaggatcagcagaatgtagtcatccgggagaatggagaggcacaattgctgggcgatgcaggcaagctgtcattggatggtcagcaagggaacaatgtggtgcaggtagcagtactgggtagttcgagcaccgttggtgctagttatttgcagaacggtgacaaggggggtggattgttggtggctgaggagaagggacgtggtggcagcagtgatgtggggcaggaggttgctgttaatggggatgtctcagagattgcaaacaaaacgggcactggtgagttacagagaaaggaaaatggaactgcaggaagcagaacaaaacggtggtttgtatcctctctgaatcctccacccaagaggagggaagtctcagccgtacgtagatttccacctggctgtgggaggactgctgttaccaccacagacagcggtgttttggaggtctcacctataagcacatttgctcctggtcatgggagatctggtgttaataccacaggcagtggaaatgaggggttgccttcagaagccacccctgtcaacaataatgatgccttggtggcaagttcggttttaggagagttggcttctccaacttcagcactagaggcctccaataagaaattggaaagcaagagaatagtgggtgaaggacatagcaaggctcacaataaggtccaagttcaagatgattttgccggtaccaaacaagatggtggccagcgaaatgttgttccaaaagctacgccgaggagtgtttctgatgggaagatgaaggggaaactcccagcacataaagcgaatcaggtagcacaagaagtgatggttggtaagatgaaaaataaacttgatggaagctttcaaagaagtaatcttaggacgcctttgagcaatcccattgatgcaaagacaaaagtaaagaggtcggatagtgacaagatgaatgctggagtgcatggtaatgcaggggcctctgcaggtgggaagatggaaaataagactttgagtgctaaaaaggaagtggggttcccaaatatgaacacaaagcaaaagaaggttgctcctaagttgaagggtgatgtcataggcaaggataatatgcatttgtccgccagggagctcaagcttggaaaatatgttgcaactgatcatactgaagagcctaagaagcaaataattgttcaagcattgatggctcctgacaattgcccttgggcacgaggaagaaagtcaattgctagtgctttcaagtctcttggtcctatgaacaaggcaaaggggaaggatgctagtgcttccaaacaatgttcaagaaaatgttaggcgctagccaggtgttaggctactgaccagcgtctaggaagtttaaacgtagattaagcatgcttaatcattcttttgtagattttgtgctgctgagagcaagcagctgatcatctatgagggatatctcaatattgtacatgcacagccaagcttccaaacaacagggcagcatcacaaggcaaaggatcacaagaaaatatacacaaaaaaacactcacagttcatcacatgccttaatgatttaagttattccaaagaataggtctatagatccttgtcccttgtattggagaagagttatttgatgattggtgggagaagattatttttgtttaactacaggaaggcctcaactcgcttgtgattcttaggatctggaccattttagatcaccgcaatatatttgtttttgatagtatacatccctgtttggctagaaccttgttattgcttgttagcaaggaaattcagttgtgggtttgttgggactaaatgtatcttttacctttttgcccagtcgcctgagtatgtttgttcttaggttacatacccttctgtttcttgtcgcgaaagtgatttgtagctttttttttgtatatgtggtgttgtgtaaggattctcttttttattaatacaacgatatgcgattcttctgtgtccgagag

SEQ ID NO: 65724 - DNA, 2612 bp, Zea Mays
tctccaacctcgtattgggagagatccgctcgccgcctcccccgcggcttcctcttcctccgcgcaaactcgccgtggcagagttatctcgcgccggtaccgcacgcatcgggggaaaaacaaggtttttgggatgccgggggccggtgtggagccgccgtcgccgccagccgaggccgcggcatggctaccgccgcgcaggttgagacctgggagggtctccgccaagcggtgctggccgcccgggtgcggtcggttcccttcgcccccgccagcgccggcctctgcggccgaggcaggtcctgaggtgaagggcgtggatggcgcctccaccatcgtcgtcggcagagccgatgagaagcccgcccccgccgtcatttcgccttcggctcagaatggatgcccagataaggtggaggcccccgcccccgtttcacctgcgcctgagagcggcgccccgcctgctgataaggtggaggaggtggctgaccccgccgccgtttcacctgcgtgtcagaactgcgccccgcctcagcaagaggaaaataaggtggaagttgtcgctgctattttgcctgcagcgcacagcagcgccctcccacatgccctgactgagaaggatcagcagaatgtagtcatccgggagaatggagaggcacaattgctgggcgatgcaggcaagctgtcattggatggtcagcaagggaacaatgtggtgcaggtagcagtactgggtagttcgagcaccgttggtgctagttatttgcagaacggtgacaaggggggtggattgttggtggctgaggagaagggacgtggtggcagcagtgatgtggggcaggaggttgctgttaatggggatgtctcagagattgcaaacaaaacgggcactggtgagttacagagaaaggaaaatggaactgcaggaagcagaacaaaacggtggtttgtatcctctctgaatcctccacccaagaggagggaagtctcagccgtacgtagatttccacctggctgtgggaggactgctgttaccaccacagacagcggtgttttggaggtctcacctataagcacatttgctcctggtcatgggagatctggtgttaataccacaggcagtggaaatgaggggttgccttcagaagccacccctgtcaacaataatgatgccttggtggcaagttcggttttaggagagttggcttctccaacttcagcactagaggcctccaataagaaattggaaagcaagagaatagtgggtgaaggacatagcaaggctcacaataaggtccaagttcaagatgattttgccggtaccaaacaagatggtggccagcgaaatgttgttccaaaagctacgccgaggagtgtttctgatgggaagatgaaggggaaactcccagcacataaagcgaatcaggtagcacaagaagtgatggttggtaagatgaaaaataaacttgatggaagctttcaaagaagtaatcttaggacgcctttgagcaatcccattgatgcaaagacaaaagtaaagaggtcggatagtgacaagatgaatgctggagtgcatggtaatgcaggggcctctgcaggtgggaagatggaaaataagactttgagtgctaaaaaggaagtggggttcccaaatatgaacacaaagcaaaagaaggttgctcctaagttgaagggtgatgtcataggcaaggataatatgcatttgtccgccagggagctcaagcttggaaaatatgttgcaactgatcatactgaagagcctaagaagcaaataattgttcaagcattgatggctcctgacaattgcccttgggcacgaggaagaaagtcaattgctagtgctttcaagtctcttggtcctatgaacaaggcaaaggggaaggatgctagtgcttccaaacaatgttcaagaaaatgttaggcgctagccaggtgttaggctactgaccagcgtctaggaagtttaaacgtagattaagcatgcttaatcattcttttgtagattttgtgctgctgagagcaagagcagctgatcatctatgagggatatctcaatattgtacatgcacagccaagcttccaaacaacagggcagcatcacaaggcaaaggatcacaagaaaatatacacaaaaaaacactcacagttcatcacatgccttaatgatttaagttattccaaagaataggtctatagatccttgtcccttgtattggagaagagttatttgatgattggtgggagaagattatttttgtttaactacaggaaggcctcaactcgcttgtgattcttaggatctggaccattttagatcaccgcaatatatttgtttttgatagtatacatccctgtttggctagaaccttgttattgcttgttagcaaggaaattcagttgtgggtttgttgggactaaatgtatcttttacctttttgcccagtcgcctgagtatgtttgttcttaggttacatacccttctgtttcttgtcgcgaaagtgatttgtagctttttttttgtatatgtggtgttgtgtaaggattctcttttttattaatacaacgatatgcgattcttctgtgtccgagag

SEQ ID NO: 65725 - DNA, 3181 bp, Zea Mays
aagccctgcccggctgcccctccatatcccttcgccttcgtcagttcctacctgcccccagccttctctcccacctccaatggcgctgctcttgccacctcccgccctctccacgacgcctccatttctctccgctccccgaccagcacggctaccctgtctcagatgcactagaactaccaccgccacctcaagcgtctccacctgtcctcccgcatcgacgtcttctccctcgacctcctcgccggtggcgtcggacggcgcagttggaaggaagagcaagaataagagcaggcccctcaagccgagttttgaggaacaggccctccgccgctggtccgcccgggcaccttcccagcgtgcctcggtcccctgggaacaacctcagcagcagtcgcctttgccgccttcgctgccgcaccgggctggccgaggaagtggtgatgcgggcgatcaaaaacgcagtggtggaggctcaagcgcaacgttgcgctccatcgtggactactttgctggcggctcctccgatgacgaaggagttcgagtagaggaaggggcgtgcgacaccaccgcagtaccggaccaagcggcacgggagcaggacgatggatcgcattttcggccgagctatctgcttgggagccacccattctctgcgccatggattcacagggaggaatcgaccaatgataggggggtttccggtccggtggccgaagaggaggaaaggttggacattcgtgatgcttctgatgatgaactgggcttggtggatgaggataaggaagagacggataatggtgaggagcttcttactgggggtttagaagatgaattttatgatgattatgccacaccaactatgaattcttcatatggagtggatttgtcagtggacaaagatgcttatggtagcaggttcgataggagtatgatgcagagcagtgtaaacaccatagttaaaacattgaggaattcgatggaggaaagtgacccgaatgccacggttgagttgtctaatgcagaagattttgtccagaaattgggccctgcactcctgccatgggaaagggaggaggaagatgatgaggcattcagcggtggcagggcggtgaggcgcagcaacacggagctggccgagaggtctattccagagcctgaactgcggaggcttagggacacggcgttgaggatgaaggagaggataaaggttgggccagggggtgttactcaagacatagtggagagcatccacaggaaatggaaggtggatgaggtggtcaagatgaggtttgaaggccctccaagcctgaacatgaagagaactcatgatttactagaggacaggactgggggagttgttatatggaggtcagggagatcagttgtgttgtataggggaatgaattacaactttcaatgtgtgcagtcatatgctaaatttatagaaattgattcgggtaagggagttagcgatgctaatagtgctgtattgagccatgatggtcacaacttacaggcctcaagagcagatggcatgaagagtttaacgtctactggcaatttttctctggagtcctctgaaacatttgatattgataacttcttggatcaattgggaccacggtacaaggattggtctggtcgtggccctatccctgttgatgccgacttgcttcctggtgtagtacatggctacaaaccaccatttagagtacttccctacaagattaaaagcactcttagagataaggaaatgacaactctgcgtagacttgcaaggcaaactgctcctcatttcgctctagggagaaacagagaacaccaaggcttagctgctgctatggttaaattatgggagaaaagtgctattgcaaagattgccatcaagagagggattccaaacacatgcaatgacagaatggcagaagaaatcaaggaggagtgctcttgtcaaggaacaaggagttcattgtcttctacaggggcaatgatttcatagctcctaaagtaaggcaggtcttggtggagaagcaagaacaagccattactcaacaggatgaggaagagctggctcggcttaaagcatcagcctcaattattactatccccaaggatataaagggtcctctagttgctggtactctggcagaaactacagaagcaaaatctagatggggaaagtcagttaatgataagcagagggaagaggagatgaagcatttgtctttgttgaagcatacctctcttttgaagaacttgaagagaaaactgattttggcaaaaacaaaagttgcaaaagcagagaaggctctagctaaagtccaggaatttctcactccagcagagcttccaactgatctggaaacagttacagatgaggaacgcttcttatttcgcagaatcggcctgaaaatgagggcctttttgatgcttggcagacgagaagtttttgatggaactgtacaaaacatgcatttgcattggaagcatcgagagttggttaaaattgttgtcaggggaaagagctttgcacaagcgaaacatattgcaatctctctagaagctgagagtgaaggtgttctcatttcacttgacaagacaactaaaggatatgtaatcattttctaccggggtaaaaactacaggcgaccccaaatcatgaagcctaggaatctactaacaaggaggcaagcattggcacgctctatagagttgcaaaggcgggaggccttaaagcatcacatctcaagtctgcaaggcaagatctcgaagttgcagtcgcaacttgtacaaacaaaggttgcaagtgagaaacatgatctgaagctgcttcaaacagttgaggatgacttctcatcatcagatgatgatgtagaggatgatggggaagaagcttatttgcagacttacagcagcgctgatgaagaagatgccgaggatgatgctaatgaatatatttagactggtgcggttataactaatgaggcttaaggtggtcgtgttatgttctgaagcagtaaaagttcaatggtaaagacagtctccacgtgactacacatctgcaacgccatggtttcaagaatagcatggagctcattggtcgagtagagttttcaggaatggtggaccaaggctgaggatcgggtggctagccaaacaaagaaaggcttcaatttcg

SEQ ID NO: 65726 - DNA, 3279 bp, Zea Mays
cttcgccttcgtcagttcctacctgcccccagccttctctcccacctccaatggcgctgctcttgccacctcccgccctctccacgacgcctccatttctctccgctccccgaccagcacggctaccctgtctcagatgcactagaactaccaccgccacctcaagcgtctccacctgtcctcccgcatcgacgtcttctccctcgacctcctcgccggtggcgtcggacggcgcagttggaaggaagagcaagaataagagcaggcccctcaagccgagttttgaggaacaggccctccgccgctggtccgcccgggcaccttcccagcgtgcctcggtcccctgggaacaacctcagcagcagtcgcctttgccgccttcgctgccgcaccgggctggccgaggaagtggtgatgcgggcgatcaaaaacgcagtggtggaggctcaagcgcaacgttgcgctccatcgtggactactttgctggcggctcctccgatgacgaaggagttcgagtagaggaaggggcgtgcgacaccaccgcagtaccggaccaagcggcacgggagcaggacgatggatcgcattttcggccgagctatctgcttgggagccacccattctctgcgccatggattcacagggaggaatcgaccaatgataggggggtttccggtccggtggccgaagaggaggaaaggttggacattcgtgatgcttctgatgatgaactgggcttggtggatgaggataaggaagagacggataatggtgaggagcttcttactgggggtttagaagatgaattttatgatgattatgccacaccaactatgaattcttcatatggagtggatttgtcagtggacaaagatgcttatggtagcaggttcgataggagtatgatgcagagcagtgtaaacaccatagttaaaacattgaggaattcgatggaggaaagtgacccgaatgccacggttgagttgtctaatgcagaagattttgtccagaaattgggccctgcactcctgccatgggaaagggaggaggaagatgatgaggcattcagcggtggcagggcggtgaggcgcagcaacacggagctggccgagaggtctattccagagcctgaactgcggaggcttagggacacggcgttgaggatgaaggagaggataaaggttgggccagggggtgttactcaagacatagtggagagcatccacaggaaatggaaggtggatgaggtggtcaagatgaggtttgaaggccctccaagcctgaacatgaagagaactcatgatttactagaggacaggactgggggagttgttatatggaggtcagggagatcagttgtgttgtataggggaatgaattacaactttcaatgtgtgcagtcatatgctaaatttatagaaattgattcgggtaagggagttagcgatgctaatagtgctgtattgagccatgatggtcacaacttacaggcctcaagagcagatggcatgaagagtttaacgtctactggcaatttttctctggagtcctctgaaacatttgatattgataacttcttggatcaattgggaccacggtacaaggattggtctggtcgtggccctatccctgttgatgccgacttgcttcctggtgtagtacatggctacaaaccaccatttagagtacttccctacaagattaaaagcactcttagagataaggaaatgacaactctgcgtagacttgcaaggcaaactgctcctcatttcgctctagggagaaacagagaacaccaaggcttagctgctgctatggttaaattatgggagaaaagtgctattgcaaagattgccatcaagagagggattccaaacacatgcaatgacagaatggcagaagaaatcaagaaattgacaggaggagtgctcttgtcaaggaacaaggagttcattgtcttctacaggggcaatgatttcatagctcctaaagtaaggcaggtcttggtggagaagcaagaacaagccattactcaacaggatgaggaagagctggctcggcttaaagcatcagcctcaattattactatccccaaggatataaagggtcctctagttgctggtactctggcagaaactacagaagcaaaatctagatggggaaagtcagttaatgataagcagagggaagaggagatgaagcatttgtctttgttgaagcatacctctcttttgaagaacttgaagagaaaactgattttggcaaaaacaaaagttgcaaaagcagagaaggctctagctaaagtccaggaatttctcactccagcagagcttccaactgatctggaaacagttacagatgaggaacgcttcttatttcgcagaatcggcctgaaaatgagggcctttttgatgcttggcagacgagaagtttttgatggaactgtacaaaacatgcatttgcattggaagcatcgagagttggttaaaattgttgtcaggggaaagagctttgcacaagcgaaacatattgcaatctctctagaagctgagagtgaaggtgttctcatttcacttgacaagacaactaaaggatatgtaatcattttctaccggggtaaaaactacaggcgaccccaaatcatgaagcctaggaatctactaacaaggaggcaagcattggcacgctctatagagttgcaaaggcgggaggccttaaagcatcacatctcaagtctgcaaggcaagatctcgaagttgcagtcgcaacttgtacaaacaaaggttgcaagtgagaaacatgatctgaagctgcttcaaacagttgaggatgacttctcatcatcagatgatgatgtagaggatgatggggaagaagcttatttgcagacttacagcagcgctgatgaagaagatgccgaggatgatgctaatgaatatatttaggccatgtttggatcctcctagctaattgtttgctaatagctaattgtttgccaatagctaacaattagtcggcaaataattagctagcaacaattagctagtgtatgcttggagtcttggctaacagatttctttttctctttatatgatctattagcatttattagtaaggttaaatggctaacgagcaaacagtttgccagtcctccggctcaagggcggattcaaggggtgagcaaggtggactatggccccacctaatttttttgaccccttatacctaggtttagatacacaccaaaataaacaaactttttgtatagttagcgtggac

SEQ ID NO: 65727 - DNA, 3266 bp, Zea Mays
cgccttcgtcagttcctacctgcccccagccttctctcccacctccaatggcgctgctcttgccacctcccgccctctccacgacgcctccatttctctccgctccccgaccagcacggctaccctgtctcagatgcactagaactaccaccgccacctcaagcgtctccacctgtcctcccgcatcgacgtcttctccctcgacctcctcgccggtggcgtcggacggcgcagttggaaggaagagcaagaataagagcaggcccctcaagccgagttttgaggaacaggccctccgccgctggtccgcccgggcaccttcccagcgtgcctcggtcccctgggaacaacctcagcagcagtcgcctttgccgccttcgctgccgcaccgggctggccgaggaagtggtgatgcgggcgatcaaaaacgcagtggtggaggctcaagcgcaacgttgcgctccatcgtggactactttgctggcggctcctccgatgacgaaggagttcgagtagaggaaggggcgtgcgacaccaccgcagtaccggaccaagcggcacgggagcaggacgatggatcgcattttcggccgagctatctgcttgggagccacccattctctgcgccatggattcacagggaggaatcgaccaatgataggggggtttccggtccggtggccgaagaggaggaaaggttggacattcgtgatgcttctgatgatgaactgggcttggtggatgaggataaggaagagacggataatggtgaggagcttcttactgggggtttagaagatgaattttatgatgattatgccacaccaactatgaattcttcatatggagtggatttgtcagtggacaaagatgcttatggtagcaggttcgataggagtatgatgcagagcagtgtaaacaccatagttaaaacattgaggaattcgatggaggaaagtgacccgaatgccacggttgagttgtctaatgcagaagattttgtccagaaattgggccctgcactcctgccatgggaaagggaggaggaagatgatgaggcattcagcggtggcagggcggtgaggcgcagcaacacggagctggccgagaggtctattccagagcctgaactgcggaggcttagggacacggcgttgaggatgaaggagaggataaaggttgggccagggggtgttactcaagacatagtggagagcatccacaggaaatggaaggtggatgaggtggtcaagatgaggtttgaaggccctccaagcctgaacatgaagagaactcatgatttactagaggacaggactgggggagttgttatatggaggtcagggagatcagttgtgttgtataggggaatgaattacaactttcaatgtgtgcagtcatatgctaaatttatagaaattgattcgggtaagggagttagcgatgctaatagtgctgtattgagccatgatggtcacaacttacaggcctcaagagcagatggcatgaagagtttaacgtctactggcaatttttctctggagtcctctgaaacatttgatattgataacttcttggatcaattgggaccacggtacaaggattggtctggtcgtggccctatccctgttgatgccgacttgcttcctggtgtagtacatggctacaaaccaccatttagagtacttccctacaagattaaaagcactcttagagataaggaaatgacaactctgcgtagacttgcaaggcaaactgctcctcatttcgctctagggagaaacagagaacaccaaggcttagctgctgctatggttaaattatgggagaaaagtgctattgcaaagattgccatcaagagagggattccaaacacatgcaatgacagaatggcagaagaaatcaaggaggagtgctcttgtcaaggaacaaggagttcattgtcttctacaggggcaatgatttcatagctcctaaagtaaggcaggtcttggtggagaagcaagaacaagccattactcaacaggatgaggaagagctggctcggcttaaagcatcagcctcaattattactatccccaaggatataaagggtcctctagttgctggtactctggcagaaactacagaagcaaaatctagatggggaaagtcagttaatgataagcagagggaagaggagatgaagcatttgtctttgttgaagcatacctctcttttgaagaacttgaagagaaaactgattttggcaaaaacaaaagttgcaaaagcagagaaggctctagctaaagtccaggaatttctcactccagcagagcttccaactgatctggaaacagttacagatgaggaacgcttcttatttcgcagaatcggcctgaaaatgagggcctttttgatgcttggcagacgagaagtttttgatggaactgtacaaaacatgcatttgcattggaagcatcgagagttggttaaaattgttgtcaggggaaagagctttgcacaagcgaaacatattgcaatctctctagaagctgagagtgaaggtgttctcatttcacttgacaagacaactaaaggatatgtaatcattttctaccggggtaaaaactacaggcgaccccaaatcatgaagcctaggaatctactaacaaggaggcaagcattggcacgctctatagagttgcaaaggcgggaggccttaaagcatcacatctcaagtctgcaaggcaagatctcgaagttgcagtcgcaacttgtacaaacaaaggttgcaagtgagaaacatgatctgaagctgcttcaaacagttgaggatgacttctcatcatcagatgatgatgtagaggatgatggggaagaagcttatttgcagacttacagcagcgctgatgaagaagatgccgaggatgatgctaatgaatatatttaggccatgtttggatcctcctagctaattgtttgctaatagctaattgtttgccaatagctaacaattagtcggcaaataattagctagcaacaattagctagtgtatgcttggagtcttggctaacagatttctttttctctttatatgatctattagcatttattagtaaggttaaatggctaacgagcaaacagtttgccagtcctccggctcaagggcggattcaaggggtgagcaaggtggactatggccccacctaatttttttgaccccttatacctaggtttagatacacaccaaaataaacaaactttttgtatagttagcgtggac

SEQ ID NO: 65728 - DNA, 3259 bp, Zea Mays
gtcagttcctacctgcccccagccttctctcccacctccaatggcgctgctcttgccacctcccgccctctccacgacgcctccatttctctccgctccccgaccagcacggctaccctgtctcagatgcactagaactaccaccgccacctcaagcgtctccacctgtcctcccgcatcgacgtcttctccctcgacctcctcgccggtggcgtcggacggcgcagttggaaggaagagcaagaataagagcaggcccctcaagccgagttttgaggaacaggccctccgccgctggtccgcccgggcaccttcccagcgtgcctcggtcccctgggaacaacctcagcagcagtcgcctttgccgccttcgctgccgcaccgggctggccgaggaagtggtgatgcgggcgatcaaaaacgcagtggtggaggctcaagcgcaacgttgcgctccatcgtggactactttgctggcggctcctccgatgacgaaggagttcgagtagaggaaggggcgtgcgacaccaccgcagtaccggaccaagcggcacgggagcaggacgatggatcgcattttcggccgagctatctgcttgggagccacccattctctgcgccatggattcacagggaggaatcgaccaatgataggggggtttccggtccggtggccgaagaggaggaaaggttggacattcgtgatgcttctgatgatgaactgggcttggtggatgaggataaggaagagacggataatggtgaggagcttcttactgggggtttagaagatgaattttatgatgattatgccacaccaactatgaattcttcatatggagtggatttgtcagtggacaaagatgcttatggtagcaggttcgataggagtatgatgcagagcagtgtaaacaccatagttaaaacattgaggaattcgatggaggaaagtgacccgaatgccacggttgagttgtctaatgcagaagattttgtccagaaattgggccctgcactcctgccatgggaaagggaggaggaagatgatgaggcattcagcggtggcagggcggtgaggcgcagcaacacggagctggccgagaggtctattccagagcctgaactgcggaggcttagggacacggcgttgaggatgaaggagaggataaaggttgggccagggggtgttactcaagacatagtggagagcatccacaggaaatggaaggtggatgaggtggtcaagatgaggtttgaaggccctccaagcctgaacatgaagagaactcatgatttactagaggacaggactgggggagttgttatatggaggtcagggagatcagttgtgttgtataggggaatgaattacaactttcaatgtgtgcagtcatatgctaaatttatagaaattgattcgggtaagggagttagcgatgctaatagtgctgtattgagccatgatggtcacaacttacaggcctcaagagcagatggcatgaagagtttaacgtctactggcaatttttctctggagtcctctgaaacatttgatattgataacttcttggatcaattgggaccacggtacaaggattggtctggtcgtggccctatccctgttgatgccgacttgcttcctggtgtagtacatggctacaaaccaccatttagagtacttccctacaagattaaaagcactcttagagataaggaaatgacaactctgcgtagacttgcaaggcaaactgctcctcatttcgctctagagaacaccaaggcttagctgctgctatggttaaattatgggagaaaagtgctattgcaaagattgccatcaagagagggattccaaacacatgcaatgacagaatggcagaagaaatcaagaaattgacaggaggagtgctcttgtcaaggaacaaggagttcattgtcttctacaggggcaatgatttcatagctcctaaagtaaggcaggtcttggtggagaagcaagaacaagccattactcaacaggatgaggaagagctggctcggcttaaagcatcagcctcaattattactatccccaaggatataaagggtcctctagttgctggtactctggcagaaactacagaagcaaaatctagatggggaaagtcagttaatgataagcagagggaagaggagatgaagcatttgtctttgttgaagcatacctctcttttgaagaacttgaagagaaaactgattttggcaaaaacaaaagttgcaaaagcagagaaggctctagctaaagtccaggaatttctcactccagcagagcttccaactgatctggaaacagttacagatgaggaacgcttcttatttcgcagaatcggcctgaaaatgagggcctttttgatgcttggcagacgagaagtttttgatggaactgtacaaaacatgcatttgcattggaagcatcgagagttggttaaaattgttgtcaggggaaagagctttgcacaagcgaaacatattgcaatctctctagaagctgagagtgaaggtgttctcatttcacttgacaagacaactaaaggatatgtaatcattttctaccggggtaaaaactacaggcgaccccaaatcatgaagcctaggaatctactaacaaggaggcaagcattggcacgctctatagagttgcaaaggcgggaggccttaaagcatcacatctcaagtctgcaaggcaagatctcgaagttgcagtcgcaacttgtacaaacaaaggttgcaagtgagaaacatgatctgaagctgcttcaaacagttgaggatgacttctcatcatcagatgatgatgtagaggatgatggggaagaagcttatttgcagacttacagcagcgctgatgaagaagatgccgaggatgatgctaatgaatatatttaggccatgtttggatcctcctagctaattgtttgctaatagctaattgtttgccaatagctaacaattagtcggcaaataattagctagcaacaattagctagtgtatgcttggagtcttggctaacagatttctttttctctttatatgatctattagcatttattagtaaggttaaatggctaacgagcaaacagtttgccagtcctccggctcaagggcggattcaaggggtgagcaaggtggactatggccccacctaatttttttgaccccttatacctaggtttagatacacaccaaaataaacaaactttttgtatagttagcgtggac

SEQ ID NO: 65729 - DNA, 3137 bp, Zea Mays
cccacctccaatggcgctgctcttgccacctcccgccctctccacgacgcctccatttctctccgctccccgaccagcacggctaccctgtctcagatgcactagaactaccaccgccacctcaagcgtctccacctgtcctcccgcatcgacgtcttctccctcgacctcctcgccggtggcgtcggacggcgcagttggaaggaagagcaagaataagagcaggcccctcaagccgagttttgaggaacaggccctccgccgctggtccgcccgggcaccttcccagcgtgcctcggtcccctgggaacaacctcagcagcagtcgcctttgccgccttcgctgccgcaccgggctggccgaggaagtggtgatgcgggcgatcaaaaacgcagtggtggaggctcaagcgcaacgttgcgctccatcgtggactactttgctggcggctcctccgatgacgaaggagttcgagtagaggaaggggcgtgcgacaccaccgcagtaccggaccaagcggcacgggagcaggacgatggatcgcattttcggccgagctatctgcttgggagccacccattctctgcgccatggattcacagggaggaatcgaccaatgataggggggtttccggtccggtggccgaagaggaggaaaggttggacattcgtgatgcttctgatgatgaactgggcttggtggatgaggataaggaagagacggataatggtgaggagcttcttactgggggtttagaagatgaattttatgatgattatgccacaccaactatgaattcttcatatggagtggatttgtcagtggacaaagatgcttatggtagcaggttcgataggagtatgatgcagagcagtgtaaacaccatagttaaaacattgaggaattcgatggaggaaagtgacccgaatgccacggttgagttgtctaatgcagaagattttgtccagaaattgggccctgcactcctgccatgggaaagggaggaggaagatgatgaggcattcagcggtggcagggcggtgaggcgcagcaacacggagctggccgagaggtctattccagagcctgaactgcggaggcttagggacacggcgttgaggatgaaggagaggataaaggttgggccagggggtgttactcaagacatagtggagagcatccacaggaaatggaaggtggatgaggtggtcaagatgaggtttgaaggccctccaagcctgaacatgaagagaactcatgatttactagaggacaggactgggggagttgttatatggaggtcagggagatcagttgtgttgtataggggaatgaattacaactttcaatgtgtgcagtcatatgctaaatttatagaaattgattcgggtaagggagttagcgatgctaatagtgctgtattgagccatgatggtcacaacttacaggcctcaagagcagatggcatgaagagtttaacgtctactggcaatttttctctggagtcctctgaaacatttgatattgataacttcttggatcaattgggaccacggtacaaggattggtctggtcgtggccctatccctgttgatgccgacttgcttcctggtgtagtacatggctacaaaccaccatttagagtacttccctacaagattaaaagcactcttagagataaggaaatgacaactctgcgtagacttgcaaggcaaactgctcctcatttcgctctagggagaaacagagaacaccaaggcttagctgctgctatggttaaattatgggagaaaagtgctattgcaaagattgccatcaagagagggattccaaacacatgcaatgacagaatggcagaagaaatcaagaaattgacaggaggagtgctcttgtcaaggaacaaggagttcattgtcttctacaggggcaatgatttcatagctcctaaagtaaggcaggtcttggtggagaagcaagaacaagccattactcaacaggatgaggaagagctggctcggcttaaagcatcagcctcaattattactatccccaaggatataaagggtcctctagttgctggtactctggcagaaactacagaagcaaaatctagatggggaaagtcagttaatgataagcagagggaagaggagatgaagcatttgtctttgttgaagcatacctctcttttgaagaacttgaagagaaaactgattttggcaaaaacaaaagttgcaaaagcagagaaggctctagctaaagtccaggaatttctcactccagcagagcttccaactgatctggaaacagttacagatgaggaacgcttcttatttcgcagaatcggcctgaaaatgagggcctttttgatgcttggcagacgagaagtttttgatggaactgtacaaaacatgcatttgcattggaagcatcgagagttggttaaaattgttgtcaggggaaagagctttgcacaagcgaaacatattgcaatctctctagaagctgagagtgaaggtgttctcatttcacttgacaagacaactaaaggatatgtaatcattttctaccggggtaaaaactacaggcgaccccaaatcatgaagcctaggaatctactaacaaggaggcaagcattggcacgctctatagagttgcaaaggcgggaggccttaaagcatcacatctcaagtctgcaaggcaagatctcgaagttgcagtcgcaacttgtacaaacaaaggttgcaagtgagaaacatgatctgaagctgcttcaaacagttgaggatgacttctcatcatcagatgatgatgtagagctgattatgtgccaggatgatggggaagaagcttatttgcagacttacagcagcgctgatgaagaagatgccgaggatgatgctaatgaatatatttagactggtgcggttataactaatgaggcttaaggtggtcgtgttatgttctgaagcagtaaaagttcaatggtaaagacagtctccacgtgactacacatctgcaacgccatggtttcaagaatagcatggagctcattggtcgagtagagttttcaggaatggtggaccaaggctgaggatcgggtggctagccaaacaaagaaaggcttcaatttcg

SEQ ID NO: 65730 - DNA, 1400 bp, Zea Mays
atggatagcttccacaatagcttcaatctcttccttggcacgctcaaacacattcggacctttgactttgtcaactggtgtgttctcatttatgtcagcacttgttccgtgagtttcatccgtgtgggcttttattttgtgcaggctcccctccttgccttccttatgtgattctgcatgtattcagatctcagagatccgcatcatactgaggataaagttctcaaatgaaattgtgttagtaacatcgattctaaatcatcaccaagcatgaaaatagcattacaaacttggaactaagatgatctacaatgttctaaacaaccattgaaccttggtcctgtttttcaatctctatctctaaacagcagtttcaacagtcgtcccacgtcaccgttccccttcccgcttaattcaaaaataaagtaaaattatgcacaagtgggagtttgaaccttggttgttagctccacatttacacccacctaaccaatagaacacatatttttgtgttttattaaaacaaagtctacccatgtgatatatagaaactgtagcaatgtacggacaactgacaattagtatctaaaaagcagtacttccgcaagtcgctaagagtagtagagtacttctatacttgaaatgatatacacaaaattctaccattaagcagcagtaatttttaatattgggcagtgacaaccattatgaactcaatatgctcagaagtcccttttgcaagattgaaattgtctgcatgctaatgttctcggtcatatttctgtgatctttcagggaaaaaatgttgaacaaaccaactctttcccaaacatggtgaaagaattaagacaaatgcacaagacatgtttttcattactacaaaggaatggcacatgctcttaaaagaataagcaacctgaactttacatttgcagttgttttactgtaaaatcaatggctctcatcatgaatcacattactgtttgcaaatgacgttgataaatgacaatgtcaagctatagtatatgggctgaatggttttttggtgaattacatccaacgtctttggtatgaaggataacacattctattggtaagtagctaaagttgtacttagcttcagttggcaaaaatgatcaatacacagggcaaaagatatactataaaaaacactataaaaagtgcaaatatgtgagttgattctaggcaccgttactgtcctttcttcttatcctccagtttcctgctctccattccttttcatatatttaatatacggggtactaaatatgaagtaacatcattctagatagttttaccatccttcttcgcgtggggactggaatggtgctccatcttagtatgaacagctccggcaagggcctcgatctcttcctttg

SEQ ID NO: 65731 - DNA, 1301 bp, Zea Mays
attaggcccatctgtcagttgacgtgcgcctttccgattacggaaagcgttggagctttctctgccaccagacgctcaggggcaccccgggcctacctgccagcgtcggtcagagacccgcctccgtctctgaatcggccgctgccgctaccgccgccggcggcgacgaccatgccccgcgccgctacgggtgcgatcactgcggcgttcctgcgcgcgcaggccccgcacatggcgccgctggcatcgcgcatcgcgcgcgcgttccccggcctcgccaccgccgccgcgacgcgcttcgctccctcctcgtccgcgtcctcgccgcggcttggcctcgtcccgcgcctccgatccgcgcgctccttctccggcgcccgtgcgtctcccgttagcggcgcggtttctggctcctcgacgtcggaggagggccagcagctgcagtcggagctcatcttcctgggcacgggcaccagcgagggcatcccgcgcgtcagctgcctcacgcaccccaccaagatttgccccgtttgcaccaaggcggctgagccagggaacccgaacaggaggcgcaacacctctatccttctgcgccacgccaccccgtctggcaccacaaacatcgttgttgatgccggcaagttcttctatcactcggcactccagtggttccccacgtttggtttgaggacaatcgatggtgtcattattacccattctcatgctgatgccattggagggcttgattgtcttcgtgattggacgaacaatgttcagtcatcgatcccaatttatgtggcagaacgtgattatgaggtgatgaagatgacccactattatctcatcgacacaagtgtagttatacctggagccgcagtttcagcattgcaatttaacattataaaagaggaaccatttatggttcacaatcttgaggtgattcctttacctgtttggcacggtcagggttaccgctctcttggttttcgttttggtgatgtatgctatataagtgatgtcagtgatatacccgaagaaacatacaagcttctggaaaactgtgaacttcttataatggatgctctaagacctgatcgttcttcatcaacacacttcggactaccaagggctcttgaggaagttaggaaaatcaaaccaaagaaaacactgtttactggaatgatgcatttgatggaccatgagaaagtaaacagtgatcttgccaggctgattggaacagacggtcttgacatccagcttagctatgacggtctcaggatacctgtatgtgcaatatggaa

SEQ ID NO: 65732 - DNA, 1365 bp, Zea Mays
attaggcccatctgtcagttgacgtgcgcctttccgattacggaaagcgttggagctttctctgccaccagacgctcaggggcaccccgggcctacctgccagcgtcggtcagagacccgcctccgtctctgaatcggccgctgccgctaccgccgccggcggcgacgaccatgccccgcgccgctacgggtgcgatcactgcggcgttcctgcgcgcgcaggccccgcacatggcgccgctggcatcgcgcatcgcgcgcgcgttccccggcctcgccaccgccgccgcgacgcgcttcgctccctcctcgtccgcgtcctcgccgcggcttggcctcgtcccgcgcctccgatccgcgcgctccttctccggcgcccgtgcgtctcccgttagcggcgcggtttctggctcctcgacgtcggaggagggccagcagctgcagtcggagctcatcttcctgggcacgggcaccagcgagggcatcccgcgcgtcagctgcctcacgcaccccaccaagatttgccccgtttgcaccaaggcggctgagccagggaacccgaacaggaggcgcaacacctctatccttctgcgccacgccaccccgtctggcaccacaaacatcgttgttgatgccggcaagttcttctatcactcggcactccagtggttccccacgtttggtttgaggacaatcgatggtgtcattattacccattctcatgctgatgccattggagggcttgattgtcttcgtgattggacgaacaatgttcagtcatcgatcccaatttatgtggcagaacgtgattatgaggtgatgaagatgacccactattatctcatcgacacaagtgtagttatacctggagccgcagtttcagcattgcaatttaacattataaaagaggaaccatttatggttcacaatcttgaggtgattcctttacctgtttggcacggtcagggttaccgctctcttggttttcgttttggtgatgtatgctatataagtgatgtcagtgatatacccgaagaaacatacaagcttctggaaaactgtgaacttcttataatggatgctctaagacctgatcgttcttcatcaacacacttcggactaccaagggctcttgaggaagttaggaaaatcaaaccaaagaaaacactgtttactggaatgatgcatttgatggaccatgagaaagtaaacagtgatcttgccaggctgattggaacagacggtcttgacatccagcttagctatgacggtctcaggatacctggaatagcgatggcagacctcagcagacatgattccatggtggcagtggacactctccgacgactgaccaaacccgctgct

SEQ ID NO: 65733 - DNA, 2069 bp, Zea Mays
ccgaagtttgtcactgtcccgttcgtcgtgtcccaaagtccaaaacccaacccacaatggccgccacctcgccggccccggcgccgccgcgcatcctcctcgccggggatgcccacggccgactccaccagctcttcaagcgcgtcaaatcggtgaaccagtcaacggggccgttccacgcgctgctctgcgtggggcagtttttctcccccgagggtgctgcagagggctcaccggaggacgtcaccgactacctcgaggggcgcgcttccgtgcccatcccgacctacttcaccggcgactacggcccagccgcgccgcgattgctatcgaaggccgccgctggtgctcgcgggttcgcacccggtggcatcgagatatgccccaacgtcttctggcttaggggaagcaaccgcttcaccctccacggtttgtcggtggtttatttgtcagggaggaaagggttaggagggcctggctgttacagccaggatgatgtggatgccctacgggctcttgcagaagagccagggattgacgatctgttcttgactaatgaatggccgactggagtggtcagtgggtctgacacttccaatgtgcctaatcaggttttggatcccaatgggtatgatcctattgttgctgaattggttgctgagattaaaccaagatatcacattgctggcacaaaaggtgtcttttactcaagggaaccatatgtcaatgattctgctgctcatgttacccgctttattggacttgctaatgttggaaacaaagagaagcagcatctgtcatgtccagtgctgatatcaatgccaagcctccaaacgccactttgtcaccatatgttggttcagcaaaatcagttcctatcgaagaagctccaaaacgtgcagcggagaacatagattcacaatattggcgttatgatgtcaagcggcaaaggcatggggaagctggtgggggtggattgtgtttcaaatttgtatcctcaggatcctgtcaaagagggagtagatgcagttataggcatgatgaagaggcagtggagcattaccagagaaatgtctgttttgattttctaaacaaaggaaaatgtgagaggggcccagaatgcaagtttgttcacagtctttctggggagactgctctaagggatgcaagacctcctagtgaaagaagacgagtggagagcagttgctggttctgcttgtcgagtccagatgtcgagtcacatcttgtcattagcatcggtgaagtacattgatgatgcctccggaagcagaggcagaacttgggagatataagattgctctgagtaagtactttgagaagcaaggaaaaactgcagtctactttgagtgggtttcaccacgctctcaccatgcaaacctgcaggctgttcctgtaccattgtctaaagcagacgctgttaacaagatatttcatctagcagccaaaaaactgggatttgaattctctatggtgaatccagatggtgcaaaaactgctagagaatcattgatgtctcaatgcgaaagcaaatcagggctgttttatgttgagctcccggaaggtagaattctcttgcacatggtcgacagtaacgagaagttccctgttcagtttggacgcgaggtgttagcgggactgctaagcatggcggatcgtgcagattggaggaactgcaagatttcaaaggaggaagagattaaactggtggacgatttcaaacaaggtttccgcgaatttgaccctgcagagtgaaaacaatgctctgcgcctgtgtttttgttttgcaatttgtagtctatttttgaggtctcatttgaaatggacatatatgaagcacaagaatgtagtaacgttttccaatgccgcaatttttgttttagggctagttttggaaccacatttttcaagggattttcattctcctaagcaaaattagttcattttcttttgtgaaaataggttggaaaaatggtgttttcaaactagcccttagataaacgtatgtctgatctcggcgtgagtgggcacgcctagggatgaaaacggac

SEQ ID NO: 65734 - DNA, 1668 bp, Zea Mays
cgaagtttgtcactgtcccgttcgtcgtgtcccaaagtccaaaacccaacccacaatggccgccacctcgccggccccggcgccgccgcgcatcctcctcgccggggatgcccacggccgactccaccagctcttcaagcgcgtcaaatcggtgaaccagtcaacggggccgttccacgcgctgctctgcgtggggcagtttttctcccccgagggtgctgcagagggctcaccggaggacgtcaccgactacctcgaggggcgcgcttccgtgcccatcccgacctacttcaccggcgactacggcccagccgcgccgcgattgctatcgaaggccgccgctggtgctcgcgggttcgcacccggtggcatcgagatatgccccaacgtcttctggcttaggggaagcaaccgcttcaccctccacggtttgtcggtggtttatttgtcagggaggaaagggttaggagggcctggctgttacagccaggatgatgtggatgccctacgggctcttgcagaagagccagggattgacgatctgttcttgactaatgaatggccgactggagtggtcagtgggtctgacacttccaatgtgcctaatcaggttttggatcccaatgggtatgatcctattgttgctgaattggttgctgagattaaaccaagatatcacattgctggcacaaaaggtgtcttttactcaagggaaccatatgtcaatgattctgctgctcatgttacccgctttattggacttgctaatgttggaaacaaagagaagcagcatctgtcatgtccagtgctgatatcaatgccaagcctccaaacgccactttgtcaccatatgttggttcagcaaaatcagttcctatcgaagaagctccaaaacgtgcagcggagaacatagattcacaatattggcgttatgatgtcaagcggcaaaggcatggggaagctggtgggggtggattgtgtttcaaatttgtatcctcaggatcctgtcaaagagggagtagatgcagttataggcatgatgaagaggcagtggagcattaccagagaaatgtctgttttgattttctaaacaaaggaaaatgtgagaggggcccagaatgcaagtttgttcacagtctttctggggagactgctctaagggatgcaagacctcctagtgaaagaagacgagtggagagcagttgctggttctgcttgtcgagtccagatgtcgagtcacatcttgtcattagcatcggtgaaggttactactgcacacttgcaaaggggccacttgttccaaatcacgttctaatgattcccgtggaacactgccccagtacattgatgatgcctccggaagcagaggcagaacttgggagatataagattgctctgagctgttcctgtaccattgtctaaagcagacgctgttaacaagatatttcatctagcagccaaaaaactgggatttgaattctctatggtgaatccagatggtgcaaaaactgctagagaatcattgatgtctcaatgcgaaagcaaatcagggctgttttatgttgagctcccggaaggtagaattctcttgcacatggtcgacagtaacgagaagttccctgttcagtttggacgcgagctggctgtccttcattttcatggctacag

SEQ ID NO: 65735 - DNA, 2199 bp, Zea Mays
cgaagtttgtcactgtcccgttcgtcgtgtcccaaagtccaaaacccaacccacaatggccgccacctcgccggccccggcgccgccgcgcatcctcctcgccggggatgcccacggccgactccaccagctcttcaagcgcgtcaaatcggtgaaccagtcaacggggccgttccacgcgctgctctgcgtggggcagtttttctcccccgagggtgctgcagagggctcaccggaggacgtcaccgactacctcgaggggcgcgcttccgtgcccatcccgacctacttcaccggcgactacggcccagccgcgccgcgattgctatcgaaggccgccgctggtgctcgcgggttcgcacccggtggcatcgagatatgccccaacgtcttctggcttaggggaagcaaccgcttcaccctccacggtttgtcggtggtttatttgtcagggaggaaagggttaggagggcctggctgttacagccaggatgatgtggatgccctacgggctcttgcagaagagccagggattgacgatctgttcttgacatatccttttttcccttatactgtttctttcactgcttgctaatattaatattgagttgctttgtgttagcatctattctggatgcatcaaatttaggttcccttgacagtaacgagattgcactaatgaatggccgactggagtggtcagtgggtctgacacttccaatgtgcctaatcaggttttggatcccaatgggtatgatcctattgttgctgaattggttgctgagattaaaccaagatatcacattgctggcacaaaaggtgtcttttactcaagggaaccatatgtcaatgattctgctgctcatgttacccgctttattggacttgctaatgttggaaacaaagagaagcagcatctgtcatgtccagtgctgatatcaatgccaagcctccaaacgccactttgtcaccatatgttggttcagcaaaatcagttcctatcgaagaagctccaaaacgtgcagcggagaacatagattcacaatattggcgttatgatgtcaagcggcaaaggcatggggaagctggtgggggtggattgtgtttcaaatttgtatcctcaggatcctgtcaaagagggagtagatgcagttataggcatgatgaagaggcagtggagcattaccagagaaatgtctgttttgattttctaaacaaaggaaaatgtgagaggggcccagaatgcaagtttgttcacagtctttctggggagactgctctaagggatgcaagacctcctagtgaaagaagacgagtggagagcagttgctggttctgcttgtcgagtccagatgtcgagtcacatcttgtcattagcatcggtgaaggttactactgcacacttgcaaaggggccacttgttccaaatcacgttctaatgattcccgtggaacactgccccagtacattgatgatgcctccggaagcagaggcagaacttgggagatataagattgctctgagtatggatgcttcacacctgatatgaaatttacaattgtgccgaaactttgccatgatcatgctacatgccaaaaaactgggatttgaattctctatggtgaatccagatggtgcaaaaactgctagagaatcattgatgtctcaatgcgaaagcaaatcagggctgttttatgttgagctcccggaaggtagaattctcttgcacatggtcgacagtaacgagaagttccctgttcagtttggacgcgaggtgttagcgggactgctaagcatggcggatcgtgcagattggaggaactgcaagatttcaaaggaggaagagattaaactggtggacgatttcaaacaaggtttccgcgaatttgaccctgcagagtgaaaacaatgctctgcgcctgtgtttttgttttgcaatttgtagtctatttttgaggtctcatttgaaatggacatatatgaagcacaagaatgtagtaacgttttccaatgccgcaatttttgttttagggctagttttggaaccacatttttcaagggattttcattctcctaagcaaaattagttcattttcttttgtgaaaataggttggaaaaatggtgttttcaaactagcccttagataaacgtatgtctgatctcggcgtgagtgggcacgcctagggatgaaaacggac

SEQ ID NO: 65736 - DNA, 2099 bp, Zea Mays
cgaagtttgtcactgtcccgttcgtcgtgtcccaaagtccaaaacccaacccacaatggccgccacctcgccggccccggcgccgccgcgcatcctcctcgccggggatgcccacggccgactccaccagctcttcaagcgcgtcaaatcggtgaaccagtcaacggggccgttccacgcgctgctctgcgtggggcagtttttctcccccgagggtgctgcagagggctcaccggaggacgtcaccgactacctcgaggggcgcgcttccgtgcccatcccgacctacttcaccggcgactacggcccagccgcgccgcgattgctatcgaaggccgccgctggtgctcgcgggttcgcacccggtggcatcgagatatgccccaacgtcttctggcttaggggaagcaaccgcttcaccctccacggtttgtcggtggtttatttgtcagggaggaaagggttaggagggcctggctgttacagccaggatgatgtggatgccctacgggctcttgcagaagagccagggattgacgatctgttcttgactaatgaatggccgactggagtggtcagtgggtctgacacttccaatgtgcctaatcaggttttggatcccaatgggtatgatcctattgttgctgaattggttgctgagattaaaccaagatatcacattgctggcacaaaaggtgtcttttactcaagggaaccatatgtcaatgattctgctgctcatgttacccgctttattggacttgctaatgttggaaacaaagagaagcagaaatttattcatgcgatttctcctactccagcatctgtcatgtccagtgctgatatcaatgccaagcctccaaacgccactttgtcaccatatgttggttcagcaaaatcagttcctatcgaagaagctccaaaacgtgcagcggagaacatagattcacaatattggcgttatgatgtcaagcggcaaaggcatggggaagctggtgggggtggattgtgtttcaaatttgtatcctcaggatcctgtcaaagagggagtagatgcagttataggcatgatgaagaggcagtggagcattaccagagaaatgtctgttttgattttctaaacaaaggaaaatgtgagaggggcccagaatgcaagtttgttcacagtctttctggggagactgctctaagggatgcaagacctcctagtgaaagaagacgagtggagagcagttgctggttctgcttgtcgagtccagatgtcgagtcacatcttgtcattagcatcggtgaagtacattgatgatgcctccggaagcagaggcagaacttgggagatataagattgctctgagtaagtactttgagaagcaaggaaaaactgcagtctactttgagtgggtttcaccacgctctcaccatgcaaacctgcaggctgttcctgtaccattgtctaaagcagacgctgttaacaagatatttcatctagcagccaaaaaactgggatttgaattctctatggtgaatccagatggtgcaaaaactgctagagaatcattgatgtctcaatgcgaaagcaaatcagggctgttttatgttgagctcccggaaggtagaattctcttgcacatggtcgacagtaacgagaagttccctgttcagtttggacgcgaggtgttagcgggactgctaagcatggcggatcgtgcagattggaggaactgcaagatttcaaaggaggaagagattaaactggtggacgatttcaaacaaggtttccgcgaatttgaccctgcagagtgaaaacaatgctctgcgcctgtgtttttgttttgcaatttgtagtctatttttgaggtctcatttgaaatggacatatatgaagcacaagaatgtagtaacgttttccaatgccgcaatttttgttttagggctagttttggaaccacatttttcaagggattttcattctcctaagcaaaattagttcattttcttttgtgaaaataggttggaaaaatggtgttttcaaactagcccttagataaacgtatgtctgatctcggcgtgagtgggcacgcctagggatgaaaacggac

SEQ ID NO: 65737 - DNA, 2234 bp, Zea Mays
cgaagtttgtcactgtcccgttcgtcgtgtcccaaagtccaaaacccaacccacaatggccgccacctcgccggccccggcgccgccgcgcatcctcctcgccggggatgcccacggccgactccaccagctcttcaagcgcgtcaaatcggtgaaccagtcaacggggccgttccacgcgctgctctgcgtggggcagtttttctcccccgagggtgctgcagagggctcaccggaggacgtcaccgactacctcgaggggcgcgcttccgtgcccatcccgacctacttcaccggcgactacggcccagccgcgccgcgattgctatcgaaggccgccgctggtgctcgcgggttcgcacccggtggcatcgagatatgccccaacgtcttctggcttaggggaagcaaccgcttcaccctccacgagatactgtggagttagtcgaatgttgcactatatcgcactcaggcaactaagcaggagtcgcctctcgtggttgaagatactaaaacctgtttgtcggtggtttatttgtcagggaggaaagggttaggagggcctggctgttacagccaggatgatgtggatgccctacgggctcttgcagaagagccagggattgacgatctgttcttgactaatgaatggccgactggagtggtcagtgggtctgacacttccaatgtgcctaatcaggttttggatcccaatgggtatgatcctattgttgctgaattggttgctgagattaaaccaagatatcacattgctggcacaaaaggtgtcttttactcaagggaaccatatgtcaatgattctgctgctcatgttacccgctttattggacttgctaatgttggaaacaaagagaagcagcatctgtcatgtccagtgctgatatcaatgccaagcctccaaacgccactttgtcaccatatgttggttcagcaaaatcagttcctatcgaagaagctccaaaacgtgcagcggagaacatagattcacaatattggcgttatgatgtcaagcggcaaaggcatggggaagctggtgggggtggattgtgtttcaaatttgtatcctcaggatcctgtcaaagagggagtagatgcagttataggcatgatgaagaggcagtggagcattaccagagaaatgtctgttttgattttctaaacaaaggaaaatgtgagaggggcccagaatgcaagtttgttcacagtctttctggggagactgctctaagggatgcaagacctcctagtgaaagaagacgagtggagagcagttgctggttctgcttgtcgagtccagatgtcgagtcacatcttgtcattagcatcggtgaaggttactactgcacacttgcaaaggggccacttgttccaaatcacgttctaatgattcccgtggaacactgccccagtacattgatgatgcctccggaagcagaggcagaacttgggagatataagattgctctgagtaagtactttgagaagcaaggaaaaactgcagtctactttgagtgggtttcaccacgctctcaccatgcaaacctgcaggctgttcctgtaccattgtctaaagcagacgctgttaacaagatatttcatctagcagccaaaaaactgggatttgaattctctatggtgaatccagatggtgcaaaaactgctagagaatcattgatgtctcaatgcgaaagcaaatcagggctgttttatgttgagctcccggaaggtagaattctcttgcacatggtcgacagtaacgagaagttccctgttcagtttggacgcgaggtgttagcgggactgctaagcatggcggatcgtgcagattggaggaactgcaagatttcaaaggaggaagagattaaactggtggacgatttcaaacaaggtttccgcgaatttgaccctgcagagtgaaaacaatgctctgcgcctgtgtttttgttttgcaatttgtagtctatttttgaggtctcatttgaaatggacatatatgaagcacaagaatgtagtaacgttttccaatgccgcaatttttgttttagggctagttttggaaccacatttttcaagggattttcattctcctaagcaaaattagttcattttcttttgtgaaaataggttggaaaaatggtgttttcaaactagcccttagataaacgtatgtctgatctcggcgtgagtgggcacgcctagggatgaaaacggac

SEQ ID NO: 65738 - DNA, 1993 bp, Zea Mays
cgaagtttgtcactgtcccgttcgtcgtgtcccaaagtccaaaacccaacccacaatggccgccacctcgccggccccggcgccgccgcgcatcctcctcgccggggatgcccacggccgactccaccagctcttcaagcgcgtcaaatcggtgaaccagtcaacggggccgttccacgcgctgctctgcgtggggcagtttttctcccccgagggtgctgcagagggctcaccggaggacgtcaccgactacctcgaggggcgcgcttccgtgcccatcccgacctacttcaccggcgactacggcccagccgcgccgcgattgctatcgaaggccgccgctggtgctcgcgggttcgcacccggtggcatcgagatatgccccaacgtcttctggcttaggggaagcaaccgcttcaccctccacggttttggatcccaatgggtatgatcctattgttgctgaattggttgctgagattaaaccaagatatcacattgctggcacaaaaggtgtcttttactcaagggaaccatatgtcaatgattctgctgctcatgttacccgctttattggacttgctaatgttggaaacaaagagaagcagaaatttattcatgcgatttctcctactccagcatctgtcatgtccagtgctgatatcaatgccaagcctccaaacgccactttgtcaccatatgttggttcagcaaaatcagttcctatcgaagaagctccaaaacgtgcagcggagaacatagattcacaatattggcgttatgatgtcaagcggcaaaggcatggggaagctggtgggggtggattgtgtttcaaatttgtatcctcaggatcctgtcaaagagggagtagatgcagttataggcatgatgaagaggcagtggagcattaccagagaaatgtctgttttgattttctaaacaaaggaaaatgtgagaggggcccagaatgcaagtttgttcacagtctttctggggagactgctctaagggatgcaagacctcctagtgaaagaagacgagtggagagcagttgctggttctgcttgtcgagtccagatgtcgagtcacatcttgtcattagcatcggtgaaggttactactgcacacttgcaaaggggccacttgttccaaatcacgttctaatgattcccgtggaacactgccccagtacattgatgatgcctccggaagcagaggcagaacttgggagatataagattgctctgagtaagtactttgagaagcaaggaaaaactgcagtctactttgagtgggtttcaccacgctctcaccatgcaaacctgcaggctgttcctgtaccattgtctaaagcagacgctgttaacaagatatttcatctagcagccaaaaaactgggatttgaattctctatggtgaatccagatggtgcaaaaactgctagagaatcattgatgtctcaatgcgaaagcaaatcagggctgttttatgttgagctcccggaaggtagaattctcttgcacatggtcgacagtaacgagaagttccctgttcagtttggacgcgaggtgttagcgggactgctaagcatggcggatcgtgcagattggaggaactgcaagatttcaaaggaggaagagattaaactggtggacgatttcaaacaaggtttccgcgaatttgaccctgcagagtgaaaacaatgctctgcgcctgtgtttttgttttgcaatttgtagtctatttttgaggtctcatttgaaatggacatatatgaagcacaagaatgtagtaacgttttccaatgccgcaatttttgttttagggctagttttggaaccacatttttcaagggattttcattctcctaagcaaaattagttcattttcttttgtgaaaataggttggaaaaatggtgttttcaaactagcccttagataaacgtatgtctgatctcggcgtgagtgggcacgcctagggatgaaaacggac

SEQ ID NO: 65739 - DNA, 1931 bp, Zea Mays
cgaagtttgtcactgtcccgttcgtcgtgtcccaaagtccaaaacccaacccacaatggccgccacctcgccggccccggcgccgccgcgcatcctcctcgccggggatgcccacggccgactccaccagctcttcaagcgcgtcaaatcggtgaaccagtcaacggggccgttccacgcgctgctctgcgtggggcagtttttctcccccgagggtgctgcagagggctcaccggaggacgtcaccgactacctcgaggggcgcgcttccgtgcccatcccgacctacttcaccggcgactacggcccagccgcgccgcgattgctatcgaaggccgccgctggtgctcgcgggttcgcacccggtggcatcgagatatgccccaacgtcttctggcttaggggaagcaaccgcttcaccctccacgatatcacattgctggcacaaaaggtgtcttttactcaagggaaccatatgtcaatgattctgctgctcatgttacccgctttattggacttgctaatgttggaaacaaagagaagcagaaatttattcatgcgatttctcctactccagcatctgtcatgtccagtgctgatatcaatgccaagcctccaaacgccactttgtcaccatatgttggttcagcaaaatcagttcctatcgaagaagctccaaaacgtgcagcggagaacatagattcacaatattggcgttatgatgtcaagcggcaaaggcatggggaagctggtgggggtggattgtgtttcaaatttgtatcctcaggatcctgtcaaagagggagtagatgcagttataggcatgatgaagaggcagtggagcattaccagagaaatgtctgttttgattttctaaacaaaggaaaatgtgagaggggcccagaatgcaagtttgttcacagtctttctggggagactgctctaagggatgcaagacctcctagtgaaagaagacgagtggagagcagttgctggttctgcttgtcgagtccagatgtcgagtcacatcttgtcattagcatcggtgaaggttactactgcacacttgcaaaggggccacttgttccaaatcacgttctaatgattcccgtggaacactgccccagtacattgatgatgcctccggaagcagaggcagaacttgggagatataagattgctctgagtaagtactttgagaagcaaggaaaaactgcagtctactttgagtgggtttcaccacgctctcaccatgcaaacctgcaggctgttcctgtaccattgtctaaagcagacgctgttaacaagatatttcatctagcagccaaaaaactgggatttgaattctctatggtgaatccagatggtgcaaaaactgctagagaatcattgatgtctcaatgcgaaagcaaatcagggctgttttatgttgagctcccggaaggtagaattctcttgcacatggtcgacagtaacgagaagttccctgttcagtttggacgcgaggtgttagcgggactgctaagcatggcggatcgtgcagattggaggaactgcaagatttcaaaggaggaagagattaaactggtggacgatttcaaacaaggtttccgcgaatttgaccctgcagagtgaaaacaatgctctgcgcctgtgtttttgttttgcaatttgtagtctatttttgaggtctcatttgaaatggacatatatgaagcacaagaatgtagtaacgttttccaatgccgcaatttttgttttagggctagttttggaaccacatttttcaagggattttcattctcctaagcaaaattagttcattttcttttgtgaaaataggttggaaaaatggtgttttcaaactagcccttagataaacgtatgtctgatctcggcgtgagtgggcacgcctagggatgaaaacggac

SEQ ID NO: 65740 - DNA, 2265 bp, Zea Mays
cgaagtttgtcactgtcccgttcgtcgtgtcccaaagtccaaaacccaacccacaatggccgccacctcgccggccccggcgccgccgcgcatcctcctcgccggggatgcccacggccgactccaccagctcttcaagcgcgtcaaatcggtgaaccagtcaacggggccgttccacgcgctgctctgcgtggggcagtttttctcccccgagggtgctgcagagggctcaccggaggacgtcaccgactacctcgaggggcgcgcttccgtgcccatcccgacctacttcaccggcgactacggcccagccgcgccgcgattgctatcgaaggccgccgctggtgctcgcgggttcgcacccggtggcatcgagatatgccccaacgtcttctggcttaggggaagcaaccgcttcaccctccacgagatactgtggagttagtcgaatgttgcactatatcgcactcaggcaactaagcaggagtcgcctctcgtggttgaagatactaaaacctgtttgtcggtggtttatttgtcagggaggaaagggttaggagggcctggctgttacagccaggatgatgtggatgccctacgggctcttgcagaagagccagggattgacgatctgttcttgactaatgaatggccgactggagtggtcagtgggtctgacacttccaatgtgcctaatcaggttttggatcccaatgggtatgatcctattgttgctgaattggttgctgagattaaaccaagatatcacattgctggcacaaaaggtgtcttttactcaagggaaccatatgtcaatgattctgctgctcatgttacccgctttattggacttgctaatgttggaaacaaagagaagcagaaatttattcatgcgatttctcctactccagcatctgtcatgtccagtgctgatatcaatgccaagcctccaaacgccactttgtcaccatatgttggttcagcaaaatcagttcctatcgaagaagctccaaaacgtgcagcggagaacatagattcacaatattggcgttatgatgtcaagcggcaaaggcatggggaagctggtgggggtggattgtgtttcaaatttgtatcctcaggatcctgtcaaagagggagtagatgcagttataggcatgatgaagaggcagtggagcattaccagagaaatgtctgttttgattttctaaacaaaggaaaatgtgagaggggcccagaatgcaagtttgttcacagtctttctggggagactgctctaagggatgcaagacctcctagtgaaagaagacgagtggagagcagttgctggttctgcttgtcgagtccagatgtcgagtcacatcttgtcattagcatcggtgaaggttactactgcacacttgcaaaggggccacttgttccaaatcacgttctaatgattcccgtggaacactgccccagtacattgatgatgcctccggaagcagaggcagaacttgggagatataagattgctctgagtaagtactttgagaagcaaggaaaaactgcagtctactttgagtgggtttcaccacgctctcaccatgcaaacctgcaggctgttcctgtaccattgtctaaagcagacgctgttaacaagatatttcatctagcagccaaaaaactgggatttgaattctctatggtgaatccagatggtgcaaaaactgctagagaatcattgatgtctcaatgcgaaagcaaatcagggctgttttatgttgagctcccggaaggtagaattctcttgcacatggtcgacagtaacgagaagttccctgttcagtttggacgcgaggtgttagcgggactgctaagcatggcggatcgtgcagattggaggaactgcaagatttcaaaggaggaagagattaaactggtggacgatttcaaacaaggtttccgcgaatttgaccctgcagagtgaaaacaatgctctgcgcctgtgtttttgttttgcaatttgtagtctatttttgaggtctcatttgaaatggacatatatgaagcacaagaatgtagtaacgttttccaatgccgcaatttttgttttagggctagttttggaaccacatttttcaagggattttcattctcctaagcaaaattagttcattttcttttgtgaaaataggttggaaaaatggtgttttcaaactagcccttagataaacgtatgtctgatctcggcgtgagtgggcacgcctagggatgaaaacggac

SEQ ID NO: 65741 - DNA, 1900 bp, Zea Mays
cgaagtttgtcactgtcccgttcgtcgtgtcccaaagtccaaaacccaacccacaatggccgccacctcgccggccccggcgccgccgcgcatcctcctcgccggggatgcccacggccgactccaccagctcttcaagcgcgtcaaatcggtgaaccagtcaacggggccgttccacgcgctgctctgcgtggggcagtttttctcccccgagggtgctgcagagggctcaccggaggacgtcaccgactacctcgaggggcgcgcttccgtgcccatcccgacctacttcaccggcgactacggcccagccgcgccgcgattgctatcgaaggccgccgctggtgctcgcgggttcgcacccggtggcatcgagatatgccccaacgtcttctggcttaggggaagcaaccgcttcaccctccacgatatcacattgctggcacaaaaggtgtcttttactcaagggaaccatatgtcaatgattctgctgctcatgttacccgctttattggacttgctaatgttggaaacaaagagaagcagcatctgtcatgtccagtgctgatatcaatgccaagcctccaaacgccactttgtcaccatatgttggttcagcaaaatcagttcctatcgaagaagctccaaaacgtgcagcggagaacatagattcacaatattggcgttatgatgtcaagcggcaaaggcatggggaagctggtgggggtggattgtgtttcaaatttgtatcctcaggatcctgtcaaagagggagtagatgcagttataggcatgatgaagaggcagtggagcattaccagagaaatgtctgttttgattttctaaacaaaggaaaatgtgagaggggcccagaatgcaagtttgttcacagtctttctggggagactgctctaagggatgcaagacctcctagtgaaagaagacgagtggagagcagttgctggttctgcttgtcgagtccagatgtcgagtcacatcttgtcattagcatcggtgaaggttactactgcacacttgcaaaggggccacttgttccaaatcacgttctaatgattcccgtggaacactgccccagtacattgatgatgcctccggaagcagaggcagaacttgggagatataagattgctctgagtaagtactttgagaagcaaggaaaaactgcagtctactttgagtgggtttcaccacgctctcaccatgcaaacctgcaggctgttcctgtaccattgtctaaagcagacgctgttaacaagatatttcatctagcagccaaaaaactgggatttgaattctctatggtgaatccagatggtgcaaaaactgctagagaatcattgatgtctcaatgcgaaagcaaatcagggctgttttatgttgagctcccggaaggtagaattctcttgcacatggtcgacagtaacgagaagttccctgttcagtttggacgcgaggtgttagcgggactgctaagcatggcggatcgtgcagattggaggaactgcaagatttcaaaggaggaagagattaaactggtggacgatttcaaacaaggtttccgcgaatttgaccctgcagagtgaaaacaatgctctgcgcctgtgtttttgttttgcaatttgtagtctatttttgaggtctcatttgaaatggacatatatgaagcacaagaatgtagtaacgttttccaatgccgcaatttttgttttagggctagttttggaaccacatttttcaagggattttcattctcctaagcaaaattagttcattttcttttgtgaaaataggttggaaaaatggtgttttcaaactagcccttagataaacgtatgtctgatctcggcgtgagtgggcacgcctagggatgaaaacggac

SEQ ID NO: 65742 - DNA, 1753 bp, Zea Mays
tggttccgtgttgagggcattcaaattactactaaaaaattggaagttcaagacagccctgatgccatcagcacctagggagaaggatccacaagttactacgagccctgcaacggggcctcctcgggtgcacactctcatgcctgttaatgccacaggaagtcctgccatggacctgaagctggcgcaaccatcttgccctggccatgtagtactcctgcacccttgtgcaccttggcctcctcatttgctagtcccgttgtttcttccacaccaaaatgtggttcactctctaaccgaatttcaaatcctctctattaatggggaacaatgcctattgtccttattctatttattgatgggcaggatgctctagtggatgtggctgcagcagatgttaaccctacgaccgatacctgtgatgagaagatgtttcccaagggggtttcggaagaagggagcaaatgaagcaaagtgtccacatcttgaaacacgaattggatgccccgcaagcttgaccattagacttactgctaatggcaagtaccatttgatagagtttgtgccgaatcataaccatcaactggcaatagcctctacaattcatatgctgaaagcgaagaaaatcaggcacaaagcacgggttgtgagagaaaatctgacagatgataccgtgagtacaccagattttgagaatgaagatgaggcatatgaatattatagatatgcattgcaaggttatgatatgccattggctttgagtgtgaatcatcataagcagacaattatctttggtgctgcaattattcatgatgaaagtaaagaagctttccaatggttattagatactttcaagatggcaatgaatggaacacatcccaagacattgttaattgatagatctgttgccttaaatgaagctgttacagcccatcgttattgtgtgtggcaaatttatcaaaatgctctacaacagttgagtcaagctttccatggttcaaaaactttagattgcaacttcaagagatgtctatttgattgtgaggatgagtttgtgacagcatgtaaggaaatgttagaaaacgtgcaacaaaaggaaagtttgacaagtgagctgaagaaacatctatccttggaatgtgaccttttgaacttctttgagcagtttgaaagactgttatgtgatcgtcagtctacagagatggaggctgaaccaagagaccactttgttaaatttgattcactcaattccacgatggactgtacttgtaagacgtttgaacttattggcatcccatgtcgccatatgctggagcaatgtcattgtgaccgaagtgcgactgtgacgatatatgaattcgatcttgttggttctgctcttgctggacgaggtaatggttctgctcttgcaggatgtggtaatcttgatggttctgatcttgtaggacgtggtaattttgctggttctgatctggcagaccgtggtaatattgctggttttggtcttgcagaacttgataatcttgctggttctggtcttgcagaccgtggtaatcttgctggttctggtcttgcagaaggtggaaatcttgttggttctggtcttgtagaaggtggtaatcttgctggttctggtctgggagaccgtggtaatattgctgattttggtcttgcagaatttgataatcttgctggttctgttctcgtagaccgtggtaatcttcctggttctggtcttgtttttttttggtaa

SEQ ID NO: 65743 - DNA, 2442 bp, Zea Mays
caagttactacgagccctgcaacggggcctcctcgggtgcacactctcatgcctgttaatgccacaggaagtcctgccatggacctgaagctggcgcaaccatcttgccctggccatgtagtactcctgcacccttgtgcaccttggcctcctcatttgctagtcccgttgtttcttccacaccaaaatgtggttcactctctaaccgaatttcaaatcctctctattaatggggaacaatgcctattgtccttattctatttattgatgggcaggatgctctagtggatgtggctgcagcagatgttaaccctacgaccgatacctgtgatgagaagatgtttcccaaggtgaatatgttgttcgacggtgaaagcgatgtgtatgagttctacaatgcatattcagaaaacgtgggttttctttgtccgaaggggtttcggaagaagggagcaaatgaagcaaagtgtccacatcttgaaacacgaattggatgccccgcaagcttgaccattagacttactgctaatggcaagtaccatttgatagagtttgtgccgaatcataaccatcaactggcaatagcctctacaattcatatgctgaaagcgaagaaaatcaggcacaaagcacgggttgtgagagaaaatctgacagatgataccgtgagtacaccagattttgagaatgaagatgaggcatatgaatattatagtatgtatgcagggaaaattgggtttatcgtgcgtacggctggcatgacagtgaataatgagaatgttataaccacaagaatgcttgtttgttcaaaagaacggttccgtgagaagaaaacaggagcaaaaagagtaaagaaacctcgacaggaaatgtgaactggttgtctagcatgtatggtcatcaggcttggaactaacgggaaatatcgagtcacagaacttgttaccttccacaatcactagcttggagctgaagcagcttctgatcttgtcatggcatctgggagtagagaaaatgatcaagatagatcacccgatgattctgtttacaagcaaaatctgattaatggaagttgcactctgaattccctagaaggtacaagttgaaaaagatacaagtgtgcaaatactccacactcaggtgatgttggtgctacactagagtacttgcagaaggtgcagcatgataacccttcgttcttctatgctgtaaaatctgatgatgatgggaacttcataatttttatgggcacattcaaaatctattatggactttttccattttggtgatgtagtatgttttgattcaggatatgcattgcaaggttatgatatgccattggctttgagtgtgaatcatcataagcagacaattatctttggtgctgcaattattcatgatgaaagtaaagaagctttccaatggttattagatactttcaagatggcaatgaatggaacacatcccaagacattgttaattgatagatctgttgccttaaatgaagctgttacagcccatcgttattgtgtgtggcaaatttatcaaaatgctctacaacagttgagtcaagctttccatggttcaaaaactttagattgcaacttcaagagatgtctatttgattgtgaggatgagtttgtgacagcatgtaaggaaatgttagaaaagtatgacatagaagataatcaatagctagcatatttgttctcaagaaaggagaaatgggcactgacatatggtcgtgatgcattttatgttgatatgaaaagcgtgcaacaaaaggaaagtttgacaagtgagctgaagaaacatctatccttggaatgtgaccttttgaacttctttgagcagtttgaaagactgttatgtgatcgtcagtctacagagatggaggctgaaccaagagaccactttgttaaatttgattcactcaattccacgatggactgtacttgtaagacgtttgaacttattggcatcccatgtcgccatatgctggagcaatgtcattgtgaccgaagtgcgactgtgacgatatatgaattcgatcttgttggttctgctcttgctggacgaggtaatggttctgctcttgcaggatgtggtaatcttgatggttctgatcttgtaggacgtggtaattttgctggttctgatctggcagaccgtggtaatattgctggttttggtcttgcagaacttgataatcttgctggttctggtcttgcagaccgtggtaatcttgctggttctggtcttgcagaaggtggaaatcttgttggttctggtcttgtagaaggtggtaatcttgctggttctggtctgggagaccgtggtaatattgctgattttggtcttgcagaatttgataatcttgctggttctgttctcgtagaccgtggtaatcttcctggttctggtcttgtttttttttggtaa

SEQ ID NO: 65744 - DNA, 3541 bp, Zea Mays
cttacgtcgaacaccttggaggttcctgtcctctcgtatcgaacacctgaaacccaccgcccgccgatcacgaagcggcggcggcacagcaagatgctatcccgcgcgcggcgcctccaccccgccgttcgccgattcctcctcccaaacacgcctgcaccctcccgtcatcctccgctccctcctcaacacagcgcttccgccaaaacctctaaacccttctcgattctcttccgccgccacctctgctcctcaccaccggcaacgccaccgccaacatcaccgcctccagcggtggtatcttctgaccttccggctgtccacgtcaatgaagtttgcccaggatgcgggatcgccatgcaatcctcggaccccgagctcccggggttcttcttgctcccctccgcaaaatcccccaactaccgcgcgcgcctcgcgcctgtcaccgccgacgacacccgaatctccgcctccctcaagtctggtcacctccgggaggatatacagccgtcgggtggcgacaagccggccgcggcggcggctgagatggcggaggccaagggagaaggcaaggttttggtgtgcgcgcgatgccactcactgcgccactacggccgcgtcaagcacccggacgccgagcgcctcctcccggacttcgacttcgttgccgccgtcggcccgcgcctcgcgtcgccttccggggccaggtcgctcgtgctgctcctggcggacgcctctgacttcgatgggtcgttcccgcgcgccgtcgcgcgattggttgccgcagccggcgaggcccatcgcgcggactggaagcacggggccccggccaacctcccacgcgcgttgctcgtggtcaccaagctcgacctgctccccacgccatcgctgtcccccgacgatgtgcatgcgtgggcgcactctcgcgctcgcgccggtgcgggtgccgaccttcggctcgctggggtgcacttggttagcgccacgcgcggatggggcgtccgcgacctgctcgaacatgtgcgcgagctcgcggggacgcgcggcaatgtctgggccgtgggtgcgcggaatgttggcaagtcaacgctcctcaatgcgattgccagatgctgtggcatagtcgggcgaccgaccttgacggaggctccagttccgggaacgacccttgacgtgattaagcttgacggcgttcttggcgctcaagcaaagctgtttgacactcctggtcttctccatgggcatcagttgacatctagactgacgagcgaggagatgaagttggttcaagtgaggaaggagatgagtcccagaacttacagaataaaggtcgcatctattttcctggtcttgatatattctctaatgatatgtgtcaatatgtccaatggtctggctgcttcccatcttctcaagttccttgtgaaaattacagcatctggctgcaactgggtttaatctgtaaaatgtctactcaaatatcttactgcagtttttgcaaagctgaacttagcagttctttggttttgaattggactaggtaatggacaaatcatgaagtttatgaattctcagttattaggttgtgatctgcttgactaacattgttgatttgatcttaagttgtttagagcatcattagataaagagttaaatgtatggtaggcccttgaacttgtgaggatgtcacttaggtccacaaactatcaaaatgcatttttggcatcctaaattcctaacattgcttaagtgtgcgacttaggtccataacggttcggaaggtgggttttggcctacatggcttcgccagtgtcgcagtgactgtcgttgcgcatgtaaggagcgtgtgaggttggtttgtaccatggaaataaccagagaagaccctcttcttcctttctttttgtttctgtggtccaagatggtggagtagaaatgaagggaagaagagggtatctttgcttattttcatggccaaaccaacctcatgctctcaccttgtgcgcagcgacacagttggtgccatgctggcaacggcatgtagaccgaaacctaccttcagtaccgttatggaccaaagtggcacacttaaacaacactaggatgctagaaatgcatttgtcacccacactggcaatgacacgtagccaaaacctagcttccaaaccgttatggacctaagtgacacacttaaacaatattagggtgccaaaaatacattatgagagttcatgtatctaagtggcaccctcagacaagttcaagggcctaccctgcatttaactctttgataaaacatttgtggcataggattattcaataaacagcagttgtcaaatgatgaaatatgtgtactttgttcttgcatcgtctgcagacagaacattctatacatattggtggactggtgcgcctggacgtagaagagttaactgtaggatcgatctatgttacagtttgggcatcaccacttgtcccacttcacatgggaaagacagaaaacacgacaacattgataaaagaacactttggcttgcaattacagcctcccataggccaggagcgggtaaaggagcttggtaaatgggtgaggaaacagttcaaagtttctgggaacagttgggatacaaactctaaggatatagccatcgctggtcttggttggtttggaattgggctgaaaggagaggcagtgttaggattatggacatatgatggtgttgatgtcatctccaggagctccttagtccatgagagggcttcagtttttgaggaagctggtttcacagtttcacagattgtttctaaggcagatagcatgaccaataagctgaagagcaccaagaagccaaaaaaggagagaatgaaacgtacttcccccacagagccggaagcttgagacctgcttccaccgatagatacttgagtcttttcatccagtcctgtgactggagtatcattttggtgatcatgttacacaatgttccgcattggccctagaaactgttaattgaattcagaagcagcggctgagtatacaatgtattgttctccagaaggaacctgccctaatcggagtgtctatgttttacaaagctctaaattttgatcctttgctagtttgctgagctggagagtcaggaagtattctgagatgtcagtcagttacggaacacctatctggagagtcagtcagttaggaaatactctgtgagatgttttgatgttaacttataaaatccaacatgaggacttgtgttccagcattaaagggaaggtgtggagacattccagattgcatttgatgttatcattcagttttaggattcatgattgtgcctccttgtaaagttgtagctgaactataatgatgtaggttccacagatgcatatcctgtttttcgtcaacattgcctgcattatagattccgtgggcatcgttctcagaccacagcttgttttctaatgaactttctctcaattgcttgttgagctattggatgcaatgcgttttgtattgaatccaaccattgtttctaaa

SEQ ID NO: 65745 - DNA, 1110 bp, Zea Mays
acaccgcgcacggcatacccaccactcgatccaccacacgagggcacgagagaagaaccacttccatggccggcgcctcatcgtgagctcctcgcagcatcgctaccgcgcccttgcgttagctctgtcttcctgtcgcacgtacgcttgtgagacaagcgagaaggcacgtacgtttagtttattcattttcttggagcgggatctgaggttccaaccggcaaaagagagatgatggtagggaagagggagcgggactgcaagaacccgatgcggcggcgttctgcagcctggagtgcagggagcggcacatgacgcaggaggagtggaaggacaagtgcgcggtgacgtcgatcaaggacgctgccgcgggctcggccaaggtcaagggccgccgcgccggctccggcaaggctgggggcacggtggccgcagcatgacgacgatgctgatttgctgaacctacacctagctacctagctaccaccagcttctcctcaactagccagctgcaagctccgattattcacccgtgcaaccatctatatactaaccatgcatcatatatgatatatccccagctagctcaatcgattattaattatttgttatccggatccatcgctcatcgctgcatgcaagccatactgatagatataatactataccattagcttgattccatcatcgatcatccgcgcacgcatgcttggtaaaagaaattcttcaagctttgttgctatatatgctactggagtactatagatgttgctatacactttagtgtagcgatacagcagcatgagtagacgtccttgtgtacaagtggaaaaaagaaaggtgaagggaggaaattgatgtggcttcggcactactagcttggcagatgcactgggccacggatgatccctgtcactgccactagccctgagaacaagacggtgtgaatttcagtgtttcattattacctcaaattgactctgggcatatcgttgtccctccgtagggggagttttattattttactaattttctgtttggatttttattattcaccgatgcaaatcatcatttgttcaataaaactcgaatcaacttattatttgcaag

SEQ ID NO: 65746 - DNA, 1386 bp, Zea Mays
acaccgcgcacggcatacccaccactcgatccaccacacgagggcacgagagaagaaccacttccatggccggcgcctcatcgtgagctcctcgcagcatcgctaccgcgcccttgcgttagctctgtcttcctgtcgcacgtacgcttgtgagacaagcgagaagagagatgatggtagggaagagggagcgggactgcaagaacccgatgcggcggacgacgagcatgacggagttcgcgccgcccgacgcgctcgcggcggtgatggaggacgaggagggcccccagctgtccgacgacagcagccgtgacggcgggcagcaggactggctgtccgcgctcggcggcggcggcggcggcgtcgggggcgccgcggcgcaggaggactggctcgcggcgtaccacgcccgcgcggcgccggcgcgggcggggctccgccggaactcggccgactactccgccgtcgagaccgccgcgttcctgcgcgcctgcgggctctgccggcgccgcctcgggcccggccgagacaccttcatgtacaagggcgaggcggcgttctgcagcctggagtgcagggagcggcacatgacgcaggaggagtggaaggacaagtgcgcggtgacgtcgatcaaggacgctgccgcgggctcggccaaggtcaagggccgccgcgccggctccggcaaggctgggggcacggtggccgcagcatgacgacgatgctgatttgctgaacctacacctagctacctagctaccaccagcttctcctcaactagccagctgcaagctccgattattcacccgtgcaaccatctatatactaaccatgcatcatatatgatatatccccagctagctcaatcgattattaattatttgttatccggatccatcgctcatcgctgcatgcaagccatactgatagatataatactataccattagcttgattccatcatcgatcatccgcgcacgcatgcttggtaaaagaaattcttcaagctttgttgctatatatgctactggagtactatagatgttgctatacactttagtgtagcgatacagcagcatgagtagacgtccttgtgtacaagtggaaaaaagaaaggtgaagggaggaaattgatgtggcttcggcactactagcttggcagatgcactgggccacggatgatccctgtcactgccactagccctgagaacaagacggtgtgaatttcagtgtttcattattacctcaaattgactctgggcatatcgttgtccctccgtagggggagttttattattttactaattttctgtttggatttttattattcaccgatgcaaatcatcatttgttcaataaaactcgaatcaacttattatttgcaag

SEQ ID NO: 65747 - DNA, 1186 bp, Zea Mays
aaggcgacccggcccctctgtctgtctctctccagtctccagacagagtccacagtctagacgagagcgcgcttgtcacttgcaggccagtcttatttaagagtggccaggaccgtgtcctcagcctcgtacaatacaatacaacccaggatctctgtgttccttctatactctgatgcctgtgtgtccctcgccctctttcttttgcctcaatatcagaagctagctttcttcttcatcgcgttacgatctcggtgaggatcgaacgttcttcgtcttgccttaaggaaaaacccctctgacctctcgatcgtcgcgggtggaggcgaacttgctggtgagctggacacaaacccgtgggccggtgctcacgccaggataagtcgcctcaagaggcagcacacctcgccggctgccgccgacgcgccgtccgaccccgccaggcagatggagcgcgccgtccgcacgtcagcggtagtcaagctacttacccgatccctgctatctggcgtgctccagccgggccggcacctgaccgtcaccaccggcaccgcctccgccatcgccggcaccagctcgtggccctccacggcagcgctgccaagcagatcggtcgtggcagacctgctcgacgccatcgagacgaaccgggccgtgccgcgctgcggtggatccggtggcgacggcggactcggactcgggtggtggaacctcaacgtggagggtgtaatgctgttgctcagggtcgtccaggcggtccggggaaggaacaatctagcggcgccggcgccagggggaaagaggccacgggacgagggaccagctggccgcgacaccatgagaggtggcgttgtgggaggcagcagcgcggcacggcggtggtgtggcgctggcgggcggccggggaagattgggaatgcaccgttggcgcctgtggctgtggggtccagaccatcatcaaatagatgcttgattgacgatcggtaggggtttagggtaattagggaacggtttgatttgttgatatgctcagactgctatcgtacgcgatgcatgattgatgatcggtatgcttcgagaagtcaaattctttattagttctcgtcgagaccatcaccaatcaaatagacgcatgcttggcgatcgcagagttctttgtcgtctcaataatactcgataaacttag

SEQ ID NO: 65748 - DNA, 2438 bp, Zea Mays
atattttgagtttctatagacacgtcactggtgctccgggacacgcggaagcggaagcgaagcaggccaactggcccggtccctaaaatccatcgaaatcctccgatttccgaagacgagacggatatgcggtgtgccaatgtcaaatctctgatagcattggtcaattgactcgtcctgaatgcctcctcctaacctttggatcaacaatggagggcggggaacgcacgcgttgcaattgcaattgcaacatccgaacgcgtcggcgagctaggcgagcagatgaaccccggtcactgttcccaacatctccatcgacgaacatttccacgaaaatctcgctgctctcgcgaaaaaaggacgccacccgcccttgcttgctctccagtttgcaccctggaggcaggtgcaggggcgctcctcgccagcgggcagtcaaccgcccgcgtcggccatggcggaggcggggaggcggacgcttgcgctggtgaacctggcggccatcatggagcgcgccgacgaggcgctgctgcccgcggtgtaccgggaggtgggcgcagcgctgggcgccacgcccgtggcactcggcgcgctcacgctctaccgctcagccgtgcaggccgcctgctacccgctggccgcctacgccgccgtgcgctacaaccgcgcccacgtagtcgccgttggggccgttctctgggccgccgccaccttcctcgtcgccgtctcagacacctttgcccagcaggtagcgatagctagatgtttgaatggtattggcctagcacttgtcaccccggcgatccaatctctggtggcagattgctctgatgacaacactcgaggcgccgcatttggatggcttcaacttacgggaaacattggttcaattattggtggtttgttttccctgatgcttgcacccaccacagtcatgggtattgccggctggcgtgttgcatttcacattgttgctgttataagcgttgtagtcggtgtgttggttggcctatttgcagtggaccctcatttcctccatgttgaaagtggcgagcagctgttacgcaagtctgcatgggcagagatgaaggatttggtgagagaagccaaggctgttgtgaagatctcatcgtttcagatcattgtggctcagggtgtcacaggctcgtttccatggtctgccctggcctttgccccaatgtggctggagttgatggggtttacgcacaacagaactgggctcctgatggtaacatttgcattggcaagctcacttggagggctgttaggtggaaagatgggggatcactttgctactcgcttcccgaattccggccgaatagtcctgtcgcagataagctcagcttctgctattccgttggctgctctgttgcttttggggctccctgataactcttctggttccttgcatggacttgtcatgtttatcatgggtctgagcatctcctggaatggtcctgcaactaacaagcaacccgatatttgctgagattgtacctgagaggtcaaggacaagcatctatgcattggaccgttctttagagtcagttctagcttcattcgctccaccagttgttgggtttctagccgagcatgtctatgggtacaatcccgtcccctacggagctgcagataacaatgttggcagggataaatcaaatgctggcgccctagccaaagctctgtacacgtcgatcgccatccctatgctgctgtgctgcttcatctactccctgttgtaccggacgtacccacgagacagggagagggcaaggatggactctctgatcactccagagctccagcagattgaactggaaagatgtcatgggcaagcggattattattctggaaggaaggacaaggacggctctactgtcttcgatatggattacagaggaatcgacgcctatgatgacgagaagggattaatcgatcagcaggctaagcagagcggcaatgtcaagtggcacaggagtcattcacagaatttgtgacgtttttgccaaagtatcagtgctctcggatctgtacagaaaacgtgagtgagagtgagttacctctcgaaggacgattacatagggttgtttagatagactcagaagcatcagaacaattcggttatgttcagcattatatatatatatatatatatataataatagtataagacttttggaggaatatggaggtgaatatatatttgtatttgatcagaccgacgaggctactatacaaattatgtaatcagtaaaacaaaaatataaactgcccgtctagctcagttggtagagcgcaaggctcttaaccttgtggtcgtgggttcgagccccacggtgggcgttatttttgttcactgtgtgctcttcaatcaatgatcagagtttatatatattttgccaaacggccagaaagcc

SEQ ID NO: 65749 - DNA, 2236 bp, Zea Mays
cggtccctaaaatccatcgaaatcctccgatttccgaagacgagacggatatgcggtgtgccaatgtcaaatctctgatagcattggtcaattgactcgtcctgaatgcctcctcctaacctttggatcaacaatggagggcggggaacgcacgcgttgcaattgcaattgcaacatccgaacgcgtcggcgagctaggcgagcagatgaaccccggtcactgttcccaacatctccatcgacgaacatttccacgaaaatctcgctgctctcgcgaaaaaaggacgccacccgcccttgcttgctctccagtttgcaccctggaggcaggtgcaggggcgctcctcgccagcgggcagtcaaccgcccgcgtcggccatggcggaggcggggaggcggacgcttgcgctggtgaacctggcggccatcatggagcgcgccgacgaggcgctgctgcccgcggtgtaccgggaggtgggcgcagcgctgggcgccacgcccgtggcactcggcgcgctcacgctctaccgctcagccgtgcaggccgcctgctacccgctggccgcctacgccgccgtgcgctacaaccgcgcccacgtagtcgccgttggggccgttctctgggccgccgccaccttcctcgtcgccgtctcagacacctttgcccaggtagcgatagctagatgtttgaatggtattggcctagcacttgtcaccccggcgatccaatctctggtggcagattgctctgatgacaacactcgaggcgccgcatttggatggcttcaacttacgggaaacattggttcaattattgtggaccctcatttcctccatgttgaaagtggcgagcagctgttacgcaagtctgcatgggcagagatgaaggatttggtgagagaagccaaggctgttgtgaagatctcatcgtttcagatcattgtggctcagggtgtcacaggctcgtttccatggtctgccctggcctttgccccaatgtggctggagttgatggggtttacgcacaacagaactgggctcctgatggtaacatttgcattggcaagctcacttggagggctgttaggtggaaagatgggggatcactttgctactcgcttcccgaattccggccgaatagtcctgtcgcagataagctcagcttctgctattccgttggctgctctgttgcttttggggctccctgataactcttctggttccttgcatggacttgtcatgtttatcatgggtctgagcatctcctggaatggtcctgcaactaacaagcaacccgatatttgctgagattgtacctgagaggtcaaggacaagcatctatgcattggaccgttctttagagtcagttctagcttcattcgctccaccagttgttgggtttctagccgagcatgtctatgggtacaatcccgtcccctacggagctgcagataacaatgttggcagggataaatcaaatgctggcgccctagccaaagctctgtacacgtcgatcgccatccctatgctgctgtgctgcttcatctactccctgttgtaccggacgtacccacgagacagggagagggcaaggatggactctctgatcactccagagctccagcagattgaactggaaagatgtcatgggcaagcggattattattctggaaggaaggacaaggacggctctactgtcttcgatatggattacagaggaatcgacgcctatgatgacgagaagggattaatcgatcagcaggctaagcagagcggcaatgtcaagtggcacaggagtcattcacagaatttgtgacgtttttgccaaagtatcagtgctctcggatctgtacagaaaacgtgagtgagagtgagttacctctcgaaggacgattacatagggttgtttagatagactcagaagcatcagaacaattcggttatgttcagcattatatatatatatatatatatataataatagtataagacttttggaggaatatggaggtgaatatatatttgtatttgatcagaccgacgaggctactatacaaattatgtaatcagtaaaacaaaaatataaactgcccgtctagctcagttggtagagcgcaaggctcttaaccttgtggtcgtgggttcgagccccacggtgggcgttatttttgttcactgtgtgctcttcaatcaatgatcagagtttatatatattttgccaaacggccagaaagcc

SEQ ID NO: 65750 - DNA, 2280 bp, Zea Mays
ctaaaatccatcgaaatcctccgatttccgaagacgagacggatatgcggtgtgccaatgtcaaatctctgatagcattggtcaattgactcgtcctgaatgcctcctcctaacctttggatcaacaatggagggcggggaacgcacgcgttgcaattgcaattgcaacatccgaacgcgtcggcgagctaggcgagcagatgaaccccggtcactgttcccaacatctccatcgacgaacatttccacgaaaatctcgctgctctcgcgaaaaaaggacgccacccgcccttgcttgctctccagtttgcaccctggaggcaggtgcaggggcgctcctcgccagcgggcagtcaaccgcccgcgtcggccatggcggaggcggggaggcggacgcttgcgctggtgaacctggcggccatcatggagcgcgccgacgaggcgctgctgcccgcggtgtaccgggaggtgggcgcagcgctgggcgccacgcccgtggcactcggcgcgctcacgctctaccgctcagccgtgcaggccgcctgctacccgctggccgcctacgccgccgtgcgctacaaccgcgcccacgtagtcgccgttggggccgttctctgggccgccgccaccttcctcgtcgccgtctcagacacctttgcccagattgctctgatgacaacactcgaggcgccgcatttggatggcttcaacttacgggaaacattggttcaattattggtggtttgttttccctgatgcttgcacccaccacagtcatgggtattgccggctggcgtgttgcatttcacattgttgctgttataagcgttgtagtcggtgtgttggttggcctatttgcagtggaccctcatttcctccatgttgaaagtggcgagcagctgttacgcaagtctgcatgggcagagatgaaggatttggtgagagaagccaaggctgttgtgaagatctcatcgtttcagatcattgtggctcagggtgtcacaggctcgtttccatggtctgccctggcctttgccccaatgtggctggagttgatggggtttacgcacaacagaactgggctcctgatggtaacatttgcattggcaagctcacttggagggctgttaggtggaaagatgggggatcactttgctactcgcttcccgaattccggccgaatagtcctgtcgcagataagctcagcttctgctattccgttggctgctctgttgcttttggggctccctgataactcttctggttccttgcatggacttgtcatgtttatcatgggtctgagcatctcctggaatggtcctgcaactaacaagcaacccgatatttgctgagattgtacctgagaggtcaaggacaagcatctatgcattggaccgttctttagagtcagttctagcttcattcgctccaccagttgttgggtttctagccgagcatgtctatgggtacaatcccgtcccctacggagctgcagataacaatgttggcagggataaatcaaatgctggcgccctagccaaagctctgtacacgtcgatcgccatccctatgctgctgtgctgcttcatctactccctgttgtaccggacgtacccacgagacagggagagggcaaggatggactctctgatcactccagagctccagcagattgaactggaaagatgtcatgggcaagcggattattattctggaaggaaggacaaggacggctctactgtcttcgatatggattacagaggaatcgacgcctatgatgacgagaagggattaatcgatcagcaggctaagcagagcggcaatgtcaagtggcacaggagtcattcacagaatttgtgacgtttttgccaaagtatcagtgctctcggatctgtacagaaaacgtgagtgagagtgagttacctctcgaaggacgattacatagggttgtttagatagactcagaagcatcagaacaattcggttatgttcagcattatatatatatatatatatatataataatagtataagacttttggaggaatatggaggtgaatatatatttgtatttgatcagaccgacgaggctactatacaaattatgtaatcagtaaaacaaaaatataaactgcccgtctagctcagttggtagagcgcaaggctcttaaccttgtggtcgtgggttcgagccccacggtgggcgttatttttgttcactgtgtgctcttcaatcaatgatcagagtttatatatattttgccaaacggccagaaagcc

SEQ ID NO: 65751 - DNA, 1904 bp, Zea Mays
attgactcgtcctgaatgcctcctcctaacctttggatcaacaatggagggcggggaacgcacgcgttgcaattgcaattgcaacatccgaacgcgtcggcgagctaggcgagcagatgaaccccggtcactgttcccaacatctccatcgacgaacatttccacgaaaatctcgctgctctcgcgaaaaaaggacgccacccgcccttgcttgctctccagtttgcaccctggaggcaggtgcaggggcgctcctcgccagcgggcagtcaaccgcccgcgtcggccatggcggaggcggggaggcggacgcttgcgctggtgaacctggcggccatcatggagcgcgccgacgaggcgctgctgcccgcggtgtaccgggaggtgggcgcagcgctgggcgccacgcccgtggcactcggcgcgctcacgctctaccgctcagccgtgcaggccgcctgctacccgctggccgcctacgccgccgtgcgctacaaccgcgcccacgtagtcgccgttggggccgttctctgggccgccgccaccttcctcgtcgccgtctcagacacctttgcccaggtagcgatagctagatgtttgaatggtattggcctagcacttgtcaccccggcgatccaatctctggtggcagattgctctgatgacaacactcgaggcgccgcatttggatggcttcaacttacgggaaacattggttcaattattggtggtttgttttccctgatgcttgcacccaccacagtcatgggtattgccggctggcgtgttgcatttcacattgttgctgttataagcgttgtagtcggtgtgttggttggcctttcattcgtttctgcattagtacttcactgatcagggcataaaatgtattttatgacatgcaagagtagctctatgaaattcttgagtgctggcaataatgattctatctaatgtgcagcccgatatttgctgagattgtacctgagaggtcaaggacaagcatctatgcattggaccgttctttagagtcagttctagcttcattcgctccaccagttgttgggtttctagccgagcatgtctatgggtacaatcccgtcccctacggagctgcagataacaatgttggcagggataaatcaaatgctggcgccctagccaaagctctgtacacgtcgatcgccatccctatgctgctgtgctgcttcatctactccctgttgtaccggacgtacccacgagacagggagagggcaaggatggactctctgatcactccagagctccagcagattgaactggaaagatgtcatgggcaagcggattattattctggaaggaaggacaaggacggctctactgtcttcgatatggattacagaggaatcgacgcctatgatgacgagaagggattaatcgatcagcaggctaagcagagcggcaatgtcaagtggcacaggagtcattcacagaatttgtgacgtttttgccaaagtatcagtgctctcggatctgtacagaaaacgtgagtgagagtgagttacctctcgaaggacgattacatagggttgtttagatagactcagaagcatcagaacaattcggttatgttcagcattatatatatatatatatatatataataatagtataagacttttggaggaatatggaggtgaatatatatttgtatttgatcagaccgacgaggctactatacaaattatgtaatcagtaaaacaaaaatataaactgcccgtctagctcagttggtagagcgcaaggctcttaaccttgtggtcgtgggttcgagccccacggtgggcgttatttttgttcactgtgtgctcttcaatcaatgatcagagtttatatatattttgccaaacggccagaaagcc

SEQ ID NO: 65752 - DNA, 1393 bp, Zea Mays
ggaaaatgttggacatgggacacactacttggagtcaaaccgaaagacagacagctgaaacaatctgaactttctaaccgcagcagcacacagcaagcactcgctatgtattcttgcaacaaacggaacaattagcaaaggcatatccagtggcggtcgggcggctgacctggaggaaggtgtcggagacggcgacgaggaaggtggcggcggcccagaggaaggcccccagcgcgatgacgtgggcgcggttgtggcgcgacgcggcgtaggccgccaccgggtagcaggcggcctgcacgatggagcggtacagcgtgagggcgccgagccccgtgggcgtggcgtgcagcgcggcgcccacctcccggtacaccgccggcagcagcgcctcgtcggcgcgctccatgatggacgccaggttcaccagcaccagcgtccgccgcttctccggcggcggacccattcttctggtacctgcaccctctctctctcgcctctcctgttcaggccgccggacgctcagctccggcttgggctatcgctccgctcggaatggccgccattagtcagcaactcagcaagcaagcaagtagccaagccaccggcgggcgatctgggtcttctctcctcgggagaatttttatatttaccgctcgtctttggttcgagtatagccgtgtagcatatgacacgtgggccatcttacatgtgggatgttatgtcagtgatggagtcaggtacgctggcaagttgggcaagcaggcaaaagcgactagcgacgagcgagctaggcgaggtagttggggagcttcccattggttggttaactgaaaccccatgggtcccgacttgtcagtaacacaggcagagcctatacaggagttggatgcagaggacggtgtcgcgcgattgtttttttttgggtgaacgacgagaaaactatttgtacgatgctacgtatgcgcgcgccctcgcgctgagggtatttctgcagtacatacgtttagttttcggactgaaaagcagttaaaagtcatatacaacgacgcagcacaggacaaatttaaatactactagtcggttgatcgtgcattgcgacggctcacaacaatactcacgtaaattatccaccaaaaagatcttaagattttttattattgtctccactctccgcataatattttttttaatttgactaactgatgttgttatttacttcatccaatatgtcttgttacaacacggtcaatgaagggagcgatttaaagagagttcacaatgactgactaaacgaacagaaattatagaatgacataattccaccgtacaaagactaaataagagaaagtttatgagctcaagtttctaaaataagtcacatgaactcaaa

SEQ ID NO: 65753 - DNA, 1544 bp, Zea Mays
acaccagatacttttggataggccctggtgaccagatctggcctgatcaaatgataaaactgaagctcaaagctgtctacatgtatgctgctggattttacacatattcaattttcgctcttctgttctgggaaacaaggcgttcggactttggagtatcaatgtcccaccatatagcaactgttgttctgattgttctttcctacattttcagatttgctcgtgttggctctgttgttttagcccttcatgatgcaagtgatatattcctagagattgggaagatggccaagtacagtagctgcgagtggctagcagttgtggcatttcttcttttcgtggcatcgtggatacttctccggcttgttatattccctttctggatcctaagaagcacaagctatgaagtactgctgaccctggacaaggagaaacatcagttttatggccccatatactattatgttttcaactgtcttctgttctcactcctagttcttcacatatattggtgggtactgatatggcggatgctagttaagcagattcaatcgaaagggcatgttggtgatgatgttcgatccgattctgaaggcgaagaggaacatgaagattaactttttaggttgaatgcttaactgaagaactatgttgtgtgatacctacagcaaggcacaccttctgaaaccacctttttccttctaaagaagatttgcagatattagattttattagatcatatcattctttcagcatcaaagatgacaactatcatttgcgagttgccactgaagccgtctgtgctcttggatgtttgcatgaaaacagaagtgaattgtatttttttcccagtcaaccgtcgtttgtaaaagatacagaataatcgcttgttcatccattcttgtaactagacagttgatttgatttcaaatcatgtaatttgctacatcagcttagttgattacttggtgtatcatccattatgatgtaaatgggagtcttgggaagttcacaacaagaatgtgacactatgtactgttatttctcctattattttaataagagcacagagaagtagcccaagtgcaaggatatcatatagctgctttgatgttcagtttgacatttttacatgacaccgtgactccatgagtatcaaagatccacagacattagactgatgtaatatcctgaaagttctacaaaagaatcaatattgagcctatccaaggactgaatgacgtcaagcatgggccaattttacatcatattggctctgtactgtataacaaagaaatgagaggaactccagggtgatctagggcaagtattttgcaatgagcttgtcaacatgaagaaccacatcagaaatgtgagggcgcattacagcttcaggttgaagcatccagataacaaaatggcgaagctcatcaggataaggaggtttgggtcctgctggccatttcaactgcccgtttacaatggcaagttgcagacttcctccagattcaccaagagcatactcaaatggtgaaacattgtac

SEQ ID NO: 65754 - DNA, 976 bp, Zea Mays
caagcacctcggtgatgtggcgtggtcaagctcaagtagcagcacgaacaggtccacactgctaccctagctgcctcacacgcaccttcagtttcagttgcacatatacagaggatgtaggtgggaggagaggggaggggagaagatggagcgtgtccatcacctcgtacagtctcactaccggcgtctgccccacgtgccttcccatctctctggcacacgtcgtcattgttcaccacgtggaaatcgcccaggcctagggcaaaagggggaaggagcaccatgacacgacctcttctgggcccagcgtgagttattgccctcggctgcagccaccatgaccatctccgtgtcggcgagccaggacaacaactccttcgacctcgaatttgtggtgcccggcgacgagagtgccggtccaacgccgaagaggattgcgtggagcgcccggggcagccaacgttgtggccatggatgcgtcggcagtggaggccaaggctggagtgttgccaccgacgtcgctgttccgctcggccaccaggttctgcgtctcgcttctcaagctgatgaatcccaagacctcagtagcggccgaggccggggctacgcaagcgccgagtgaggtcacgggaaatctgaagacaagcttggagaagtacctgtgatctcaagtctaaggaaagttgtgcccttgatcactcttctttacctaataatgttcatgttaatcactatgacatgctcaggttaatttgatgggacctaataggtttccctagtattgcttatcccatagcttgcaaacaaatgaactattgggtagatttgctattgttttacctggttttgggaaattaattatatatatgatcatgttctaataatattgttggtttatttattgttcatgataagattattgtattaattggaacatggagaaccacccgggaaaacagtgctaccacaagggtgg

SEQ ID NO: 65755 - DNA, 1254 bp, Zea Mays
aggctctcgttcccgaacggcgggcgtggtggtgcgccccgacactctccctctcctcctcctcgtctctgggtcttcttctgctgctgctgctgcttgtgcagttgccgtccatggccagctgccacgaggagatgaagtccatctacgtgggccagagggttctccccgtgcgcctcggccggccggcgttcgggcccgagagcctcgccttcgaccaccgcggcgacgggcccttcaccggcgtctccaacggccgcatcctccggtggcgcggcgcccagcgcgggtggaccgagttcgcccacaaccacaagcacgagacggtggccatgtgcgcggcgaagaagaggctggtggtgccggagagcgcgtgcgggcggccgctgggcctgcagttccaccgcgcgtccggcgacctctactacggcgacgcgtacctggggctgatgcgcgtggggcgccgcggcggcctggcggaggcggtggccacggaggccggcggcgcgccgctcaacttcgtcaacgccgtcgaggtcgaccaggagaccggcctcgtctacttcaccgacagcagcgccacgtaccagcggagcgactacatcatgatcatcctgaccggggaagcgacgggtcggctactgcggtacgacccggccacgggcagcgccgccgtgctggcgtccggcctgtccttccccaacggcgtggcgctgagcgcggacgggacgcacgtcgtggtggccgagaccacgcggtgccgcctgctgcgccactggctgcgcggccccgccgccggcaccaccgagcccttcgccgacctgccggggtacccggacaacgtgcgccgcgccggcgacggtgggtactactgggtggcgctcaaccgggacaagtcgtggctggagcagggggaccactcccccggtccgtggctgccgtcagggtccacgctgagacgggcgtcgtcgtcgagggcgttgcgcgggctcggcaacgccacggtcagcgaggtcctggagcgccccggcggcgcgctctggctcggttctgtcgacacgccttacgtcggtctgttcaagatcggcctctagctagcagcgtacgtgtgtagccgtgtatgtctgtcgtttgtcctaaattaagagtagtcgatcttctatctgtcgcacacgtacgtgtgacagcaatgtaatatatgtgcactagtaatgtcggacgcctatctataatatattgtcatcgtagaaatgc

SEQ ID NO: 65756 - DNA, 2366 bp, Zea Mays
attcttagtttattaaaatccaagaaactcctggctaaaaaaattaaaaactggtttcttaaaaactaagttgcttccaaactggacctaatttgacatattaattcatacaaataagattgcctcttctgtctactaacaaggtaccgttacggctctgatttagatttttttataaaaaaaactatttacgctagccattacaactagagtatatttaggagtaaagggaatgaagttgattcctttgttattcaattttaaatagtaatggaaatttaactccttaaatactcttgcttctaaattaacatgccgctacgatatatatagcggactagatttcaaaagctaaaatttaaggaccgctatttgagttagtgaaccgctatatatatagctctctacagtttttttatactggtttaaaaaacgtggtataatatacaaaatgtaaatgattttagtccactgaagttatacatatggtttaagtggtcatgagaatgtcaatattattgctaccttttttttaaacaatggtaaggactggtagccttatgagctatatatatttatggctcttataatctatttgtttatatataaactctgatgcatgataacgtatatataagagcatctccaagagctctccataaaacgactccttaaaatcagttttaagggacctctaaataataagtggggtagattttaatcctttctccaacagatcccttaaagcggcagattgtttctggggagcccaaaaaacccctcatttgtaactacaaatgagagagttttaagggatatgaaaaagttgggagcgctttaggggaactgttggagacatgtttttgtgttttttccaaaaagatagatttaggggagacttctgggaagtttttggagatgctctaagttgtggaacacgatatgtttccttaacttaagtatgtgagacaacagcccatcgagtattgtttaatgcttatacttattattcataatatttacgcttaaattacatgtcacgtatcagatgtaaccgtgcaaccaagacacaatcataatagtgggatgagctttttagaaaactccatagagaagaatgtttcctaaaaaggtcctcctacttctagttgttgtgtctgggtcgttgctgggattattgcacggttgcaccaacgcctcctccggttgcacatcatacattgtcgtcatagttacgatatgtcgttattgaaacttattagcgttgtcaatggcgcctgttatctgcgatcccgctacctgtacactaataatctactaccaacctgctatacgcaattgagtaccttgcttaattgggagagacaatgataacgctagcagctagccgatgatgacgacgagaattgacgagacggtgacaccgcgaggggttttgttttgattgtttttggtaaatcatttctttatcgacttaattaggtttaccagaatgtacgtacacctatcacctaaatccacaagatccataaaagctccccctcccctgagacatgctctagaaactcctaaaaactactcaccatgccactagttacctgccttatattggttcgtttactctttttttttctctctctcttttctcgctcgtctccacacagcctgctgtgttcctcatccgtactgcacagcccggcgcccacctcgccgcagcgctcatcacctcaccgtactacgtgccctaccgtcacggacgttgtgcccacctcgccattgcaatgcaacccacggccctgcgtaagacggggccacgcagctggcggaggaggcaacgaagatgaactaattttatcctcttgatatttggatagtttaggaaccatattttcacaagtgatttatattttcacaaaggaaactagatcatttttctttagaaaaatagaaatctcatgaaaaaatagagttaccaaattagacctaaaactatacttactccatttctttttagttgtcgctggatagttcaattttgcactattcaacaataactaaaacgaaacggagggagtatatatgagcccatattaaactttaagttttcaagtctatatttcttaaaaaaaaactggaagtctctcgttcatgctgtgcgtgggtacactttctactgtcattagaccaaccgctagactcgcgtctcggctctacgacatcatttcaccgcctgcccgtctgacacaagcattagctaggctgtccccaagtgggcctgtgtgctggtaaaatgcgcggatccaagcggtgcatttacgccggcgtcatggcagtaaaaattggtgcggcgactacgcagatatccc

SEQ ID NO: 65757 - DNA, 781 bp, Zea Mays
atggccaaggcagcaaggccaacagcccaacatggcaacatggtctggtctgcacggatggcatctgcaagtggcagtgggtgcgcaagcactggagcatcccttgctgctgcgaacactctagttgtggttgtgcaagaaacaactccagttaatagaggtggagaaggagaagatggagaaagaacaactgatattggagtgaaagagtctgatacaaagaaaaggaaaccaaaaagaccaacctctggggtttgggactacttcatcaagtccacagtgacagagaagggagataagggcaagaccgaggaacaaatttgggcaaaatgcaagaagtgcaagttcaaaactcgtggtgaatcatcgaggggcacaactgtcttctggaaccatttgaaatcaaggcactacatacataaagggcggcaagaactacaagttcagaaaggtgaagggaacaatgatattgttcaaaatttcaagtatgatcctgaagctagcttgaggaagttccatatggcaatagttatgcatgagtacccctttaagatggttgaacatgaatattttgttgatttcatgaagtctttgcatccacactttacattcttgtgccgcacaaccactaggaatgagataatgacaatgtacatggatgaaaagaaaaaattgtttgagcagcttaaatccctttcttgccgattttctgcaactatggatatgtggacatcgaacgaaaataaaggctatatgagcattaccatacattggattgatg

SEQ ID NO: 65758 - DNA, 1229 bp, Zea Mays
cggcattgcacaacccgtcagcccgcacgcacgcgtacatgccccacgcaagacgcagactcccaattccaaaccctagacctagaggtcggcagcgacggcaggtcggcagctccagccgacagctagccagccacacgcccacacactgacgcacaacacacggagccacggacggcaggctcggccacgagcccacgacgaccgcaatcgtccgctcctcacgacatcacctcctcggctcttcatctcacgatggctgcagtctgcaggcggcaggacgctccgatccctcgcgtcggacttgacgactggtgactacctgactggatggcatctgcaagtggcagtgggtgcgcaagcactggagcatcccttgctgctgcgaacactctagttgtggttgtgcaagaaacaactccagttaatagaggtggagaaggagaagatggagaaagaacaactgatattggagtgaaagagtctgatacaaagaaaaggaaaccaaaaagaccaacctctggggtttgggactacttcatcaagtccacagtgacagagaagggagataagggcaagaccgaggaacaaatttgggcaaaatgcaagaagtgcaagttcaaaactcgtggtgaatcatcgaggggcacaactgtcttctggaaccatttgaaatcaaggcactacatacataaagggcggcaagaactacaagttcagaaagatcgcaatgacaaggtaccgtcaattcttgaggagttcatggcagatgaaaatgaatatagctcgacaattgaagagggacataaccaagctgacaatgaaggaaatggtgaggatagtgaggatgagggcagcgatatggagttatgatttttctgcagttgttcatgggagtctgtttcagaagtttcagtgctccgaagcctgagatgatgcttaaatcttggttttggaccttttggcgctggctggtagctgctacacttaatccttaatgtagtaatgtagttctattttggagaggcatgtactatgagtctatgactatgtgacattgtgacatgtacgcagtacttagcaatgctgatggctcatgctcatggttgcttgcctatttacttagctttatgaacttctagtgtcagactgtctattagccttgtcagttgtgacatttgattctagatgctatatatgaatgaatgatgtgtctttatatacgaaga

SEQ ID NO: 65759 - DNA, 1799 bp, Zea Mays
tgatatgcgacgagcacggcatcgaccacaccggaaagtacgccggcgactccgacctccagctcgagcgcatcagcatctactgcaacaaggccagcgacgaccgcttcgtcccgcgcgccgtcctcatggacctcgagcccggcaccatggactccgtgcgctcgggccccttcggccagatcttccgccccgacaatttcgtcttccagtccggcgccggcaacaactgggccaagggccactacaccgagggcgccaacaacaacaggaaccgcacccgccatccgcgctccaaatctcgctgctcactttctaagcgcggggaggaggcgggccagctgagtcggtcggcttccgagtcgtcgtcttcggcggggagcatcggccgcacgccgtctggaaggcgggccggccggcgcggcagcgacgtcgacggcgaccgctccagtcgcgagagtttcgaagcccaagatcagaagaggagcatgcatgaaataagtagaggagaaaggcggagttggtctgggcagaagagaaagcctgaacctttagtagaaaagaagtctgttcgtgctgctgcagaagagttctttgcaaaggcttctcaggaacttattggacatagtgattgcaggactattcttctgaaaaatgtgataggacactactctgaggacatccttcgctttgacatgcattcagtgaaccagcttccagtgcctcttgtaccgctcatcggcaagggagtgctagaggaggaggttatggtgagttttgtcgcgactaacggtgagcccacaactacgaccacatcgaagctggtctggtggaacctcttggagcagatgacgatgacgccgacatcctgcacttctgtgatgttgtcgaccaggacgcgggcccctctgttgcgcgcgctctacaaggctggatccatcatcgtgctcggtaagactgacttccttaggccagacatgtctgtccataggcaggtcattgataatgggattcttccaatacttgtgaagatagagaagaaaaaagagaagctccttagtgaaaaaatggaggtgatcaaggtgtaaagggattaaagtcccttagagttagggatctctcttatcgcctcactatatatcttacttggtcctttatcattttcaaatgccaatcagtgaacaccaaattttaggtttgttaaatgcctgttaccagtcagaaatgagatattatcttcagatgataaataaaaaaactgggaactgggaattgtaccatatgttgtgtacttagttcctatctaattctaattccttagtttattcttcaataacaaatttctaggaggaggacaatgcactctttctacagtgatgttgtgcgccttcagggtctaagggaaaggttttcacattgcaactcaaacatggacgcgaaccaggtacaacctgtgttggctccagaagcatctgaccctcaacattcatggctagactgcagattggatattagcaagcgcagccctaaacaacttggaattctccaaggttggtcgtctctatggttggaagaaatgtccaaatgctcctattgtgatggctttaaagcaacaaaatgaagatgtgaagagggagtttaatacgagactcacatatattgttacacaattcaagatggtgatgctgacagctcgttggacaggctgtggcagaagaaggctgagatcaagcagtaggtcttgcacgtagttccaccaggaatggactcttgagggatactgtgttagctatgtttta

SEQ ID NO: 65760 - DNA, 1674 bp, Zea Mays
gcttcgtcccgcgcgccgtcctcatggacctcgagcccggcaccatggactccgtgcgctcgggccccttcggccagatcttccgccccgacaatttcgtcttccagtccggcgccggcaacaactgggccaagggccactacaccgagggcgccaacaacaacaggaaccgcacccgccatccgcgctccaaatctcgctgctcactttctaagcgcggggaggaggcgggccagctgagtcggtcggcttccgagtcgtcgtcttcggcggggagcatcggccgcacgccgtctggaaggcgggccggccggcgcggcagcgacgtcgacggcgaccgctccagtcgcgagagtttcgaagcccaagatcagaagaggagcatgcatgaaataagtagaggagaaaggcggagttggtctgggcagaagagaaagcctgaacctttagtagaaaagaagtctgttcgtgctgctgcagaagagttctttgcaaaggcttctcaggaacttattggacatagtgattgcaggactattcttctgaaaaatgtgataggacactactctgaggacatccttcgctttgacatgcattcagtgaaccagcttccagtgcctcttgtaccgctcatcggcaagggagtgctagaggaggaggttatggtgagttttgtcgcgactaacggtgagcccacaactacgaccacatcgaagctggtctggtggaacctcttggagcagatgacgatgacgccgacatcctgcacttctgtgatgttgtcgaccaggacgcgggcccctctgttgcgcgcgctctacaaggctggatccatcatcgtgctcggtaagactgacttccttaggccagacatgtctgtccataggcaggtcattgataatgggattcttccaatacttgtgaagatagagaagaaaaaagagaagctccttagtgaaaaaatggaggtgatcaaggtgtaaagggattaaagtcccttagagttagggatctctcttatcgcctcactatatatcttacttggtcctttatcattttcaaatgccaatcagtgaacaccaaattttaggtttgttaaatgcctgttaccagtcagaaatgagatattatcttcagatgataaataaaaaaactgggaactgggaattgtaccatatgttgtgtacttagttcctatctaattctaattccttagtttattcttcaataacaaatttctaggaggaggacaatgcactctttctacagtgatgttgtgcgccttcagggtctaagggaaaggttttcacattgcaactcaaacatggacgcgaaccaggtacaacctgtgttggctccagaagcatctgaccctcaacattcatggctagactgcagattggatattagcaagcgcagccctaaacaacttggaattctccaaggttggtcgtctctatggttggaagaaatgtccaaatgctcctattgtgatggctttaaagcaacaaaatgaagatgtgaagagggagtttaatacgagactcacatatggtgatgctgacagctcgttggacaggctgtggcagaagaaggctgagatcaagcagtaggtcttgcacgtagttccaccaggaatggactcttgagggatactgtgttagctatgtttta

SEQ ID NO: 65761 - DNA, 828 bp, Zea Mays
cgccgaccgcccagcatgcaagcagtaatgcaggggcggatgcggacgacggatcaccggatcggagcaccgagcacctcgtgctcgtgggcgctacgtggcactgcgccaggggcggatctccaaagagagtttgaggatgatccagatctttatgtgctgaagcctttgaagtatattggaattgaagtttggcaggcaccgtgtagacttatatctcaaacgtatgcaagtaaaagctggttcagttttcaacaacattctgatttgtgatgaccctgagtatgcaagaaaggttgttgaggaaacttggggtgcaaatagggaggctgaaaaggaagcttttgaagaagctgaaaaggagaggaaagctagggaggataggagaaatattattgtgtcgacgcatgatatccaaatcgtcatggacacttggcaccatataagctagggtcaaaataccatgtacctgactagagcctgtaggagaggaccaactccaaacaaggagtaagagcactttaactatttacattcaaatatccgaaatgttgtggagcgagcatttgacatatggaaaatgaagtggagagttctactgaaaatgtcgtcttaccaaatggaagatcaaaaattgatcgtggcagctactattgtttacataactatattcgagagaacaatgttctaaatttggattttatgaagtgtgatgagaatcctgattatgagcccactatttcagaaaggtatgctagatttcagccgacttgaacgtacacatttgtatttcattagtcgccgtgacttttatatacgaatattgga

SEQ ID NO: 65762 - DNA, 788 bp, Zea Mays
atgcaagcagtaatgcaggggcggatgcggacgacggatcaccggatcggagcaccgagcacctcgtgctcgtgggcgctacgtggcactgcgccaggggcggatctccaaagagagtttgaggatgatccagatctttatgtgctgaagcctttgaagcaccgtgtagacttatatctcaaacgtatgcaagtaaaagctggttcagttttcaacaacattctgatttgtgatgaccctgagtatgcaagaaaggttgttgaggaaacttggggtgcaaatagggaggctgaaaaggaagcttttgaagaagctgaaaaggagaggaaagctagggaggataggagaaatattattgtgtcgacgcatgatatccaaatcgtcatggacacttggcaccatataagctagggtcaaaataccatgtacctgactagagcctgtaggagaggaccaactccaaacaaggagtaagagcactttaactatttacattcaaatatccgaaatgttgtggagcgagcatttgacatatggaaaatgaagtggagagttctactgaaaatgtcgtcttaccaaatggaagatcaaaaattgatcgtggcagctactattgtttacataactatattcgagagaacaatgttctaaatttggattttatgaagtgtgatgagaatcctgattatgagcccactatttcagaaaggtatgctagatttcagccgacttgaacgtacacatttgtatttcattagtcgccgtgacttttatatacgaatattgga

SEQ ID NO: 65763 - DNA, 2703 bp, Zea Mays
gtttgctctttgctctcctgcaattttccgtatgtggacaccttcataaacgctcgaatggcaccgcctcctcctccctctcttgagggtgagagaaggaaaaaaacccttcaagaggagcaatgatctctccctctttgctaatgagcatttgtaactgaaaggaattctgccttcttctctcatcttcctgctcaacatcagtagcagctttagctgtagcagcgccaccggccaccgccacgccatggccaccacgttgcacaagccccttggggcgatcaccgttgacgacctcgccgcggcggcgcctgggtcggacgccaccgcgctccacgcagcgctccggcgcgcgctcgactcgcacggacccaccgaagtgtggggcgagctctgccggtccgtgctctgtccgtctgtccccttcgccgtccaccggatgctctactacggttgcttcgccgggttcccgtcccccacgccgccggcctggacgcccgaccccaaggagtctgtcttgaccaatgtcggccgtgtcctcgaggcgcgtggtaggaacttgatcggcgacgcgtacaaggatcccatcaccagcttcccagacctccacaagttctccaacgagaacccagaggcgtactggaagatggtatttgaggatatgggtatccaattcagcgtagagccatcctgcatctggagagagaacactgcatatcctggtggcgagtggctaccaggcgccgagctcaacgctgctgttaattgcttgactgctaaacccgggaggagctccgacggtccggccattgtatggagggatgaagggaaggactctgatcctcttaacttcatgtctttggaggacttgaggaagaaagtttgcctagtggccaatgcaattgatgccctggaactgccgaagggatctgcaattgctattgacatgcctatggatgtcaatgctgttgtgatctaccttgcgatcgtgttggcgggatatgtggttgtctcaattgcagacagttttgctgcacctgcaatatcaatgaggttgaagttatcagaagcgaaggcaatttttactcaggattacatccttcgtgatgacaaagaactaccattgtacagtagagttgtggaggctaaggcccctatggcaattgtgattcctgtaagggggtctttgctaataaagggactacgtgttgatgacctttcctggcaagatttccttggaagggttaattataccgaggctgaaaattacactgctgttaaccaacctgcctatgcattcaccaatattctattttcatcagggaccacaggggagcccaaagcaattccatggacacatataacacccctaaaggcagctgccgatggatggtgtcacatggatattcgtaaaggagatgttgttgcttggccaacgaatcttggttggatgatgggcccttggcttgtttatgcctccttgctgaatggagcttccatggctctgtataatggctccccaaatagttcaggctttgcgaagtttgtacaggatgctaaggtaacaatgcttggactggtacccagcatcgttcgtacttggaagaatacggactgtacagctggactagactggtcctccatccgatgctttagctcctctggggaggcatccagtgtggatgattatttatggctgatgggaagagctggttacaagccagtaatcgagtactgtggaggcacagagattggtggtggatttgttactggatcgatgctacaacctcaagcgttgtctgcattcagcacacctgccatgggttgtaacctgttcattcttgatagcagtgggaatcctttgccacaagactctgtcggcattggtgaacttgcacttgatccaactttatttggatcatcaacaacacttctaaacgctgatcatcaggaggtttacttcaacggaatgccagaatggcacgggaaaatcctccgcaggcatggagatgaatttgagcgtacttctgacgggtattatagagctcatgggcgtgcagatgatacaatgaaccttggtggaattaaggttagttccattgagatcgagaggatctgcaacagagtacatgacgccatccttgaaacagcagctatcggggttccacctgtagggggtggccccgaacaactaaccatagccgtcgtgttgaaggaccagagctctcaaatagaggacttgaaccagctgaaactagcatgcaacatggctctgaagaaactgaaccctctcttcaaggtttcctccgtcgtcatcgtcccgtccctccctaggaccgcctctaacaaggtcatgaggagagtccttcgcaaggagttcagccaggccgcccaggcaaagcattcaaaaatataggtagttattagaaataattagtgttttctgctgcaaatgcacctgcagaaagagtaaaacaccaaactgggcatatcgggaagtcctgttgtttgccaccaaaacggataaatgagatgtacttagatttcgggaaataagggagctgtattcctgccaacgttcagcactcacttgatgtgctgcactaataaaacactaatgcaatcacttgcattagatcacagtctgaactctaagggcttgttcgtttacgtcggattgcacctggaatcgttccagctaat

SEQ ID NO: 65764 - DNA, 2319 bp, Zea Mays
ggaattctgccttcttctctcatcttcctgctcaacatcagtagcagctttagctgtagcagcgccaccggccaccgccacgccatggccaccacgttgcacaagccccttggggcgatcaccgttgacgacctcgccgcggcggcgcctgggtcggacgccaccgcgctccacgcagcgctccggcgcgcgctcgactcgcacggacccaccgaagtgtggggcgagctctgccggtccgtgctctgtccgtctgtccccttcgccgtccaccggatgctctactacggttgcttcgccgggttcccgtcccccacgccgccggcctggacgcccgaccccaaggagtctgtcttgaccaatgtcggccgtgtcctcgaggcgcgtggtaggaacttgatcggcgacgcgtacaaggatcccatcaccagcttcccagacctccacaagttctccaacgagaacccagaggcgtactggaagatggtatttgaggatatgggtatccaattcagcgtagagccatcctgcatctggagagagaacactgcatatcctggtggcgagtggctaccaggcgccgagctcaacgctgctgttaattgcttgactgctaaacccgggaggagctccgacggtccggccattgtatggagggatgaagggaaggactctgatcctcttaacttcatgtctttggaggacttgaggaagaaagtttgcctagtggccaatgcaattgatgccctggaactgccgaagggatctgcaattgctattgacatgcctatggatgtcaatgctgttgtgatctaccttgcgatcgtgttggcgggatatgtggttgtctcaattgcagacagttttgctgcacctgcaatatcaatgaggttgaagttatcagaagcgaaggcaatttttactcaggattacatccttcgtgatgacaaagaactaccattgtacagtagagttgtggaggctaaggcccctatggcaattgtgattcctgtaagggggtctttgctaataaagggactacgtgttgatgacctttcctggcaagatttccttggaagggttaattataccgaggctgaaaattacactgctgttaaccaacctgcctatgcattcaccaatattctattttcatcagggaccacaggatgctaaggtaacaatgcttggactggtacccagcatcgttcgtacttggaagaatacggactgtacagctggactagactggtcctccatccgatgctttagctcctctggggaggcatccagtgtggatgattatttatggctgatgggaagagctggttacaagccagtaatcgagtactgtggaggcacagagattggtggtggatttgttactggatcgatgctacaacctcaagcgttgtctgcattcagcacacctgccatgggttgtaacctgttcattcttgatagcagtgggaatcctttgccacaagactctgtcggcattggtgaacttgcacttgatccaactttatttggatcatcaacaacacttctaaacgctgatcatcaggaggtttacttcaacggaatgccagaatggcacgggaaaatcctccgcaggcatggagatgaatttgagcgtacttctgacgggtattatagagctcatgggcgtgcagatgatacaatgaaccttggtggaattaaggttagttccattgagatcgagaggatctgcaacagagtacatgacgccatccttgaaacagcagctatcggggttccacctgtagggggtggccccgaacaactaaccatagccgtcgtgttgaaggaccagagctctcaaatagaggacttgaaccagctgaaactagcatgcaacatggctctgaagaaactgaaccctctcttcaaggtttcctccgtcgtcatcgtcccgtccctccctaggaccgcctctaacaaggtcatgaggagagtccttcgcaaggagttcagccaggccgcccaggcaaagcattcaaaaatataggtagttattagaaataattagtgttttctgctgcaaatgcacctgcagaaagagtaaaacaccaaactgggcatatcgggaagtcctgttgtttgccaccaaaacggataaatgagatgtacttagatttcgggaaataagggagctgtattcctgccaacgttcagcactcacttgatgtgctgcactaataaaacactaatgcaatcacttgcattagatcacagtctgaactctaagggcttgttcgtttacgtcggattgcacctggaatcgttccagctaat

SEQ ID NO: 65765 - DNA, 2599 bp, Zea Mays
cttcttctctcatcttcctgctcaacatcagtagcagctttagctgtagcagcgccaccggccaccgccacgccatggccaccacgttgcacaagccccttggggcgatcaccgttgacgacctcgccgcggcggcgcctgggtcggacgccaccgcgctccacgcagcgctccggcgcgcgctcgactcgcacggacccaccgaagtgtggggcgagctctgccggtccgtgctctgtccgtctgtccccttcgccgtccaccggatgctctactacggttgcttcgccgggttcccgtcccccacgccgccggcctggacgcccgaccccaaggagtctgtcttgaccaatgtcggccgtgtcctcgaggcgcgtggtaggaacttgatcggcgacgcgtacaaggatcccatcaccagcttcccagacctccacaagttctccaacgagaacccagaggcgtactggaagatggtatttgaggatatgggtatccaattcagcgtagagccatcctgcatctggagagagaacactgcatatcctggtggcgagtggctaccaggcgccgagctcaacgctgctgttaattgcttgactgctaaacccgggaggagctccgacggtccggccattgtatggagggatgaagggaaggactctgatcctcttaacttcatgtctttggaggacttgaggaagaaagtttgcctagtggccaatgcaattgatgccctggaactgccgaagggatctgcaattgctattgacatgcctatggatgtcaatgctgttgtgatctaccttgcgatcgtgttggcgggatatgtggttgtctcaattgcagacagttttgctgcacctgcaatatcaatgaggttgaagttatcagaagcgaaggcaatttttactcaggattacatccttcgtgatgacaaagaactaccattgtacagtagagttgtggaggctaaggcccctatggcaattgtgattcctgtaagggggtctttgctaataaagggactacgtgttgatgacctttcctggcaagatttccttggaagggttaattataccgaggctgaaaattacactgctgttaaccaacctgcctatgcattcaccaatattctattttcatcagggaccacaggggagcccaaagcaattccatggacacatataacacccctaaaggcagctgccgatggatggtgtcacatggatattcgtaaaggagatgttgttgcttggccaacgaatcttggttggatgatgggcccttggcttgtttatgcctccttgctgaatggagcttccatggctctgtataatggctccccaaatagttcaggctttgcgaagtttgtacagcatcgttcgtacttggaagaatacggactgtacagctggactagactggtcctccatccggtaatttttaaattgctcaactatccagaccttttgtcttaactttgcaagttacacatatagtatggtatgcagtttctattgaccatattcattatatacagatgctttagctcctctggggaggcatccagtgtggatgattatttatggctgatgggaagagctggttacaagccagtaatcgagtactgtggaggcacagagattggtggtggatttgttactggatcgatgctacaacctcaagcgttgtctgcattcagcacacctgccatgggttgtaacctgttcattcttgatagcagtgggaatcctttgccacaagactctgtcggcattggtgaacttgcacttgatccaactttatttggatcatcaacaacacttctaaacgctgatcatcaggaggtttacttcaacggaatgccagaatggcacgggaaaatcctccgcaggcatggagatgaatttgagcgtacttctgacgggtattatagagctcatgggcgtgcagatgatacaatgaaccttggtggaattaaggttagttccattgagatcgagaggatctgcaacagagtacatgacgccatccttgaaacagcagctatcggggttccacctgtagggggtggccccgaacaactaaccatagccgtcgtgttgaaggaccagagctctcaaatagaggacttgaaccagctgaaactagcatgcaacatggctctgaagaaactgaaccctctcttcaaggtttcctccgtcgtcatcgtcccgtccctccctaggaccgcctctaacaaggtcatgaggagagtccttcgcaaggagttcagccaggccgcccaggcaaagcattcaaaaatataggtagttattagaaataattagtgttttctgctgcaaatgcacctgcagaaagagtaaaacaccaaactgggcatatcgggaagtcctgttgtttgccaccaaaacggataaatgagatgtacttagatttcgggaaataagggagctgtattcctgccaacgttcagcactcacttgatgtgctgcactaataaaacactaatgcaatcacttgcattagatcacagtctgaactctaagggcttgttcgtttacgtcggattgcacctggaatcgttccagctaat

SEQ ID NO: 65766 - DNA, 1423 bp, Zea Mays
gtttgataattttgtcagttctgacatgtctcgcccatatgcaattattaggggagcccaaagcaattccatggacacatataacacccctaaaggcagctgccgatggatggtgtcacatggatattcgtaaaggagatgttgttgcttggccaacgaatcttggttggatgatgggcccttggcttgtttatgcctccttgctgaatggagcttccatggctctgtataatggctccccaaatagttcaggctttgcgaagtttgtacaggatgctaaggtaacaatgcttggactggtacccagcatcgttcgtacttggaagaatacggactgtacagctggactagactggtcctccatccgatgctttagctcctctggggaggcatccagtgtggatgattatttatggctgatgggaagagctggttacaagccagtaatcgagtactgtggaggcacagagattggtggtggatttgttactggatcgatgctacaacctcaagcgttgtctgcattcagcacacctgccatgggttgtaacctgttcattcttgatagcagtgggaatcctttgccacaagactctgtcggcattggtgaacttgcacttgatccaactttatttggatcatcaacaacacttctaaacgctgatcatcaggaggtttacttcaacggaatgccagaatggcacgggaaaatcctccgcaggcatggagatgaatttgagcgtacttctgacgggtattatagagctcatgggcgtgcagatgatacaatgaaccttggtggaattaaggttagttccattgagatcgagaggatctgcaacagagtacatgacgccatccttgaaacagcagctatcggggttccacctgtagggggtggccccgaacaactaaccatagccgtcgtgttgaaggaccagagctctcaaatagaggacttgaaccagctgaaactagcatgcaacatggctctgaagaaactgaaccctctcttcaaggtttcctccgtcgtcatcgtcccgtccctccctaggaccgcctctaacaaggtcatgaggagagtccttcgcaaggagttcagccaggccgcccaggcaaagcattcaaaaatataggtagttattagaaataattagtgttttctgctgcaaatgcacctgcagaaagagtaaaacaccaaactgggcatatcgggaagtcctgttgtttgccaccaaaacggataaatgagatgtacttagatttcgggaaataagggagctgtattcctgccaacgttcagcactcacttgatgtgctgcactaataaaacactaatgcaatcacttgcattagatcacagtctgaactctaagggcttgttcgtttacgtcggattgcacctggaatcgttccagctaat

SEQ ID NO: 65767 - DNA, 342 bp, Zea Mays
ctaagcgctgcagttttctcccaaaaccactcttccaggttccagtgaactcagcagtgtacactttaccttgcttaaagtatggagtctgaaaacctctactgctacacacccatctcttcgattcaggtcaccttgaactgaatgacttttgttcccataaccattcaaaacctccactaaccatcacagaggtgcccaagttttctttcgtcggttgcactgaaggtggtgaccacgccgtttttctttccacccattcaccgcagtcagccatttcaaagaacacctagaagaagtggtgtttggagaagaagcctgccccaagtactgttgatcgag

SEQ ID NO: 65768 - DNA, 918 bp, Zea Mays
gttcctgtctccgtctccgcgtcgctccctatccaatcttctcctccctcccttccccgcgtcgcggcaagacgacctcgccgctccctgcctccctctccccgccgcaggtgctggagatgcaggcgactgccgcctccttcctcgcccgcccactcccgcggcttcgccgcattggcagctggggagcggatgcggcggtggtgcgtgagggcgttatcgcgctccctctgcggctgcgggggccgcggtgctccattagcctctccatcggcgccggcgccggcgctggcgccgaagctgaccacgagttcagctacgagcatgttccggtgttccctagataccgaatacgagatccctacaagcttcttggtgttgatcgtgacgcatctgaagaagagatccgaggtgcgaggaatttccttattcaacagtatgctgggcatgaaccgagtgaagaagctattgaaggtgcttatgagaagataattatgaagagctaccagcagcggaagaagacaaaaattaacttgaaaaccaagttaaagaagagagtagaggaatccccttcatgggtcaaagcacttcttggttgctttgaggtgccatcgatggatattatctccagaagattgtttttctttgctttcattgctggatggagcatagcaacttctgcagagaatggacctgcgtttcagctcgcgatatcgctattctcatgcatatatttcctcaacgaaaagatgaagaaccttctaagggcatcaaccactgggtttggaatacttgttggcggttggatcattggttctctactggttccactggtcccaacattcatcatcccaccttcatggcaggtccgagaaatagtatgaggtgatgcacaacagaaccgagcgcaggcaggat

SEQ ID NO: 65769 - DNA, 1277 bp, Zea Mays
gttcctgtctccgtctccgcgtcgctccctatccaatcttctcctccctcccttccccgcgtcgcggcaagacgacctcgccgctccctgcctccctctccccgccgcaggtgctggagatgcaggcgactgccgcctccttcctcgcccgcccactcccgcggcttcgccgcattggcagctggggagcggatgcggcggtggtgcgtgagggcgttatcgcgctccctctgcggctgcgggggccgcggtgctccattagcctctccatcggcgccggcgccggcgctggcgccgaagctgaccacgagttcagctacgagcatgttccggtgttccctagataccgaatacgagatccctacaagcttcttggtgttgatcgtgacgcatctgaagaagagatccgaggtgcgaggaatttccttattcaacagtatgctgggcatgaaccgagtgaagaagctattgaaggtgcttatgagaagataattatgaagagctaccagcagcggaagaagacaaaaattaacttgaaaaccaagttaaagaagagagtagaggaatccccttcatgggtcaaagcacttcttggttgctttgaggtgccatcgatggatattatctccagaagattgtttttctttgctttcattgctggatggagcatagcaacttctgcagagaatggacctgcgtttcagctcgcgatatcgctattctcatgcatatatttcctcaacgaaaagatgaagaaccttctaagggcatcaaccactgggtttggaatacttgttggcggttggatcattggttctctactggttccactggtcccaacattcatcatcccaccttcatggtctctagagctacttacctcactagttgcttacattttcttgtttctgggatccactttcctgaaatgaatctgtttcaatcttgtaactggaactgttggatcttttgagagggaaattacgatgactgatctctggatttgagttttagaaattttttgcttgtactggcctcttgagattggaatactggcgttgttgtgggcttgtgacataggcttcccttttgggtctttttttcatctgatgtaaacagtttttctccctgtctggtgacggtgcagagacaaatgtggcatcggtacccatatctgggccgtgtttttgacagagatacgaaactggccagaatgcattggcaggtccgagaaatagtatgaggtgatgcacaacagaaccgagcgcaggcaggat

SEQ ID NO: 65770 - DNA, 3180 bp, Zea Mays
cttcttgacgctccgtcgttggggagccaagcgccaaaaaaaaaaacccatctctgctgctgtgatctctttcctgcctcacactcttcttttcctactagtatttgtatttcctactaggctcaatcccagtcaatcatagagcagagcagcccgtgaccccgtgggcgtgtgctgtgactgcgaggagggaggaggaggaggaaaaagagtgccgccgtttcctgggggcagccagattccattccttgcgcaggagtactacggctactccttgtactatttcctagtagcaggctgccgtggaatcagctgcctagagcaatgcgagattatcaacaccagcacagcctccctccctcgctgccttttcccactcatcccagcgatcgatattcctccttccttccttccttcctcgtgaaggcgtcgagtgagtcctgcgttcttgctctcctctgctaggcacttgtcacaggaaggccccctcgtgttcgcgtcctcttgccttcacacccgggacgggagttccttgctagggggagagcttcccttgctcgtgtcctcactcacgcactcacagactcactcattcaccgacggtcccagtggactgaggtgagacttcggtcggagccggccggacggaacatacaggatggccgccgcgccgccgcccaaggccgacgagctccagccgttcccgcccaaggagcagctgcccggcgtcgccttctgcatcaccagccccccgccatggccggaggccatcttgctagggttccagcatttcgtcgtcatgctgggcaccaccgtcatcatacccagcgcgctcgttcctcagatgggaggcggaaatgaagagaaggctcgggtggttcagaccatactgttcgttgctggcataaacaccctgttccagacgttattcgggacgcgccttccggtcgtgatgggcggctcgtacgtcttcgtcgggccgaccatctcgatcgtcttggctggacggtacagcaacgaagcagaccctcacgaggtaccttctgctgaactgctctgtttccttcaagaacgatagaactagagatggcaatgggtaaaaacccgctgggtattacttgcccaaacccgtacccgcgaagaaaaaatacgtccgctaaaaaacccatacccgtgacgggtataaaattttgcccaaacccatacccatgcgggtttcgggtacccaacgggtttcccatacccactaacatcaacataaaaaataattcatcatgtaaacgacaatcaatacattactaagctagcataaaatgaacaagtgataacaaattttagcctaaaaattgttacatgaagtttatttcaattagaacatattcaattaataatattatgagacatatttataagtaatgttgattttaaggcgggttttaaaaacccatgggtttgcgggtatgggtagtggaagaacaaacccatgcccacgtacccgttgggtttccatttgaacccattaacaaacccatgggtagagaaattggcccaaacacataccctaatagagcaaaaacccaccgggtttcgggtagcgggtactcattgccatctctagatagaacatactggtatcgacgaagctttctgttgctcacgcacatgaagaaattcctgcggacgatgagggggacgcagggcgctctcctcgttgcgtcgacgattcagatcatacttgggttcagtggcctctggcgcaacgttgtcaaattactgagtccgctggcagctgttcctctggtatcactggtcgggttcgggctctacgagcttggctttccaggggtagcgaaatgcgtcgaagttggcctcccagaactgctcctgttggttgtgttttctcagtatctgcctcaggttctggacttcggcaagtccgtcttcagccggttcagcgttctcttcaccgtcgccatcgtgtggctgtacgcctacatcctcaccatcggcggcgcttacaagaactctccgcccaagacgcaggtgcattgccgcgttgatcggtcgggccttatttcaggagcaccttggataagtgttccctatccctttcagtggggtgctccgacgtttgacgccggagaagctttcgctatgatgatgacttcgttcattgctcttgtagagtcaactggcgccttcatcggtgcttcgagatatgcgagtgcaactatgattcctccatcgattatcagtcggggcgtgggatggcagggcattggtctgttgctcgattcatttttcgggacagcgaacgggacatcggtttcagtagagaatattggactgcttgcgttgacacgcattggcagccggagagtggtgcagatatctgcaggcttcatgattttcttctctgtccttggaaaatttggagctttgtttgcgtcgattccgctgcccgtatttgccggcatgtactgtctcttcttcgcatatgttggtggcgttggcctgagcctccttcagttctgcaacctaaacagctttaggaccaagttcatcatggggttcgctttcttcatgggcctatcggttcctcagtacttcaacgagtacacagccgttgcaagctatggtccggtgcacactggcgccagatggttcaatgacatgatcaacgtgccattcacgtcgaagccgttcgtcgctgggttggtagcctatatcctggacaacaccctccaggtaaaggagagcgcggtgcggaaggacaggggcaaccactggtgggagaagttcaggagcttcaagaaagacgcgaggagccaagagttctactcgctgccgttcaatctgaacaagttcttcccgtcggtctgatctcaaatggcgccgccgctgaatcaattctggaagcaacccttgttcatatgggcgttaatgaggaacataattctgctggtctggccagtggaagcttctgtgtctccattgttggtcaattttgtgtgttttcggacgagatgggagtaattgaactgtagaaattattacgattgaagtatatcgcgttctttttgtaatctacatgaatcagcgcagattaaatatttgtaggcgtagatactttgatcagtcaaacgttataggagcaaaccaatcttttttttaaaacga

SEQ ID NO: 65771 - DNA, 2523 bp, Zea Mays
acccatctctgctgctgtgatctctttcctgcctcacactcttcttttcctactagtatttgtatttcctactaggctcaatcccagtcaatcatagagcagagcagcccgtgaccccgtgggcgtgtgctgtgactgcgaggagggaggaggaggaggaaaaagagtgccgccgtttcctgggggcagccagattccattccttgcgcaggagtactacggctactccttgtactatttcctagtagcaggctgccgtggaatcagctgcctagagcaatgcgagattatcaacaccagcacagcctccctccctcgctgccttttcccactcatcccagcgatcgatattcctccttccttccttccttcctcgtgaaggcgtcgagtgagtcctgcgttcttgctctcctctgctaggcacttgtcacaggaaggccccctcgtgttcgcgtcctcttgccttcacacccgggacgggagttccttgctagggggagagcttcccttgctcgtgtcctcactcacgcactcacagactcactcattcaccgacggtcccagtggactgaggtgagacttcggtcggagccggccggacggaacatacaggatggccgccgcgccgccgcccaaggccgacgagctccagccgttcccgcccaaggagcagctgcccggcgtcgccttctgcatcaccagccccccgccatggccggaggccatcttgctagggttccagcatttcgtcgtcatgctgggcaccaccgtcatcatacccagcgcgctcgttcctcagatgggaggcggaaatgaagagaaggctcgggtggttcagaccatactgttcgttgctggcataaacaccctgttccagacgttattcgggacgcgccttccggtcgtgatgggcggctcgtacgtcttcgtcgggccgaccatctcgatcgtcttggctggacggtacagcaacgaagcagaccctcacgagaaattcctgcggacgatgagggggacgcagggcgctctcctcgttgcgtcgacgattcagatcatacttgggttcagtggcctctggcgcaacgttgtcaaattactgagtccgctggcagctgttcctctggtatcactggtcgggttcgggctctacgagcttggctttccaggggtagcgaaatgcgtcgaagttggcctcccagaactgctcctgttggttgtgttttctcagtatctgcctcaggttctggacttcggcaagtccgtcttcagccggttcagcgttctcttcaccgtcgccatcgtgtggctgtacgcctacatcctcaccatcggcggcgcttacaagaactctccgcccaagacgcaggtgcattgccgcgttgatcggtcgggccttatttcaggagcaccttggataagtgttccctatccctttcagtggggtgctccgacgtttgacgccggagaagctttcgctatgatgatgacttcgttcattgctcttgtagagtcaactggcgccttcatcggtgcttcgagatatgcgagtgcaactatgattcctccatcgattatcagtcggggcgtgggatggcagatgcgaaacacccttgtcagggcattggtctgttgctcgattcatttttcgggacagcgaacgggacatcggtttcagtagagaatattggactgcttgcgttgacacgcattggcagccggagagtggtgcagatatctgcaggcttcatgattttcttctctgtccttggaaaatttggagctttgtttgcgtcgattccgctgcccgtatttgccggcatgtactgtctcttcttcgcatatgttggtggcgttggcctgagcctccttcagttctgcaacctaaacagctttaggaccaagttcatcatggggttcgctttcttcatgggcctatcggttcctcagtacttcaacgagtacacagccgttgcaagctatggtccggtgcacactggcgccagatggttcaatgacatgatcaacgtgccattcacgtcgaagccgttcgtcgctgggttggtagcctatatcctggacaacaccctccaggtaaaggagagcgcggtgcggaaggacaggggcaaccactggtgggagaagttcaggagcttcaagaaagacgcgaggagccaagagttctactcgctgccgttcaatctgaacaagttcttcccgtcggtctgatctcaaatggcgccgccgctgaatcaattctggaagcaacccttgttcatatgggcgttaatgaggaacataattctgctggtctggccagtggaagcttctgtgtctccattgttggtcaattttgtgtgttttcggacgagatgggagtaattgaactgtagaaattattacgattgaagtatatcgcgttctttttgtaatctacatgaatcagcgcagattaaatatttgtaggcgtagatactttgatcagtcaaacgttataggagcaaaccaatcttttttttaaaacga

SEQ ID NO: 65772 - DNA, 2473 bp, Zea Mays
acccatctctgctgctgtgatctctttcctgcctcacactcttcttttcctactagtatttgtatttcctactaggctcaatcccagtcaatcatagagcagagcagcccgtgaccccgtgggcgtgtgctgtgactgcgaggagggaggaggaggaggaaaaagagtgccgccgtttcctgggggcagccagattccattccttgcgcaggagtactacggctactccttgtactatttcctagtagcaggctgccgtggaatcagctgcctagagcaatgcgagattatcaacaccagcacagcctccctccctcgctgccttttcccactcatcccagcgatcgatattcctccttccttccttccttcctcgtgaaggcgtcgagtgagtcctgcgttcttgctctcctctgctaggcacttgtcacaggaaggccccctcgtgttcgcgtcctcttgccttcacacccgggacgggagttccttgctagggggagagcttcccttgctcgtgtcctcactcacgcactcacagactcactcattcaccgacggtcccagtggactgaggtgagacttcggtcggagccggccggacggaacatacaggatggccgccgcgccgccgcccaaggccgacgagctccagccgttcccgcccaaggagcagctgcccggcgtcgccttctgcatcaccagccccccgccatggccggaggccatcttgctagggttccagcatttcgtcgtcatgctgggcaccaccgtcatcatacccagcgcgctcgttcctcagatgggaggcggaaatgaagagaaggctcgggtggttcagaccatactgttcgttgctggcataaacaccctgttccagacgttattcgggacgcgccttccggtcgtgatgggcggctcgtacgtcttcgtcgggccgaccatctcgatcgtcttggctggacggtacagcaacgaagcagaccctcacgagggcgctctcctcgttgcgtcgacgattcagatcatacttgggttcagtggcctctggcgcaacgttgtcaaattactgagtccgctggcagctgttcctctggtatcactggtcgggttcgggctctacgagcttggctttccaggggtagcgaaatgcgtcgaagttggcctcccagaactgctcctgttggttgtgttttctcagtatctgcctcaggttctggacttcggcaagtccgtcttcagccggttcagcgttctcttcaccgtcgccatcgtgtggctgtacgcctacatcctcaccatcggcggcgcttacaagaactctccgcccaagacgcaggtgcattgccgcgttgatcggtcgggccttatttcaggagcaccttggataagtgttccctatccctttcagtggggtgctccgacgtttgacgccggagaagctttcgctatgatgatgacttcgttcattgctcttgtagagtcaactggcgccttcatcggtgcttcgagatatgcgagtgcaactatgattcctccatcgattatcagtcggggcgtgggatggcagggcattggtctgttgctcgattcatttttcgggacagcgaacgggacatcggtttcagtagagaatattggactgcttgcgttgacacgcattggcagccggagagtggtgcagatatctgcaggcttcatgattttcttctctgtccttggaaaatttggagctttgtttgcgtcgattccgctgcccgtatttgccggcatgtactgtctcttcttcgcatatgttggtggcgttggcctgagcctccttcagttctgcaacctaaacagctttaggaccaagttcatcatggggttcgctttcttcatgggcctatcggttcctcagtacttcaacgagtacacagccgttgcaagctatggtccggtgcacactggcgccagatggttcaatgacatgatcaacgtgccattcacgtcgaagccgttcgtcgctgggttggtagcctatatcctggacaacaccctccaggtaaaggagagcgcggtgcggaaggacaggggcaaccactggtgggagaagttcaggagcttcaagaaagacgcgaggagccaagagttctactcgctgccgttcaatctgaacaagttcttcccgtcggtctgatctcaaatggcgccgccgctgaatcaattctggaagcaacccttgttcatatgggcgttaatgaggaacataattctgctggtctggccagtggaagcttctgtgtctccattgttggtcaattttgtgtgttttcggacgagatgggagtaattgaactgtagaaattattacgattgaagtatatcgcgttctttttgtaatctacatgaatcagcgcagattaaatatttgtaggcgtagatactttgatcagtcaaacgttataggagcaaaccaatcttttttttaaaacga

SEQ ID NO: 65773 - DNA, 1993 bp, Zea Mays
ttcacctttcggacttggtggattgggattgggagcacccgatccttcgttcatgcaaagcgctcctgtcagctgggatcttcaccgttcttctttctctgtctttaatttgtcggcgctcgctcatgtgtgctgctgtaattctgcgtatggctttcttcgtattttctcctactacgattcttgttttccggagagaaaaaaagcggaggccatcttgctagggttccagcatttcgtcgtcatgctgggcaccaccgtcatcatacccagcgcgctcgttcctcagatgggaggcggaaatgaagagaaggctcgggtggttcagaccatactgttcgttgctggcataaacaccctgttccagacgttattcgggacgcgccttccggtcgtgatgggcggctcgtacgtcttcgtcgggccgaccatctcgatcgtcttggctggacggtacagcaacgaagcagaccctcacgagaaattcctgcggacgatgagggggacgcagggcgctctcctcgttgcgtcgacgattcagatcatacttgggttcagtggcctctggcgcaacgttgtcaaattactgagtccgctggcagctgttcctctggtatcactggtcgggttcgggctctacgagcttggctttccaggggtagcgaaatgcgtcgaagttggcctcccagaactgctcctgttggttgtgttttctcagtatctgcctcaggttctggacttcggcaagtccgtcttcagccggttcagcgttctcttcaccgtcgccatcgtgtggctgtacgcctacatcctcaccatcggcggcgcttacaagaactctccgcccaagacgcaggtgcattgccgcgttgatcggtcgggccttatttcaggagcaccttggataagtgttccctatccctttcagtggggtgctccgacgtttgacgccggagaagctttcgctatgatgatgacttcgttcattgctcttgtagagtcaactggcgccttcatcggtgcttcgagatatgcgagtgcaactatgattcctccatcgattatcagtcggggcgtgggatggcagggcattggtctgttgctcgattcatttttcgggacagcgaacgggacatcggtttcagtagagaatattggactgcttgcgttgacacgcattggcagccggagagtggtgcagatatctgcaggcttcatgattttcttctctgtccttggaaaatttggagctttgtttgcgtcgattccgctgcccgtatttgccggcatgtactgtctcttcttcgcatatgttggtggcgttggcctgagcctccttcagttctgcaacctaaacagctttaggaccaagttcatcatggggttcgctttcttcatgggcctatcggttcctcagtacttcaacgagtacacagccgttgcaagctatggtccggtgcacactggcgccagatggttcaatgacatgatcaacgtgccattcacgtcgaagccgttcgtcgctgggttggtagcctatatcctggacaacaccctccaggtaaaggagagcgcggtgcggaaggacaggggcaaccactggtgggagaagttcaggagcttcaagaaagacgcgaggagccaagagttctactcgctgccgttcaatctgaacaagttcttcccgtcggtctgatctcaaatggcgccgccgctgaatcaattctggaagcaacccttgttcatatgggcgttaatgaggaacataattctgctggtctggccagtggaagcttctgtgtctccattgttggtcaattttgtgtgttttcggacgagatgggagtaattgaactgtagaaattattacgattgaagtatatcgcgttctttttgtaatctacatgaatcagcgcagattaaatatttgtaggcgtagatactttgatcagtcaaacgttataggagcaaaccaatcttttttttaaaacga

SEQ ID NO: 65774 - DNA, 2007 bp, Zea Mays
tgcccctaccggcctacccgaatgcggctggaggcagcccggcccagcacagcagacactccgccacgtcaccgtcgccatggcgctgcaccacctccgcctcgcgccgctcgcgctccttcgcgccgcaagcctcccgcccctcgcctcctcccgtatcgccgcgcgcggccaccgccgcgttctcctctttgcgccgccgtcgtggccgtggcgccttctgtcgcccggtgcgaggccgcgcgcgcttgccaccgctgcggcagaggccgacgatgctacctcgggctcgggcaacgaattcttcgcagagagcacgtcgtgggcttcactcggcgtatccgaacgcctcgcgtccgccctttgcagtgccgggctctcgaggccttcccttgtccaggcaacctgtataccacatgttctcatggcaaatgatgtaattgtcgcagcagagactgatgacaattgtcaggacaccaccccaggagcacatgacatggtgttggtcctttgtcccaatgtcatgctctgcgagcaagttgttcgcatggctaattcattacttgacgagtctggcaaaccacttaaaagagctgctgctgtttgtgggccaaatggctggccagctgttcatccagatattcttgtagccaccccagctgctctattaaactatctatttgactatgacccggaaaagaggcgaagagagagattcatgcgtaatgtaaaatttgtagtgtttgatgaagcagacatgctactctgtggaagttttgagaaccaggtcattcgtctcatcaatatgttgagatttgatgaaaagctactttctagagcacaggattctggaaaggatatatcacttgggagtgatgatgaatatcatgaggattcaaagtttgagactgctgaatttggtagttctgacaaggaaattgaagacaatattgtggaagatagacttgtcaagttggagaatagtcacgttggagcacacaaggactggaggagagttagaaaaatatacagacgcagcaagcagtatgtctttgttgctgccacccttcctcagagtgggaaaaaaactgctggtggtgtgctacaacgtatgtttccggatgctgtatgggttagtggcacttatctgcaccgtcacaaccccagattagaacgaagatggatagaggttactgctgatacacaagttgatgctcttctgaatgcagttaaatatggcctgaagagtgaagttcatgatgctaaagatgttccaagacgcactatggtctttacaaacaccgttgatgctgctaattcagtctctgatatattgcatcgagttggtattccatgtattttgtaccatcgtgagagttccttgaaggagcgggctaacaatttacagtcttttcgggaaaatggtggtgtgcttgtatgcactgatgctgctgcccgtgggcttgatgttccaaatgtttctcatgtcattcaggcagaatttgctgcctgtgctgttgattttttgcacagggtgggccgcacagccagagctggtcaatctggtatagttactagcctatacacagaggcaaatcgtgatcttgtaagagcagttcgtcaagcagaggagttggctcagccagtggagggagcattcagcaggaaaagaagctttcgcaacaaactaaagaagcaagcattacaaaaacgcgaagcactgctatcttgatagcgtgactcactatatttgtagtaaggagaaaatatatgttttttttctctattactgggtgatgaatgtttttgtagtactatatagaaagctgctacatattaaatagaagttgtattcagaccgagtgcgttgaagtaatctgaccaacatgtagtctcttggataattatatccttatggcgttttcgtggtatttttaccgcattattgcaagtgattacaagtatttttgagaaaattaactatatggccaaaaaaagtctgcctta

SEQ ID NO: 65775 - DNA, 2110 bp, Zea Mays
tgcccctaccggcctacccgaatgcggctggaggcagcccggcccagcacagcagacactccgccacgtcaccgtcgccatggcgctgcaccacctccgcctcgcgccgctcgcgctccttcgcgccgcaagcctcccgcccctcgcctcctcccgtatcgccgcgcgcggccaccgccgcgttctcctctttgcgccgccgtcgtggccgtggcgccttctgtcgcccggtgcgaggccgcgcgcgcttgccaccgctgcggcagaggccgacgatgctacctcgggctcgggcaacgaattcttcgcagagagcacgtcgtgggcttcactcggcgtatccgaacgcctcgcgtccgccctttgcagtgccgggctctcgaggccttcccttgtccaggcaacctgtataccacatgttctcatggcaaatgatgtaattgtcgcagcagagactggtagtggcaaaacccatggttaccttgtacctttgattgaaaagctgtgctcaaaatcttctaccaccaaagatgacaattgtcaggacaccaccccaggagcacatgacatggtgttggtcctttgtcccaatgtcatgctctgcgagcaagttgttcgcatggctaattcattacttgacgagtctggcaaaccacttaaaagagctgctgctgtttgtgggccaaatggctggccagctgttcatccagatattcttgtagccaccccagctgctctattaaactatctatttgactatgacccggaaaagaggcgaagagagagattcatgcgtaatgtaaaatttgtagtgtttgatgaagcagacatgctactctgtggaagttttgagaaccaggtcattcgtctcatcaatatgttgagatttgatgaaaagctactttctagagcacaggattctggaaaggatatatcacttgggagtgatgatgaatatcatgaggattcaaagtttgagactgctgaatttggtagttctgacaaggaaattgaagacaatattgtggaagatagacttgtcaagttggagaatagtcacgttggagcacacaaggactggaggagagttagaaaaatatacagacgcagcaagcagtatgtctttgttgctgccacccttcctcagagtgggaaaaaaactgctggtggtgtgctacaacgtatgtttccggatgctgtatgggttagtggcacttatctgcaccgtcacaaccccagattagaacgaagatggatagaggttactgctgatacacaagttgatgctcttctgaatgcagttaaatatggcctgaagagtgaagttcatgatgctaaagatgttccaagacgcactatggtctttacaaacaccgttgatgctgctaattcagtctctgatatattgcatcgagttggtattccatgtattttgtaccatcgtgagagttccttgaaggagcgggctaacaatttacagtcttttcgggaaaatggtggtgtgcttgtatgcactgatgctgctgcccgtgggcttgatgttccaaatgtttctcatgtcattcaggcagaatttgctgcctgtgctgttgattttttgcacagggtgggccgcacagccagagctggtcaatctggtatagttactagcctatacacagaggcaaatcgtgatcttgtaagagcagttcgtcaagcagaggagttggctcagccagtggtaggattccgttttcatcaccctctggaaggagggagcattcagcaggaaaagaagctttcgcaacaaactaaagaagcaagcattacaaaaacgcgaagcactgctatcttgatagcgtgactcactatatttgtagtaaggagaaaatatatgttttttttctctattactgggtgatgaatgtttttgtagtactatatagaaagctgctacatattaaatagaagttgtattcagaccgagtgcgttgaagtaatctgaccaacatgtagtctcttggataattatatccttatggcgttttcgtggtatttttaccgcattattgcaagtgattacaagtatttttgagaaaattaactatatggccaaaaaaagtctgcctta

SEQ ID NO: 65776 - DNA, 2095 bp, Zea Mays
cgaatgcggctggaggcagcccggcccagcacagcagacactccgccacgtcaccgtcgccatggcgctgcaccacctccgcctcgcgccgctcgcgctccttcgcgccgcaagcctcccgcccctcgcctcctcccgtatcgccgcgcgcggccaccgccgcgttctcctctttgcgccgccgtcgtggccgtggcgccttctgtcgcccggtgcgaggccgcgcgcgcttgccaccgctgcggcagaggccgacgatgctacctcgggctcgggcaacgaattcttcgcagagagcacgtcgtgggcttcactcggcgtatccgaacgcctcgcgtccgccctttgcagtgccgggctctcgaggccttcccttgtccaggcaacctgtataccacatgttctcatggcaaatgatgtaattgtcgcagcagagactggtagtggcaaaacccatggttaccttgtacctttgattgaaaagctgtgctcaaaatcttctaccaccaaagatgacaattgtcaggacaccaccccaggagcacatgacatggtgttggtcctttgtcccaatgtcatgctctgcgagcaagttgttcgcatggctaattcattacttgacgagtctggcaaaccacttaaaagagctgctgctgtttgtgggccaaatggctggccagctgttcatccagatattcttgtagccaccccagctgctctattaaactatctatttgactatgacccggaaaagaggcgaagagagagattcatgcgtaatgtaaaatttgtagtgtttgatgaagcagacatgctactctgtggaagttttgagaaccaggtcattcgtctcatcaatatgttgagatttgatgaaaagctactttctagagcacaggattctggaaaggatatatcacttgggagtgatgatgaatatcatgaggattcaaagtttgagactgctgaatttggtagttctgacaaggaaattgaagacaatattgtggaagatagacttgtcaagttggagaatagtcacgttggagcacacaaggactggaggagagttagaaaaatatacagacgcagcaagcagtatgtctttgttgctgccacccttcctcagagtgggaaaaaaactgctggtggtgtgctacaacgtatgtttccggatgctgtatgggttagtggcacttatctgcaccgtcacaaccccagttaaatatggcctgaagagtgaagttcatgatgctaaagatgttccaagacgcactatggtctttacaaacaccgttgatgctgctaattcagtctctgatatattgcatcgagttggtattccatgtattttgtaccatcgtgagagttccttgaaggagcgggctaacaatttacagtcttttcgggaaaatggtggtgtgcttgtatgcactgatgctgctgcccgtgggcttgatgttccaaatgtttctcatgtcattcaggcagaatttgctgcctgtgctgttgattttttgcacagggtgggccgcacagccagagctggtcaatctggtatagttactagcctatacacagaggcaaatcgtgatcttgtaagagcagttcgtcaagcagaggagttggctcagccagtggtaggattccgttttcatcaccctctggaaggttataatatatatattttttcctggagaagcatttgcataataaaaatgttaatgtttaaacaggagggagcattcagcaggaaaagaagctttcgcaacaaactaaagaagcaagcattacaaaaacgcgaagcactgctatcttgatagcgtgactcactatatttgtagtaaggagaaaatatatgttttttttctctattactgggtgatgaatgtttttgtagtactatatagaaagctgctacatattaaatagaagttgtattcagaccgagtgcgttgaagtaatctgaccaacatgtagtctcttggataattatatccttatggcgttttcgtggtatttttaccgcattattgcaagtgattacaagtatttttgagaaaattaactatatggccaaaaaaagtctgcctta

SEQ ID NO: 65777 - DNA, 2283 bp, Zea Mays
ctggaggcagcccggcccagcacagcagacactccgccacgtcaccgtcgccatggcgctgcaccacctccgcctcgcgccgctcgcgctccttcgcgccgcaagcctcccgcccctcgcctcctcccgtatcgccgcgcgcggccaccgccgcgttctcctctttgcgccgccgtcgtggccgtggcgccttctgtcgcccggtgcgaggccgcgcgcgcttgccaccgctgcggcagaggccgacgatgctacctcgggctcgggcaacgaattcttcgcagagagcacgtcgtgggcttcactcggcgtatccgaacgcctcgcgtccgccctttgcagtgccgggctctcgaggccttcccttgtccaggcaacctgtataccacatgttctcatggcaaatgatgtaattgtcgcagcagagactggtagtggcaaaacccatggttaccttgtacctttgattgaaaagctgtgctcaaaatcttctaccaccaaagatgacaattgtcaggacaccaccccaggagcacatgacatggtgttggtcctttgtcccaatgtcatgctctgcgagcaagttgttcgcatggctaattcattacttgacgagtctggcaaaccacttaaaagagctgctgctgtttgtgggccaaatggctggccagctgttcatccagatattcttgtagccaccccagctgctctattaaactatctatttgactatgacccggaaaagaggcgaagagagagattcatgcgtaatgtaaaatttgtagtgtttgatgaagcagacatgctactctgtggaagttttgagaaccaggtcattcgtctcatcaatatgttgagatttgatgaaaagctactttctagagcacaggattctggaaaggatatatcacttgggagtgatgatgaatatcatgaggattcaaagtttgagactgctgaatttggtagttctgacaaggaaattgaagacaatattgtggaagatagacttgtcaagttggagaatagtcacgttggagcacacaaggactggaggagagttagaaaaatatacagacgcagcaagcagtatgtctttgttgctgccacccttcctcagagtgggaaaaaaactgctggtggtgtgctacaacgtatgtttccggatgctgtatgggttagtggcacttatctgcaccgtcacaaccccaggtcagtgaaggagagcgtaggctcggctcccgactctgtgcctgtggattcaaacactgaccctatggcagatccaaagcgcagagcaaagtcttgcaagaccgtgacaacgggaggaatcaagaggttaaaaaaacatcttgccggtggtcatgcggacacattaatgtgttctaagactacaactgagattagaaaagaaatgaaggcatatttggacaagaacaagagattagaacgaagatggatagaggttactgctgatacacaagttgatgctcttctgaatgcagttaaatatggcctgaagagtgaagttcatgatgctaaagatgttccaagacgcactatggtctttacaaacaccgttgatgctgctaattcagtctctgatatattgcatcgagttggtattccatgtattttgtaccatcgtgagagttccttgaaggagcgggctaacaatttacagtcttttcgggaaaatggtggtgtgcttgtatgcactgatgctgctgcccgtgggcttgatgttccaaatgtttctcatgtcattcaggcagaatttgctgcctgtgctgttgattttttgcacagggtgggccgcacagccagagctggtcaatctggtatagttactagcctatacacagaggcaaatcgtgatcttgtaagagcagttcgtcaagcagaggagttggctcagccagtggagggagcattcagcaggaaaagaagctttcgcaacaaactaaagaagcaagcattacaaaaacgcgaagcactgctatcttgatagcgtgactcactatatttgtagtaaggagaaaatatatgttttttttctctattactgggtgatgaatgtttttgtagtactatatagaaagctgctacatattaaatagaagttgtattcagaccgagtgcgttgaagtaatctgaccaacatgtagtctcttggataattatatccttatggcgttttcgtggtatttttaccgcattattgcaagtgattacaagtatttttgagaaaattaactatatggccaaaaaaagtctgcctta

SEQ ID NO: 65778 - DNA, 1439 bp, Zea Mays
cgccatggcgctgcaccacctccgcctcgcgccgctcgcgctccttcgcgccgcaagcctcccgcccctcgcctcctcccgtatcgccgcgcgcggccaccgccgcgttctcctctttgcgccgccgtcgtggccgtggcgccttctgtcgcccggtgcgaggccgcgcgcgcttgccaccgctgcggcagaggccgacgatgctacctcgggctcgggcaacgaattcttcgcagagagcacgtcgtgggcttcactcggcgtatccgaacgcctcgcgtccgccctttgcagtgccgggctctcgaggccttcccttgtccaggcaacctgtataccacatgttctcatggcaaatgatgtaattgtcgcagcagagactggtagtggcaaaacccatggttaccttgtacctttgattgaaaagctgtgctcaaaatcttctaccaccaaagatgacaattgtcaggacaccaccccaggagcacatgacatggtgttggtcctttgtcccaatgtcatgctctgcgagcaagttgttcgcatggctaattcattacttgacgagtctggcaaaccacttaaaagagctgctgctgtttgtgggccaaatggctggccagctgttcatccagatattcttgtagccaccccagctgctctattaaactatctatttgactatgacccggaaaagaggcgaagagagagattcatgcgtaatgtaaaatttgtagtgtttgatgaagcagacatgctactctgtggaagttttgagaaccaggtcattcgtctcatcaatatgttgagatttgatgaaaagctactttctagagcacaggattctggaaaggatatatcacttgggagtgatgatgaatatcatgaggattcaaagtttgagactgctgaatttggtagttctgacaaggaaattgaagacaatattgtggaagatagacttgtcaagttggagaatagtcacgttggagcacacaaggactggaggagagttagaaaaatatacagacgcagcaagcagtatgtctttgttgctgccacccttcctcagagtgggaaaaaaactgctggtggtgtgctacaacgtatgtttccggatgctgtatgggttagtggcacttatctgcaccgtcacaaccccagggttcagggcgtcgcctagcgcctcataggaagacaagacgtcgccctgcagacaccttggaccggattgcaaagttttccactcgccaaacccttctgttcgctgtcgttcgctgtgcacgtaccagactcgcgattagggcttcacatgaggtccaggcgacgacaactctcagtgtccaccggcggcggcaactctcagttcaccggcggcggcggccccctgtcgtgagcccttgacctctccctccctggcgaagtcctcttcccctgct

SEQ ID NO: 65779 - DNA, 1520 bp, Zea Mays
ccctccgtgtcgtcaacggcaaagccaaacccatcaaacccgccgtccaaaccagctgaccacagcagcagctctccatcggacggcagagagcagccgttcgccacttggattcaaacgccccgtcactctaaccgctgctgaaactaccaaattacccctagcccgctccctcagcttcctgctccgttggaacggacagccgcggcagtccccagcccccccgcttcctgcaccctcgctgctagggttttctcgcaatccagcccctctgtcatggccaagacgaagcaagggaagcgggatgtcgacgcctataccatcaagggcaccaacaaggtggtccgagtgggggactgcgtgctgatgcggccagcggacacggacaacccgccgtacgtggcgcgggtggagcggatggagtcggacgggcgcggcagcgtgagggtgcgggtgcgctggtactaccgccccgaggaggccaagggcggccgacgcccgttccacggtgccaaggagctcttcctctccgaccacttcgacacgcagagcgcccacaccattgagggcaagtgcatcgttcactccttcaagagctacaccaagctcgacaacgttggtccggaggacttctactgccgatttgactacaaggccgccaccggtgcattcacccccgaccgtgtcgccgtatattgcaagtgtgagatgccgtacaacccggatgacctcatggtgcagtgtgaaggatgcaaggactggttccatccgtcttgtatgggaatgaccattgagcaagcaaaaaagatagatcattacatgtgctcggattgtgctaaagaaaatggtgcaaagagaccctcaaattcatactcagtttcaccaaactcagattctaagtcagtattgttttgattggaagtaccttgtgggcaacgtaaaacataccataaagatatgaagccttgccattgtaatcatgttgaaactacagctaatcagtgaagttctggtaaacatatgctatctgatcaacaagtggcctaatcatgtttgccgtagtgcgaggcctaaattttagccttttaacctcgattgaatcaaagaggcgcaagagataaatgctgcggcagaagcacccctggcaaaggagatgcggtatttatggtgtcagctcctcattactggtgcatatttgagatgttgatgtgtacactgcgagagaagagccaagccaattgtagggcaaaacctatttgacttatcattcttctgtgtattctgcctagacattagtgtgatgagtaggtgagttccccgttgcggcgtgtgcatgatcagctgctggaggcgggatgtcgggaaatgctagaattatgctgactcttgtcgatgtaagtgtatcgtgtgtgtgtgttaacatatgcactggctggaaacgttcccatgtgtgaatggaggatgctgatgatagcttgactgttgtttcatattcaaaatagacaataagaaaagaaaaa

SEQ ID NO: 65780 - DNA, 1393 bp, Zea Mays
ccctccgtgtcgtcaacggcaaagccaaacccatcaaacccgccgtccaaaccagctgaccacagcagcagctctccatcggacggcagagagcagccgttcgccacttggattcaaacgccccgtcactctaaccgctgctgaaactaccaaattacccctagcccgctccctcagcttcctgctcccccctctgtcatggccaagacgaagcaagggaagcgggatgtcgacgcctataccatcaagggcaccaacaaggtggtccgagtgggggactgcgtgctgatgcggccagcggacacggacaacccgccgtacgtggcgcgggtggagcggatggagtcggacgggcgcggcagcgtgagggtgcgggtgcgctggtactaccgccccgaggaggccaagggcggccgacgcccgttccacggtgccaaggagctcttcctctccgaccacttcgacacgcagagcgcccacaccattgagggcaagtgcatcgttcactccttcaagagctacaccaagctcgacaacgttggtccggaggacttctactgccgatttgactacaaggccgccaccggtgcattcacccccgaccgtgtcgccgtatattgcaagtgtgagatgccgtacaacccggatgacctcatggtgcagtgtgaaggatgcaaggactgtttccttttgactgcgaggcgaagtataattcatctggaatatctactttggtcaggattaggaccaaacaatgaatgatgaacatggggttccttagagccttatgctcctgtgtttgcttggtccttatgtaagatatatatggttccatccgtcttgtatgggaatgaccattgagcaagcaaaaaagatagatcattacatgtgctcggattgtgctaaagaaaatggtgcaaagagaccctcaaattcatactcagtttcaccaaactcagattctaagattgaatcaaagaggcgcaagagataaatgctgcggcagaagcacccctggcaaaggagatgcggtatttatggtgtcagctcctcattactggtgcatatttgagatgttgatgtgtacactgcgagagaagagccaagccaattgtagggcaaaacctatttgacttatcattcttctgtgtattctgcctagacattagtgtgatgagtaggtgagttccccgttgcggcgtgtgcatgatcagctgctggaggcgggatgtcgggaaatgctagaattatgctgactcttgtcgatgtaagtgtatcgtgtgtgtgtgttaacatatgcactggctggaaacgttcccatgtgtgaatggaggatgctgatgatagcttgactgttgtttcatattcaaaatagacaataagaaaagaaaaa

SEQ ID NO: 65781 - DNA, 2546 bp, Zea Mays
ccctccgtgtcgtcaacggcaaagccaaacccatcaaacccgccgtccaaaccagctgaccacagcagcagctctccatcggacggcagagagcagccgttcgccacttggattcaaacgccccgtcactctaaccgctgctgaaactaccaaattacccctagcccgctccctcagcttcctgctcccccctctgtcatggccaagacgaagcaagggaagcgggatgtcgacgcctataccatcaagggcaccaacaaggtggtccgagtgggggactgcgtgctgatgcggccagcggacacggacaacccgccgtacgtggcgcgggtggagcggatggagtcggacgggcgcggcagcgtgagggtgcgggtgcgctggtactaccgccccgaggaggccaagggcggccgacgcccgttccacggtgccaaggagctcttcctctccgaccacttcgacacgcagagcgcccacaccattgagggcaagtgcatcgttcactccttcaagagctacaccaagctcgacaacgttggtccggaggacttctactgccgatttgactacaaggccgccaccggtgcattcacccccgaccgtgtcgcctgtgagatgccgtacaacccggatgacctcatggtgcagtgtgaaggatgcaaggactggtaaaatcctgtgaaaactccacacttttctcccattagtgcatgttttgagaggggtttatctagtaaaatcactgtgaaatggctccacattttgccctcaacaataaatctcttgaaatggtgctgatgtggtggttatatgaactgcctttcatcaagatgttatttttttctgctctcttgccctatgtctactttgttatgcagaatgaactaattaatttatcttgtgtttatttagtttccttttgactgcgaggcgaagtataattcatctggaatatctactttggtcaggattaggaccaaacaatgaatgatgaacatggggttccttagagccttatgctcctgtgtttgcttggtccttatgtaagatatatatggtattcactactgactagtattgcttacacagtctttgtagatatatttagtttcaagaactgtttaaacacatcatcaaggactggttttctgcaaaatctcgtagcatttatctgttttgttctgtttaattatacctgttgcacattggtttttcttgcttgacaagcagctagcttagttatatggacctgattgtggcacatgtgattctctctggagtactatcaaactaatatagaattggattagaatttagaacagtaggtgccatgcagtgtttttaggatttgcatgacctgacattttatttattttttctaagaagcttttaagatgtttgatctacatgaatatgattgcttacgagaacatttagacatcatgcagtatgctatctctggattttgtcacatgataaatgtatgtcatatgttctacataatgatcaaagggctgcatgatgtagttatgatggttgtccttttcgttggctttctgctgaaatgatttcttgagagctgatactcttttgccatttatatagaatatttgttattatttgtatccaatatcatcttattgttgctaaccattattacgggcctgtttggttttccacctaaagcgccacaatctgcctaaacttagtcgttggaattgagaactaaccttagacaaaaaaagttaggcaaattgtggcgccttaggcacgaagccaaacaggcctaaatcctctacatcctggtgccatggatatgagtcatatgacttgtacatataatcctgttttttctatattctatggaaaatgcttatttaacttgttaacaatgtaattttgtttctgttatttgtatgatgttattgttcttctttattaccatttttattagttatccaacttttaactcttgtaggttccatccgtcttgtatgggaatgaccattgagcaagcaaaaaagatagatcattacatgtgctcggattgtgctaaagaaaatggtgcaaagagaccctcaaattcatactcagtttcaccaaactcagattctaagattgaatcaaagaggcgcaagagataaatgctgcggcagaagcacccctggcaaaggagatgcggtatttatggtgtcagctcctcattactggtgcatatttgagatgttgatgtgtacactgcgagagaagagccaagccaattgtagggcaaaacctatttgacttatcattcttctgtgtattctgcctagacattagtgtgatgagtaggtgagttccccgttgcggcgtgtgcatgatcagctgctggaggcgggatgtcgggaaatgctagaattatgctgactcttgtcgatgtaagtgtatcgtgtgtgtgtgttaacatatgcactggctggaaacgttcccatgtgtgaatggaggatgctgatgatagcttgactgttgtttcatattcaaaatagacaataagaaaagaaaaa

SEQ ID NO: 65782 - DNA, 1637 bp, Zea Mays
ccctccgtgtcgtcaacggcaaagccaaacccatcaaacccgccgtccaaaccagctgaccacagcagcagctctccatcggacggcagagagcagccgttcgccacttggattcaaacgccccgtcactctaaccgctgctgaaactaccaaattacccctagcccgctccctcagcttcctgctcccccctctgtcatggccaagacgaagcaagggaagcgggatgtcgacgcctataccatcaagggcaccaacaaggtggtccgagtgggggactgcgtgctgatgcggccagcggacacggacaacccgccgtacgtggcgcgggtggagcggatggagtcggacgggcgcggcagcgtgagggtgcgggtgcgctggtactaccgccccgaggaggccaagggcggccgacgcccgttccacggtgccaaggagctcttcctctccgaccacttcgacacgcagagcgcccacaccattgagggcaagtgcatcgttcactccttcaagagctacaccaagctcgacaacgttggtccggaggacttctactgccgatttgactacaaggccgccaccggtgcattcacccccgaccgtgtcgccgtatattgcaagtgtgagatgccgtacaacccggatgacctcatggtgcagtgtgaaggatgcaaggactggtaaaatcctgtgaaaactccacacttttctcccattagtgcatgttttgagaggggtttatctagtaaaatcactgtgaaatggctccacattttgccctcaacaataaatctcttgaaatggtgctgatgtggtggttatatgaactgcctttcatcaagatgttatttttttctgctctcttgccctatgtctactttgttatgcagaatgaactaattaatttatcttgtgtttatttagtttccttttgactgcgaggcgaagtataattcatctggaatatctactttggtcaggattaggaccaaacaatgaatgatgaacatggggttccttagagccttatgctcctgtgtttgcttggtccttatgtaagatatatatggttccatccgtcttgtatgggaatgaccattgagcaagcaaaaaagatagatcattacatgtgctcggattgtgctaaagaaaatggtgcaaagagaccctcaaattcatactcagtttcaccaaactcagattctaagattgaatcaaagaggcgcaagagataaatgctgcggcagaagcacccctggcaaaggagatgcggtatttatggtgtcagctcctcattactggtgcatatttgagatgttgatgtgtacactgcgagagaagagccaagccaattgtagggcaaaacctatttgacttatcattcttctgtgtattctgcctagacattagtgtgatgagtaggtgagttccccgttgcggcgtgtgcatgatcagctgctggaggcgggatgtcgggaaatgctagaattatgctgactcttgtcgatgtaagtgtatcgtgtgtgtgtgttaacatatgcactggctggaaacgttcccatgtgtgaatggaggatgctgatgatagcttgactgttgtttcatattcaaaatagacaataagaaaagaaaaa

SEQ ID NO: 65783 - DNA, 1236 bp, Zea Mays
ccctccgtgtcgtcaacggcaaagccaaacccatcaaacccgccgtccaaaccagctgaccacagcagcagctctccatcggacggcagagagcagccgttcgccacttggattcaaacgccccgtcactctaaccgctgctgaaactaccaaattacccctagcccgctccctcagcttcctgctcccccctctgtcatggccaagacgaagcaagggaagcgggatgtcgacgcctataccatcaagggcaccaacaaggtggtccgagtgggggactgcgtgctgatgcggccagcggacacggacaacccgccgtacgtggcgcgggtggagcggatggagtcggacgggcgcggcagcgtgagggtgcgggtgcgctggtactaccgccccgaggaggccaagggcggccgacgcccgttccacggtgccaaggagctcttcctctccgaccacttcgacacgcagagcgcccacaccattgagggcaagtgcatcgttcactccttcaagagctacaccaagctcgacaacgttggtccggaggacttctactgccgatttgactacaaggccgccaccggtgcattcacccccgaccgtgtcgcctgtgagatgccgtacaacccggatgacctcatggtgcagtgtgaaggatgcaaggactggttccatccgtcttgtatgggaatgaccattgagcaagcaaaaaagatagatcattacatgtgctcggattgtgctaaagaaaatggtgcaaagagaccctcaaattcatactcagtttcaccaaactcagattctaagattgaatcaaagaggcgcaagagataaatgctgcggcagaagcacccctggcaaaggagatgcggtatttatggtgtcagctcctcattactggtgcatatttgagatgttgatgtgtacactgcgagagaagagccaagccaattgtagggcaaaacctatttgacttatcattcttctgtgtattctgcctagacattagtgtgatgagtaggtgagttccccgttgcggcgtgtgcatgatcagctgctggaggcgggatgtcgggaaatgctagaattatgctgactcttgtcgatgtaagtgtatcgtgtgtgtgtgttaacatatgcactggctggaaacgttcccatgtgtgaatggaggatgctgatgatagcttgactgttgtttcatattcaaaatagacaataagaaaagaaaaa

SEQ ID NO: 65784 - DNA, 2015 bp, Zea Mays
ccctccgtgtcgtcaacggcaaagccaaacccatcaaacccgccgtccaaaccagctgaccacagcagcagctctccatcggacggcagagagcagccgttcgccacttggattcaaacgccccgtcactctaaccgctgctgaaactaccaaattacccctagcccgctccctcagcttcctgctccgttggaacggacagccgcggcagtccccagcccccccgcttcctgcaccctcgctgctagggttttctcgcaatccagcccctctgtcatggccaagacgaagcaagggaagcgggatgtcgacgcctataccatcaagggcaccaacaaggtggtccgagtgggggactgcgtgctgatgcggccagcggacacggacaacccgccgtacgtggcgcgggtggagcggatggagtcggacgggcgcggcagcgtgagggtgcgggtgcgctggtactaccgccccgaggaggccaagggcggccgacgcccgttccacggtgccaaggagctcttcctctccgaccacttcgacacgcagagcgcccacaccattgagggcaagtgcatcgttcactccttcaagagctacaccaagctcgacaacgttggtccggaggacttctactgccgatttgactacaaggccgccaccggtgcattcacccccgaccgtgtcgccgtgtacaaagctcttccttttctgtaaccttttgtcatgtggtggttaatcagtttgtattatttttgcttctgatgtaatgtgggatttttgatcttatgtgacattgtttgtatgtgaagatattgcaagtgtgagatgccgtacaacccggatgacctcatggtgcagtgtgaaggatgcaaggactggtaaaatcctgtgaaaactccacacttttctcccattagtgcatgttttgagaggggtttatctagtaaaatcactgtgaaatggctccacattttgccctcaacaataaatctcttgaaatggtgctgatgtggtggttatatgaactgcctttcatcaagatgttatttttttctgctctcttgccctatgtctactttgttatgcagaatgaactaattaatttatcttgtgtttatttagtttccttttgactgcgaggcgaagtataattcatctggaatatctactttggtcaggattaggaccaaacaatgaatgatgaacatggggttccttagagccttatgctcctgtgtttgcttggtccttatgttccatccgtcttgtatgggaatgaccattgagcaagcaaaaaagatagatcattacatgtgctcggattgtgctaaagaaaatggtgcaaagagaccctcaaattcatactcagtttcaccaaactcagattctaagtcagtattgttttgattggaagtaccttgtgggcaacgtaaaacataccataaagatatgaagccttgccattgtaatcatgttgaaactacagctaatcagtgaagttctggtaaacatatgctatctgatcaacaagtggcctaatcatgtttgccgtagtgcgaggcctaaattttagccttttaacctcgattgaatcaaagaggcgcaagagataaatgctgcggcagaagcacccctggcaaaggagatgcggtatttatggtgtcagctcctcattactggtgcatatttgagatgttgatgtgtacactgcgagagaagagccaagccaattgtagggcaaaacctatttgacttatcattcttctgtgtattctgcctagacattagtgtgatgagtaggtgagttccccgttgcggcgtgtgcatgatcagctgctggaggcgggatgtcgggaaatgctagaattatgctgactcttgtcgatgtaagtgtatcgtgtgtgtgtgttaacatatgcactggctggaaacgttcccatgtgtgaatggaggatgctgatgatagcttgactgttgtttcatattcaaaatagacaataagaaaagaaaaa

SEQ ID NO: 65785 - DNA, 1394 bp, Zea Mays
aagcaagcagcgactccgtccgcgcacggcaccttcccctcccccgcacggccgcacacaccagacaccaccaccactcgcaagtctcttcgccgtctcgccgagttattagaaggcggggaaaaaaatcaactcgaacgggcgggtggcaaccaaccaccaagcggcgagggcgatggcggcgtcctcgccgcggaagcggctccctgctgcgcgcctcatcttcgccctcctcctgatgtcctccgtgctgccgcgggacgccggggcggtggaactggggctgaagctgcccttcagtccgggggacgtgctccccgtcctgccgcggcaggtggcgtggcccgtcatgaacacgctccacagcgccgtcgacctactgccgtccttcgtcgccgccgtggcgcccggggcgccggcgccggcggcctggaaaggcgcgtgcttctcggagaacgaggccgctatcgagctcacgcccggggaccgcaacgggaccgacgtcggcggtgccgtactgcgcctcaagactgcttcagctcatagttgggcatgcatggatctctacgtttttgcaacaccatataggataacatgggactattattttgctgctcgggagcacactttggagattaaatcatgggaggaagaagcggaattgaaatatgtgaaggagcatggcatttctatttttctcatgccatctggaatgctcggaactttgctatctttgattgatgtcctgcctttgttttcaaacactgcctggggccaacattccaacctagcctttttagagaagcatatgggagcctcatttgagaaacgaacccaaccttgggttgctaacattagaaaggaggatatacaatctggtgactttttggctttatcaaagattcgaggacgatggggtgggtttgagacattagagaaatgggtgactggtgcatttgctgggcatacctcggtttgcttaaaagacgagaagggtgatctttgggttgcagagtcaggctatgaaaacgagaagggagaagaaatcattgctatagttccttgggatgaatggtgggccatggctctcaaggatgaatcaaatcctcagatagccctgcttcctttgcaccctgatgtgcgtgccagattcaacgaaagtgctgcatgggaatatgcccggagcatggttggaaatccttatggctaccataacatgatatttagctggatcgatacaataggagataattatccacctcctcttgatgctaacctggtaatggcagttatgtcaatgtggactagattgcagccagtttatgctgcaaacatgtggaatgaagccctaaacaaacgacttggcactgagggcagctcaacggtgatgtatc

SEQ ID NO: 65786 - DNA, 1658 bp, Zea Mays
gttcatccgctgcacctgctaaagtttttgactgcttcagctcatagttgggcatgcatggatctctacgtttttgcaacaccatataggataacatgggactattattttgctgctcgggagcacactttggagattaaatcatgggaggaagaagcggaattgaaatatgtgaaggagcatggcatttctatttttctcatgccatctggaatgctcggaactttgctatctttgattgatgtcctgcctttgttttcaaacactgcctggggccaacattccaacctagcctttttagagaagcatatgggagcctcatttgagaaacgaacccaaccttgggttgctaacattagaaaggaggatatacaatctggtgactttttggctttatcaaagattcgaggacgatggggtgggtttgagacattagagaaatgggtgactggtgcatttgctgggcatacctcggtttgcttaaaagacgagaagggtgatctttgggttgcagagtcaggctatgaaaacgagaagggagaagaaatcattgctatagttccttgggatgaatggtgggccatggctctcaaggatgaatcaaatcctcagatagccctgcttcctttgcaccctgatgtgcgtgccagattcaacgaaagtgctgcatgggaatatgcccggagcatggttggaaatccttatggctaccataacatgatatttagctggatcgatacaataggagataattatccacctcctcttgatgctaacctggtaatggcagttatgtcaatgtggactagattgcagccagtttatgctgcaaacatgtggaatgaagccctaaacaaacgacttggcactgaggatttcgaccttcaggggatcattatggagattgaaagacgtggaatgtcttttgatcagttgctcaccatacccgagcaagacgaatgggtgtacagtgatggtaaatcaactacttgtgtcgccttcattcttgcaatgtacaaggaggctggaatattcacccctttctcggagtcgatccaggtcaccgagttcactattcgtgacgcatacatgctcaagatatttgaagacaacccggcaaggcttccaggttggtgcaacgcaggcacggacaagcttcccttttgccagattctcggagagtacagaatggagctaccagagtacaacacgattgaaccttatgcgaaaatgaacgagaactgtccgtccttgcccccaacgtacaaacgacccgcacgctgctgactacgagattgtctactatgtatctttctgcagctgctgcctttacacagtggcattagagtgttgttgctatgttctgtaaataaaagacactatatatataggtgcttggtagatggtagttcttaccagtaatgtagctgcgatgtattcaggttcacggttttcagtcgatcagttctgaagccacggcgtcggcgaccaatatgaaggttaggatttgtcagctccggaaagttgcttatatgtatcaatgtatgtatgtaggcaacattatggcttggtcataaattgtgaactccgtcaagaaataaatctataatgcaacgtcaggtgattctgatatgtgattaagaaaataaaaaaacaaa

SEQ ID NO: 65787 - DNA, 2828 bp, Zea Mays
cgcattgtatggattgaaacaagctcctcgtgcttggtttgagcgatttatctctatcatcacaactgctggtttttttttctagtgaacatgaccctgcattgtttgttatatctttccaaaaggacgcactttacttctattatacgtggatgatatgctgattactggtgacaactcagaacatatttcttatgtcaagcaacatcttagtaaggaatttcagatgtctgatttgggaccactcagctatttcttgggcattgaagttcagcagactcaaaaaggtttttatctgtctcagtccaagtatattcaagatcttcttgatcgctctggaattactgatacacgcgcagttgcaacaccaatgaatattcatttgaaacttcgtccgaaggatgggacaccacttgcagacccaactcggtattgtcatattgtgggtagtcttgtttatcttaccatcaccagacctgatatagctcatgttgttcatatgttgagccaatttgtatcaacaccaactacagttcattatggtcatttgcttcgtgtgcttcgatatttacgtggggcaacatccagatgtttactctatgcgtctgatagcctacttcagcttcatgcgtattctgatgccacttgggcaagtgatcctgttgatcgttgttctactataggttattgtattctccttggatcttctcccattgcctggaaatccaagaagcaagcggccatatctcgttctagtgctgaagccgaacttcaggcccttgctactaccactgctgaaattatttggttgcgctggctcttggctgatcttggtgtctcttgtgacacgtttacacctctgttatgtgataacttgagtgctatacagattgctcatgatccggtgaagcatgaacttactaaacacatcagtgttgatgcatcttttacttgatcccattgtcagcagaagactattgatcttcaatatgttccctcagaatctcaattggcagatttcttcaccaaagcacaaacaagagcacaacattagtttcacttgatcaaacttaaagcttcagatcctccttttccaccttgagtttgaggaggggtgttaaggcccattaggcccaggcctactgcctatatatatgacctatagtccttagggacagattatcaattgtaattttcaagactgcttcagctcatagttgggcatgcatggatctctacgtttttgcaacaccatataggataacatgggactattattttgctgctcgggagcacactttggagattaaatcatgggaggaagaagcggaattgaaatatgtgaaggagcatggcatttctatttttctcatgccatctggaatgctcggaactttgctatctttgattgatgtcctgcctttgttttcaaacactgcctggggccaacattccaacctagcctttttagagaagcatatgggagcctcatttgagaaacgaacccaaccttgggttgctaacattagaaaggaggatatacaatctggtgactttttggctttatcaaagattcgaggacgatggggtgggtttgagacattagagaaatgggtgactggtgcatttgctgggcatacctcggtttgcttaaaagacgagaagggtgatctttgggttgcagagtcaggctatgaaaacgagaagggagaagaaatcattgctatagttccttgggatgaatggtgggccatggctctcaaggatgaatcaaatcctcagatagccctgcttcctttgcaccctgatgtgcgtgccagattcaacgaaagtgctgcatgggaatatgcccggagcatggttggaaatccttatggctaccataacatgatatttagctggatcgatacaataggagataattatccacctcctcttgatgctaacctggtaatggcagttatgtcaatgtggactagattgcagccagtttatgctgcaaacatgtggaatgaagccctaaacaaacgacttggcactgaggatttcgaccttcaggggatcattatggagattgaaagacgtggaatgtcttttgatcagttgctcaccatacccgagcaagacgaatgggtgtacagtgatggtaaatcaactacttgtgtcgccttcattcttgcaatgtacaaggaggctggaatattcacccctttctcggagtcgatccaggtcaccgagttcactattcgtgacgcatacatgctcaagatatttgaagacaacccggcaaggcttccaggttggtgcaacgcaggcacggacaagcttcccttttgccagattctcggagagtacagaatggagctaccagagtacaacacgattgaaccttatgcgaaaatgaacgagaactgtccgtccttgcccccaacgtacaaacgacccgcacgctgctgactacgagattgtctactatgtatctttctgcagctgctgcctttacacagtggcattagagtgttgttgctatgttctgtaaataaaagacactatatatataggtgcttggtagatggtagttcttaccagtaatgtagctgcgatgtattcaggttcacggttttcagtcgatcagttctgaagccacggcgtcggcgaccaatatgaaggttaggatttgtcagctccggaaagttgcttatatgtatcaatgtatgtatgtaggcaacattatggcttggtcataaattgtgaactccgtcaagaaataaatctataatgcaacgtcaggtgattctgatatgtgattaagaaaataaaaaaacaaa

SEQ ID NO: 65788 - DNA, 2068 bp, Zea Mays
gtgacacgtttacacctctgttatgtgataacttgagtgctatacagattgctcatgatccggtgaagcatgaacttactaaacacatcagtgttgatgcatcttttacttgatcccattgtcagcagaagactattgatcttcaatatgttccctcagaatctcaattggcagatttcttcaccaaagcacaaacaagagcacaacattagtttcacttgatcaaacttaaagcttcagatcctccttttccaccttgagtttgaggaggggtgttaaggcccattaggcccaggcctactgcctatatatatgacctatagtccttagggacagattatcaattgtaattttcaagactgcttcagctcatagttgggcatgcatggatctctacgtttttgcaacaccatataggataacatgggactattattttgctgctcgggagcacactttggagattaaatcatgggaggaagaagcggaattgaaatatgtgaaggagcatggcatttctatttttctcatgccatctggaatgctcggaactttgctatctttgattgatgtcctgcctttgttttcaaacactgcctggggccaacattccaacctagcctttttagagaagcatatgggagcctcatttgagaaacgaacccaaccttgggttgctaacattagaaaggaggatatacaatctggtgactttttggctttatcaaagattcgaggacgatggggtgggtttgagacattagagaaatgggtgactggtgcatttgctgggcatacctcggtttgcttaaaagacgagaagggtgatctttgggttgcagagtcaggctatgaaaacgagaagggagaagaaatcattgctatagttccttgggatgaatggtgggccatggctctcaaggatgaatcaaatcctcagatagccctgcttcctttgcaccctgatgtgcgtgccagattcaacgaaagtgctgcatgggaatatgcccggagcatggttggaaatccttatggctaccataacatgatatttagctggatcgatacaataggagataattatccacctcctcttgatgctaacctggtaatggcagttatgtcaatgtggactagattgcagccagtttatgctgcaaacatgtggaatgaagccctaaacaaacgacttggcactgaggttgtagattactgttaatacttattctccctcattgggtattgggcattcacaagattattttgattcaagctagtgtaaggatttcgaccttcaggggatcattatggagattgaaagacgtggaatgtcttttgatcagttgctcaccatacccgagcaagacgaatgggtgtacagtgatggtaaatcaactacttgtgtcgccttcattcttgcaatgtacaaggaggctggaatattcacccctttctcggagtcgatccaggtcaccgagttcactattcgtgacgcatacatgctcaagatatttgaagacaacccggcaaggcttccaggttggtgcaacgcaggcacggacaagcttcccttttgccagattctcggagagtacagaatggagctaccagagtacaacacgattgaaccttatgcgaaaatgaacgagaactgtccgtccttgcccccaacgtacaaacgacccgcacgctgctgactacgagattgtctactatgtatctttctgcagctgctgcctttacacagtggcattagagtgttgttgctatgttctgtaaataaaagacactatatatataggtgcttggtagatggtagttcttaccagtaatgtagctgcgatgtattcaggttcacggttttcagtcgatcagttctgaagccacggcgtcggcgaccaatatgaaggttaggatttgtcagctccggaaagttgcttatatgtatcaatgtatgtatgtaggcaacattatggcttggtcataaattgtgaactccgtcaagaaataaatctataatgcaacgtcaggtgattctgatatgtgattaagaaaataaaaaaacaaa

SEQ ID NO: 65789 - DNA, 849 bp, Zea Mays
gttaatacttattctccctcattgggtattgggcattcacaagattattttgattcaagctagtgatttcgaccttcaggggatcattatggagattgaaagacgtggaatgtcttttgatcagttgctcaccatacccgagcaagacgaatgggtgtacagtgatggtaaatcaactacttgtgtcgccttcattcttgcaatgtacaaggaggctggaatattcacccctttctcggagtcgatccaggtcaccgagttcactattcgtgacgcatacatgctcaagatatttgaagacaacccggcaaggcttccaggttggtgcaacgcaggcacggacaagcttcccttttgccagattctcggagagtacagaatggagctaccagagtacaacacgattgaaccttatgcgaaaatgaacgagaactgtccgtccttgcccccaacgtacaaacgacccgcacgctgctgactacgagattgtctactatgtatctttctgcagctgctgcctttacacagtggcattagagtgttgttgctatgttctgtaaataaaagacactatatatataggtgcttggtagatggtagttcttaccagtaatgtagctgcgatgtattcaggttcacggttttcagtcgatcagttctgaagccacggcgtcggcgaccaatatgaaggttaggatttgtcagctccggaaagttgcttatatgtatcaatgtatgtatgtaggcaacattatggcttggtcataaattgtgaactccgtcaagaaataaatctataatgcaacgtcaggtgattctgatatgtgattaagaaaataaaaaaacaaa

SEQ ID NO: 65790 - DNA, 1990 bp, Zea Mays
tctcctccaccacccgtttctctttctctaggctcgcgcctgccccgccttcgttgtcgcgcctgccacctgctcgacgaatcgccgcttccgccccacgccgcgatgccgacgcccctcgccgcggcgctgctgccactgcccgcctctcccgcactgcactttccgcggccgcggcccggtccctcatggcgtgcgcggccggccgtggttagggcggccgctctccgcgccctgccacggcgcctcgagctctgtccgccgtgccttgcggcggtcgagagtaacccggccccgccacccttagctccgccaccgccggacgaggcgagcgccggctcaggcctcgatgcgagggccgggggaggtggcggtggtggtgacggaggtggcggcgctgatcttgggtggttgagggctttcccgcatgtgttcactgcgtcaatggcaaacttcctattcggttaccacattggggttatgaacggtccaatagaagatattgcaacccagcttggttttcaaggaaatccgttcctccaaggtcttgtggtgagcatattcattgttggtgccttttttgggagcttaggctcatctgcattagtagataagttcggctgcaagaggacccttcagatcgacagtattccattgattattggagctctcctgagtgcacaggctgattctttggatgagatgcttttgggaagattccttgttggcatcgggatcggcgtaaacactgttcttgttccaatatacatctctgaggttgctccaacaaaatataggggcactttggggactctgtgtcaaattggaacatgtctaggcataattgctgcactttccttggggataccttctgagagtgatccacattggtggcgaacaatgctttatgctgcatgtgtacctgggattcttattgttgctgggatgcaatttgctgttgagagtccacggtggcttgccaaggttggaaggttcgatgatgctagaaaggttgtagagagcctttgggaaccttctgaagttgagaagtccatggaagagatcaaagctgttgtgctaaatgatgattcacggggcagctggtcagaccttctggtggaaccacataatagagttgcattgattggaggatcccttttctttctgcaacagtttgctggaataaatggtgttctttatttttcatcattgacattccgtgatgttggtatcagtagtggtgctttagcaagcttatatgttggaataaccaattttggaggggcactagttgcttcaaatttgatggacaagcaagggcgaaagaagcttttgataggaagctaccttggaatggtacatttttacttttgcaattggtgctggaccagttaccggtatcattataccagagctcagcagtgctcggacacgctcaaaagttatgggcttcagtttcactgtgcattggatatgtaactttctggtgggactatttttcctggagcttgtgcacaagtttggggttggagcagtctatgcaggttttggtggggtctccctgctgacagcactcttcgcctacaatttcatagttgaaacaaaaggacgttcgcttgaggaaattgagatgtccatgagcagtgctacccctggcaagcaagagtagaacatctcaactgtatggacaaactgaacaactgacgggaggaatttaataagagaagagggggcctaatcccatgaatcttcagcagcagcagtttgttgcaaacaacatcaactcctatagataatgagcacaatcaaattcagcttttctttggtagcatgagaatcgttgtacaatattaaaaagggtgaagaaaacgacccttttaatttgttttttgtacatctgatgtatatattttacgccttctgtagtacgtaaaataaagggaacagatctttctgatattacttgattgatgaatttggaatattcgca

SEQ ID NO: 65791 - DNA, 2041 bp, Zea Mays
tctcctccaccacccgtttctctttctctaggctcgcgcctgccccgccttcgttgtcgcgcctgccacctgctcgacgaatcgccgcttccgccccacgccgcgatgccgacgcccctcgccgcggcgctgctgccactgcccgcctctcccgcactgcactttccgcggccgcggcccggtccctcatggcgtgcgcggccggccgtggttagggcggccgctctccgcgccctgccacggcgcctcgagctctgtccgccgtgccttgcggcggtcgagagtaacccggccccgccacccttagctccgccaccgccggacgaggcgagcgccggctcaggcctcgatgcgagggccgggggaggtggcggtggtggtgacggaggtggcggcgctgatcttgggtggttgagggctttcccgcatgtgttcactgcgtcaatggcaaacttcctattcggttaccacattggggttatgaacggtccaatagaagatattgcaacccagcttggttttcaaggaaatccgttcctccaaggtcttgtggtgagcatattcattgttggtgccttttttgggagcttaggctcatctgcattagtagataagttcggctgcaagaggacccttcagatcgacagtattccattgattattggagctctcctgagtgcacaggctgattctttggatgagatgcttttgggaagattccttgttggcatcgggatcggcgtaaacactgttcttgttccaatatacatctctgaggttgctccaacaaaatataggggcactttggggactctgtgtcaaattggaacatgtctaggcataattgctgcactttccttggggataccttctgagagtgatccacattggtggcgaacaatgctttatgctgcatgtgtacctgggattcttattgttgctgggatgcaatttgctgttgagagtccacggtggcttgccaaggttggaaggttcgatgatgctagaaaggttgtagagagcctttgggaaccttctgaagttgagaagtccatggaagagatcaaagctgttgtgctaaatgatgattcacggggcagctggtcagaccttctggtggaaccacataatagagtttgctggaataaatggtgttctttatttttcatcattgacattccgtgatgttggtatcagtagtggtgctttagcaagcttatatgttggaataaccaattttggaggggcactagttgcttcaaatttgatggacaagcaagggcgaaagaagcttttgataggaagctaccttggaatggcttttgcaatgttccttatagtatatggtattagcttcccgcttgatgaaggagttgcccacagcttatcaatcgctggaactcttttgtacatttttacttttgcaattggtgctggaccagttaccggtatcattataccagagctcagcagtgctcggacacgctcaaaagttatgggcttcagtttcactgtgcattggatatgtaactttctggtgggactatttttcctggagcttgtgcacaagtttggggttggagcagtctatgcaggttttggtggggtctccctgctgacagcactcttcgcctacaatttcatagttgaaacaaaaggacgttcgcttgaggaaattgagatgtccatgagcagtgctacccctggcaagcaagagtagaacatctcaactgtatggacaaactgaacaactgacgggaggaatttaataagagaagagggggcctaatcccatgaatcttcagcagcagcagtttgttgcaaacaacatcaactcctatagataatgagcacaatcaaattcagcttttctttggtagcatgagaatcgttgtacaatattaaaaagggtgaagaaaacgacccttttaatttgttttttgtacatctgatgtatatattttacgccttctgtagtacgtaaaataaagggaacagatctttctgatattacttgattgatgaatttggaatattcgca

SEQ ID NO: 65792 - DNA, 2437 bp, Zea Mays
tctcctccaccacccgtttctctttctctaggctcgcgcctgccccgccttcgttgtcgcgcctgccacctgctcgacgaatcgccgcttccgccccacgccgcgatgccgacgcccctcgccgcggcgctgctgccactgcccgcctctcccgcactgcactttccgcggccgcggcccggtccctcatggcgtgcgcggccggccgtggttagggcggccgctctccgcgccctgccacggcgcctcgagctctgtccgccgtgccttgcggcggtcgagagtaacccggccccgccacccttagctccgccaccgccggacgaggcgagcgccggctcaggcctcgatgcgagggccgggggaggtggcggtggtggtgacggaggtggcggcgctgatcttgggtggttgagggctttcccgcatgtgttcactgcgtcaatggcaaacttcctattcggttaccacattggggttatgaacggtccaatagaagatattgcaacccagcttggttttcaaggaaatccgttcctccaaggtcttgtggtgagcatattcattgttggtgccttttttgggagcttaggctcatctgcattagtagataagttcggctgcaagaggacccttcagatcgacagtattccattgattattggagctctcctgagtgcacaggctgattctttggatgagatgcttttgggaagattccttgttggcatcgggatcggcgtaaacactgttcttgttccaatatacatctctgaggttgctccaacaaaatataggggcactttggggactctgtgtcaaattggaacatgtctaggcataattgctgcactttccttggggataccttctgagagtgatccacattggtggcgaacaatgctttatgctgcatgtgtacctgggattcttattgttgctgggatgcaatttgctgttgagagtccacggtggcttgccaaggttggaaggttcgatgatgctagaaaggttgtagagagcctttgggaaccttctgaagttgagaagtccatggaagagatcaaagctgttgtgctaaatgatgattcacggggcagctggtcagaccttctggtggaaccacataatagagtttgctggaataaatggtgttctttatttttcatcattgacattccgtgatgttggtatcagtagtggtgctttagcaagcttatatgttggaataaccaattttggaggggcactagttgcttcaaatttgatggacaagcaagggcgaaagaagcttttgataggaagctaccttggaatggcttttgcaatgttccttatagtatatggtattagcttcccgcttgatgaaggagttgcccacagcttatcaatcgctggaactcttttgtatgtgctttcactttctattctctctagcaaaccccttaggggcttgggctggtttggtgacaagggaattggaggggatccatggaggaggaaatccattgctatacaaaattgttgttcttcactagcagaaggcttgcttagaaccttttgtggaaattatacctgtgggtttctcaatgtatggaaatcatttacttacatcatgaacaatgtgaaaggttttctagtacgatctctgcttcatgatatgatgataaatgaattacaccttgttaatgtgtaaagaaaccactaattcagaatatttattagaaattccacttataaaatttgtgtttataatttttaaaaagattgttagttgcgagatctattttttttcatttgcaggtacatttttacttttgcaattggtgctggaccagttaccggtatcattataccagagctcagcagtgctcggacacgctcaaaagttatgggcttcagtttcactgtgcattggatatgtaactttctggtgggactatttttcctggagcttgtgcacaagtttggggttggagcagtctatgcaggttttggtggggtctccctgctgacagcactcttcgcctacaatttcatagttgaaacaaaaggacgttcgcttgaggaaattgagatgtccatgagcagtgctacccctggcaagcaagagtagaacatctcaactgtatggacaaactgaacaactgacgggaggaatttaataagagaagagggggcctaatcccatgaatcttcagcagcagcagtttgttgcaaacaacatcaactcctatagataatgagcacaatcaaattcagcttttctttggtagcatgagaatcgttgtacaatattaaaaagggtgaagaaaacgacccttttaatttgttttttgtacatctgatgtatatattttacgccttctgtagtacgtaaaataaagggaacagatctttctgatattacttgattgatgaatttggaatattcgca

SEQ ID NO: 65793 - DNA, 1954 bp, Zea Mays
tctcctccaccacccgtttctctttctctaggctcgcgcctgccccgccttcgttgtcgcgcctgccacctgctcgacgaatcgccgcttccgccccacgccgcgatgccgacgcccctcgccgcggcgctgctgccactgcccgcctctcccgcactgcactttccgcggccgcggcccggtccctcatggcgtgcgcggccggccgtggttagggcggccgctctccgcgccctgccacggcgcctcgagctctgtccgccgtgccttgcggcggtcgagagtaacccggccccgccacccttagctccgccaccgccggacgaggcgagcgccggctcaggcctcgatgcgagggccgggggaggtggcggtggtggtgacggaggtggcggcgctgatcttgggtggttgagggctttcccgcatgtgttcactgcgtcaatggcaaacttcctattcggttaccacattggggttatgaacggtccaatagaagatattgcaacccagcttggttttcaaggaaatccgttcctccaaggtcttgtgtgcacaggctgattctttggatgagatgcttttgggaagattccttgttggcatcgggatcggcgtaaacactgttcttgttccaatatacatctctgaggttgctccaacaaaatataggggcactttggggactctgtgtcaaattggaacatgtctaggcataattgctgcactttccttggggataccttctgagagtgatccacattggtggcgaacaatgctttatgctgcatgtgtacctgggattcttattgttgctgggatgcaatttgctgttgagagtccacggtggcttgccaaggttggaaggttcgatgatgctagaaaggttgtagagagcctttgggaaccttctgaagttgagaagtccatggaagagatcaaagctgttgtgctaaatgatgattcacggggcagctggtcagaccttctggtggaaccacataatagagttgcattgattggaggatcccttttctttctgcaacagtttgctggaataaatggtgttctttatttttcatcattgacattccgtgatgttggtatcagtagtggtgctttagcaagcttatatgttggaataaccaattttggaggggcactagttgcttcaaatttgatggacaagcaagggcgaaagaagcttttgataggaagctaccttggaatggcttttgcaatgttccttatagtatatggtattagcttcccgcttgatgaaggagttgcccacagcttatcaatcgctggaactcttttgtacatttttacttttgcaattggtgctggaccagttaccggtatcattataccagagctcagcagtgctcggacacgctcaaaagttatgggcttcagtttcactgtgcattggatatgtaactttctggtgggactatttttcctggagcttgtgcacaagtttggggttggagcagtctatgcaggttttggtggggtctccctgctgacagcactcttcgcctacaatttcatagttgaaacaaaaggacgttcgcttgaggaaattgagatgtccatgagcagtgctacccctggcaagcaagagtagaacatctcaactgtatggacaaactgaacaactgacgggaggaatttaataagagaagagggggcctaatcccatgaatcttcagcagcagcagtttgttgcaaacaacatcaactcctatagataatgagcacaatcaaattcagcttttctttggtagcatgagaatcgttgtacaatattaaaaagggtgaagaaaacgacccttttaatttgttttttgtacatctgatgtatatattttacgccttctgtagtacgtaaaataaagggaacagatctttctgatattacttgattgatgaatttggaatattcgca

SEQ ID NO: 65794 - DNA, 2736 bp, Zea Mays
tctcctccaccacccgtttctctttctctaggctcgcgcctgccccgccttcgttgtcgcgcctgccacctgctcgacgaatcgccgcttccgccccacgccgcgatgccgacgcccctcgccgcggcgctgctgccactgcccgcctctcccgcactgcactttccgcggccgcggcccggtccctcatggcgtgcgcggccggccgtggttagggcggccgctctccgcgccctgccacggcgcctcgagctctgtccgccgtgccttgcggcggtcgagagtaacccggccccgccacccttagctccgccaccgccggacgaggcgagcgccggctcaggcctcgatgcgagggccgggggaggtggcggtggtggtgacggaggtggcggcgctgatcttgggtggttgagggctttcccgcatgtgttcactgcgtcaatggcaaacttcctattcggttaccacattggggttatgaacggtccaatagaagatattgcaacccagcttggttttcaaggaaatccgttcctccaaggtcttgtggtgagcatattcattgttggtgccttttttgggagcttaggctcatctgcattagtagataagttcggctgcaagaggacccttcagatcgacagtattccattgattattggagctctcctgaggtttttacttccactttaccgtgttctatattcctgaagtcctgactttgcatagtttctgctgaccagtgttatgcccggcctataatatcagaggcgcaggacccatggggataagcccatatcagtagataagagataatcaccattagtggataagaacatatgacagttagttagatggatagctgccttatcttatcataagattattagatcttgatagattagatggatagctcccttatcttatcggatggttgttaagatgtactaggcggccttggctatataatgccagggaagaaaggaataaagcaagcaatttgcaaccaatctggactcacctgcgcctcctgttccctcccgcagcctgtgatcacgacgcccaagcgccaaccacaacctgcgaccaatcgcttgccagcccctcatctcttttccctatgccatcttcccgagagggcaaggaaccctaacaagtgtagtgtttacttgtattgaatttggccatcaagtttcagaacttcctctcagcagcatttctatttcatacattaccatttgttgtatattaagttatcatatttttttccttaagggaaagctatgttacagtgcacaggctgattctttggatgagatgcttttgggaagattccttgttggcatcgggatcggcgtaaacactgttcttgttccaatatacatctctgaggttgctccaacaaaatataggggcactttggggactctgtgtcaaattggaacatgtctaggcataattgctgcactttccttggggataccttctgagagtgatccacattggtgaggcatctcttgttggcatttatgcatcttaatgatgtggcgaacaatgctttatgctgcatgtgtacctgggattcttattgttgctgggatgcaatttgctgttgagagtccacggtggcttgccaaggttggaaggttcgatgatgctagaaaggttgtagagagcctttgggaaccttctgaagttgagaagtccatggaagagatcaaagctgttgtgctaaatgatgattcacggggcagctggtcagaccttctggtggaaccacataatagagttgcattgattggaggatcccttttctttctgcaacagtttgctggaataaatggtgttctttatttttcatcattgacattccgtgatgttggtatcagtagtggtgctttagcaagcttatatgttggaataaccaattttggaggggcactagttgcttcaaatttgatggacaagcaagggcgaaagaagcttttgataggaagctaccttggaatggcttttgcaatgttccttatagtatatggtattagcttcccgcttgatgaaggagttgcccacagcttatcaatcgctggaactcttttgtacatttttacttttgcaattggtgctggaccagttaccggtatcattataccagagctcagcagtgctcggacacgctcaaaagttatgggcttcagtttcactgtgcattggatatgtaactttctggtgggactatttttcctggagcttgtgcacaagtttggggttggagcagtctatgcaggttttggtggggtctccctgctgacagcactcttcgcctacaatttcatagttgaaacaaaaggacgttcgcttgaggaaattgagatgtccatgagcagtgctacccctggcaagcaagagtagaacatctcaactgtatggacaaactgaacaactgacgggaggaatttaataagagaagagggggcctaatcccatgaatcttcagcagcagcagtttgttgcaaacaacatcaactcctatagataatgagcacaatcaaattcagcttttctttggtagcatgagaatcgttgtacaatattaaaaagggtgaagaaaacgacccttttaatttgttttttgtacatctgatgtatatattttacgccttctgtagtacgtaaaataaagggaacagatctttctgatattacttgattgatgaatttggaatattcgca

SEQ ID NO: 65795 - DNA, 2071 bp, Zea Mays
tctcctccaccacccgtttctctttctctaggctcgcgcctgccccgccttcgttgtcgcgcctgccacctgctcgacgaatcgccgcttccgccccacgccgcgatgccgacgcccctcgccgcggcgctgctgccactgcccgcctctcccgcactgcactttccgcggccgcggcccggtccctcatggcgtgcgcggccggccgtggttagggcggccgctctccgcgccctgccacggcgcctcgagctctgtccgccgtgccttgcggcggtcgagagtaacccggccccgccacccttagctccgccaccgccggacgaggcgagcgccggctcaggcctcgatgcgagggccgggggaggtggcggtggtggtgacggaggtggcggcgctgatcttgggtggttgagggctttcccgcatgtgttcactgcgtcaatggcaaacttcctattcggttaccacattggggttatgaacggtccaatagaagatattgcaacccagcttggttttcaaggaaatccgttcctccaaggtcttgtggtgagcatattcattgttggtgccttttttgggagcttaggctcatctgcattagtagataagttcggctgcaagaggacccttcagatcgacagtattccattgattattggagctctcctgagtgcacaggctgattctttggatgagatgcttttgggaagattccttgttggcatcgggatcggcgtaaacactgttcttgttccaatatacatctctgaggttgctccaacaaaatataggggcactttggggactctgtgtcaaattggaacatgtctaggcataattgctgcactttccttggggataccttctgagagtgatccacattggtggcgaacaatgctttatgctgcatgtgtacctgggattcttattgttgctgggatgcaatttgctgttgagagtccacggtggcttgccaaggttcgatgatgctagaaaggttgtagagagcctttgggaaccttctgaagttgagaagtccatggaagagatcaaagctgttgtgctaaatgatgattcacggggcagctggtcagaccttctggtggaaccacataatagagttgcattgattggaggatcccttttctttctgcaacagtttgctggaataaatggtgttctttatttttcatcattgacattccgtgatgttggtatcagtagtggtgctttagcaagcttatatgttggaataaccaattttggaggggcactagttgcttcaaatttgatggacaagcaagggcgaaagaagcttttgataggaagctaccttggaatggcttttgcaatgttccttatagtatatggtattagcttcccgcttgatgaaggagttgcccacagcttatcaatcgctggaactcttttgtacatttttacttttgcaattggtgctggaccagttaccggtatcattataccagagctcagcagtgctcggacacgctcaaaagttatgggcttcagtttcactgtgcattggatatgtaactttctggtgggactatttttcctggagcttgtgcacaagtttggggttggagcagtctatgcaggttttggtggggtctccctgctgacagcactcttcgcctacaatttcatagttgaaacaaaaggacgttcgcttgaggaaattgagatgtccatgagcagtgctacccctggcaagcaagagtagaacatctcaactgtatggacaaactgaacaactgacgggaggaatttaataagagaagagggggcctaatcccatgaatcttcagcagcagcagtttgttgcaaacaacatcaactcctatagataatgagcacaatcaaattcagcttttctttggtagcatgagaatcgttgtacaatattaaaaagggtgaagaaaacgacccttttaatttgttttttgtacatctgatgtatatattttacgccttctgtagtacgtaaaataaagggaacagatctttctgatattacttgattgatgaatttggaatattcgca

SEQ ID NO: 65796 - DNA, 2475 bp, Zea Mays
tctcctccaccacccgtttctctttctctaggctcgcgcctgccccgccttcgttgtcgcgcctgccacctgctcgacgaatcgccgcttccgccccacgccgcgatgccgacgcccctcgccgcggcgctgctgccactgcccgcctctcccgcactgcactttccgcggccgcggcccggtccctcatggcgtgcgcggccggccgtggttagggcggccgctctccgcgccctgccacggcgcctcgagctctgtccgccgtgccttgcggcggtcgagagtaacccggccccgccacccttagctccgccaccgccggacgaggcgagcgccggctcaggcctcgatgcgagggccgggggaggtggcggtggtggtgacggaggtggcggcgctgatcttgggtggttgagggctttcccgcatgtgttcactgcgtcaatggcaaacttcctattcggttaccacattggggttatgaacggtccaatagaagatattgcaacccagcttggttttcaaggaaatccgttcctccaaggtcttgtggtgagcatattcattgttggtgccttttttgggagcttaggctcatctgcattagtagataagttcggctgcaagaggacccttcagatcgacagtattccattgattattggagctctcctgagtgcacaggctgattctttggatgagatgcttttgggaagattccttgttggcatcgggatcggcgtaaacactgttcttgttccaatatacatctctgaggttgctccaacaaaatataggggcactttggggactctgtgtcaaattggaacatgtctaggcataattgctgcactttccttggggataccttctgagagtgatccacattggtggcgaacaatgctttatgctgcatgtgtacctgggattcttattgttgctgggatgcaatttgctgttgagagtccacggtggcttgccaaggttggaaggttcgatgatgctagaaaggttgtagagagcctttgggaaccttctgaagttgagaagtccatggaagagatcaaagctgttgtgctaaatgatgattcacggggcagctggtcagaccttctggtggaaccacataatagagttgcattgattggaggatcccttttctttctgcaacagtttgctggaataaatggtgttctttatttttcatcattgacattccgtgatgttggtatcagtagtggtgctttagcaagcttatatgttggaataaccaattttggaggggcactagttgcttcaaatttgatggacaagcaagggcgaaagaagcttttgataggaagctaccttggaatggcttttgcaatgttccttatagtatatggtattagcttcccgcttgatgaaggagttgcccacagcttatcaatcgctggaactcttttgtatgtgctttcactttctattctctctagcaaaccccttaggggcttgggctggtttggtgacaagggaattggaggggatccatggaggaggaaatccattgctatacaaaattgttgttcttcactagcagaaggcttgcttagaaccttttgtggaaattatacctgtgggtttctcaatgtatggaaatcatttacttacatcatgaacaatgtgaaaggttttctagtacgatctctgcttcatgatatgatgataaatgaattacaccttgttaatgtgtaaagaaaccactaattcagaatatttattagaaattccacttataaaatttgtgtttataatttttaaaaagattgttagttgcgagatctattttttttcatttgcaggtacatttttacttttgcaattggtgctggaccagttaccggtatcattataccagagctcagcagtgctcggacacgctcaaaagttatgggcttcagtttcactgtgcattggatatgtaactttctggtgggactatttttcctggagcttgtgcacaagtttggggttggagcagtctatgcaggttttggtggggtctccctgctgacagcactcttcgcctacaatttcatagttgaaacaaaaggacgttcgcttgaggaaattgagatgtccatgagcagtgctacccctggcaagcaagagtagaacatctcaactgtatggacaaactgaacaactgacgggaggaatttaataagagaagagggggcctaatcccatgaatcttcagcagcagcagtttgttgcaaacaacatcaactcctatagataatgagcacaatcaaattcagcttttctttggtagcatgagaatcgttgtacaatattaaaaagggtgaagaaaacgacccttttaatttgttttttgtacatctgatgtatatattttacgccttctgtagtacgtaaaataaagggaacagatctttctgatattacttgattgatgaatttggaatattcgca

SEQ ID NO: 65797 - DNA, 2268 bp, Zea Mays
tctcctccaccacccgtttctctttctctaggctcgcgcctgccccgccttcgttgtcgcgcctgccacctgctcgacgaatcgccgcttccgccccacgccgcgatgccgacgcccctcgccgcggcgctgctgccactgcccgcctctcccgcactgcactttccgcggccgcggcccggtccctcatggcgtgcgcggccggccgtggttagggcggccgctctccgcgccctgccacggcgcctcgagctctgtccgccgtgccttgcggcggtcgagagtaacccggccccgccacccttagctccgccaccgccggacgaggcgagcgccggctcaggcctcgatgcgagggccgggggaggtggcggtggtggtgacggaggtggcggcgctgatcttgggtggttgagggctttcccgcatgtgttcactgcgtcaatggcaaacttcctattcggttaccacattggggttatgaacggtccaatagaagatattgcaacccagcttggttttcaaggaaatccgttcctccaaggtcttgtggtgagcatattcattgttggtgccttttttgggagcttaggctcatctgcattagtagataagttcggctgcaagaggacccttcagatcgacagtattccattgattattggagctctcctgagtgcacaggctgattctttggatgagatgcttttgggaagattccttgttggcatcgggatcggcgtaaacactgttcttgttccaatatacatctctgaggttgctccaacaaaatataggggcactttggggactctgtgtcaaattggaacatgtctaggcataattgctgcactttccttggggataccttctgagagtgatccacattggtggcgaacaatgctttatgctgcatgtgtacctgggattcttattgttgctgggatgcaatttgctgttgagagtccacggtggcttgccaaggttggaaggttcgatgatgctagaaaggttgtagagagcctttgggaaccttctgaagttgagaagtccatggaagagatcaaagctgttgtgctaaatgatgattcacggggcagctggtcagaccttctggtggaaccacataatagagaatgcatgtttgggtgtgcgtatgttcacgcttggttgttggactgcactgcatgtacattcgtctgattctgccatccttaaaggcccatactggacgatctattatctgggcactaagtttgcttcttgacttttgctatgatgagttattgctgagatgttctgtcataatatttggaacattcatgtttcacacaccacaacaatatctacatgtttctgcagtttgctggaataaatggtgttctttatttttcatcattgacattccgtgatgttggtatcagtagtggtgctttagcaagcttatatgttggaataaccaattttggaggggcactagttgcttcaaatttgatggacaagcaagggcgaaagaagcttttgataggaagctaccttggaatggcttttgcaatgttccttatagtatatggtattagcttcccgcttgatgaaggagttgcccacagcttatcaatcgctggaactcttttgtacatttttacttttgcaattggtgctggaccagttaccggtatcattataccagagctcagcagtgctcggacacgctcaaaagttatgggcttcagtttcactgtgcattggatatgtaactttctggtgggactatttttcctggagcttgtgcacaagtttggggttggagcagtctatgcaggttttggtggggtctccctgctgacagcactcttcgcctacaatttcatagttgaaacaaaaggacgttcgcttgaggaaattgagatgtccatgagcagtgctacccctggcaagcaagagtagaacatctcaactgtatggacaaactgaacaactgacgggaggaatttaataagagaagagggggcctaatcccatgaatcttcagcagcagcagtttgttgcaaacaacatcaactcctatagataatgagcacaatcaaattcagcttttctttggtagcatgagaatcgttgtacaatattaaaaagggtgaagaaaacgacccttttaatttgttttttgtacatctgatgtatatattttacgccttctgtagtacgtaaaataaagggaacagatctttctgatattacttgattgatgaatttggaatattcgca

SEQ ID NO: 65798 - DNA, 2150 bp, Zea Mays
cggcagagcatggtatgcacaaaacgtttgcctccaactataaacgcggcaacccgagaggccgcgactgccgaggcagggtctggggccggtcagtgttgtgccgcccgttgaaaccaccacgtaacgtctcggacggctagacgcggtccacgctagctccttgctatctccgtcctactcctcctcatactttaccgcaaagcgcgcaccacgaattgcacctacccatttcgctaatctccctccacgagccgaccaaatcgaatcgaatcgcgcgcagcgcgcccgcgcagcgattgccggcgatggcgagcctcaccctgccgccggcgccccccaacccacggcaggacgccatcgacctccaaaaggccttcaaagggtttggctgtgacagtacaacagtgataaacatacttactcatcgcgattcagtgcagcgtggactcattcaacaggaatacagggctatgtatcatgaggaactctcccatcgcatttcatctgaactcaatggaaaccacaagaaagctatgttgctgtggattcttgatcctgctggacgtgatgcaactgttttgagagaagctctaagtgttgacactatggatctgagagcagccactgatattatatgttccaggacgccatcacagttgcaaataatgaaacagacttattatgctagatttggtacttatcttgagcatgacattggtcaccacacatctggcgatcaccagaagcttttacttgcctatgtggggattccacgctacgaaggtcctgaggttgatcctaccattgtgacacatgatgcaaaggatttgtacaaagctggtgagaaaaggctgggtacggatgagaagacctttatccgcgttttcactgaacgcagttgggcacacttggcatctgtttcgtctgcctaccatcatatgtatgaccggaaattagagaaggttatcaagagcgaaacatctggaaactttgaattcgcacttttagctatcctcagatgcgcggaaaacccagcaaagtattttgcaaaggtactgcgcccatgttgttttcagtaaagaaatattgtagattttgaaatcctgtgcaggcaccataggtgtataaaatcactgattgatttagagtcgagttatgttttgctgatagatttagccatagccaacagctgttctttcttacgaaattataatttaacatttggtgaagcaaagatcactagttgatatgacactgatataaagtttgctgtaccatctagagttgatctttttatttcttatttcaattatatgtaacttgccaccattccaaagtgttattttctgctaatgctgcgaaatgagcatgttcaagattgctcttgtatcttcggtgccgaatacagctcttacgaaaggccatgaaaggtctaggcactgatgacaagacacttataagggttgtggtgacgaggactgaaattgatatgcaatatatcaaggcagagtacttcaagaagtataagaagccattagctgaggctatccactccgaaacatcaggaaactatcggacattccttctttcacttgttggtcctggacattaggttatgtttcgaccatgggacatgatattccatccatccaccctaaatgcagcgacctacctggaaaacttatgatgttgccatttgtcagtggtgactcgtggattcgtctaacttccacatatgcggtatctagtatgcttgactaaagtattcgtgtttaaatttgtatctgggtttcttgttggaaaattctgtgcgggggcacaacagctgttgttggtcacgctaggcttgacttgtgtctccatgacatcaataatattatgtcatgttcgtgtgtggtcattccactattagagaaagcaccatatgtaccggttgggaattggctttaaagaggagattttagtaccggttcttggtatgagctgatactaaaagttacatatttagggctagtttgggaaccacattatttgaaggaattttcatttttcaagggaaattagtttattttcttatgggaaaatagaaatctttcggaaaaacgaggttcccaaactaggcttaacattagttcattccactggag

SEQ ID NO: 65799 - DNA, 1695 bp, Zea Mays
agggtctggggccggtcagtgttgtgccgcccgttgaaaccaccacgtaacgtctcggacggctagacgcggtccacgctagctccttgctatctccgtcctactcctcctcatactttaccgcaaagcgcgcaccacgaattgcacctacccatttcgctaatctccctccacgagccgaccaaatcgaatcgaatcgcgcgcagcgcgcccgcgcagcgattgccggcgatggcgagcctcaccctgccgccggcgccccccaacccacggcaggacgccatcgacctccaaaaggccttcaaagggtttggctgtgacagtacaacagtgataaacatacttactcatcgcgattcagtgcagcgtggactcattcaacaggaatacagggctatgtatcatgaggaactctcccatcgcatttcatctgaactcaatggaaaccacaagaaagctatgttgctgtggattcttgatcctgctggacgtgatgcaactgttttgagagaagctctaagtgttgacactatggatctgagagcagccactgatattatatgttccaggacgccatcacagttgcaaataatgaaacagacttattatgctagatttggtacttatcttgagcatgacattggtcaccacacatctggcgatcaccagaagcttttacttgcctatgtggggattccacgctacgaaggtcctgaggttgatcctaccattgtgacacatgatgcaaaggatttgtacaaagctggtgagaaaaggctgggtacggatgagaagacctttatccgcgttttcactgaacgcagttgggcacacttggcatctgtttcgtctgcctaccatcatatgtatgaccggaaattagagaaggttatcaagagcgaaacatctggaaactttgaattcgcacttttagctatcctcagatgcgcggaaaacccagcaaagtattttgcaaaggtctaggcactgatgacaagacacttataagggttgtggtgacgaggactgaaattgatatgcaatatatcaaggcagagtacttcaagaagtataagaagccattagctgaggctatccactccgaaacatcaggaaactatcggacattccttctttcacttgttggtcctggacattaggttatgtttcgaccatgggacatgatattccatccatccaccctaaatgcagcgacctacctggaaaacttatgatgttgccatttgtcagtggtgactcgtggattcgtctaacttccacatatgcggtatctagtatgcttgactaaagtattcgtgtttaaatttgtatctgggtttcttgttggaaaattctgtgcgggggcacaacagctgttgttggtcacgctaggcttgacttgtgtctccatgacatcaataatattatgtcatgttcgtgtgtggtcattccactattagagaaagcaccatatgtaccggttgggaattggctttaaagaggagattttagtaccggttcttggtatgagctgatactaaaagttacatatttagggctagtttgggaaccacattatttgaaggaattttcatttttcaagggaaattagtttattttcttatgggaaaatagaaatctttcggaaaaacgaggttcccaaactaggcttaacattagttcattccactggag

SEQ ID NO: 65800 - DNA, 1450 bp, Zea Mays
cgatgctacaacaattccctattccagggggggggctagctggactgggttcagattgcagatgggaaggtggtcgaggagggttattgttattagaggcttatataggccattggaaatttcctgtggttgctagggtttggctgtgacagtacaacagtgataaacatacttactcatcgcgattcagtgcagcgtggactcattcaacaggaatacagggctatgtatcatgaggaactctcccatcgcatttcatctgaactcaatggaaaccacaagaaagctatgttgctgtggattcttgatcctgctggacgtgatgcaactgttttgagagaagctctaagtgttgacactatggatctgagagcagccactgatattatatgttccaggacgccatcacagttgcaaataatgaaacagacttattatgctagatttggtacttatcttgagcatgacattggtcaccacacatctggcgatcaccagaagcttttacttgcctatgtggggattccacgctacgaaggtcctgaggttgatcctaccattgtgacacatgatgcaaaggatttgtacaaagctggtgagaaaaggctgggtacggatgagaagacctttatccgcgttttcactgaacgcagttgggcacacttggcatctgtttcgtctgcctaccatcatatgtatgaccggaaattagagaaggttatcaagagcgaaacatctggaaactttgaattcgcacttttagctatcctcagatgcgcggaaaacccagcaaagtattttgcaaaggcagagtacttcaagaagtataagaagccattagctgaggctatccactccgaaacatcaggaaactatcggacattccttctttcacttgttggtcctggacattaggttatgtttcgaccatgggacatgatattccatccatccaccctaaatgcagcgacctacctggaaaacttatgatgttgccatttgtcagtggtgactcgtggattcgtctaacttccacatatgcggtatctagtatgcttgactaaagtattcgtgtttaaatttgtatctgggtttcttgttggaaaattctgtgcgggggcacaacagctgttgttggtcacgctaggcttgacttgtgtctccatgacatcaataatattatgtcatgttcgtgtgtggtcattccactattagagaaagcaccatatgtaccggttgggaattggctttaaagaggagattttagtaccggttcttggtatgagctgatactaaaagttacatatttagggctagtttgggaaccacattatttgaaggaattttcatttttcaagggaaattagtttattttcttatgggaaaatagaaatctttcggaaaaacgaggttcccaaactaggcttaacattagttcattccactggag

SEQ ID NO: 65801 - DNA, 1379 bp, Zea Mays
gaaaatgtataataactgtaagggtttggctgtgacagtacaacagtgataaacatacttactcatcgcgattcagtgcagcgtggactcattcaacaggaatacagggctatgtatcatgaggaactctcccatcgcatttcatctgaactcaatggaaaccacaagaaagctatgttgctgtggattcttgatcctgctggacgtgatgcaactgttttgagagaagctctaagtgttgacactatggatctgagagcagccactgatattatatgttccaggacgccatcacagttgcaaataatgaaacagacttattatgctagatttggtacttatcttgagcatgacattggtcaccacacatctggcgatcaccagaagcttttacttgcctatgtggggattccacgctacgaaggtcctgaggttgatcctaccattgtgacacatgatgcaaaggatttgtacaaagctggtgagaaaaggctgggtacggatgagaagacctttatccgcgttttcactgaacgcagttgggcacacttggcatctgtttcgtctgcctaccatcatatgtatgaccggaaattagagaaggttatcaagagcgaaacatctggaaactttgaattcgcacttttagctatcctcagatgcgcggaaaacccagcaaagtattttgcaaagggttgtggtgacgaggactgaaattgatatgcaatatatcaaggcagagtacttcaagaagtataagaagccattagctgaggctatccactccgaaacatcaggaaactatcggacattccttctttcacttgttggtcctggacattaggttatgtttcgaccatgggacatgatattccatccatccaccctaaatgcagcgacctacctggaaaacttatgatgttgccatttgtcagtggtgactcgtggattcgtctaacttccacatatgcggtatctagtatgcttgactaaagtattcgtgtttaaatttgtatctgggtttcttgttggaaaattctgtgcgggggcacaacagctgttgttggtcacgctaggcttgacttgtgtctccatgacatcaataatattatgtcatgttcgtgtgtggtcattccactattagagaaagcaccatatgtaccggttgggaattggctttaaagaggagattttagtaccggttcttggtatgagctgatactaaaagttacatatttagggctagtttgggaaccacattatttgaaggaattttcatttttcaagggaaattagtttattttcttatgggaaaatagaaatctttcggaaaaacgaggttcccaaactaggcttaacattagttcattccactggag

SEQ ID NO: 65802 - DNA, 1460 bp, Zea Mays
cccacacgcctggacacctaacccttcggccttcgttgcggacccgccactcacttcttctctcgaccgcatcttttctccgcgccgccgctcgcctgcacttctacgtgtgaaccgcgtccgcgcctatggcctgcccgtgcccagctgccccctctccacacgagcctctctaggcgtcaagcgtgccattaagcaaccgtggcccccacccctcctcggctctctgcgtgagcacaagcacgtctctgtagcccatgttcaacggaagcgaaagttctaggtgtcagtgctagaggatttggaaaggcgctgtttgataagaagacaaacccgtgtcctggcaagtggatacctgtagccccccattaattccactgaagaaaacatagaatgtgcatcataatgtcacagaaggcctaaaatgttgtagtgtgcggccattgctcacgaggaggcagagtgccgtgttgccgaggtttgcactacagcttggtttctgatggagttgtaccagattttttttgttcaaactagcagttgacgcattgttggaactttagcagtctataaaggatttttttcttaaatgccgctggaccacatacgattgttgatggtaaagaagttgtgaactttgcatcagcaaactacctcggtttaattggcaacgaaaagattattgattcttgcatcagttcattggagaaatatggtgttggttcttgtggtccacgtggcttttatggaacaattgatgtccatcttgactgtgagtcaaagatagctaaatttttggggactccagactccattctttattcatatgggatttctacaatattcagtgtgatacctgccttctgtaagaaagaagatatcatagtcgcgtaagttcaccgtattacaaaattatgaaattcacaagtattattggaaccttgacttgtttggtgtatcgaggtatgcatgcttggccttttagacataatatggatttatccagctcaactttaggctttagcacaacattgtcatctctttcttgtgtctattgatgagttgtttttccttgtcagttaactgtacatgggtagtttgatgtgattgcggtgacgagggtgttgactgtttggtgaaatgcttgggacaaagtggccaacaagaatggagtcatggaacatcgacaggaggggtgcggcagcagcaaccgatgtatcccttggacaatctggttttgacaagatgcaaatcaatccgctgtacactgtattccgcacttgcacagattgtttggttaattacaagattatctcagtgttttgattggtacacttatgtatgaaatattgattggtactcatctatattatatgaattatattattattaaatatatgtgtgtgtatttctctttcaaattattataatgtggtatctcaaatgaatataaattgaag

SEQ ID NO: 65803 - DNA, 1130 bp, Zea Mays
cacacgcctggacacctaacccttcggccttcgttgcggacccgccactcacttcttctctcgaccgcatcttttctccgcgccgccgctcgcctgcacttctacgtgtgaaccgcgtccgcgcctatggcctgcccgtgcccagctgccccctctccacacgagcctctctaggcgtcaagcgtgccattaagcaaccgtggcccccacccctcctcggctctctgcgtgagcacaagcacgtctctgtagcccatgttcaacggaagcgaaaggtgtcagtgctagaggatttggaaaggcgctgtttgataagaagacaaacccgtgtcctgcccattaattccactgaagaaaacatagaatgtgcatcataatgtcacagaaggcctaaaatgttgtagtgtgcggccattgctcacgaggaggcagagtgccgtgttgccgagtgccgctggaccacatacgattgttgatggtaaagaagttgtgaactttgcatcagcaaactacctcggtttaattggcaacgaaaagattattgattcttgcatcagttcattggagaaatatggtgttggttcttgtggtccacgtggcttttatggaacaattgatgtccatcttgactgtgagtcaaagatagctaaatttttggggactccagactccattctttattcatatgggatttctacaatattcagtgtgatacctgccttctgtaagaaagaagatatcatagtcgcttaactgtacatgggtagtttgatgtgattgcggtgacgagggtgttgactgtttggtgaaatgcttgggacaaagtggccaacaagaatggagtcatggaacatcgacaggaggggtgcggcagcagcaaccgatgtatcccttggacaatctggttttgacaagatgcaaatcaatccgctgtacactgtattccgcacttgcacagattgtttggttaattacaagattatctcagtgttttgattggtacacttatgtatgaaatattgattggtactcatctatattatatgaattatattattattaaatatatgtgtgtgtatttctctttcaaattattataatgtggtatctcaaatgaatataaattgaag

SEQ ID NO: 65804 - DNA, 1021 bp, Zea Mays
tggacacctaacccttcggccttcgttgcggacccgccactcacttcttctctcgaccgcatcttttctccgcgccgccgctcgcctgcacttctacgtgtgaaccgcgtccgcgcctatggcctgcccgtgcccagctgccccctctccacacgagcctctctaggcgtcaagcgtgccattaagcaaccgtggcccccacccctcctcggctctctgcgtgagcacaagcacgtctctgtagcccatgttcaacggaagcgaaagtgccgctggaccacatacgattgttgatggtaaagaagttgtgaactttgcatcagcaaactacctcggtttaattggcaacgaaaagattattgattcttgcatcagttcattggagaaatatggtgttggttcttgtggtccacgtggcttttatggaacaattgatgtccatcttgactgtgagtcaaagatagctaaatttttggggactccagactccattctttattcatatgggatttctacaatattcagtgtgatacctgccttctgtaagaaagaagatatcatagtcgcgtaagttcaccgtattacaaaattatgaaattcacaagtattattggaaccttgacttgtttggtgtatcgagttaactgtacatgggtagtttgatgtgattgcggtgacgagggtgttgactgtttggtgaaatgcttgggacaaagtggccaacaagaatggagtcatggaacatcgacaggaggggtgcggcagcagcaaccgatgtatcccttggacaatctggttttgacaagatgcaaatcaatccgctgtacactgtattccgcacttgcacagattgtttggttaattacaagattatctcagtgttttgattggtacacttatgtatgaaatattgattggtactcatctatattatatgaattatattattattaaatatatgtgtgtgtatttctctttcaaattattataatgtggtatctcaaatgaatataaattgaag

SEQ ID NO: 65805 - DNA, 1327 bp, Zea Mays
acctaacccttcggccttcgttgcggacccgccactcacttcttctctcgaccgcatcttttctccgcgccgccgctcgcctgcacttctacgtgtgaaccgcgtccgcgcctatggcctgcccgtgcccagctgccccctctccacacgagcctctctaggcgtcaagcgtgccattaagcaaccgtggcccccacccctcctcggctctctgcgtgagcacaagcacgtctctgtagcccatgttcaacggaagcgaaaggtgtcagtgctagaggatttggaaaggcgctgtttgataagaagacaaacccgtgtcctggcaagtggatacctgtagccccccattaattccactgaagaaaacatagaatgtgcatcataatgtcacagaaggcctaaaatgttgtagtgtgcggccattgctcacgaggaggcagagtgccgtgttgccgagtgccgctggaccacatacgattgttgatggtaaagaagttgtgaactttgcatcagcaaactacctcggtttaattggcaacgaaaagattattgattcttgcatcagttcattggagaaatatggtgttggttcttgtggtccacgtggcttttatggaacaattgatgtccatcttgactgtgagtcaaagatagctaaatttttggggactccagactccattctttattcatatgggatttctacaatattcagtgtgatacctgccttctgtaagaaagaagatatcatagtcgcgtaagttcaccgtattacaaaattatgaaattcacaagtattattggaaccttgacttgtttggtgtatcgaggtatgcatgcttggccttttagacataatatggatttatccagctcaactttaggctttagcacaacattgtcatctctttcttgtgtctattgatgagttgtttttccttgtcagttaactgtacatgggtagtttgatgtgattgcggtgacgagggtgttgactgtttggtgaaatgcttgggacaaagtggccaacaagaatggagtcatggaacatcgacaggaggggtgcggcagcagcaaccgatgtatcccttggacaatctggttttgacaagatgcaaatcaatccgctgtacactgtattccgcacttgcacagattgtttggttaattacaagattatctcagtgttttgattggtacacttatgtatgaaatattgattggtactcatctatattatatgaattatattattattaaatatatgtgtgtgtatttctctttcaaattattataatgtggtatctcaaatgaatataaattgaag

SEQ ID NO: 65806 - DNA, 1169 bp, Zea Mays
acctaacccttcggccttcgttgcggacccgccactcacttcttctctcgaccgcatcttttctccgcgccgccgctcgcctgcacttctacgtgtgaaccgcgtccgcgcctatggcctgcccgtgcccagctgccccctctccacacgagcctctctaggcgtcaagcgtgccattaagcaaccgtggcccccacccctcctcggctctctgcgtgagcacaagcacgtctctgtagcccatgttcaacggaagcgaaaggtgtcagtgctagaggatttggaaaggcgctgtttgataagaagacaaacccgtgtcctggaaacaggtaacccatcacattcgtcatgtgcaattctctcatgtcgtgcagcccattaattccactgaagaaaacatagaatgtgcatcataatgtcacagaaggcctaaaatgttgtagtgtgcggccattgctcacgaggaggcagagtgccgtgttgccgagtgccgctggaccacatacgattgttgatggtaaagaagttgtgaactttgcatcagcaaactacctcggtttaattggcaacgaaaagattattgattcttgcatcagttcattggagaaatatggtgttggttcttgtggtccacgtggcttttatggaacaattgatgtccatcttgactgtgagtcaaagatagctaaatttttggggactccagactccattctttattcatatgggatttctacaatattcagtgtgatacctgccttctgtaagaaagaagatatcatagtcgcttaactgtacatgggtagtttgatgtgattgcggtgacgagggtgttgactgtttggtgaaatgcttgggacaaagtggccaacaagaatggagtcatggaacatcgacaggaggggtgcggcagcagcaaccgatgtatcccttggacaatctggttttgacaagatgcaaatcaatccgctgtacactgtattccgcacttgcacagattgtttggttaattacaagattatctcagtgttttgattggtacacttatgtatgaaatattgattggtactcatctatattatatgaattatattattattaaatatatgtgtgtgtatttctctttcaaattattataatgtggtatctcaaatgaatataaattgaag

SEQ ID NO: 65807 - DNA, 1053 bp, Zea Mays
acctaacccttcggccttcgttgcggacccgccactcacttcttctctcgaccgcatcttttctccgcgccgccgctcgcctgcacttctacgtgtgaaccgcgtccgcgcctatggcctgcccgtgcccagctgccccctctccacacgagcctctctaggcgtcaagcgtgccattaagcaaccgtggcccccacccctcctcggctctctgcgtgagcacaagcacgtctctgtagcccatgttcaacggaagcgaaagtgccgctggaccacatacgattgttgatgttcattggagaaatatggtgttggttcttgtggtccacgtggcttttatggaacaattgatgtccatcttgactgtgagtcaaagatagctaaatttttggggactccagactccattctttattcatatgggatttctacaatattcagtgtgatacctgccttctgtaagaaagaagatatcatagtcgcgtaagttcaccgtattacaaaattatgaaattcacaagtattattggaaccttgacttgtttggtgtatcgaggtatgcatgcttggccttttagacataatatggatttatccagctcaactttaggctttagcacaacattgtcatctctttcttgtgtctattgatgagttgtttttccttgtcagttaactgtacatgggtagtttgatgtgattgcggtgacgagggtgttgactgtttggtgaaatgcttgggacaaagtggccaacaagaatggagtcatggaacatcgacaggaggggtgcggcagcagcaaccgatgtatcccttggacaatctggttttgacaagatgcaaatcaatccgctgtacactgtattccgcacttgcacagattgtttggttaattacaagattatctcagtgttttgattggtacacttatgtatgaaatattgattggtactcatctatattatatgaattatattattattaaatatatgtgtgtgtatttctctttcaaattattataatgtggtatctcaaatgaatataaattgaag

SEQ ID NO: 65808 - DNA, 1130 bp, Zea Mays
acctaacccttcggccttcgttgcggacccgccactcacttcttctctcgaccgcatcttttctccgcgccgccgctcgcctgcacttctacgtgtgaaccgcgtccgcgcctatggcctgcccgtgcccagctgccccctctccacacgagcctctctaggcgtcaagcgtgccattaagcaaccgtggcccccacccctcctcggctctctgcgtgagcacaagcacgtctctgtagcccatgttcaacggaagcgaaagcccattaattccactgaagaaaacatagaatgtgcatcataatgtcacagaaggcctaaaatgttgtagtgtgcggccattgctcacgaggaggcagagtgccgtgttgccgagtgccgctggaccacatacgattgttgatggtaaagaagttgtgaactttgcatcagcaaactacctcggtttaattggcaacgaaaagattattgattcttgcatcagttcattggagaaatatggtgttggttcttgtggtccacgtggcttttatggaacaattgatgtccatcttgactgtgagtcaaagatagctaaatttttggggactccagactccattctttattcatatgggatttctacaatattcagtgtgatacctgccttctgtaagaaagaagatatcatagtcgcgtaagttcaccgtattacaaaattatgaaattcacaagtattattggaaccttgacttgtttggtgtatcgagttaactgtacatgggtagtttgatgtgattgcggtgacgagggtgttgactgtttggtgaaatgcttgggacaaagtggccaacaagaatggagtcatggaacatcgacaggaggggtgcggcagcagcaaccgatgtatcccttggacaatctggttttgacaagatgcaaatcaatccgctgtacactgtattccgcacttgcacagattgtttggttaattacaagattatctcagtgttttgattggtacacttatgtatgaaatattgattggtactcatctatattatatgaattatattattattaaatatatgtgtgtgtatttctctttcaaattattataatgtggtatctcaaatgaatataaattgaag

SEQ ID NO: 65809 - DNA, 1102 bp, Zea Mays
acctaacccttcggccttcgttgcggacccgccactcacttcttctctcgaccgcatcttttctccgcgccgccgctcgcctgcacttctacgtgtgaaccgcgtccgcgcctatggcctgcccgtgcccagctgccccctctccacacgagcctctctaggcgtcaagcgtgccattaagcaaccgtggcccccacccctcctcggctctctgcgtgagcacaagcacgtctctgtagcccatgttcaacggaagcgaaaggtaacccatcacattcgtcatgtgcaattctctcatgtcgtgcagcccattaattccactgaagaaaacatagaatgtgcatcataatgtcacagaaggcctaaaatgttgtagtgtgcggccattgctcacgaggaggcagagtgccgtgttgccgagtgccgctggaccacatacgattgttgatggtaaagaagttgtgaactttgcatcagcaaactacctcggtttaattggcaacgaaaagattattgattcttgcatcagttcattggagaaatatggtgttggttcttgtggtccacgtggcttttatggaacaattgatgtccatcttgactgtgagtcaaagatagctaaatttttggggactccagactccattctttattcatatgggatttctacaatattcagtgtgatacctgccttctgtaagaaagaagatatcatagtcgcttaactgtacatgggtagtttgatgtgattgcggtgacgagggtgttgactgtttggtgaaatgcttgggacaaagtggccaacaagaatggagtcatggaacatcgacaggaggggtgcggcagcagcaaccgatgtatcccttggacaatctggttttgacaagatgcaaatcaatccgctgtacactgtattccgcacttgcacagattgtttggttaattacaagattatctcagtgttttgattggtacacttatgtatgaaatattgattggtactcatctatattatatgaattatattattattaaatatatgtgtgtgtatttctctttcaaattattataatgtggtatctcaaatgaatataaattgaag

SEQ ID NO: 65810 - DNA, 1232 bp, Zea Mays
acctaacccttcggccttcgttgcggacccgccactcacttcttctctcgaccgcatcttttctccgcgccgccgctcgcctgcacttctacgtgtgaaccgcgtccgcgcctatggcctgcccgtgcccagctgccccctctccacacgagcctctctaggcgtcaagcgtgccattaagcaaccgtggcccccacccctcctcggctctctgcgtgagcacaagcacgtctctgtagcccatgttcaacggaagcgaaagcccattaattccactgaagaaaacatagaatgtgcatcataatgtcacagaaggcctaaaatgttgtagtgtgcggccattgctcacgaggaggcagagtgccgtgttgccgagtgccgctggaccacatacgattgttgatggtaaagaagttgtgaactttgcatcagcaaactacctcggtttaattggcaacgaaaagattattttcattggagaaatatggtgttggttcttgtggtccacgtggcttttatggaacaattgatgtccatcttgactgtgagtcaaagatagctaaatttttggggactccagactccattctttattcatatgggatttctacaatattcagtgtgatacctgccttctgtaagaaagaagatatcatagtcgcgtaagttcaccgtattacaaaattatgaaattcacaagtattattggaaccttgacttgtttggtgtatcgaggtatgcatgcttggccttttagacataatatggatttatccagctcaactttaggctttagcacaacattgtcatctctttcttgtgtctattgatgagttgtttttccttgtcagttaactgtacatgggtagtttgatgtgattgcggtgacgagggtgttgactgtttggtgaaatgcttgggacaaagtggccaacaagaatggagtcatggaacatcgacaggaggggtgcggcagcagcaaccgatgtatcccttggacaatctggttttgacaagatgcaaatcaatccgctgtacactgtattccgcacttgcacagattgtttggttaattacaagattatctcagtgttttgattggtacacttatgtatgaaatattgattggtactcatctatattatatgaattatattattattaaatatatgtgtgtgtatttctctttcaaattattataatgtggtatctcaaatgaatataaattgaag

SEQ ID NO: 65811 - DNA, 1182 bp, Zea Mays
acctaacccttcggccttcgttgcggacccgccactcacttcttctctcgaccgcatcttttctccgcgccgccgctcgcctgcacttctacgtgtgaaccgcgtccgcgcctatggcctgcccgtgcccagctgccccctctccacacgagcctctctaggcgtcaagcgtgccattaagcaaccgtggcccccacccctcctcggctctctgcgtgagcacaagcacgtctctgtagcccatgttcaacggaagcgaaaggaaacaggtaacccatcacattcgtcatgtgcaattctctcatgtcgtgcagcccattaattccactgaagaaaacatagaatgtgcatcataatgtcacagaaggcctaaaatgttgtagtgtgcggccattgctcacgaggaggcagagtgccgtgttgccgagtgccgctggaccacatacgattgttgatggtaaagaagttgtgaactttgcatcagcaaactacctcggtttaattggcaacgaaaagattattgattcttgcatcagttcattggagaaatatggtgttggttcttgtggtccacgtggcttttatggaacaattgatgtccatcttgactgtgagtcaaagatagctaaatttttggggactccagactccattctttattcatatgggatttctacaatattcagtgtgatacctgccttctgtaagaaagaagatatcatagtcgcgtaagttcaccgtattacaaaattatgaaattcacaagtattattggaaccttgacttgtttggtgtatcgagttaactgtacatgggtagtttgatgtgattgcggtgacgagggtgttgactgtttggtgaaatgcttgggacaaagtggccaacaagaatggagtcatggaacatcgacaggaggggtgcggcagcagcaaccgatgtatcccttggacaatctggttttgacaagatgcaaatcaatccgctgtacactgtattccgcacttgcacagattgtttggttaattacaagattatctcagtgttttgattggtacacttatgtatgaaatattgattggtactcatctatattatatgaattatattattattaaatatatgtgtgtgtatttctctttcaaattattataatgtggtatctcaaatgaatataaattgaag

SEQ ID NO: 65812 - DNA, 1014 bp, Zea Mays
acctaacccttcggccttcgttgcggacccgccactcacttcttctctcgaccgcatcttttctccgcgccgccgctcgcctgcacttctacgtgtgaaccgcgtccgcgcctatggcctgcccgtgcccagctgccccctctccacacgagcctctctaggcgtcaagcgtgccattaagcaaccgtggcccccacccctcctcggctctctgcgtgagcacaagcacgtctctgtagcccatgttcaacggaagcgaaaggaaacagaaggcctaaaatgttgtagtgtgcggccattgctcacgaggaggcagagtgccgtgttgccgagtgccgctggaccacatacgattgttgatggtaaagaagttgtgaactttgcatcagcaaactacctcggtttaattggcaacgaaaagattattgattcttgcatcagttcattggagaaatatggtgttggttcttgtggtccacgtggcttttatggaacaattgatgtccatcttgactgtgagtcaaagatagctaaatttttggggactccagactccattctttattcatatgggatttctacaatattcagtgtgatacctgccttctgtaagaaagaagatatcatagtcgcttaactgtacatgggtagtttgatgtgattgcggtgacgagggtgttgactgtttggtgaaatgcttgggacaaagtggccaacaagaatggagtcatggaacatcgacaggaggggtgcggcagcagcaaccgatgtatcccttggacaatctggttttgacaagatgcaaatcaatccgctgtacactgtattccgcacttgcacagattgtttggttaattacaagattatctcagtgttttgattggtacacttatgtatgaaatattgattggtactcatctatattatatgaattatattattattaaatatatgtgtgtgtatttctctttcaaattattataatgtggtatctcaaatgaatataaattgaag

SEQ ID NO: 65813 - DNA, 1007 bp, Zea Mays
acctaacccttcggccttcgttgcggacccgccactcacttcttctctcgaccgcatcttttctccgcgccgccgctcgcctgcacttctacgtgtgaaccgcgtccgcgcctatggcctgcccgtgcccagctgccccctctccacacgagcctctctaggcgtcaagcgtgccattaagcaaccgtggcccccacccctcctcggctctctgcgtgagcacaagcacgtctctgtagcccatgttcaacggaagcgaaagaaggcctaaaatgttgtagtgtgcggccattgctcacgaggaggcagagtgccgtgttgccgagtgccgctggaccacatacgattgttgatggtaaagaagttgtgaactttgcatcagcaaactacctcggtttaattggcaacgaaaagattattgattcttgcatcagttcattggagaaatatggtgttggttcttgtggtccacgtggcttttatggaacaattgatgtccatcttgactgtgagtcaaagatagctaaatttttggggactccagactccattctttattcatatgggatttctacaatattcagtgtgatacctgccttctgtaagaaagaagatatcatagtcgcttaactgtacatgggtagtttgatgtgattgcggtgacgagggtgttgactgtttggtgaaatgcttgggacaaagtggccaacaagaatggagtcatggaacatcgacaggaggggtgcggcagcagcaaccgatgtatcccttggacaatctggttttgacaagatgcaaatcaatccgctgtacactgtattccgcacttgcacagattgtttggttaattacaagattatctcagtgttttgattggtacacttatgtatgaaatattgattggtactcatctatattatatgaattatattattattaaatatatgtgtgtgtatttctctttcaaattattataatgtggtatctcaaatgaatataaattgaag

SEQ ID NO: 65814 - DNA, 1175 bp, Zea Mays
acctaacccttcggccttcgttgcggacccgccactcacttcttctctcgaccgcatcttttctccgcgccgccgctcgcctgcacttctacgtgtgaaccgcgtccgcgcctatggcctgcccgtgcccagctgccccctctccacacgagcctctctaggcgtcaagcgtgccattaagcaaccgtggcccccacccctcctcggctctctgcgtgagcacaagcacgtctctgtagcccatgttcaacggaagcgaaaggtaacccatcacattcgtcatgtgcaattctctcatgtcgtgcagcccattaattccactgaagaaaacatagaatgtgcatcataatgtcacagaaggcctaaaatgttgtagtgtgcggccattgctcacgaggaggcagagtgccgtgttgccgagtgccgctggaccacatacgattgttgatggtaaagaagttgtgaactttgcatcagcaaactacctcggtttaattggcaacgaaaagattattgattcttgcatcagttcattggagaaatatggtgttggttcttgtggtccacgtggcttttatggaacaattgatgtccatcttgactgtgagtcaaagatagctaaatttttggggactccagactccattctttattcatatgggatttctacaatattcagtgtgatacctgccttctgtaagaaagaagatatcatagtcgcgtaagttcaccgtattacaaaattatgaaattcacaagtattattggaaccttgacttgtttggtgtatcgagttaactgtacatgggtagtttgatgtgattgcggtgacgagggtgttgactgtttggtgaaatgcttgggacaaagtggccaacaagaatggagtcatggaacatcgacaggaggggtgcggcagcagcaaccgatgtatcccttggacaatctggttttgacaagatgcaaatcaatccgctgtacactgtattccgcacttgcacagattgtttggttaattacaagattatctcagtgttttgattggtacacttatgtatgaaatattgattggtactcatctatattatatgaattatattattattaaatatatgtgtgtgtatttctctttcaaattattataatgtggtatctcaaatgaatataaattgaag

SEQ ID NO: 65815 - DNA, 1057 bp, Zea Mays
acctaacccttcggccttcgttgcggacccgccactcacttcttctctcgaccgcatcttttctccgcgccgccgctcgcctgcacttctacgtgtgaaccgcgtccgcgcctatggcctgcccgtgcccagctgccccctctccacacgagcctctctaggcgtcaagcgtgccattaagcaaccgtggcccccacccctcctcggctctctgcgtgagcacaagcacgtctctgtagcccatgttcaacggaagcgaaagcccattaattccactgaagaaaacatagaatgtgcatcataatgtcacagaaggcctaaaatgttgtagtgtgcggccattgctcacgaggaggcagagtgccgtgttgccgagtgccgctggaccacatacgattgttgatggtaaagaagttgtgaactttgcatcagcaaactacctcggtttaattggcaacgaaaagattattgattcttgcatcagttcattggagaaatatggtgttggttcttgtggtccacgtggcttttatggaacaattgatgtccatcttgactgtgagtcaaagatagctaaatttttggggactccagactccattctttattcatatgggatttctacaatattcagtgtgatacctgccttctgtaagaaagaagatatcatagtcgcttaactgtacatgggtagtttgatgtgattgcggtgacgagggtgttgactgtttggtgaaatgcttgggacaaagtggccaacaagaatggagtcatggaacatcgacaggaggggtgcggcagcagcaaccgatgtatcccttggacaatctggttttgacaagatgcaaatcaatccgctgtacactgtattccgcacttgcacagattgtttggttaattacaagattatctcagtgttttgattggtacacttatgtatgaaatattgattggtactcatctatattatatgaattatattattattaaatatatgtgtgtgtatttctctttcaaattattataatgtggtatctcaaatgaatataaattgaag

SEQ ID NO: 65816 - DNA, 1162 bp, Zea Mays
acctaacccttcggccttcgttgcggacccgccactcacttcttctctcgaccgcatcttttctccgcgccgccgctcgcctgcacttctacgtgtgaaccgcgtccgcgcctatggcctgcccgtgcccagctgccccctctccacacgagcctctctaggcgtcaagcgtgccattaagcaaccgtggcccccacccctcctcggctctctgcgtgagcacaagcacgtctctgtagcccatgttcaacggaagcgaaaggtgtcagtgctagaggatttggaaaggcgctgtttgataagaagacaaacccgtgtcctggtaacccatcacattcgtcatgtgcaattctctcatgtcgtgcagcccattaattccactgaagaaaacatagaatgtgcatcataatgtcacagaaggcctaaaatgttgtagtgtgcggccattgctcacgaggaggcagagtgccgtgttgccgagtgccgctggaccacatacgattgttgatggtaaagaagttgtgaactttgcatcagcaaactacctcggtttaattggcaacgaaaagattattgattcttgcatcagttcattggagaaatatggtgttggttcttgtggtccacgtggcttttatggaacaattgatgtccatcttgactgtgagtcaaagatagctaaatttttggggactccagactccattctttattcatatgggatttctacaatattcagtgtgatacctgccttctgtaagaaagaagatatcatagtcgcttaactgtacatgggtagtttgatgtgattgcggtgacgagggtgttgactgtttggtgaaatgcttgggacaaagtggccaacaagaatggagtcatggaacatcgacaggaggggtgcggcagcagcaaccgatgtatcccttggacaatctggttttgacaagatgcaaatcaatccgctgtacactgtattccgcacttgcacagattgtttggttaattacaagattatctcagtgttttgattggtacacttatgtatgaaatattgattggtactcatctatattatatgaattatattattattaaatatatgtgtgtgtatttctctttcaaattattataatgtggtatctcaaatgaatataaattgaag

SEQ ID NO: 65817 - DNA, 910 bp, Zea Mays
gtaatcctacatatcatttcatatatggattaaccggatgtgccgctggaccacatacgattgttgatggtaaagaagttgtgaactttgcatcagcaaactacctcggtttaattggcaacgaaaagattattgattcttgcatcagttcattggagaaatatggtgttggttcttgtggtccacgtggcttttatggaacaattgatgtccatcttgactgtgagtcaaagatagctaaatttttggggactccagactccattctttattcatatgggatttctacaatattcagtgtgatacctgccttctgtaagaaagaagatatcatagtcgcgtaagttcaccgtattacaaaattatgaaattcacaagtattattggaaccttgacttgtttggtgtatcgaggtatgcatgcttggccttttagacataatatggatttatccagctcaactttaggctttagcacaacattgtcatctctttcttgtgtctattgatgagttgtttttccttgtcagttaactgtacatgggtagtttgatgtgattgcggtgacgagggtgttgactgtttggtgaaatgcttgggacaaagtggccaacaagaatggagtcatggaacatcgacaggaggggtgcggcagcagcaaccgatgtatcccttggacaatctggttttgacaagatgcaaatcaatccgctgtacactgtattccgcacttgcacagattgtttggttaattacaagattatctcagtgttttgattggtacacttatgtatgaaatattgattggtactcatctatattatatgaattatattattattaaatatatgtgtgtgtatttctctttcaaattattataatgtggtatctcaaatgaatataaattgaag

SEQ ID NO: 65818 - DNA, 893 bp, Zea Mays
atcctacatatcatttcatatatggattaaccggatgtgccgctggaccacatacgattgttgatggtaaagaagttgtgaactttgcatcagcaaactacctcggtttaattggcaacgaaaagattattttcattggagaaatatggtgttggttcttgtggtccacgtggcttttatggaacaattgatgtccatcttgactgtgagtcaaagatagctaaatttttggggactccagactccattctttattcatatgggatttctacaatattcagtgtgatacctgccttctgtaagaaagaagatatcatagtcgcgtaagttcaccgtattacaaaattatgaaattcacaagtattattggaaccttgacttgtttggtgtatcgaggtatgcatgcttggccttttagacataatatggatttatccagctcaactttaggctttagcacaacattgtcatctctttcttgtgtctattgatgagttgtttttccttgtcagttaactgtacatgggtagtttgatgtgattgcggtgacgagggtgttgactgtttggtgaaatgcttgggacaaagtggccaacaagaatggagtcatggaacatcgacaggaggggtgcggcagcagcaaccgatgtatcccttggacaatctggttttgacaagatgcaaatcaatccgctgtacactgtattccgcacttgcacagattgtttggttaattacaagattatctcagtgttttgattggtacacttatgtatgaaatattgattggtactcatctatattatatgaattatattattattaaatatatgtgtgtgtatttctctttcaaattattataatgtggtatctcaaatgaatataaattgaag

SEQ ID NO: 65819 - DNA, 1308 bp, Zea Mays
cctataaatgcccctcccagctcagcgttcgcctcaccaacagaaaacctcgcagctagcagcaagatcttagcacaaacaccacagcccacaggctgattaatcactccaagactaatcaaacgaacgcttagctaatagcgcgcgatcttttttccccctccccctcttgagtcttgagcgtgcgagaagagatggcgctgaacggcggcaagacgacgttggtgcaggacgaggagaagcagcagcttctgctggagaagcacaccgagaagcacttcacagcgggcgaggtggtccgggacatcctgtcgcagtacgggctgggcccggaggagtacggccccgtggtgacctccctccgcaacaaccccaaggcgtggctggagttcatgatgaagttcgagctcgggctggagaggcctgagccccggcgcgcgctggtgagcgccgccaccatcgcgctgtcctacgtcgcgggcgggctggtgccgctgctcccctacatgttcgtgccggaggccgcgcgcgccatggccgtgtccgtcgccgtgacgctcgcggcgctgctcttcttcggcttcgtcaagggccgcttcacgggcgaccgccccttcttcagcgccgtccagaccaccgtcgtcggcgcgctcgcctccgccgccgccttcgccatggccagggccgtgcagtccatatgaagactggtgtgatgcagcaaaaatagtgaagcaggccggtcgccgcatgccccatatcaatcatcaccggccggctaggttggcgagggaaaataagtgcagctctatatgcatacgtggctacggtcactgcttctttgtttgatggctgcgtggtgtactattgtcagatgtggattattatttaggtcaagtcgattccaaactgtgacccgctgggctttggatccatttgtttttatctatctactggtaaattaaatgactgatgttgggctgtgtaattcggcaaccggaggcccaaactgggttccgctttgggctttgcctctattttctcctcaactactactactacctagtagtacacctagcaaggatttctagaagcgtgttcctaactgccctgtaaatccttctcgaaagaaaaaacttccccgcaaatctgctgataataagataatgtaataggacatctgattctgtcttctcaagttcaccgagaggcaacgccgagtaaaaaaaaagaaaaaaggggatcgaaacctcgtgctgattgagtgggcaactggccggccattgcaaaggtggaagtaaagaaaataaa

SEQ ID NO: 65820 - DNA, 2706 bp, Zea Mays
ttgtttccagcaaatcgcccgagttgtattactagtattttattcggcgcgtctccatcgcgaggccactcggctcggctgctcggctccggatcggcgtctctgctactaaactaaaataaaataaaacgctaaagcttatcgcaactcgttctctcggctgctgctcctgctgcttgctacttaaacaaacacatctcagcgtctcttgcgatcgctcaagagccaccaccaccagtccaccacgccccctgcacgcgacccgaggccaagaatcgcttccgttccgcgccgcctcctatatccagcgagcggcgctgccagcccacgcctcgctcgaatccctcctccttcctggaaacggggtttgctttccctgccccgccaaatcctttcttctccatccagccggttcctacccatcctgccggctgcggctgcggcagcggctgcctggcgctgccgtgcgttgcagagcgagggcgaggcggaggtggccaaatgccggtccaggaccgggtcgtcgtcgtcggcgagcgcgcgagactctgtctcccccctgccgccggtctgtcgaggtgtggtagtggtagtggccgtcccagctggagcacctgagacgtcgttgctcggtcgtccggattgatttcggccgaaagctgcttgtgggtttttttttccggaaagggagggagggagggagggcagccttttcggttttctgattgttactagttgctctgcggattcgattcccttgccgagatttatctcttcgccgccggagactggtggacagcagatcctcttccatctccgccggccgttcattcttaagctgcctgcgaagctttttcttgagaccctctccagagtactgttcgccggatcttggtttggagggcgagcggtgaaagatcgaatccttgtttggaggttcagcggcaggcagctcgctgtgacgtcgcccgtgcgggcatggtgtccagatcctactcgaacctcctggagctcgccgccggcggcagcggcggcgagccgctgccgtcgctggggcgccgccggataccgcgcgtcgtgacggcctccggcattgtgccggacctcgacgtctccgacgccgcctccgccgccgaccagtcctcccacgcgccgcgggagcgcgtcatcatcgtcgccaaccagctccccgtccgcgcctcccgccgcgccgccgccggcgccggcggcggcgggtgggacttcgcgtgggaccaggacagcctcctcctgcagaatgggagacatgcgttccggtgatagactgcagctggaagcagatcgcagagcctgtgatgaagacctataccgagactacggacgggtcgactattgaggacaaggagactgccatcgtgtggtgctacgaggacgccgatccagatttcggatcctgccaggccaaggagctccacgaccatctggagagcgtgcttgcaaacgagccggtctcagtgaaagctggacccaacctcgtcgaggtgaagccacagggcgtaagcaagggcctggtggcgaagcggatcctgtcgacgacgcaggagcggggcgacgccgacgacgacctgccggacttcgtgctgtgcgtgggcgacgaccggtccgacgaggacatgttcgaggtgatcgcggcggcggcggccgcgaggggcgtgtcctccctgcaggcggaggcggaggtgttcgcgtgcacggtggggcgcaagcccagcaaggccaagtactacctggacgaccccgcggacatcgtgcgcctcgtccagggcctcgccagcgtctccgacgacgaccagacgcacgccccaccgccgccgcctccctcggcggcgacgacggcggcggacaccgtgccgaggtgaaccgtgtcggcgtgcgggggtgcggtgcagttagctctaggcggcatgagaccttgtggttgtggtggaactagtggaagggaccgtcgctcgcgactgttcgcaggtggtgtacaaaatgctctaggaatgttgtggtctgggaatgtccttgttcgtgctgcctcgtcctcgtcgcgtggccaccgcactgtgtacataaacataaggcactcgtcgaggtcgccggtcacgtcgatctgccgccctgaagctccaaaggtcgccgagacgctgcgggtcgcgttgcattccttctgtctgtgggtcgggtggggtggtgaccctcgtagccctcgctgcagctaatgatggcgagcaacagtgcagtggaggggaggggagtggaggtggtggttgcacttgctgacccgccgcacagcaacagtcgcgggcggtagccttatcctgttgcctatcggggcaaaggttcttctgccggtctaatcatgtttggtcgggataaggctctcgtgccgtgtttagcaacgagaatacaagagcgagattcctgccctcgatcgccgatggatggttggtctccagtggatttagcagcgcgtttcgtcttgggccctgggtggtccggctgccgacctggtccgggcacttgtgtgctctggaactggaaggcgaatagatagataaggctggagtagggtgtaactgtaagtcacctcgtagctgaatatggttctcagttgtaacatgtatctaccggttcgttttggtcgactccttttgaatgcatacatgcccggattgcgtt

SEQ ID NO: 65821 - DNA, 4396 bp, Zea Mays
ttgtttccagcaaatcgcccgagttgtattactagtattttattcggcgcgtctccatcgcgaggccactcggctcggctgctcggctccggatcggcgtctctgctactaaactaaaataaaataaaacgctaaagcttatcgcaactcgttctctcggctgctgctcctgctgcttgctacttaaacaaacacatctcagcgtctcttgcgatcgctcaagagccaccaccaccagtccaccacgccccctgcacgcgacccgaggccaagaatcgcttccgttccgcgccgcctcctatatccagcgagcggcgctgccagcccacgcctcgctcgaatccctcctccttcctggaaacggggtttgctttccctgccccgccaaatcctttcttctccatccagccggttcctacccatcctgccggctgcggctgcggcagcggctgcctggcgctgccgtgcgttgcagagcgagggcgaggcggaggtggccaaatgccggtccaggaccgggtcgtcgtcgtcggcgagcgcgcgagactctgtctcccccctgccgccggtctgtcgaggtgtggtagtggtagtggccgtcccagctggagcacctgagacgtcgttgctcggtcgtccggattgatttcggccgaaagctgcttgtgggtttttttttccggaaagggagggagggagggagggcagccttttcggttttctgattgttactagttgctctgcggattcgattcccttgccgagatttatctcttcgccgccggagactggtggacagcagatcctcttccatctccgccggccgttcattcttaagctgcctgcgaagctttttcttgagaccctctccagagtactgttcgccggatcttggtttggagggcgagcggtgaaagatcgaatccttgtttggaggttcagcggcaggcagctcgctgtgacgtcgcccgtgcgggcatggtgtccagatcctactcgaacctcctggagctcgccgccggcggcagcggcggcgagccgctgccgtcgctggggcgccgccggataccgcgcgtcgtgacggcctccggcattgtgccggacctcgacgtctccgacgccgcctccgccgccgaccagtcctcccacgcgccgcgggagcgcgtcatcatcgtcgccaaccagctccccgtccgcgcctcccgccgcgccgccgccggcgccggcggcggcgggtgggacttcgcgtgggaccaggacagcctcctcctgcaggtcaaggacagcctccgcgcgcaccacggccgcgcggacgtggagttcgtctacgtcggcggcctccgcgacgacgtgcccccagccgagcacgaccaggtcgcgcacgacctcctcgagggcttccgctgcgttcccaccttcctgcccgccgacctccgctcccgcttctaccacggcttctgcaagcagcagctctggccactgttccattacatgctgccactgtcgccggagctaggcggccgcttcgaccgcctcctctggcaggcctacgtgtcggtcaacaagatcttcgccgacaagatcctggaggtgatcagccccgacgaagacttcgtctgggtgcacgattaccatctcatggtgctccccacattcctgcggaagcgcttcaaccgggtcaagctcgggttcttcctccatagccccttcccgtcgtcggagatctacaagaccctgcctgtgcgtgaggagctgctccggtcgctgctgaacgccgatctgattggcttccacacttttgattatgccagacacttcttgtcgtgctgcagcaggatgctcgggctcaagtatgagtcgcagaggggctacattgctctggagtactatggccggacagttactatcaagatcttgcctgtgggagtacacttggagcagctacggtcagtcctcaacctcccggagcttggggtcaaggtggccgagcttctgaaacagttctgtcatcggaaccgtctgctgttgcttggtgttgatgacatggatatcttcaaaggaattagcttgaagcttttggcgtttgagcagctcctaatgcagcatccggagtggcggggaagggtggtgcttgttcagatcgccaatccagcaagggggcggggaaaggatgtgagggaggtacaggaagagagcgatgcaatggtgaggcgcatcaacgacgcgttcgggcagccaggttaccagccggtgatactgatcgaccagcctctgcagttctatgagaggatggcttactatgtcgtcgcggagtgctgtttggtcactgcagtgagggacgggatgaacctgatcccatacgagtacgtaattgctcgacaagggaatgagaggatagatagtattctaggccttggtccggcttcaaggaagaagagcatgcttgtcgtgtcagagttcatcggctgctcgccctccctgagcggcgctatccgtgtgaacccttggaacatcgattcagtagccgacgcaatggactacgcgctggagatgccggaaggggagaaggtgttgagacatgagaaacaccacagatacgtgagcacgcacgacgtcgggtactgggcgaacagcttcctgcaagatcttgagcggatttgcctcgaccataacaggaggcgttgctggggcatagggtttgggctgaagttcagggttgtggccctcgacccaaacttcaagaagcttgcggtggagcacttggtcttggcctaccggaggacgaagaagcgtgtcattctcttagactacgatgggacgctgatgccgcagacttcgctcggtaagagtcctacctcaaggacgatagacatgttgaacagcctttgccgcgacaggaacaacatggtcttccttgtgagcgcaaagagccggatgactctgaacgaatggttcttaccatgtgagagccttggactagcagctgaacacggctgcttcctcaggctgagaagagacgcagaatgggagacatgcgttccggtgatagactgcagctggaagcagatcgcagagcctgtgatgaagacctataccgagactacggacgggtcgactattgaggacaaggagactgccatcgtgtggtgctacgaggacgccgatccagatttcggatcctgccaggccaaggagctccacgaccatctggagagcgtgcttgcaaacgagccggtctcagtgaaagctggacccaacctcgtcgaggtgaagccacagggcgtaagcaagggcctggtggcgaagcggatcctgtcgacgacgcaggagcggggcgacgccgacgacgacctgccggacttcgtgctgtgcgtgggcgacgaccggtccgacgaggacatgttcgaggtgttcgcgtgcacggtggggcgcaagcccagcaaggccaagtactacctggacgaccccgcggacatcgtgcgcctcgtccagggcctcgccagcgtctccgacgacgaccagacgcacgccccaccgccgccgcctccctcggcggcgacgacggcggcggacaccgtgccgaggtgaaccgtgtcggcgtgcgggggtgcggtgcagttagctctaggcggcatgagaccttgtggttgtggtggaactagtggaagggaccgtcgctcgcgactgttcgcaggtggtgtacaaaatgctctaggaatgttgtggtctgggaatgtccttgttcgtgctgcctcgtcctcgtcgcgtggccaccgcactgtgtacataaacataaggcactcgtcgaggtcgccggtcacgtcgatctgccgccctgaagctccaaaggtcgccgagacgctgcgggtcgcgttgcattccttctgtctgtgggtcgggtggggtggtgaccctcgtagccctcgctgcagctaatgatggcgagcaacagtgcagtggaggggaggggagtggaggtggtggttgcacttgctgacccgccgcacagcaacagtcgcgggcggtagccttatcctgttgcctatcggggcaaaggttcttctgccggtctaatcatgtttggtcgggataaggctctcgtgccgtgtttagcaacgagaatacaagagcgagattcctgccctcgatcgccgatggatggttggtctccagtggatttagcagcgcgtttcgtcttgggccctgggtggtccggctgccgacctggtccgggcacttgtgtgctctggaactggaaggcgaatagatagataaggctggagtagggtgtaactgtaagtcacctcgtagctgaatatggttctcagttgtaacatgtatctaccggttcgttttggtcgactccttttgaatgcatacatgcccggattgcgtt

SEQ ID NO: 65822 - DNA, 4441 bp, Zea Mays
ttgtttccagcaaatcgcccgagttgtattactagtattttattcggcgcgtctccatcgcgaggccactcggctcggctgctcggctccggatcggcgtctctgctactaaactaaaataaaataaaacgctaaagcttatcgcaactcgttctctcggctgctgctcctgctgcttgctacttaaacaaacacatctcagcgtctcttgcgatcgctcaagagccaccaccaccagtccaccacgccccctgcacgcgacccgaggccaagaatcgcttccgttccgcgccgcctcctatatccagcgagcggcgctgccagcccacgcctcgctcgaatccctcctccttcctggaaacggggtttgctttccctgccccgccaaatcctttcttctccatccagccggttcctacccatcctgccggctgcggctgcggcagcggctgcctggcgctgccgtgcgttgcagagcgagggcgaggcggaggtggccaaatgccggtccaggaccgggtcgtcgtcgtcggcgagcgcgcgagactctgtctcccccctgccgccggtctgtcgaggtgtggtagtggtagtggccgtcccagctggagcacctgagacgtcgttgctcggtcgtccggattgatttcggccgaaagctgcttgtgggtttttttttccggaaagggagggagggagggagggcagccttttcggttttctgattgttactagttgctctgcggattcgattcccttgccgagatttatctcttcgccgccggagactggtggacagcagatcctcttccatctccgccggccgttcattcttaagctgcctgcgaagctttttcttgagaccctctccagagtactgttcgccggatcttggtttggagggcgagcggtgaaagatcgaatccttgtttggaggttcagcggcaggcagctcgctgtgacgtcgcccgtgcgggcatggtgtccagatcctactcgaacctcctggagctcgccgccggcggcagcggcggcgagccgctgccgtcgctggggcgccgccggataccgcgcgtcgtgacggcctccggcattgtgccggacctcgacgtctccgacgccgcctccgccgccgaccagtcctcccacgcgccgcgggagcgcgtcatcatcgtcgccaaccagctccccgtccgcgcctcccgccgcgccgccgccggcgccggcggcggcgggtgggacttcgcgtgggaccaggacagcctcctcctgcaggtcaaggacagcctccgcgcgcaccacggccgcgcggacgtggagttcgtctacgtcggcggcctccgcgacgacgtgcccccagccgagcacgaccaggtcgcgcacgacctcctcgagggcttccgctgcgttcccaccttcctgcccgccgacctccgctcccgcttctaccacggcttctgcaagcagcagctctggccactgttccattacatgctgccactgtcgccggagctaggcggccgcttcgaccgcctcctctggcaggcctacgtgtcggtcaacaagatcttcgccgacaagatcctggaggtgatcagccccgacgaagacttcgtctgggtgcacgattaccatctcatggtgctccccacattcctgcggaagcgcttcaaccgggtcaagctcgggttcttcctccatagccccttcccgtcgtcggagatctacaagaccctgcctgtgcgtgaggagctgctccggtcgctgctgaacgccgatctgattggcttccacacttttgattatgccagacacttcttgtcgtgctgcagcaggatgctcgggctcaagtatgagtcgcagaggggctacattgctctggagtactatggccggacagttactatcaagatcttgcctgtgggagtacacttggagcagctacggtcagtcctcaacctcccggagcttggggtcaaggtggccgagcttctgaaacagttctgtcatcggaaccgtctgctgttgcttggtgttgatgacatggatatcttcaaaggaattagcttgaagcttttggcgtttgagcagctcctaatgcagcatccggagtggcggggaagggtggtgcttgttcagatcgccaatccagcaagggggcggggaaaggatgtgagggaggtacaggaagagagcgatgcaatggtgaggcgcatcaacgacgcgttcgggcagccaggttaccagccggtgatactgatcgaccagcctctgcagttctatgagaggatggcttactatgtcgtcgcggagtgctgtttggtcactgcagtgagggacgggatgaacctgatcccatacgagtacgtaattgctcgacaagggaatgagaggatagatagtattctaggccttggtccggcttcaaggaagaagagcatgcttgtcgtgtcagagttcatcggctgctcgccctccctgagcggcgctatccgtgtgaacccttggaacatcgattcagtagccgacgcaatggactacgcgctggagatgccggaaggggagaaggtgttgagacatgagaaacaccacagatacgtgagcacgcacgacgtcgggtactgggcgaacagcttcctgcaagatcttgagcggatttgcctcgaccataacaggaggcgttgctggggcatagggtttgggctgaagttcagggttgtggccctcgacccaaacttcaagaagcttgcggtggagcacttggtcttggcctaccggaggacgaagaagcgtgtcattctcttagactacgatgggacgctgatgccgcagacttcgctcggtaagagtcctacctcaaggacgatagacatgttgaacagcctttgccgcgacaggaacaacatggtcttccttgtgagcgcaaagagccggatgactctgaacgaatggttcttaccatgtgagagccttggactagcagctgaacacggctgcttcctcaggctgagaagagacgcagaatgggagacatgcgttccggtgatagactgcagctggaagcagatcgcagagcctgtgatgaagacctataccgagactacggacgggtcgactattgaggacaaggagactgccatcgtgtggtgctacgaggacgccgatccagatttcggatcctgccaggccaaggagctccacgaccatctggagagcgtgcttgcaaacgagccggtctcagtgaaagctggacccaacctcgtcgagggcgtaagcaagggcctggtggcgaagcggatcctgtcgacgacgcaggagcggggcgacgccgacgacgacctgccggacttcgtgctgtgcgtgggcgacgaccggtccgacgaggacatgttcgaggtgatcgcggcggcggcggccgcgaggggcgtgtcctccctgcaggcggaggcggaggtgttcgcgtgcacggtggggcgcaagcccagcaaggccaagtactacctggacgaccccgcggacatcgtgcgcctcgtccagggcctcgccagcgtctccgacgacgaccagacgcacgccccaccgccgccgcctccctcggcggcgacgacggcggcggacaccgtgccgaggtgaaccgtgtcggcgtgcgggggtgcggtgcagttagctctaggcggcatgagaccttgtggttgtggtggaactagtggaagggaccgtcgctcgcgactgttcgcaggtggtgtacaaaatgctctaggaatgttgtggtctgggaatgtccttgttcgtgctgcctcgtcctcgtcgcgtggccaccgcactgtgtacataaacataaggcactcgtcgaggtcgccggtcacgtcgatctgccgccctgaagctccaaaggtcgccgagacgctgcgggtcgcgttgcattccttctgtctgtgggtcgggtggggtggtgaccctcgtagccctcgctgcagctaatgatggcgagcaacagtgcagtggaggggaggggagtggaggtggtggttgcacttgctgacccgccgcacagcaacagtcgcgggcggtagccttatcctgttgcctatcggggcaaaggttcttctgccggtctaatcatgtttggtcgggataaggctctcgtgccgtgtttagcaacgagaatacaagagcgagattcctgccctcgatcgccgatggatggttggtctccagtggatttagcagcgcgtttcgtcttgggccctgggtggtccggctgccgacctggtccgggcacttgtgtgctctggaactggaaggcgaatagatagataaggctggagtagggtgtaactgtaagtcacctcgtagctgaatatggttctcagttgtaacatgtatctaccggttcgttttggtcgactccttttgaatgcatacatgcccggattgcgtt

SEQ ID NO: 65823 - DNA, 646 bp, Zea Mays
atcaggtggctcttttctgcatgtgcatgggaggaatcatgtattttctggagtacaagccagacacaatggctccattcctcagagggctcatcaggcgcttcctggcaagcaagatcagcaatccaagccccctgcctcccaatcagaatgcctcctactcgtaccttcagacgctgaatgctctaaaacaatcaagaacccaaccaggggtggataacagactgatatcggagaaatacaacctcgaatcaattcctagactttagagacctcatctgtggtagtagtaaattgggtcttgtagcttgggaagatcacgaaaactcgaacacccattacatgtgccatcctgtgatgggtttatactctgttatacgtgtttgtcttgagtgcaaaataaatggataagcagaggtggtttgtgcgggagtatggactgatacgaagcaatttgctcgtacttgttgaatatgggcctcaccctcccccaggaaagaccggtgcaaaatacattatcaggggagatggtcagagcttgatcttcggtatgtgaagaaaagcagcgatcagcatctggagcttggttacaaggtaaatatcaactttcactatgattatagctgctgctgactatagaagttgt

SEQ ID NO: 65824 - DNA, 2019 bp, Zea Mays
cgcacggcctcttctcacgccgcctcgacttcctcttccagcccccgccatccatcctcctcctctgcacatgtacactcacctcaaaacccccaagcatcgtgctaaaacccggcctagccctcgaatccccccttgcccgcgcggagtagacgagcccagcccgtcccatcgaccatggcatcctcagggtccgccgctaacctctggtactgcttggcctaagcatcgcgggcgtcctcctggcagcgcggcgattgaggcaccatacgcgccctgaccacgacgctttcatggcccgcctagagctcctcccaccgccacagcctccgccgtcgcaaggaggccagcccgggcgaggtggcgcaggccatcgccatgttccccagatcctgttccacagcgtcgccttcttccaggtacacccagctctcgccttcttcaggcacagctccaagccgtcaagcgccacccagtcccgattcccttcacaccgtctctcgccctatcctatctgacggtccaagactctgagtttgccgtggtgagtgtgcttcactgcttctctaattcctcccgttgcattggttcgatggaatatggcgctgaggaggaggcggcgaccgatgaccccagtagcagcgggggcaccaggcgttgggcgactgaaggggagcccgaagctgactgtggatgcggacatgcgagatatggcgaagacggccgcgtggagcgttagttcctacagggctggcaacggtgtcacggccctgcacgacaacaaccttgacacctgccgacagtctgatggggctcaagtgtacagccgcaaatggtgaacatccagttccagaagaagttgcaggcgtgtagctgcagcctgcagggctactgcggtgcggaaagagctgcaggcttcggtggaccaactacctgcgcccggacctcaagcgcgggctgctgtcgtcggaggaggagacgacggtgatcgacctgcacgcgcagctgggcaaccggtggtccaagatcgcgtcgcacctgccgggacgcacggacaacgagatcaagaaccactggaacacgcacatcaagaagaagctgaggaagatgggcatcgaccctgccacccacaagcccctccacccacagccagcagctcctcctccgactcagcaggagcaggacacgggcgggtcgcccgaggaggagggggagaaggccgacgcggtcatgatggcagcagctacgccgattatcgggcacgagacggcgccgttctttaccgacgaggaggagatgctggcgcacctccttgacgacatcgacgacttcccacccgcggcttattctcccgacgactcttcttcgccctcctcctcctcctccgcgtcccggtcgtctcactcggcctccgtcgtcacagcgccgtcgtcgagcggagctggtggaagcagcgtcgccgacggcgagcggccgctgcagatggtggagtggcctgagtccatgtggctggacgacgacgtggtgcccggcctggccacgacgccgtgggagttcgaggacgacaaccccttcctcgcctaccagaggaacaacgctctgttcgatcaccagctggaggcatggaacaacgacggcagggtcgagctgttctgaggcgctgagatgatctacttcttcctcgatcgtcattagattagatgtagttaattaatacgtcatccccggcctacgatcgagcagttcgcgttgcacagaccagagcactcacggccgttgaaaataagcaagagaaagagatgaaagtggttgcacgcccggtttcttggttttctaaaacctttggccgggccgaccacaacttgcaaaggaacagttggagagaaaaaaaaatgttcgttagcaatctgccagtgctgtttggcattggagaacccttccgtggattgtttattggacaatgcaagacccctctacgtacgttgaaaatgggaataataaagccaggccactttgtac

SEQ ID NO: 65825 - DNA, 2623 bp, Zea Mays
cgcacggcctcttctcacgccgcctcgacttcctcttccagcccccgccatccatcctcctcctctgcacatgtacactcacctcaaaacccccaagcatcgtgctaaaacccggcctagccctcgaatccccccttgcccgcgcggagtagacgagcccagcccgtcccatcgaccatggcatcctcagggtccgccgctaacctctggtactgcttggcctaagcatcgcgggcgtcctcctggcagcgcggcgattgaggcaccatacgcgccctgaccacgacgctttcatggcccgcctagagctcctcccaccgccacagcctccgccgtcgcaaggaggccagcccgggcgaggtggcgcaggccatcgccatgttccccagatcctgttccacagcgtcgccttcttccaggtacacccagctctcgccttcttcaggcacagctccaagccgtcaagcgccacccagtcccgattcccttcacaccgtctctcgccctatcctatctgacggtccaagactctgagtttgccgtgtagcagcgggggcaccaggcgttgggcgactgaaggggagcccgaagctgactgtggatgcggacatgcgagatatggcgaagacggccgcgtggagcgttagttcctacagggctggcaacggtgtcacggccctgcacgacaacaaccttgacacctgccgacagtctgatggggctcaagtgtacagccgcaaatggtgaacatccagttccagaagaagttgcaggcgtgtagctgcagcctgcagctcgtcgtgatatacgtggatttcaagctcgaagaagtgctccactaaaaatgaaacgttagaattcagctgagcatcttactctacattgcagcaaactgtgacgtgctttgctgagttagattagtctggcatgcttgagtttcccatggtagggcgccgcgaagcgcgcctctttttctagtaaacaaaagcgcaaatggaagccgcttcacgtagcagcccgtgcaaagcaagcgaaagggacccgcgagcagcgaagcaaccaggccaagcgcaacacgacctacaccgtggggccggccatccaggagacacgcgtattccgtcctggacaaaggaccgcatccacttgctagctcgctagtcattacctgatttcgccgcgggcgtcgtcgtctttctccttcctcgtcctttataaaggaaggtggcaatggcctttccctctgcaccgccaagttagcttgcctagccacatcaaagcaaagctagctacggccagctttggcgatctgcttgcttctctctgagcgtttctttacaactaaaccaactgagcaatggggaggcaaccgtgctgcgacaaggtggggctgaagaagggcccgtggtcggcggaggaggacgagaagctcgtcaccttcctcctcaccaacggccagtgctgctggcgcgccgtgcccaagcttgccgggctactgcggtgcggaaagagctgcaggcttcggtggaccaactacctgcgcccggacctcaagcgcgggctgctgtcgtcggaggaggagacgacggtgatcgacctgcacgcgcagctgggcaaccggtggtccaagatcgcgtcgcacctgccgggacgcacggacaacgagatcaagaaccactggaacacgcacatcaagaagaagctgaggaagatgggcatcgaccctgccacccacaagcccctccacccacagccagcagctcctcctccgactcagcaggagcaggacacgggcgggtcgcccgaggaggagggggagaaggccgacgcggtcatgatggcagcagctacgccgattatcgggcacgagacggcgccgttctttaccgacgaggaggagatgctggcgcacctccttgacgacatcgacgacttcccacccgcggcttattctcccgacgactcttcttcgccctcctcctcctcctccgcgtcccggtcgtctcactcggcctccgtcgtcacagcgccgtcgtcgagcggagctggtggaagcagcgtcgccgacggcgagcggccgctgcagatggtggagtggcctgagtccatgtggctggacgacgacgtggtgcccggcctggccacgacgccgtgggagttcgaggacgacaaccccttcctcgcctaccagaggaacaacgctctgttcgatcaccagctggaggcatggaacaacgacggcagggtcgagctgttctgaggcgctgagatgatctacttcttcctcgatcgtcattagattagatgtagttaattaatacgtcatccccggcctacgatcgagcagttcgcgttgcacagaccagagcactcacggccgttgaaaataagcaagagaaagagatgaaagtggttgcacgcccggtttcttggttttctaaaacctttggccgggccgaccacaacttgcaaaggaacagttggagagaaaaaaaaatgttcgttagcaatctgccagtgctgtttggcattggagaacccttccgtggattgtttattggacaatgcaagacccctctacgtacgttgaaaatgggaataataaagccaggccactttgtac

SEQ ID NO: 65826 - DNA, 3508 bp, Zea Mays
ccgcgctccatcttccgcttcctccctcgccctcggcatacaggcgacggcggcggcggcggcggcgccgctcaggctcgggctctaagcgacggcgtcattggcttcccctcccgcctctctccagtcgcctcgcgccctcgcctccggtcctccgcacacaggtctattgtacaagggatacatgcaacaaaacttgcgaagccatggctacccaagaagaaaccatggtaactgaatcatcaccctctagtgattcatctatcactattgggttggccgtgagcagctccaagtccagcaagtatgcagtgaattgggctctgaaaaacttcggtaccagacagaggataaggttcatgctcattcatgtccggcaaaaggtcacactcgttccaaccccgatgggcaactatgttcctgttgatcaagtgagggatgacattgccagtgcatatgaaaaagaagtcgaatgtgaggcccaaaatatgctccttatgtacaagaacatgtgtgatggcaaggttgaagctgaagtattggttgtcaagggtgatgatgtggcagaaactatttcaggtgttgtcttagcatgccaaattcacaagctttttgttggtgtctcttctcatagcaactttataaggaagttcaagggcactaggatgttctctcgaatatgcaagtgtgttccaagcttttgtatggtgtatgctatttcaaaaggtgggttgtccatggtttattctcttggatcagaaagtgacaacagttctaagatactccaggtcaacgagagttctaacagtgaactttattcagataagtcatcagtatcagatattacaccttccataatttccagatccaactcgctcgatgggaatctggatagtcccccatctacacatcataattggtcacagtctttacaagaacacctctctagaagcacttcatctaccattggtaaagatcaaaggatcagtccttgtactgatggatctagtaacttggggatcttagacaaaaccccaaccatgagcagggcactgcaggaattgatgttgttagaggacgaggcaagcgctccttgtgctactggtcaaatttctgcatctactaatttgcctctctccgacaaagctctaactgtaaagagtgcgctgcaggaattgatgctttcagaggacaaggcaagcactcattgtgctagtggtcaaatatctggatctagtaacttccccatctcatacaaagctccaacagtaagcaatgcactgcaggaattgatgctttcagaagacaaggataatgccaattttgagcttgaaaaactcaggattaaactagaacatatgaaaggagtgtgcaaacttgttcaggatgagtctaccagtgcttctcagcaaatgattgacctagttgaaagacgtgctcaagaggaagctcggctggcggaggtccgccagaggatcaacattaccactgaggcagcgcggaaagagagggagcagcggtacgctatagaggcgcaagctaggcatgtgagggaccttgcaaaagaggaagctttgaaaaagcagaatttgcagcttaggttatcaagggaggctgataatgtgcaaaagctggagaaacttcttgaattgggaggcaagtcatacacagtatttacatgggaggagatggaatctgctacatcatcgttttcggaggcacttaagattggatcgggagcattcgggacagtgtacaagggcaaagtccaccataagactgtggccataaaagtactcaaatctgacgacagccacattgccaaacattttgaaaaggaggtatgccgtgcaccattgcaaagttaataattaagtatgaagatcataatgatatcaacaatcaagctaagatctgtgatgcaggatcccagaatcttgagattttgggtaagacccgacatcgccatttgttgctgctgctaggtgcctgtctggacagagcttgcttggtatacgagtacatggagaatggcagccttgaggatcggctgcagtgcaaaggagacactgccccactcccatggtaccaccgtttccgtattgcatgggaaataacattggcacttatcttcctacacagttcaaaaccaaagccaattatccaccgtgacctcaagcctgcaaatatactccttgacagaaatttcactagcaaaatcggtgatgcaggccttgcaacatttcttccattaagggacacttcgtcaacacatacaattcgaaaatcaacagatctagttggtacactgttttatctggacccagagtatcagaggacaggtcaagtttcagcaaaatctgatgtatacgctttgggcatggtgttcttgcagcttctgactgcaaagtcaccaattgggctagcagacactgctgagagagcaatggaagaggatcaccttattgacattctggaccaacgtgcaggaaattggcctgtgcgagaagcgcatgagctaactcagcttggcctccgttgtttggaaatgcgaagcaaggatcgacctgacctgaagtctaaggttcttgtagttttagagcggctgaacaatcttgccagcactgtgtatcattcggtgcagcccatcccaactgcaccaccaagccattttatctgccctatactcaagagggtaatgcaggatccatgcattgcgtctgatgggtactcgtatgaacgggttgcgattgagatgtggcttaatgagaatgatgtgtcaccattgacgaaggcgcgacttcctgacaaaaacttggtgcccaatcttgccctgatatgcctgatcaattcttggaagggagaggtaggagctactgggcccattcgctgagctttactacccaaggatatcgcattagaagctaatgctgtacaggtttgtcttgataacctccatacactgtagataccgtgatcgggtgagttctctgtaagtagcagttttgcagcatctcttagatagtacagtgtgatagatcctgaaggttacttcatgcttagccccaattataggtctgaatccgtagaataccacagagacacagaccctttagggcttgttcgtttctaccccaatccatatgtattgagggggattgagggggtttcaatccctagtaattcaaaatcccttccaatccgtatcaatctccttcaatccatatggattgaaaataaccgaacaagcccttaaaggatttgattagggtacccatagttattcgatatcccgtggcctacgacggtttctgtacctttcagaaatgatgaagatgcacatgtcctacgatggtttatgtaccctttttacagtttgtttggaccaacaatagtggctaggcgggcctaaacaccggtggggcctcaatgcacttcctcgaagggcctcccgcttcgcttatctgtagcctgcacctgcagcgccactgacccgttgtttcctcct

SEQ ID NO: 65827 - DNA, 3347 bp, Zea Mays
ctctccagtcgcctcgcgccctcgcctccggtcctccgcacacaggtctattgtacaagggatacatgcaacaaaacttgcgaagccatggctacccaagaagaaaccatggtaactgaatcatcaccctctagtgattcatctatcactattgggttggccgtgagcagctccaagtccagcaagtatgcagtgaattgggctctgaaaaacttcggtaccagacagaggataaggttcatgctcattcatgtccggcaaaaggtcacactcgttccaaccccgatgggcaactatgttcctgttgatcaagtgagggatgacattgccagtgcatatgaaaaagaagtcgaatgtgaggcccaaaatatgctccttatgtacaagaacatgtgtgatggcaaggttgaagctgaagtattggttgtcaagggtgatgatgtggcagaaactatttcaggtgttgtcttagcatgccaaattcacaagctttttgttggtgtctcttctcatagcaactttataaggaagttcaagggcactaggatgttctctcgaatatgcaagtgtgttccaagcttttgtatggtgtatgctatttcaaaaggtgggttgtccatggtttattctcttggatcagaaagtgacaacagttctaagatactccaggtcaacgagagttctaacagtgaactttattcagataagtcatcagtatcagatattacaccttccataatttccagatccaactcgctcgatgggaatctggatagtcccccatctacacatcataattggtcacagtctttacaagaacacctctctagaagcacttcatctaccattggtaaagatcaaaggatcagtccttgtactgatggatctagtaacttggggatcttagacaaaaccccaaccatgagcagggcactgcaggaattgatgttgttagaggacgaggcaagcgctccttgtgctactggtcaaatttctgcatctactaatttgcctctctccgacaaagctctaactgtaaagagtgcgctgcaggaattgatgctttcagaggacaagatttaacacttggatgacttcacttatctcatctattcaaatattttaattaggcaagcactcattgtgctagtggtcaaatatctggatctagtaacttccccatctcatacaaagctccaacagtaagcaatgcactgcaggaattgatgctttcagaagacaaggataatgccaattttgagcttgaaaaactcaggattaaactagaacatatgaaaggagtgtgcaaacttgttcaggatgagtctaccagtgcttctcagcaaatgattgacctagttgaaagacgtgctcaagaggaagctcggctggcggaggtccgccagaggatcaacattaccactgaggcagcgcggaaagagagggagcagcggtacgctatagaggcgcaagctaggcatgtgagggaccttgcaaaagaggaagctttgaaaaagcagaatttgcagcttaggttatcaagggaggctgataatgtgcaaaagctggagaaacttcttgaattgggaggcaagtcatacacagtatttacatgggaggagatggaatctgctacatcatcgttttcggaggcacttaagattggatcgggagcattcgggacagtgtacaagggcaaagtccaccataagactgtggccataaaagtactcaaatctgacgacagccacattgccaaacattttgaaaaggagcttgagattttgggtaagacccgacatcgccatttgttgctgctgctaggtgcctgtctggacagagcttgcttggtatacgagtacatggagaatggcagccttgaggatcggctgcagtgcaaaggagacactgccccactcccatggtaccaccgtttccgtattgcatgggaaataacattggcacttatcttcctacacagttcaaaaccaaagccaattatccaccgtgacctcaagcctgcaaatatactccttgacagaaatttcactagcaaaatcggtgatgcaggccttgcaacatttcttccattaagggacacttcgtcaacacatacaattcgaaaatcaacagatctagttggtacactgttttatctggacccagagtatcagaggacaggtcaagtttcagcaaaatctgatgtatacgctttgggcatggtgttcttgcagcttctgactgcaaagtcaccaattgggctagcagacactgctgagagagcaatggaagaggatcaccttattgacattctggaccaacgtgcaggaaattggcctgtgcgagaagcgcatgagctaactcagcttggcctccgttgtttggaaatgcgaagcaaggatcgacctgacctgaagtctaaggttcttgtagttttagagcggctgaacaatcttgccagcactgtgtatcattcggtgcagcccatcccaactgcaccaccaagccattttatctgccctatactcaagagggtaatgcaggatccatgcattgcgtctgatgggtactcgtatgaacgggttgcgattgagatgtggcttaatgagaatgatgtgtcaccattgacgaaggcgcgacttcctgacaaaaacttggtgcccaatcttgccctgatatgcctgatcaattcttggaagggagaggtaggagctactgggcccattcgctgagctttactacccaaggatatcgcattagaagctaatgctgtacaggtttgtcttgataacctccatacactgtagataccgtgatcgggtgagttctctgtaagtagcagttttgcagcatctcttagatagtacagtgtgatagatcctgaaggttacttcatgcttagccccaattataggtctgaatccgtagaataccacagagacacagaccctttagggcttgttcgtttctaccccaatccatatgtattgagggggattgagggggtttcaatccctagtaattcaaaatcccttccaatccgtatcaatctccttcaatccatatggattgaaaataaccgaacaagcccttaaaggatttgattagggtacccatagttattcgatatcccgtggcctacgacggtttctgtacctttcagaaatgatgaagatgcacatgtcctacgatggtttatgtaccctttttacagtttgtttggaccaacaatagtggctaggcgggcctaaacaccggtggggcctcaatgcacttcctcgaagggcctcccgcttcgcttatctgtagcctgcacctgcagcgccactgacccgttgtttcctcct

SEQ ID NO: 65828 - DNA, 3201 bp, Zea Mays
caacaaaacttgcgaagccatggctacccaagaagaaaccatggtaactgaatcatcaccctctagtgattcatctatcactattgggttggccgtgagcagctccaagtccagcaagtatgcagtgaattgggctctgaaaaacttcggtaccagacagaggataaggttcatgctcattcatgtccggcaaaaggtcacactcgttccaaccccgatgggcaactatgttcctgttgatcaagtgagggatgacattgccagtgcatatgaaaaagaagtcgaatgtgaggcccaaaatatgctccttatgtacaagaacatgtgtgatggcaaggttgaagctgaagtattggttgtcaagggtgatgatgtggcagaaactatttcaggtgttgtcttagcatgccaaattcacaagctttttgttggtgtctcttctcatagcaactttataaggaagttcaagggcactaggatgttctctcgaatatgcaagtgtgttccaagcttttgtatggtgtatgctatttcaaaaggtgggttgtccatggtttattctcttggatcagaaagtgacaacagttctaagatactccaggtcaacgagagttctaacagtgaactttattcagataagtcatcagtatcagatccaactcgctcgatgggaatctggatagtcccccatctacacatcataattggtcacagtctttacaagaacacctctctagaagcacttcatctaccattggtaaagatcaaaggatcagtccttgtactgatggatctagtaacttggggatcttagacaaaaccccaaccatgagcagggcactgcaggaattgatgttgttagaggacgaggcaagcgctccttgtgctactggtcaaatttctgcatctactaatttgcctctctccgacaaagctctaactgtaaagagtgcgctgcaggaattgatgctttcagaggacaaggcaagcactcattgtgctagtggtcaaatatctggatctagtaacttccccatctcatacaaagctccaacagtaagcaatgcactgcaggaattgatgctttcagaagacaaggataatgccaattttgagcttgaaaaactcaggattaaactagaacatatgaaaggagtgtgcaaacttgttcaggatgagtctaccagtgcttctcagcaaatgattgacctagttgaaagacgtgctcaagaggaagctcggctggcggaggtccgccagaggatcaacattaccactgaggcagcgcggaaagagagggagcagcggtacgctatagaggcgcaagctaggcatgtgagggaccttgcaaaagaggaagctttgaaaaagcagaatttgcagcttaggttatcaagggaggctgataatgtgcaaaagctggagaaacttcttgaattgggaggcaagtcatacacagtatttacatgggaggagatggaatctgctacatcatcgttttcggaggcacttaagattggatcgggagcattcgggacagtgtacaagggcaaagtccaccataagactgtggccataaaagtactcaaatctgacgacagccacattgccaaacattttgaaaaggagcttgagattttgggtaagacccgacatcgccatttgttgctgctgctaggtgcctgtctggacagagcttgcttggtatacgagtacatggagaatggcagccttgaggatcggctgcagtgcaaaggagacactgccccactcccatggtaccaccgtttccgtattgcatgggaaataacattggcacttatcttcctacacagttcaaaaccaaagccaattatccaccgtgacctcaagcctgcaaatatactccttgacagaaatttcactagcaaaatcggtgatgcaggccttgcaacatttcttccattaagggacacttcgtcaacacatacaattcgaaaatcaacagatctagttggtacactgttttatctggacccagagtatcagaggacaggtcaagtttcagcaaaatctgatgtatacgctttgggcatggtgttcttgcagcttctgactgcaaagtcaccaattgggctagcagacactgctgagagagcaatggaagaggatcaccttattgacattctggaccaacgtgcaggaaattggcctgtgcgagaagcgcatgagctaactcagcttggcctccgttgtttggaaatgcgaagcaaggatcgacctgacctgaagtctaaggttcttgtagttttagagcggctgaacaatcttgccagcactgtgtatcattcggtgcagcccatcccaactgcaccaccaagccattttatctgccctatactcaagagggtaatgcaggatccatgcattgcgtctgatgggtactcgtatgaacgggttgcgattgagatgtggcttaatgagaatgatgtgtcaccattgacgaaggcgcgacttcctgacaaaaacttggtgcccaatcttgccctgatatgcctgatcaattcttggaagggagaggtaggagctactgggcccattcgctgagctttactacccaaggatatcgcattagaagctaatgctgtacaggtttgtcttgataacctccatacactgtagataccgtgatcgggtgagttctctgtaagtagcagttttgcagcatctcttagatagtacagtgtgatagatcctgaaggttacttcatgcttagccccaattataggtctgaatccgtagaataccacagagacacagaccctttagggcttgttcgtttctaccccaatccatatgtattgagggggattgagggggtttcaatccctagtaattcaaaatcccttccaatccgtatcaatctccttcaatccatatggattgaaaataaccgaacaagcccttaaaggatttgattagggtacccatagttattcgatatcccgtggcctacgacggtttctgtacctttcagaaatgatgaagatgcacatgtcctacgatggtttatgtaccctttttacagtttgtttggaccaacaatagtggctaggcgggcctaaacaccggtggggcctcaatgcacttcctcgaagggcctcccgcttcgcttatctgtagcctgcacctgcagcgccactgacccgttgtttcctcct

SEQ ID NO: 65829 - DNA, 3425 bp, Zea Mays
aaaacttgcgaagccatggctacccaagaagaaaccatggtaactgaatcatcaccctctagtgattcatctatcactattgggttggccgtgagcagctccaagtccagcaagtatgcagtgaattgggctctgaaaaacttcggtaccagacagaggataaggttcatgctcattcatgtccggcaaaaggtcacactcgttccaaccccgatgggcaactatgttcctgttgatcaagtgagggatgacattgccagtgcatatgaaaaagaagtcgaatgtgaggcccaaaatatgctccttatgtacaagaacatgtgtgatggcaaggttgaagctgaagtattggttgtcaagggtgatgatgtggcagaaactatttcaggtggaagttcaagggcactaggatgttctctcgaatatgcaagtgtgttccaagcttttgtatggtgtatgctatttcaaaaggtgggttgtccatggtttattctcttggatcagaaagtgacaacagttctaagatactccaggtcaacgagagttctaacagtgaactttattcagataagtcatcagtatcagatattacaccttccataatttccagatccaactcgctcgatgggaatctggatagtcccccatctacacatcataattggtcacagtctttacaagaacacctctctagaagcacttcatctaccattggtaaagatcaaaggatcagtccttgtactgatggatctagtaacttggggatcttagacaaaaccccaaccatgagcagggcactgcaggaattgatgttgttagaggacgaggcaagcgctccttgtgctactggtcaaatttctgcatctactaatttgcctctctccgacaaagctctaactgtaaagagtgcgctgcaggaattgatgctttcagaggacaaggttagtcaactttgcagtgtgcctttttgttgtctaatgatttgaggctgaatctttgtacatgagaattagtttcagatctctgtctccagcagtagttctctgtactaaagctgctgtacaatcacatatgtgccaacgtttgtacagtttttacctttttctaatagtcttttggcttctcagatgtttgcaatttcctttacttcaacagatttaacacttggatgacttcacttatctcatctattcaaatattttaattaggcaagcactcattgtgctagtggtcaaatatctggatctagtaacttccccatctcatacaaagctccaacagtaagcaatgcactgcaggaattgatgctttcagaagacaaggataatgccaattttgagcttgaaaaactcaggattaaactagaacatatgaaaggagtgtgcaaacttgttcaggatgagtctaccagtgcttctcagcaaatgattgacctagttgaaagacgtgctcaagaggaagctcggctggcggaggtccgccagaggatcaacattaccactgaggcagcgcggaaagagagggagcagcggtacgctatagaggcgcaagctaggcatgtgagggaccttgcaaaagaggaagctttgaaaaagcagaatttgcagcttaggttatcaagggaggctgataatgtgcaaaagctggagaaacttcttgaattgggaggcaagtcatacacagtatttacatgggaggagatggaatctgctacatcatcgttttcggaggcacttaagattggatcgggagcattcgggacagtgtacaagggcaaagtccaccataagactgtggccataaaagtactcaaatctgacgacagccacattgccaaacattttgaaaaggagcttgagattttgggtaagacccgacatcgccatttgttgctgctgctaggtgcctgtctggacagagcttgcttggtatacgagtacatggagaatggcagccttgaggatcggctgcagtgcaaaggagacactgccccactcccatggtaccaccgtttccgtattgcatgggaaataacattggcacttatcttcctacacagttcaaaaccaaagccaattatccaccgtgacctcaagcctgcaaatatactccttgacagaaatttcactagcaaaatcggtgatgcaggccttgcaacatttcttccattaagggacacttcgtcaacacatacaattcgaaaatcaacagatctagttggtacactgttttatctggacccagagtatcagaggacaggtcaagtttcagcaaaatctgatgtatacgctttgggcatggtgttcttgcagcttctgactgcaaagtcaccaattgggctagcagacactgctgagagagcaatggaagaggatcaccttattgacattctggaccaacgtgcaggaaattggcctgtgcgagaagcgcatgagctaactcagcttggcctccgttgtttggaaatgcgaagcaaggatcgacctgacctgaagtctaaggttcttgtagttttagagcggctgaacaatcttgccagcactgtgtatcattcggtgcagcccatcccaactgcaccaccaagccattttatctgccctatactcaagagggtaatgcaggatccatgcattgcgtctgatgggtactcgtatgaacgggttgcgattgagatgtggcttaatgagaatgatgtgtcaccattgacgaaggcgcgacttcctgacaaaaacttggtgcccaatcttgccctgatatgcctgatcaattcttggaagggagaggtaggagctactgggcccattcgctgagctttactacccaaggatatcgcattagaagctaatgctgtacaggtttgtcttgataacctccatacactgtagataccgtgatcgggtgagttctctgtaagtagcagttttgcagcatctcttagatagtacagtgtgatagatcctgaaggttacttcatgcttagccccaattataggtctgaatccgtagaataccacagagacacagaccctttagggcttgttcgtttctaccccaatccatatgtattgagggggattgagggggtttcaatccctagtaattcaaaatcccttccaatccgtatcaatctccttcaatccatatggattgaaaataaccgaacaagcccttaaaggatttgattagggtacccatagttattcgatatcccgtggcctacgacggtttctgtacctttcagaaatgatgaagatgcacatgtcctacgatggtttatgtaccctttttacagtttgtttggaccaacaatagtggctaggcgggcctaaacaccggtggggcctcaatgcacttcctcgaagggcctcccgcttcgcttatctgtagcctgcacctgcagcgccactgacccgttgtttcctcct

SEQ ID NO: 65830 - DNA, 3091 bp, Zea Mays
aaaacttgcgaagccatggctacccaagaagaaaccatggtaactgaatcatcaccctctagtgattcatctatcactattgggttggccgtgagcagctccaagtccagcaagtatgcagtgaattgggctctgaaaaacttcggtaccagacagaggataaggttcatgctcattcatgtccggcaaaaggtcacactcgttccaaccccgatgggcaactatgttcctgttgatcaagtgagggatgacattgccagtgcatatgaaaaagaagtcgaatgtgaggcccaaaatatgctccttatgtacaagaacatgtgtgatggcaaggttgaagctgaagtattggttgtcaagggtgatgatgtggcagaaactatttcaggtggaagttcaagggcactaggatgttctctcgaatatgcaagtgtgttccaagcttttgtatggtgtatgctatttcaaaaggtgggttgtccatggtttattctcttggatcagaaagtgacaacagttctaagatactccaggtcaacgagagttctaacagtgaactttattcagataagtcatcagtatcagatccaactcgctcgatgggaatctggatagtcccccatctacacatcataattggtcacagtctttacaagaacacctctctagaagcacttcatctaccattggtaaagatcaaaggatcagtccttgtactgatggatctagtaacttggggatcttagacaaaaccccaaccatgagcagggcactgcaggaattgatgttgttagaggacgaggcaagcgctccttgtgctactggtcaaatttctgcatctactaatttgcctctctccgacaaagctctaactgtaaagagtgcgctgcaggaattgatgctttcagaggacaaggcaagcactcattgtgctagtggtcaaatatctggatctagtaacttccccatctcatacaaagctccaacagataatgccaattttgagcttgaaaaactcaggattaaactagaacatatgaaaggagtgtgcaaacttgttcaggatgagtctaccagtgcttctcagcaaatgattgacctagttgaaagacgtgctcaagaggaagctcggctggcggaggtccgccagaggatcaacattaccactgaggcagcgcggaaagagagggagcagcggtacgctatagaggcgcaagctaggcatgtgagggaccttgcaaaagaggaagctttgaaaaagcagaatttgcagcttaggttatcaagggaggctgataatgtgcaaaagctggagaaacttcttgaattgggaggcaagtcatacacagtatttacatgggaggagatggaatctgctacatcatcgttttcggaggcacttaagattggatcgggagcattcgggacagtgtacaagggcaaagtccaccataagactgtggccataaaagtactcaaatctgacgacagccacattgccaaacattttgaaaaggagcttgagattttgggtaagacccgacatcgccatttgttgctgctgctaggtgcctgtctggacagagcttgcttggtatacgagtacatggagaatggcagccttgaggatcggctgcagtgcaaaggagacactgccccactcccatggtaccaccgtttccgtattgcatgggaaataacattggcacttatcttcctacacagttcaaaaccaaagccaattatccaccgtgacctcaagcctgcaaatatactccttgacagaaatttcactagcaaaatcggtgatgcaggccttgcaacatttcttccattaagggacacttcgtcaacacatacaattcgaaaatcaacagatctagttggtacactgttttatctggacccagagtatcagaggacaggtcaagtttcagcaaaatctgatgtatacgctttgggcatggtgttcttgcagcttctgactgcaaagtcaccaattgggctagcagacactgctgagagagcaatggaagaggatcaccttattgacattctggaccaacgtgcaggaaattggcctgtgcgagaagcgcatgagctaactcagcttggcctccgttgtttggaaatgcgaagcaaggatcgacctgacctgaagtctaaggttcttgtagttttagagcggctgaacaatcttgccagcactgtgtatcattcggtgcagcccatcccaactgcaccaccaagccattttatctgccctatactcaagagggtaatgcaggatccatgcattgcgtctgatgggtactcgtatgaacgggttgcgattgagatgtggcttaatgagaatgatgtgtcaccattgacgaaggcgcgacttcctgacaaaaacttggtgcccaatcttgccctgatatgcctgatcaattcttggaagggagaggtaggagctactgggcccattcgctgagctttactacccaaggatatcgcattagaagctaatgctgtacaggtttgtcttgataacctccatacactgtagataccgtgatcgggtgagttctctgtaagtagcagttttgcagcatctcttagatagtacagtgtgatagatcctgaaggttacttcatgcttagccccaattataggtctgaatccgtagaataccacagagacacagaccctttagggcttgttcgtttctaccccaatccatatgtattgagggggattgagggggtttcaatccctagtaattcaaaatcccttccaatccgtatcaatctccttcaatccatatggattgaaaataaccgaacaagcccttaaaggatttgattagggtacccatagttattcgatatcccgtggcctacgacggtttctgtacctttcagaaatgatgaagatgcacatgtcctacgatggtttatgtaccctttttacagtttgtttggaccaacaatagtggctaggcgggcctaaacaccggtggggcctcaatgcacttcctcgaagggcctcccgcttcgcttatctgtagcctgcacctgcagcgccactgacccgttgtttcctcct

SEQ ID NO: 65831 - DNA, 3268 bp, Zea Mays
gcgaagccatggctacccaagaagaaaccatggtaactgaatcatcaccctctagtgattcatctatcactattgggttggccgtgagcagctccaagtccagcaagtatgcagtgaattgggctctgaaaaacttcggtaccagacagaggataaggttcatgctcattcatgtccggcaaaaggtcacactcgttccaaccccgatgggcaactatgttcctgttgatcaagtgagggatgacattgccagtgcatatgaaaaagaagtcgaatgtgaggcccaaaatatgctccttatgtacaagaacatgtgtgatggcaaggttgaagctgaagtattggttgtcaagggtgatgatgtggcagaaactatttcaggtgttgtcttagcatgccaaattcacaagctttttgttggtgtctcttctcatagcaactttataaggaagttcaagggcactaggatgttctctcgaatatgcaagtgtgttccaagcttttgtatggtgtatgctatttcaaaaggtgggttgtccatggtttattctcttggatcagaaagtgacaacagttctaagatactccaggtcaacgagagttctaacagtgaactttattcagataagtcatcagtatcagatattacaccttccataatttccagatccaactcgctcgatgggaatctggatagtcccccatctacacatcataattggtcacagtctttacaagaacacctctctagaagcacttcatctaccattggtaaagatcaaaggatcagtccttgtactgatggatctagtaacttggggatcttagacaaaaccccaaccatgagcagggcactgcaggaattgatgttgttagaggacgaggcaagcgctccttgtgctactggtcaaatttctgcatctactaatttgcctctctccgacaaagctctaactgtaaagagtgcgctgcaggaattgatgctttcagaggacaaggcaagcactcattgtgctagtggtcaaatatctggatctagtaacttccccatctcatacaaagctccaacagataatgccaattttgagcttgaaaaactcaggattaaactagaacatatgaaaggagtgtgcaaacttgttcaggatgagtctaccagtgcttctcagcaaatgattgacctagttgaaagacgtgctcaagaggaagctcggctggcggaggtccgccagaggatcaacattaccactgaggcagcgcggaaagagagggagcagcggtacgctatagaggcgcaagctaggcatgtgagggaccttgcaaaagaggaagctttgaaaaagcagaatttgcagcttaggttatcaagggaggctgataatgtgcaaaagctggagaaacttcttgaattgggaggcaagtcatacacagtatttacatgggaggagatggaatctgctacatcatcgttttcggaggcacttaagattggatcgggagcattcgggacagtgtacaagggcaaagtccaccataagactgtggccataaaagtactcaaatctgacgacagccacattgccaaacattttgaaaaggaggtatgccgtgcaccattgcaaagttaataattaagtatgaagatcataatgatatcaacaatcaagctaagatctgtgatgcaggatcccagaatcttgagattttgggtaagacccgacatcgccatttgttgctgctgctaggtgcctgtctggacagagcttgcttggtatacgagtacatggagaatggcagccttgaggatcggctgcagtgcaaaggagacactgccccactcccatggtaccaccgtttccgtattgcatgggaaataacattggcacttatcttcctacacagttcaaaaccaaagccaattatccaccgtgacctcaagcctgcaaatatactccttgacagaaatttcactagcaaaatcggtgatgcaggccttgcaacatttcttccattaagggacacttcgtcaacacatacaattcgaaaatcaacagatctagttggtacactgttttatctggacccagagtatcagaggacaggtcaagtttcagcaaaatctgatgtatacgctttgggcatggtgttcttgcagcttctgactgcaaagtcaccaattgggctagcagacactgctgagagagcaatggaagaggatcaccttattgacattctggaccaacgtgcaggaaattggcctgtgcgagaagcgcatgagctaactcagcttggcctccgttgtttggaaatgcgaagcaaggatcgacctgacctgaagtctaaggttcttgtagttttagagcggctgaacaatcttgccagcactgtgtatcattcggtgcagcccatcccaactgcaccaccaagccattttatctgccctatactcaagagggtaatgcaggatccatgcattgcgtctgatgggtactcgtatgaacgggttgcgattgagatgtggcttaatgagaatgatgtgtcaccattgacgaaggcgcgacttcctgacaaaaacttggtgcccaatcttgccctgatatgcctgatcaattcttggaagggagaggtaggagctactgggcccattcgctgagctttactacccaaggatatcgcattagaagctaatgctgtacaggtttgtcttgataacctccatacactgtagataccgtgatcgggtgagttctctgtaagtagcagttttgcagcatctcttagatagtacagtgtgatagatcctgaaggttacttcatgcttagccccaattataggtctgaatccgtagaataccacagagacacagaccctttagggcttgttcgtttctaccccaatccatatgtattgagggggattgagggggtttcaatccctagtaattcaaaatcccttccaatccgtatcaatctccttcaatccatatggattgaaaataaccgaacaagcccttaaaggatttgattagggtacccatagttattcgatatcccgtggcctacgacggtttctgtacctttcagaaatgatgaagatgcacatgtcctacgatggtttatgtaccctttttacagtttgtttggaccaacaatagtggctaggcgggcctaaacaccggtggggcctcaatgcacttcctcgaagggcctcccgcttcgcttatctgtagcctgcacctgcagcgccactgacccgttgtttcctcct

SEQ ID NO: 65832 - DNA, 2996 bp, Zea Mays
atggctacccaagaagaaaccatggtaactgaatcatcaccctctagtgattcatctatcactattgggttggccgtgagcagctccaagtccagcaagtatgcagtgaattgggctctgaaaaacttcggtaccagacagaggataaggttcatgctcattcatgtccggcaaaaggtcacactcgttccaaccccgatgggcaactatgttcctgttgatcaagtgagggatgacattgccagtgcatatgaaaaagaagtcgaatgtgaggcccaaaatatgctccttatgtacaagaacatgtgtgatggcaaggttgaagctgaagtattggttgtcaagggtgatgatgtggcagaaactatttcaggtggaagttcaagggcactaggatgttctctcgaatatgcaagtgtgttccaagcttttgtatggtgtatgctatttcaaaaggtgggttgtccatggtttattctcttggatcagaaagtgacaacagttctaagatactccaggtcaacgagagttctaacagtgaactttattcagataagtcatcagtatcaggcaagcgctccttgtgctactggtcaaatttctgcatctactaatttgcctctctccgacaaagctctaactgtaaagagtgcgctgcaggaattgatgctttcagaggacaaggcaagcactcattgtgctagtggtcaaatatctggatctagtaacttccccatctcatacaaagctccaacagtaagcaatgcactgcaggaattgatgctttcagaagacaaggataatgccaattttgagcttgaaaaactcaggattaaactagaacatatgaaaggagtgtgcaaacttgttcaggatgagtctaccagtgcttctcagcaaatgattgacctagttgaaagacgtgctcaagaggaagctcggctggcggaggtccgccagaggatcaacattaccactgaggcagcgcggaaagagagggagcagcggtacgctatagaggcgcaagctaggcatgtgagggaccttgcaaaagaggaagctttgaaaaagcagaatttgcagcttaggttatcaagggaggctgataatgtgcaaaagctggagaaacttcttgaattgggaggcaagtcatacacagtatttacatgggaggagatggaatctgctacatcatcgttttcggaggcacttaagattggatcgggagcattcgggacagtgtacaagggcaaagtccaccataagactgtggccataaaagtactcaaatctgacgacagccacattgccaaacattttgaaaaggaggtatgccgtgcaccattgcaaagttaataattaagtatgaagatcataatgatatcaacaatcaagctaagatctgtgatgcaggatcccagaatcttgagattttgggtaagacccgacatcgccatttgttgctgctgctaggtgcctgtctggacagagcttgcttggtatacgagtacatggagaatggcagccttgaggatcggctgcagtgcaaaggagacactgccccactcccatggtaccaccgtttccgtattgcatgggaaataacattggcacttatcttcctacacagttcaaaaccaaagccaattatccaccgtgacctcaagcctgcaaatatactccttgacagaaatttcactagcaaaatcggtgatgcaggccttgcaacatttcttccattaagggacacttcgtcaacacatacaattcgaaaatcaacagatctagttggtacactgttttatctggacccagagtatcagaggacaggtcaagtttcagcaaaatctgatgtatacgctttgggcatggtgttcttgcagcttctgactgcaaagtcaccaattgggctagcagacactgctgagagagcaatggaagaggatcaccttattgacattctggaccaacgtgcaggaaattggcctgtgcgagaagcgcatgagctaactcagcttggcctccgttgtttggaaatgcgaagcaaggatcgacctgacctgaagtctaaggttcttgtagttttagagcggctgaacaatcttgccagcactgtgtatcattcggtgcagcccatcccaactgcaccaccaagccattttatctgccctatactcaagagggtaatgcaggatccatgcattgcgtctgatgggtactcgtatgaacgggttgcgattgagatgtggcttaatgagaatgatgtgtcaccattgacgaaggcgcgacttcctgacaaaaacttggtgcccaatcttgccctgatatgcctgatcaattcttggaagggagaggtaggagctactgggcccattcgctgagctttactacccaaggatatcgcattagaagctaatgctgtacaggtttgtcttgataacctccatacactgtagataccgtgatcgggtgagttctctgtaagtagcagttttgcagcatctcttagatagtacagtgtgatagatcctgaaggttacttcatgcttagccccaattataggtctgaatccgtagaataccacagagacacagaccctttagggcttgttcgtttctaccccaatccatatgtattgagggggattgagggggtttcaatccctagtaattcaaaatcccttccaatccgtatcaatctccttcaatccatatggattgaaaataaccgaacaagcccttaaaggatttgattagggtacccatagttattcgatatcccgtggcctacgacggtttctgtacctttcagaaatgatgaagatgcacatgtcctacgatggtttatgtaccctttttacagtttgtttggaccaacaatagtggctaggcgggcctaaacaccggtggggcctcaatgcacttcctcgaagggcctcccgcttcgcttatctgtagcctgcacctgcagcgccactgacccgttgtttcctcct

SEQ ID NO: 65833 - DNA, 3377 bp, Zea Mays
atggctacccaagaagaaaccatggtaactgaatcatcaccctctagtgattcatctatcactattgggttggccgtgagcagctccaagtccagcaagtatgcagtgaattgggctctgaaaaacttcggtaccagacagaggataaggttcatgctcattcatgtccggcaaaaggtcacactcgttccaaccccgatgggcaactatgttcctgttgatcaagtgagggatgacattgccagtgcatatgaaaaagaagtcgaatgtgaggcccaaaatatgctccttatgtacaagaacatgtgtgatggcaaggttgaagctgaagtattggttgtcaagggtgatgatgtggcagaaactatttcaggtgttgtcttagcatgccaaattcacaagctttttgttggtgtctcttctcatagcaactttataagttcaagggcactaggatgttctctcgaatatgcaagtgtgttccaagcttttgtatggtgtatgctatttcaaaaggtgggttgtccatggtttattctcttggatcagaaagtgacaacagttctaagatactccaggtcaacgagagttctaacagtgaactttattcagataagtcatcagtatcagatattacaccttccataatttccagatccaactcgctcgatgggaatctggatagtcccccatctacacatcataattggtcacagtctttacaagaacacctctctagaagcacttcatctaccattggtaaagatcaaaggatcagtccttgtactgatggatctagtaacttggggatcttagacaaaaccccaaccatgagcagggcactgcaggaattgatgttgttagaggacgaggcaagcgctccttgtgctactggtcaaatttctgcatctactaatttgcctctctccgacaaagctctaactgtaaagagtgcgctgcaggaattgatgctttcagaggacaaggcaagcactcattgtgctagtggtcaaatatctggatctagtaacttccccatctcatacaaagctccaacagataatgccaattttgagcttgaaaaactcaggattaaactagaacatatgaaaggagtgtgcaaacttgttcaggatgagtctaccagtgcttctcagcaaatgattgacctagttgaaagacgtgctcaagaggaagctcggctggcggaggtccgccagaggatcaacattaccactgaggcagcgcggaaagagagggagcagcggtacgctatagaggcgcaagctaggcatgtgagggaccttgcaaaagaggaagctttgaaaaagcagaatttgcagcttaggttatcaagggaggctgataatgtgcaaaagctggagaaacttcttgaattgggaggcaagtcatacacagtatttacatgggaggagatggaatctgctacatcatcgttttcggaggcacttaagattggatcgggagcattcgggacagtgtacaagggcaaagtccaccataagactgtggccataaaagtactcaaatctgacgacagccacattgccaaacattttgaaaaggaggtatgccgtgcaccattgcaaagttaataattaagtatgaagatcataatgatatcaacaatcaagctaagatctgtgatgcaggatcccagaatgtaagatcacagctgtattgaaatctagaatcaagtccattcatatacagaaactgatgctttatttgtcatctcatgttatctccattattttttaaatgggatgtgctctcttgtgcagcttgagattttgggtaagacccgacatcgccatttgttgctgctgctaggtgcctgtctggacagagcttgcttggtatacgagtacatggagaatggcagccttgaggatcggctgcagtgcaaaggagacactgccccactcccatggtaccaccgtttccgtattgcatgggaaataacattggcacttatcttcctacacagttcaaaaccaaagccaattatccaccgtgacctcaagcctgcaaatatactccttgacagaaatttcactagcaaaatcggtgatgcaggccttgcaacatttcttccattaagggacacttcgtcaacacatacaattcgaaaatcaacagatctagttggtacactgttttatctggacccagagtatcagaggacaggtcaagtttcagcaaaatctgatgtatacgctttgggcatggtgttcttgcagcttctgactgcaaagtcaccaattgggctagcagacactgctgagagagcaatggaagaggatcaccttattgacattctggaccaacgtgcaggaaattggcctgtgcgagaagcgcatgagctaactcagcttggcctccgttgtttggaaatgcgaagcaaggatcgacctgacctgaagtctaaggttcttgtagttttagagcggctgaacaatcttgccagcactgtgtatcattcggtgcagcccatcccaactgcaccaccaagccattttatctgccctatactcaagagggtaatgcaggatccatgcattgcgtctgatgggtactcgtatgaacgggttgcgattgagatgtggcttaatgagaatgatgtgtcaccattgacgaaggcgcgacttcctgacaaaaacttggtgcccaatcttgccctgatatgcctgatcaattcttggaagggagaggtaggagctactgggcccattcgctgagctttactacccaaggatatcgcattagaagctaatgctgtacaggtttgtcttgataacctccatacactgtagataccgtgatcgggtgagttctctgtaagtagcagttttgcagcatctcttagatagtacagtgtgatagatcctgaaggttacttcatgcttagccccaattataggtctgaatccgtagaataccacagagacacagaccctttagggcttgttcgtttctaccccaatccatatgtattgagggggattgagggggtttcaatccctagtaattcaaaatcccttccaatccgtatcaatctccttcaatccatatggattgaaaataaccgaacaagcccttaaaggatttgattagggtacccatagttattcgatatcccgtggcctacgacggtttctgtacctttcagaaatgatgaagatgcacatgtcctacgatggtttatgtaccctttttacagtttgtttggaccaacaatagtggctaggcgggcctaaacaccggtggggcctcaatgcacttcctcgaagggcctcccgcttcgcttatctgtagcctgcacctgcagcgccactgacccgttgtttcctcct

SEQ ID NO: 65834 - DNA, 2292 bp, Zea Mays
cttggctcacgtgagcatttgtgaattcaggactgtggctgtgctttcatccattgcacaagaaaggtaatccagctctcttcgtcaagctagacatctctaaagccttcgacaccctaaattgggcttatctcctagatgtgttaagagcctgtgggttctccctgaaatggcgcaattgggtagcagatattctgagatcttcttcctcaagaataattatcaacggagagcggtcaaacgccatcatccacaggcgtggggtactgcctagaggggctaagcttcgctgctcactttacgcggatgacgcgggagtattcattaaagctgacaggtcagacttggaggtgctgaaagagattctcaaagcgttcgagggatgttcaggactaaagatcaactatgacaaaacagaaattttcccaattcggtacccggattcatcatggccggctcttaaggaggtgtttccgggcaaattctctagcctccccgggaagtaccttggactcccccttcattacaagaatgtgaagaggatcgacctacaaccccttattgaaaaaattaataacaggttagctggctggaaagggaagctgctgtccaaagctggaagagaaacacttgtaaaagcggtgctatccgcacagccaatctaccatctaacgatatttcgtcccaaaaaatggctgctgcaagcaattgacagaatacgaagaaacttcctttggagaggtagcaatccactggcttgcagcgggggtcactgcctcatcaattggtccattacatgccttccaaagaacaaggggggtcttggaattcttgatcttgatcgttttgcgagggggctaagactaagatggctgtggctacgatggaagagcaaagacaggccgtggaccgccatgagactaccgtgtgacaaaattgatgaagacctcttcaatgcatccacaactgttacggtaggcaatggaaagacagcgggattctggaattctagttggatccaaggccaagcccctagaaatattgcgccctcactcttcaagaaggcaaagaggaagaacatcacggtcgccaaagcgctcactaacaacacttggattcgattatgctacccattctcgggtgagggggagtttagtgagttcttctccctttggcaggccattggtagcatgccagagctcaacgggtcagaggacaacatttcttggagatggacggcagatgggcagtacagtgctagcagtgcatacaaaatacaattcgcttccaacttcagcagaatgaatctgtgccccatttggaaggctaaagtggaaccgaagtgccgtttttttgcttggacggtactgcataagagaatactgactgctgataaccttcaaaaaagaggctggccttgtaacccaatctgctgtctctgcaactcagcgccggaaacaattctgcatttatgcaaggattgcccctttagtagagaggtttggagcaaagttttgtctcggggcaatcttcatttcctgactggggtccctagtggctcttccttgtacgattggtggacagatctgcgcagtctttgcagcagtcagagaaggagggacctcgacggcctgctaattcaattctggtggaatctatggctagaaagaaatttcagaatctttcaaggacagcataggggtgttgaccaagttactttggctatcttgggcattgctagtagctgaggtcttgtttaggtcttgtttggagtcttcctagtggcttttttgttttttgtttttgtattttttccttgctccttttttcttcttctcttcggttcttcgtgtctgttgttccccctagtttttctccctcatctaatatagatcggagaggcaagctttttgccccttcctttcaaaaaaaaaaaaaaaaaaaaaggactgtggctgtggacagtgtaccatgcacacctagctgcctgagtgaaccatctgaaagattctgaacaaagagtgcagcgtagtgtgtgatgagatagctggtggtgccagaacaggagatgctgctcttttgtttgcatcttgtgacaggatatcgtattaaaacgccgtgcatgcgcgacaaagcaagcaggcaatcaaaaaaaaaaaaaaaaaaaaaaactcgcgaagcttgccgccgccgcgcgcgggcgcgatgattgagaacgcggagctttccgttcctgggtttaatttgccgcggcatgggggcaggggcttttctgtatcttgcctgcagccc

SEQ ID NO: 65835 - DNA, 2218 bp, Zea Mays
tggcggttcatcgacgacaacgactccgatcgccactccatcgtgaatcttgagaaggcggaggttgccgacgtgaaaaaggttatagagagtatacaagagcaggcttcctatcctgctgaccaacaagtgcttatacaccaggggaaggtgctcaaggacgacacaacattggaggaaaaccaagtagttgaaaataattttcttgttataatgctcagacaggtaggctacttgtttattattctggttgacacatgggcacatgacaaatcacgggtgtatgacttggtatgataataaaattattactgagatatgaataactgataacattaactgaataactgtcatagtgcattggattatttgaaagaatttgtgcttcaatttctatggctagcttattagcagtattttatatatggatgcaaaggctgctgtgaatttggaatgtctacgatagcatcagaaatgttctatatatcttatcaattgtaacctttcacagaacaagggatcatcaagtgcagcaccagctaaggtaaccgcgaatcagtgtacctgtcagtgcaccggctgcaactgctacagcctcagcagctcctgctgttgctgtctccactgaggcggatagttatggtcaggctacctcaaacctagttgctggcagcaacttggaaggaacaattaaatccattcttgaaatgggtggcgggacatgggatagagacactgtactacgtgctctgcgggctgcgtacaacaatccagagcgtgctgttgagtacttatattctgtaagaatgattctttgtcctcgttactttctaggccttacatgcgatgaactttcagcgatttatgtgtgcccaggtacgtttaactagtgaacacatctattatataaagtagattgaagctgcatgcacatatgtttggtttgaatatttcgtgaccttagaagtgaattgccgttttcaacctgcaacatgaggatacaattttgttttacaattgtagacactaatgtccttcatcttctgtttaggggattcctgaacaaatggaggttcctgcaccgcctccgagttcccaaccagtcgaccctgttcaggcggtacaaccagctcaagctggaccaaatgctaaccctctcgacctctttccccaagaaatcttgatgttttgcgtaataactcacagttccaaaacctacttggtttggttcaggctaaccctcaaattttgcagccattgcttcaagaattgaggaaacaaaatccccgggttatgcagctaatccaggaaaaccaagcagagtttatgcggttgattagtgagccactagagggagacgaagagaatgaaatgatgctggatcagatggcagatgcaactgagaccattgcagtcactccagaggagaatgaagctatacttcgtcttgaagggatgggctttgaccgggcactcgtcctggaagtgttcttcgcctgcaacaagaacgagcagctggccgccaactacctcttggatcacatgcacgagttcgacaacgatgacgggctcggagggcctccattgtgatgcgatgcgaaggctgtggacagaaaataggaaaacgttttgggatttgtctcgtctgtccgctccgctccccctacatttctttgctgtttagtacataattctagatttacagaaaagacaaagtttactcttttctggatcatatgttttgtgctacttattgctgttctggccgcattgggccagcatgcagttattcacgggttcaacctgacaagcgctggctgcagcagcgaggtgtttgtaggtttcgcggtgattcgtctacccaaatctggaaccgtactgatactgaagaccgtactgatactgaaggcattatccggcgtaaactgttaattcaaacattattacacgaatgcataaggctgagcacggcttttgggcttgaactcgttagactgccaccaaatagcaaatcatgcatatggtcgcatgaatcaacggtttgtactgtatactttttacacagtggacttttggactattcgtacagtaaagtttaaaattcgcactatagattgtacttttcatgtagtggaaattttggactatttatacagtacattttgaaatgggaatgagtaagctggagtatagccttatacggcctgtttggtttgtg

SEQ ID NO: 65836 - DNA, 2056 bp, Zea Mays
tcggatttcttgggagagggggtcccttgtctttaaaccacacaaagttgagtgatttggttgccgacgtgaaaaaggttatagagagtatacaagagcaggcttcctatcctgctgaccaacaagtgcttatacaccaggggaaggtgctcaaggacgacacaacattggaggaaaaccaagtagttgaaaataattttcttgttataatgctcagacaggtaggctacttgtttattattctggttgacacatgggcacatgacaaatcacgggtgtatgacttggtatgataataaaattattactgagatatgaataactgataacattaactgaataactgtcatagtgcattggattatttgaaagaatttgtgcttcaatttctatggctagcttattagcagtattttatatatggatgcaaaggctgctgtgaatttggaatgtctacgatagcatcagaaatgttctatatatcttatcaattgtaacctttcacagaacaagggatcatcaagtgcagcaccagctaaggtaaccgcgaatcaggcaccctctactcagacagtgcctgctactccacctcaaacgtcagcagccccagatgcaccggcacctattgcaccggctgcaactgctacagcctcagcagctcctgctgttgctgtctccactgaggcggatagttatggtcaggctacctcaaacctagttgctggcagcaacttggaaggaacaattaaatccattcttgaaatgggtggcgggacatgggatagagacactgtactacgtgctctgcgggctgcgtacaacaatccagagcgtgctgttgagtacttatattctgggattcctgaacaaatggaggttcctgcaccgcctccgagttcccaaccagtcgaccctgttcaggcggtacaaccagctcaagctggaccaaatgctaaccctctcgacctctttccccaatctcttccgaatgattccgctaatgccaacacaggaaatcttgatgttttgcgtaataactcacagttccaaaacctacttggtttggttcaggctaaccctcaaattttgcagccattgcttcaagaattgaggaaacaaaatccccgggttatgcagctaatccaggaaaaccaagcagagtttatgcggttgattagtgagccactagagggagacgaagagaatgaaatgatgctggatcagatggcagatgcaactgagaccattgcagtcactccagaggagaatgaagctatacttcgtcttgaagggatgggctttgaccgggcactcgtcctggaagtgttcttcgcctgcaacaagaacgagcagctggccgccaactacctcttggatcacatgcacgagttcgacaacgatgacgggctcggagggcctccattgtgatgcgatgcgaaggctgtggacagaaaataggaaaacgttttgggatttgtctcgtctgtccgctccgctccccctacatttctttgctgtttagtacataattctagatttacagaaaagacaaagtttactcttttctggatcatatgttttgtgctacttattgctgttctggccgcattgggccagcatgcagttattcacgggttcaacctgacaagcgctggctgcagcagcgaggtgtttgtaggtttcgcggtgattcgtctacccaaatctggaaccgtactgatactgaagaccgtactgatactgaaggcattatccggcgtaaactgttaattcaaacattattacacgaatgcataaggctgagcacggcttttgggcttgaactcgttagactgccaccaaatagcaaatcatgcatatggtcgcatgaatcaacggtttgtactgtatactttttacacagtggacttttggactattcgtacagtaaagtttaaaattcgcactatagattgtacttttcatgtagtggaaattttggactatttatacagtacattttgaaatgggaatgagtaagctggagtatagccttatacggcctgtttggtttgtg

SEQ ID NO: 65837 - DNA, 2264 bp, Zea Mays
aggaccttcctaaacacagcaacagaaacatataaattcgttaaacttgaggaccctgccggcaaaaaatctccctctcagtaggggccggaataaaaatctcctcgccttcctctcctacgccgcctgacctctgctgtccgcctcaacggtccaaccctccggttcgacgtaggcgccggcggcgaaatgaaggtctccgtgaagacgctcaagggatccagcttccatatcgaagtggatcctaccgacaaggttgccgacgtgaaaaaggttatagagagtatacaagagcaggcttcctatcctgctgaccaacaagtgcttatacaccaggggaaggtgctcaaggacgacacaacattggaggaaaaccaagtagttgaaaataattttcttgttataatgctcagacaggtaggctacttgtttattattctggttgacacatgggcacatgacaaatcacgggtgtatgacttggtatgataataaaattattactgagatatgaataactgataacattaactgaataactgtcatagtgcattggattatttgaaagaatttgtgcttcaatttctatggctagcttattagcagtattttatatatggatgcaaaggctgctgtgaatttggaatgtctacgatagcatcagaaatgttctatatatcttatcaattgtaacctttcacagaacaagggatcatcaagtgcagcaccagctaaggtaaccgcgaatcaggcaccctctactcagacagtgcctgctactccacctcaaacgtcagcagccccagatgcaccggcacctattgtacctgtcagtgcaccggctgcaactgctacagcctcagcagctcctgctgttgctgtctccactgaggcggatagttatggtcaggctacctcaaacctagttgctggcagcaacttggaaggaacaattaaatccattcttgaaatgggtggcgggacatgggatagagacactgtactacgtgctctgcgggctgcgtacaacaatccagagcgtgctgttgagtacttatattctgggattcctgaacaaatggaggttcctgcaccgcctccgagttcccaaccagtcgaccctgttcaggcggtacaaccagctcaagctggaccaaatgctaaccctctcgacctctttccccaatctcttccgaatgattccgctaatgccaacacaggaaatcttgatgttttgcgtaataactcacagttccaaaacctacttggtttggttcaggctaaccctcaaattttgcagccattgcttcaagaattgaggaaacaaaatccccgggttatgcagctaatccaggaaaaccaagcagagtttatgcggttgattagtgagccactagagggagacgaagagaatgaaatgatgctggatcagatggcagatgcaactgagaccattgcagtcactccagaggagaatgaagctatacttcgtcttgaagggatgggctttgaccgggcactcgtcctggaagtgttcttcgcctgcaacaagaacgagcagctggccgccaactacctcttggatcacatgcacgagttcgacaacgatgacgggctcggagggcctccattgtgatgcgatgcgaaggctgtggacagaaaataggaaaacgttttgggatttgtctcgtctgtccgctccgctccccctacatttctttgctgtttagtacataattctagatttacagaaaagacaaagtttactcttttctggatcatatgttttgtgctacttattgctgttctggccgcattgggccagcatgcagttattcacgggttcaacctgacaagcgctggctgcagcagcgaggtgtttgtaggtttcgcggtgattcgtctacccaaatctggaaccgtactgatactgaagaccgtactgatactgaaggcattatccggcgtaaactgttaattcaaacattattacacgaatgcataaggctgagcacggcttttgggcttgaactcgttagactgccaccaaatagcaaatcatgcatatggtcgcatgaatcaacggtttgtactgtatactttttacacagtggacttttggactattcgtacagtaaagtttaaaattcgcactatagattgtacttttcatgtagtggaaattttggactatttatacagtacattttgaaatgggaatgagtaagctggagtatagccttatacggcctgtttggtttgtg

SEQ ID NO: 65838 - DNA, 1905 bp, Zea Mays
gttaaacttgaggaccctgccggcaaaaaatctccctctcagtaggggccggaataaaaatctcctcgccttcctctcctacgccgcctgacctctgctgtccgcctcaacggtccaaccctccggttcgacgtaggcgccggcggcgaaatgaaggtctccgtgaagacgctcaagggatccagcttccatatcgaagtggatcctaccgacaaggttgccgacgtgaaaaaggttatagagagtatacaagagcaggcttcctatcctgctgaccaacaagtgcttatacaccaggggaaggtgctcaaggacgacacaacattggaggaaaaccaagtagttgaaaataattttcttgttataatgctcagacagaacaagggatcatcaagtgcagcaccagctaaggtaaccgcgaatcaggcaccctctactcagacagtgcctgctactccacctcaaacgtcagcagccccagatgcaccggcacctattgtacctgtcagtgcaccggctgcaactgctacagcctcagcagctcctgctgttgctgtctccactgaggcggatagttatggtcaggctacctcaaacctagttgctggcagcaacttggaaggaacaattaaatccattcttgaaatgggtggcgggacatgggatagagacactgtactacgtgctctgcgggctgcgtacaacaatccagagcgtgctgttgagtacttatattctgggattcctgaacaaatggaggttcctgcaccgcctccgagttcccaaccagtcgaccctgttcaggcggtacaaccagctcaagctggaccaaatgctaaccctctcgacctctttccccaagaaatcttgatgttttgcgtaataactcacagttccaaaacctacttggtttggttcaggctaaccctcaaattttgcagccattgcttcaagaattgaggaaacaaaatccccgggttatgcagctaatccaggaaaaccaagcagagtttatgcggttgattagtgagccactagagggagacgaagagaatgaaatgatgctggatcagatggcagatgcaactgagaccattgcagtcactccagaggagaatgaagctatacttcgtcttgaagggatgggctttgaccgggcactcgtcctggaagtgttcttcgcctgcaacaagaacgagcagctggccgccaactacctcttggatcacatgcacgagttcgacaacgatgacgggctcggagggcctccattgtgatgcgatgcgaaggctgtggacagaaaataggaaaacgttttgggatttgtctcgtctgtccgctccgctccccctacatttctttgctgtttagtacataattctagatttacagaaaagacaaagtttactcttttctggatcatatgttttgtgctacttattgctgttctggccgcattgggccagcatgcagttattcacgggttcaacctgacaagcgctggctgcagcagcgaggtgtttgtaggtttcgcggtgattcgtctacccaaatctggaaccgtactgatactgaagaccgtactgatactgaaggcattatccggcgtaaactgttaattcaaacattattacacgaatgcataaggctgagcacggcttttgggcttgaactcgttagactgccaccaaatagcaaatcatgcatatggtcgcatgaatcaacggtttgtactgtatactttttacacagtggacttttggactattcgtacagtaaagtttaaaattcgcactatagattgtacttttcatgtagtggaaattttggactatttatacagtacattttgaaatgggaatgagtaagctggagtatagccttatacggcctgtttggtttgtg

SEQ ID NO: 65839 - DNA, 1794 bp, Zea Mays
taaacttgaggaccctgccggcaaaaaatctccctctcagtaggggccggaataaaaatctcctcgccttcctctcctacgccgcctgacctctgctgtccgcctcaacggtccaaccctccggttcgacgtaggcgccggcggcgaaatgaaggtctccgtgaagacgctcaagggatccagcttccatatcgaagtggatcctaccgacaaggttgccgacgtgaaaaaggttatagagagtatacaagagcaggcttcctatcctgctgaccaacaagtgcttatacaccaggggaaggtgctcaaggacgacacaacattggaggaaaaccaagtagttgaaaataattttcttgttataatgctcagacagaacaagggatcatcaagtgcagcaccagctaaggtaaccgcgaatcaggcaccctctactcagacagtgcctgctactccacctcaaacgtcagcagccccagatgcaccggcacctattgtacctgtcagtgcaccggctgcaactgctacagcctcagcagctcctgctgttgctgtctccactgaggcggatagttatggtcaggctacctcaaacctagttgctggcagcaacttggaaggaacaattaaatccattcttgaaatgggtggcgggacatgggatagagacactgtactacgtgctctgcgggctgcgtacaacaatccagagcgtgctgttgagtacttatattctgggattcctgaacaaatggaggttcctgcaccgcctccgagttcccaaccagtcgaccctgttcaggcggtacaaccagctcaagctggaccaaatgctaaccctctcgacctctttccccaatctcttccgaatgattccgctaatgccaacacaggaaatcttgatgttttgcgtaataactcacagttccaaaacctacttggtttggttcaggctaaccctcaaattttgcagccattgcttcaagaattgaggaaacaaaatccccgggttatgcagctaatccaggaaaaccaagcagagtttatgcggttgattagtgagccactagagggagacgaagagaatgaaatgatgctggatcagatggcagatgcaactgagaccattgcagtcactccagaggagaatgaagctatacttcgtcttgaagggatgggctttgaccgggcactcgtcctggaagtgttcttcgcctgcaacaagaacgagcagctggccgccaactacctcttggatcacatgcacgagttcgacaacgatgacgggctcggagggcctccattgtgatgcgatgcgaaggctgtggacagaaaataggaaaacgttttgggatttgtctcttattcacgggttcaacctgacaagcgctggctgcagcagcgaggtgtttgtaggtttcgcggtgattcgtctacccaaatctggaaccgtactgatactgaagaccgtactgatactgaaggcattatccggcgtaaactgttaattcaaacattattacacgaatgcataaggctgagcacggcttttgggcttgaactcgttagactgccaccaaatagcaaatcatgcatatggtcgcatgaatcaacggtttgtactgtatactttttacacagtggacttttggactattcgtacagtaaagtttaaaattcgcactatagattgtacttttcatgtagtggaaattttggactatttatacagtacattttgaaatgggaatgagtaagctggagtatagccttatacggcctgtttggtttgtg

SEQ ID NO: 65840 - DNA, 2185 bp, Zea Mays
cttgaggaccctgccggcaaaaaatctccctctcagtaggggccggaataaaaatctcctcgccttcctctcctacgccgcctgacctctgctgtccgcctcaacggtccaaccctccggttcgacgtaggcgccggcggcgaaatgaaggtctccgtgaagacgctcaagggatccagcttccatatcgaagtggatcctaccgacaaggttgccgacgtgaaaaaggttatagagagtatacaagagcaggcttcctatcctgctgaccaacaagtgcttatacaccaggggaaggtgctcaaggacgacacaacattggaggaaaaccaagtagttgaaaataattttcttgttataatgctcagacaggtaggctacttgtttattattctggttgacacatgggcacatgacaaatcacgggtgtatgacttggtatgataataaaattattactgagatatgaataactgataacattaactgaataactgtcatagtgcattggattatttgaaagaatttgtgcttcaatttctatggctagcttattagcagtattttatatatggatgcaaaggctgctgtgaatttggaatgtctacgatagcatcagaaatgttctatatatcttatcaattgtaacctttcacagaacaagggatcatcaagtgcagcaccagctaaggtaaccgcgaatcaggcaccctctactcagacagtgcctgctactccacctcaaacgtcagcagccccagatgcaccggcacctattgtacctgtcagtgcaccggctgcaactgctacagcctcagcagctcctgctgttgctgtctccactgaggcggatagttatggtcaggctacctcaaacctagttgctggcagcaacttggaaggaacaattaaatccattcttgaaatgggtggcgggacatgggatagagacactgtactacgtgctctgcgggctgcgtacaacaatccagagcgtgctgttgagtacttatattctgggattcctgaacaaatggaggttcctgcaccgcctccgagttcccaaccagtcgaccctgttcaggcggtacaaccagctcaagctggaccaaatgctaaccctctcgacctctttccccaagaaatcttgatgttttgcgtaataactcacagttccaaaacctacttggtttggttcaggctaaccctcaaattttgcagccattgcttcaagaattgaggaaacaaaatccccgggttatgcagctaatccaggaaaaccaagcagagtttatgcggttgattagtgagccactagagggagacgaagagaatgaaatgatgctggatcagatggcagatgcaactgagaccattgcagtcactccagaggagaatgaagctatacttcgtcttgaagggatgggctttgaccgggcactcgtcctggaagtgttcttcgcctgcaacaagaacgagcagctggccgccaactacctcttggatcacatgcacgagttcgacaacgatgacgggctcggagggcctccattgtgatgcgatgcgaaggctgtggacagaaaataggaaaacgttttgggatttgtctcgtctgtccgctccgctccccctacatttctttgctgtttagtacataattctagatttacagaaaagacaaagtttactcttttctggatcatatgttttgtgctacttattgctgttctggccgcattgggccagcatgcagttattcacgggttcaacctgacaagcgctggctgcagcagcgaggtgtttgtaggtttcgcggtgattcgtctacccaaatctggaaccgtactgatactgaagaccgtactgatactgaaggcattatccggcgtaaactgttaattcaaacattattacacgaatgcataaggctgagcacggcttttgggcttgaactcgttagactgccaccaaatagcaaatcatgcatatggtcgcatgaatcaacggtttgtactgtatactttttacacagtggacttttggactattcgtacagtaaagtttaaaattcgcactatagattgtacttttcatgtagtggaaattttggactatttatacagtacattttgaaatgggaatgagtaagctggagtatagccttatacggcctgtttggtttgtg

SEQ ID NO: 65841 - DNA, 1905 bp, Zea Mays
ccggcaaaaaatctccctctcagtaggggccggaataaaaatctcctcgccttcctctcctacgccgcctgacctctgctgtccgcctcaacggtccaaccctccggttcgacgtaggcgccggcggcgaaatgaaggtctccgtgaagacgctcaagggatccagcttccatatcgaagtggatcctaccgacaaggttgccgacgtgaaaaaggttatagagagtatacaagagcaggcttcctatcctgctgaccaacaagtgcttatacaccaggggaaggtgctcaaggacgacacaacattggaggaaaaccaagtagttgaaaataattttcttgttataatgctcagacagaacaagggatcatcaagtgcagcaccagctaaggcaccctctactcagacagtgcctgctactccacctcaaacgtcagcagccccagatgcaccggcacctattgtacctgtcagtgcaccggctgcaactgctacagcctcagcagctcctgctgttgctgtctccactgaggcggatagttatggtcaggctacctcaaacctagttgctggcagcaacttggaaggaacaattaaatccattcttgaaatgggtggcgggacatgggatagagacactgtactacgtgctctgcgggctgcgtacaacaatccagagcgtgctgttgagtacttatattctgggattcctgaacaaatggaggttcctgcaccgcctccgagttcccaaccagtcgaccctgttcaggcggtacaaccagctcaagctggaccaaatgctaaccctctcgacctctttccccaatctcttccgaatgattccgctaatgccaacacaggaaatcttgatgttttgcgtaataactcacagttccaaaacctacttggtttggttcaggctaaccctcaaattttgcagccattgcttcaagaattgaggaaacaaaatccccgggttatgcagctaatccaggaaaaccaagcagagtttatgcggttgattagtgagccactagagggagacgaagagaatgaaatgatgctggatcagatggcagatgcaactgagaccattgcagtcactccagaggagaatgaagctatacttcgtcttgaagggatgggctttgaccgggcactcgtcctggaagtgttcttcgcctgcaacaagaacgagcagctggccgccaactacctcttggatcacatgcacgagttcgacaacgatgacgggctcggagggcctccattgtgatgcgatgcgaaggctgtggacagaaaataggaaaacgttttgggatttgtctcgtctgtccgctccgctccccctacatttctttgctgtttagtacataattctagatttacagaaaagacaaagtttactcttttctggatcatatgttttgtgctacttattgctgttctggccgcattgggccagcatgcagttattcacgggttcaacctgacaagcgctggctgcagcagcgaggtgtttgtaggtttcgcggtgattcgtctacccaaatctggaaccgtactgatactgaagaccgtactgatactgaaggcattatccggcgtaaactgttaattcaaacattattacacgaatgcataaggctgagcacggcttttgggcttgaactcgttagactgccaccaaatagcaaatcatgcatatggtcgcatgaatcaacggtttgtactgtatactttttacacagtggacttttggactattcgtacagtaaagtttaaaattcgcactatagattgtacttttcatgtagtggaaattttggactatttatacagtacattttgaaatgggaatgagtaagctggagtatagccttatacggcctgtttggtttgtg

SEQ ID NO: 65842 - DNA, 2199 bp, Zea Mays
aaaaaatctccctctcagtaggggccggaataaaaatctcctcgccttcctctcctacgccgcctgacctctgctgtccgcctcaacggtccaaccctccggttcgacgtaggcgccggcggcgaaatgaaggtctccgtgaagacgctcaagggatccagcttccatatcgaagtggatcctaccgacaaggttgccgacgtgaaaaaggttatagagagtatacaagagcaggcttcctatcctgctgaccaacaagtgcttatacaccaggggaaggtgctcaaggacgacacaacattggaggaaaaccaagtagttgaaaataattttcttgttataatgctcagacaggtaggctacttgtttattattctggttgacacatgggcacatgacaaatcacgggtgtatgacttggtatgataataaaattattactgagatatgaataactgataacattaactgaataactgtcatagtgcattggattatttgaaagaatttgtgcttcaatttctatggctagcttattagcagtattttatatatggatgcaaaggctgctgtgaatttggaatgtctacgatagcatcagaaatgttctatatatcttatcaattgtaacctttcacagaacaagggatcatcaagtgcagcaccagctaaggtaaccgcgaatcaggcaccctctactcagacagtgcctgctactccacctcaaacgtcagcagccccagatgcaccggcacctattgtacctgtcagtgcaccggctgcaactgctacagcctcagcagctcctgctgttgctgtctccactgaggcggatagttatggtcaggctacctcaaacctagttgctggcagcaacttggaaggaacaattaaatccattcttgaaatgggtggcgggacatgggatagagacactgtactacgtgctctgcgggctgcgtacaacaatccagagcgtgctgttgagtacttatattctgggattcctgaacaaatggaggttcctgcaccgcctccgagttcccaaccagtcgaccctgttcaggcggtacaaccagctcaagctggaccaaatgctaaccctctcgacctctttccccaatctcttccgaatgattccgctaatgccaacacaggaaatcttgatgttttgcgtaataactcacagttccaaaacctacttggtttggttcaggctaaccctcaaattttgcagccattgcttcaagaattgaggaaacaaaatccccgggttatgcagctaatccaggaaaaccaagcagagtttatgcggttgattagtgagccactagagggagacgaagagaatgaaatgatgctggatcagatggcagatgcaactgagaccattgcagtcactccagaggagaatgaagctatacttccttgaagggatgggctttgaccgggcactcgtcctggaagtgttcttcgcctgcaacaagaacgagcagctggccgccaactacctcttggatcacatgcacgagttcgacaacgatgacgggctcggagggcctccattgtgatgcgatgcgaaggctgtggacagaaaataggaaaacgttttgggatttgtctcgtctgtccgctccgctccccctacatttctttgctgtttagtacataattctagatttacagaaaagacaaagtttactcttttctggatcatatgttttgtgctacttattgctgttctggccgcattgggccagcatgcagttattcacgggttcaacctgacaagcgctggctgcagcagcgaggtgtttgtaggtttcgcggtgattcgtctacccaaatctggaaccgtactgatactgaagaccgtactgatactgaaggcattatccggcgtaaactgttaattcaaacattattacacgaatgcataaggctgagcacggcttttgggcttgaactcgttagactgccaccaaatagcaaatcatgcatatggtcgcatgaatcaacggtttgtactgtatactttttacacagtggacttttggactattcgtacagtaaagtttaaaattcgcactatagattgtacttttcatgtagtggaaattttggactatttatacagtacattttgaaatgggaatgagtaagctggagtatagccttatacggcctgtttggtttgtg

SEQ ID NO: 65843 - DNA, 2066 bp, Zea Mays
ggagactgtgacaagaaatcgcactattcgttccttcctcccctcagtggcggcgtggttgccgacgtgaaaaaggttatagagagtatacaagagcaggcttcctatcctgctgaccaacaagtgcttatacaccaggggaaggtgctcaaggacgacacaacattggaggaaaaccaagtagttgaaaataattttcttgttataatgctcagacaggtaggctacttgtttattattctggttgacacatgggcacatgacaaatcacgggtgtatgacttggtatgataataaaattattactgagatatgaataactgataacattaactgaataactgtcatagtgcattggattatttgaaagaatttgtgcttcaatttctatggctagcttattagcagtattttatatatggatgcaaaggctgctgtgaatttggaatgtctacgatagcatcagaaatgttctatatatcttatcaattgtaacctttcacagaacaagggatcatcaagtgcagcaccagctaaggtaaccgcgaatcaggcaccctctactcagacagtgcctgctactccacctcaaacgtcagcagccccagatgcaccggcacctattgtacctgtcagtgcaccggctgcaactgctacagcctcagcagctcctgctgttgctgtctccactgaggcggatagttatggtcaggctacctcaaacctagttgctggcagcaacttggaaggaacaattaaatccattcttgaaatgggtggcgggacatgggatagagacactgtactacgtgctctgcgggctgcgtacaacaatccagagcgtgctgttgagtacttatattctgggattcctgaacaaatggaggttcctgcaccgcctccgagttcccaaccagtcgaccctgttcaggcggtacaaccagctcaagctggaccaaatgctaaccctctcgacctctttccccaatctcttccgaatgattccgctaatgccaacacaggaaatcttgatgttttgcgtaataactcacagttccaaaacctacttggtttggttcaggctaaccctcaaattttgcagccattgcttcaagaattgaggaaacaaaatccccgggttatgcagctaatccaggaaaaccaagcagagtttatgcggttgattagtgagccactagagggagacgaagagaatgaaatgatgctggatcagatggcagatgcaactgagaccattgcagtcactccagaggagaatgaagctatacttcgtcttgaagggatgggctttgaccgggcactcgtcctggaagtgttcttcgcctgcaacaagaacgagcagctggccgccaactacctcttggatcacatgcacgagttcgacaacgatgacgggctcggagggcctccattgtgatgcgatgcgaaggctgtggacagaaaataggaaaacgttttgggatttgtctcgtctgtccgctccgctccccctacatttctttgctgtttagtacataattctagatttacagaaaagacaaagtttactcttttctggatcatatgttttgtgctacttattgctgttctggccgcattgggccagcatgcagttattcacgggttcaacctgacaagcgctggctgcagcagcgaggtgtttgtaggtttcgcggtgattcgtctacccaaatctggaaccgtactgatactgaagaccgtactgatactgaaggcattatccggcgtaaactgttaattcaaacattattacacgaatgcataaggctgagcacggcttttgggcttgaactcgttagactgccaccaaatagcaaatcatgcatatggtcgcatgaatcaacggtttgtactgtatactttttacacagtggacttttggactattcgtacagtaaagtttaaaattcgcactatagattgtacttttcatgtagtggaaattttggactatttatacagtacattttgaaatgggaatgagtaagctggagtatagccttatacggcctgtttggtttgtg

SEQ ID NO: 65844 - DNA, 4806 bp, Zea Mays
caccttccgcgccgagctgcatccatccccacgatccgccgcagggcgccgcaacgccctcgccgcctccggtggccactgacgtgtcaccccactcccttcttcgtcaccccatctccctttcccgccacttctccgcgccatttcccttgcccactcgcctcctacctactaataatcccctccagccagcaattctcccgcaaaaaaagacaaaaccctaaacccgcggagccggggtggagagcagccattccttcgctcccctccgcaatggcgtcgcgccgagccagcaacggccgctctcccctcgtgcggaaacagagtcagatcaccgcctttttctcctcccctaccccctctccgtccccctcgggcccgagccccggcgcatccaagccctctccatcgccgctgaaccctagtgcgaggacgaggtccccacttgccgcggtatccccctcctctcccaagctgccacagccgcagcagaaacagaaggaggtaaagaaggttaaggaggagcatgatgccgccttggtgcctgcgcccgcggccgcggaggtggtggggaggtgtttgcgggtgtactggccgctggacgacgcgtggtacaagggcaaggtggaggcctacgacgcggcctcccgcaggcaccgcgtgaagtatgacgacggcgacgaggaggaggtcgatctcaggaaggagaagttcgagtgggccgccgtcgttgaggagtcgaccttgctgccggcgaggaagctgcggcgtctccggcggatgtctgatatctcggtggcaaaatcaccggctgaggcagaggatggcgcaggggattccactgaggacgaggactggaagagggatactgttgtggaggatgcttctgaggaggtggagctggatgaggaagacgaggaggaagttgttgcagtgcgatcacgaaagagaaatccaaagaattccttgatgtcaggttcaacaccatcgacattgggttctggtttgacatcagaatcggagccaagaatttcgaagaggaggaaaaacgtggatgtggcctcattggattttgctaaaaggttcaccttcgaagcagttaataccaatagaaaagttgacccagaagtgccaatgagctgtggccagaaggggcaaactacggggaatgactacactgctcctactggggatgcagctgagcgctttgggcagcgggatgctgagaagtttaaattccttggagaagggcgcaaagacgcaaaaggcagacgtcctggaaacccgggctttgatccgagaacacttttattgccacctcagttcttgaagaatttgacaggagggcagaggcaatggtgggaattcaaatcacagcacatggataaggttctgtttttcaagatgggcaaattctacgaactatttgagatggatgcacatgttggagcaaaggatcttgatcttcagtacatgaagggtgaacagccccactgtggattcccagagaagaatttatcagtgaatttggagaagttagctgagaagggttatcgagttctggttgtcgagcaaactgaaacacctgaccagcttgaacttcggcgtaaggagatgggtataaaggacaaggttgtcagacgtgaaatatgtgcagtagtcacaaaaggaacactaatagaaggagagcacctactggcaaacccagatccttcatacctcctgtccgtgactgaaagttaccaacgaagtccaaataagagccaagacacatgtaccattggtgttagcatagttgatgtttctacaagcaaatttattgtaggacagttccaagatgatccagagcgccatggattgtgttcaattttgtctgaaatgaggcctgtggaaattataaagcctagtaaaatgctgagtccagaaactgagaaggcattaaacaacaacacaaggaagcctttaataaatgagctggttccgtccacagaattctgggacgcagaaaagactattgatgagataaaacagtactacagctcagccaataaacagaaaaaagccgatgatatacaagactgtgtggactgtctgcctaacttattacgcgagttaattggagcaggtgataaaacatatgcactttcagctctaggaggttccttattttatttaaggcaaacccttctggatgagaaaatacttccatgtgctgagtttgagccacttgcatgctcggggttcatcaacaatatccgaaaacatatgatacttgatacagcagcattggagaatctagaacttttggaaaatacaagaactggtggcctctcagggaccctgtatgcacaactgaatcattgtgttactggatttggaaagagattgctcaaacggtggatcgcaaagccattgtatgatcgcagagaaatacttcggcgtcaaagtgctgttgctactttcaagtgatgaaaacaagagaagttcatcagttgttctttatgaagatgcatcaaagaaaactgcttcaacagtttacttctgcgctttgtggatgccagcagatgttccatgcatgttcttctattagtacattgatatgctcagagggatctcaacttattgatttgctgtcaccaggcaaaggcctatcaaatatttcatctattttagaccgattcagagatgcatttgattggtcagaagcagaccgcaatggtcggatcattccttctgaaggttgtgatcctgaatatgatgccacttgcaatgcaatagaagagatcaaatccagtctaaaagagtacttgaaggagcaacgaaagcttttgagacctgcatcggttaattatgttaatgttggaaaagatatgtacctaattgaagtgcctgagagtttgggaggttcagttcccagaaactatgagttgcagtctacaaaaaagggtttctatcggtactggacgccagaactgaaagagctaatattagaactttcaaaggctgagtcagagaaagaatcaaaattgaaagccattcttcagaatctgattcagctatttgttgagcatcacactgagtggaggcagctggtttctgttgttgctgagcttgatgtattgacaagtcttgctattgcaagtggttattttgagggaccaagttgctgtccaactataaaagaatcaaatggcacagacgatactcctactttccatgctagaaatcttggacatcccattctacgaagtgattccttaggcaagggttcatttgtaccgaatgacgttaagataggtggtccagggaatgccagttttattgttcttactggtccaaatatgggtggtaaatcaactctcttgcgccaagtttgtcttaccattatactggctcagattggagcagatgttcctgcagaaaaacttgagctttctcttgttgaccgtatcttcgttcgaatgggagcaagggatcatattatggctggccaaagtacattcttggtggagctcgaggagactgcctcagtgctttcatcagctaccaagaattctcttgtggtgttagatgagcttggacggggtacatcaacttctgatggacaagctatcgcggcttcagttctggaatatctagttcatcaggtgcagtgtctaggcttgttttctacacactatcataggttagcaatggaacacaacgataccaaggtatcgctgtgccatatggcgtgcgaggtggtcgagggagtaggaggtctggaagaagtgactttcctttatagattaacacctggtgcttgccctaaaagttatggtgtaaatgttgctcgattggcaggaattcctactaaattgcttcaaagagcgaatgaaaagtcgagtgaatttgaggccaattacgggaagcgacacaagatgaccaacgataagcacgtcagtgcacagagcgatgataagttttctgccataagggatctgtttcgaattgtgaagacatggcctcgtcctgaagatcaggaagcgagtataagcatgctccgtaaattgcagaagcgtgccaaggtataggctgtggaaggctaggtaggcgattgttacatagcatgctcgcctggtagagatggcctcgttttgctaccttggtggcattttttttgttggattggcgtcataccgagaggggagaaaattacgtggacacgggttccaatcgaggacagcattgccctaggtttagtgtggaagcagaaaaaggctcagtcccatcggatgtgtcaggattcattgatgggacgtggattgagaattctgcgtctacagctttactatcccttccaacaattttgtgccctcactaattctcctaccaggccaggagccccaaggtattggtctgtcctggtttgttcgagctcggtagggtgttggatcagtgctgacctgagacgtggagaaacatcccggactgtaactttcctgaagggttaattatgattactatatgtaaatcagaactactctctcgaagttgcaaggcaacttaggattaattttagtgcctttttgtattctgaaaagttcgagcttgtatttagtcgagatttgagctgtaatccaaaacaaaataggccccactccaacgttttatagccttatcgtagaacgatacaggacacgtggacatgaatcttactacggttattcccatctgggttagtttgtgaacttaaatcctttgggatctcctggggtgaggaattttaggagatactatttaaataagatatttaattatttatga

SEQ ID NO: 65845 - DNA, 4740 bp, Zea Mays
atccgccgcagggcgccgcaacgccctcgccgcctccggtggccactgacgtgtcaccccactcccttcttcgtcaccccatctccctttcccgccacttctccgcgccatttcccttgcccactcgcctcctacctactaataatcccctccagccagcaattctcccgcaaaaaaagacaaaaccctaaacccgcggagccggggtggagagcagccattccttcgctcccctccgcaatggcgtcgcgccgagccagcaacggccgctctcccctcgtgcggaaacagagtcagatcaccgcctttttctcctcccctaccccctctccgtccccctcgggcccgagccccggcgcatccaagccctctccatcgccgctgaaccctagtgcgaggacgaggtccccacttgccgcggtatccccctcctctcccaagctgccacagccgcagcagaaacagaaggaggtaaagaaggttaaggaggagcatgatgccgccttggtgcctgcgcccgcggccgcggaggtggtggggaggtgtttgcgggtgtactggccgctggacgacgcgtggtacaagggcaaggtggaggcctacgacgcggcctcccgcaggcaccgcgtgaagtatgacgacggcgacgaggaggaggtcgatctcaggaaggagaagttcgagtgggccgccgtcgttgaggagtcgaccttgctgccggcgaggaagctgcggcgtctccggcggatgtctgatatctcggtggcaaaatcaccggctgaggcagaggatggcgcaggggattccactgaggacgaggactggaagagggatactgttgtggaggatgcttctgaggaggtggagctggatgaggaagacgaggaggaagttgttgcagtgcgatcacgaaagagaaatccaaagaattccttgatgtcaggttcaacaccatcgacattgggttctggtttgacatcagaatcggagccaagaatttcgaagaggaggaaaaacgtggatgtggcctcattggattttgctaaaaggttcaccttcgaagcagttaataccaatagaaaagttgacccagaagtgccaatgagctgtggccagaaggggcaaactacggggaatgactacactgctcctactggggatgcagctgagcgctttgggcagcgggatgctgagaagtttaaattccttggagaagggcgcaaagacgcaaaaggcagacgtcctggaaacccgggctttgatccgagaacacttttattgccacctcagttcttgaagaatttgacaggagggcagaggcaatggtgggaattcaaatcacagcacatggataaggttctgtttttcaagatgggcaaattctacgaactatttgagatggatgcacatgttggagcaaaggatcttgatcttcagtacatgaagggtgaacagccccactgtggattcccagagaagaatttatcagtgaatttggagaagttagctgagaagggttatcgagttctggttgtcgagcaaactgaaacacctgaccagcttgaacttcggcgtaaggagatgggtataaaggacaaggttgtcagacgtgaaatatgtgcagtagtcacaaaaggaacactaatagaaggagagcacctactggcaaacccagatccttcatacctcctgtccgtgactgaaagttaccaacgaagtccaaataagagccaagacacatgtaccattggtgttagcatagttgatgtttctacaagcaaatttattgtaggacagttccaagatgatccagagcgccatggattgtgttcaattttgtctgaaatgaggcctgtggaaattataaagcctagtaaaatgctgagtccagaaactgagaaggcattaaacaacaacacaaggaagcctttaataaatgagctggttccgtccacagaattctgggacgcagaaaagactattgatgagataaaacagtactacagctcagccaataaacagaaaaaagccgatgatatacaagactgtgtggactgtctgcctaacttattacgcgagttaattggagcaggtgataaaacatatgcactttcagctctaggaggttccttattttatttaaggcaaacccttctggatgagaaaatacttccatgtgctgagtttgagccacttgcatgctcggggttcatcaacaatatccgaaaacatatgatacttgatacagcagcattggagaatctagaacttttggaaaatacaagaactggtggcctctcagggaccctgtatgcacaactgaatcattgtgttactggatttggaaagagattgctcaaacggtggatcgcaaagccattgtatgatcgcagagaaatacttcggcgtcaaagtgctgttgctactttcaagtgatgaaaacaagagaagttcatcagttgttctttatgaagatgcatcaaagaaaactgcttcaacagtttacttctgcgctttgtggatgccagcagatgttccatgcatgttcttctattagtacattgatatgctcagagggatctcaacttattgatttgctgtcaccaggcaaaggcctatcaaatatttcatctattttagaccgattcagagatgcatttgattggtcagaagcagaccgcaatggtcggatcattccttctgaaggttgtgatcctgaatatgatgccacttgcaatgcaatagaagagatcaaatccagtctaaaagagtacttgaaggagcaacgaaagcttttgagacctgcatcggttaattatgttaatgttggaaaagatatgtacctaattgaagtgcctgagagtttgggaggttcagttcccagaaactatgagttgcagtctacaaaaaagagcttgatgtattgacaagtcttgctattgcaagtggttattttgagggaccaagttgctgtccaactataaaagaatcaaatggcacagacgatactcctactttccatgctagaaatcttggacatcccattctacgaagtgattccttaggcaagggttcatttgtaccgaatgacgttaagataggtggtccagggaatgccagttttattgttcttactggtccaaatatgggtggtaaatcaactctcttgcgccaagtttgtcttaccattatactggctcagattggagcagatgttcctgcagaaaaacttgagctttctcttgttgaccgtatcttcgttcgaatgggagcaagggatcatattatggctggccaaagtacattcttggtggagctcgaggagactgcctcagtgctttcatcagctaccaagaattctcttgtggtgttagatgagcttggacggggtacatcaacttctgatggacaagctatcgcggcttcagttctggaatatctagttcatcaggtgcagtgtctaggcttgttttctacacactatcataggttagcaatggaacacaacgataccaaggtatcgctgtgccatatggcgtgcgaggtggtcgagggagtaggaggtctggaagaagtgactttcctttatagattaacacctggtgcttgccctaaaagttatggtgtaaatgttgctcgattggcaggtaattctcaagctaatgcacttgtttcttaatgtcttctgctctgaattcaaatgctctttttcctcgggccgtgttatgttgacacataataccatgcccatttgctgtcttcgctcttgatactcaggaattcctactaaattgcttcaaagagcgaatgaaaagtcgagtgaatttgaggccaattacgggaagcgacacaagatgaccaacgataagcacgtcagtgcacagagcgatgataagttttctgccataagggatctgtttcgaattgtgaagacatggcctcgtcctgaagatcaggaagcgagtataagcatgctccgtaaattgcagaagcgtgccaaggtataggctgtggaaggctaggtaggcgattgttacatagcatgctcgcctggtagagatggcctcgttttgctaccttggtggcattttttttgttggattggcgtcataccgagaggggagaaaattacgtggacacgggttccaatcgaggacagcattgccctaggtttagtgtggaagcagaaaaaggctcagtcccatcggatgtgtcaggattcattgatgggacgtggattgagaattctgcgtctacagctttactatcccttccaacaattttgtgccctcactaattctcctaccaggccaggagccccaaggtattggtctgtcctggtttgttcgagctcggtagggtgttggatcagtgctgacctgagacgtggagaaacatcccggactgtaactttcctgaagggttaattatgattactatatgtaaatcagaactactctctcgaagttgcaaggcaacttaggattaattttagtgcctttttgtattctgaaaagttcgagcttgtatttagtcgagatttgagctgtaatccaaaacaaaataggccccactccaacgttttatagccttatcgtagaacgatacaggacacgtggacatgaatcttactacggttattcccatctgggttagtttgtgaacttaaatcctttgggatctcctggggtgaggaattttaggagatactatttaaataagatatttaattatttatga

SEQ ID NO: 65846 - DNA, 4696 bp, Zea Mays
gtcaccccactcccttcttcgtcaccccatctccctttcccgccacttctccgcgccatttcccttgcccactcgcctcctacctactaataatcccctccagccagcaattctcccgcaaaaaaagacaaaaccctaaacccgcggagccggggtggagagcagccattccttcgctcccctccgcaatggcgtcgcgccgagccagcaacggccgctctcccctcgtgcggaaacagagtcagatcaccgcctttttctcctcccctaccccctctccgtccccctcgggcccgagccccggcgcatccaagccctctccatcgccgctgaaccctagtgcgaggacgaggtccccacttgccgcggtatccccctcctctcccaagctgccacagccgcagcagaaacagaaggaggtaaagaaggttaaggaggagcatgatgccgccttggtgcctgcgcccgcggccgcggaggtggtggggaggtgtttgcgggtgtactggccgctggacgacgcgtggtacaagggcaaggtggaggcctacgacgcggcctcccgcaggcaccgcgtgaagtatgacgacggcgacgaggaggaggtcgatctcaggaaggagaagttcgagtgggccgccgtcgttgaggagtcgaccttgctgccggcgaggaagctgcggcgtctccggcggatgtctgatatctcggtggcaaaatcaccggctgaggcagaggatggcgcaggggattccactgaggacgaggactggaagagggatactgttgtggaggatgcttctgaggaggtggagctggatgaggaagacgaggaggaagttgttgcagtgcgatcacgaaagagaaatccaaagaattccttgatgtcaggttcaacaccatcgacattgggttctggtttgacatcagaatcggagccaagaatttcgaagaggaggaaaaacgtggatgtggcctcattggattttgctaaaaggttcaccttcgaagcagttaataccaatagaaaagttgacccagaagtgccaatgagctgtggccagaaggggcaaactacggggaatgactacactgctcctactggggatgcagctgagcgctttgggcagcgggatgctgagaagtttaaattccttggagaagggcgcaaagacgcaaaaggcagacgtcctggaaacccgggctttgatccgagaacacttttattgccacctcagttcttgaagaatttgacaggagggcagaggcaatggtgggaattcaaatcacagcacatggataaggttctgtttttcaagatgggcaaattctacgaactatttgagatggatgcacatgttggagcaaaggatcttgatcttcagtacatgaagggtgaacagccccactgtggattcccagagaagaatttatcagtgaatttggagaagttagctgagaagggttatcgagttctggttgtcgagcaaactgaaacacctgaccagcttgaacttcggcgtaaggagatgggtataaaggacaaggttgtcagacgtgaaatatgtgcagtagtcacaaaaggaacactaatagaaggagagcacctactggcaaacccagatccttcatacctcctgtccgtgactgaaagttaccaacgaagtccaaataagagccaagacacatgtaccattggtgttagcatagttgatgtttctacaagcaaatttattgtaggacagttccaagatgatccagagcgccatggattgtgttcaattttgtctgaaatgaggcctgtggaaattataaagcctagtaaaatgctgagtccagaaactgagaaggcattaaacaacaacacaaggaagcctttaataaatgagctggttccgtccacagaattctgggacgcagaaaagactattgatgagataaaacagtactacagctcagccaataaacagaaaaaagccgatgatatacaagactgtgtggactgtctgcctaacttattacgcgagttaattggagcaggtgataaaacatatgcactttcagctctaggaggttccttattttatttaaggcaaacccttctggatgagaaaatacttccatgtgctgagtttgagccacttgcatgctcggggttcatcaacaatatccgaaaacatatgatacttgatacagcagcattggagaatctagaacttttggaaaatacaagaactggtggcctctcagggaccctgtatgcacaactgaatcattgtgttactggatttggaaagagattgctcaaacggtggatcgcaaagccattgtatgatcgcagagaaatacttcggcgtcaaagtgctgttgctactttcaagtgatgaaaacaagagaagttcatcagttgttctttatgaagatgcatcaaagaaaactgcttcaacagtttacttctgcgctttgtggatgccagcagatgttccatgcatgttcttctattagtacattgatatgctcagagggatctcaacttattgatttgctgtcaccaggcaaaggcctatcaaatatttcatctattttagaccgattcagagatgcatttgattggtcagaagcagaccgcaatggtcggatcattccttctgaaggttgtgatcctgaatatgatgccacttgcaatgcaatagaagagatcaaatccagtctaaaagagtacttgaaggagcaacgaaagcttttgagacctgcatcggttaattatgttaatgttggaaaagatatgtacctaattgaagtgcctgagagtttgggaggttcagttcccagaaactatgagttgcagtctacaaaaaagaactgaaagagctaatattagaactttcaaaggctgagtcagagaaagaatcaaaattgaaagccattcttcagaatctgattcagctatttgttgagcatcacactgagtggaggcagctggtttctgttgttgctgagcttgatgtattgacaagtcttgctattgcaagtggttattttgagggaccaagttgctgtccaactataaaagaatcaaatggcacagacgatactcctactttccatgctagaaatcttggacatcccattctacgaagtgattccttaggcaagggttcatttgtaccgaatgacgttaagataggtggtccagggaatgccagttttattgttcttactggtccaaatatgggtggtaaatcaactctcttgcgccaagtttgtcttaccattatactggctcagattggagcagatgttcctgcagaaaaacttgagctttctcttgttgaccgtatcttcgttcgaatgggagcaagggatcatattatggctggccaaagtacattcttggtggagctcgaggagactgcctcagtgctttcatcagctaccaagaattctcttgtggtgttagatgagcttggacggggtacatcaacttctgatggacaagctatcgcggcttcagttctggaatatctagttcatcaggtgcagtgtctaggcttgttttctacacactatcataggttagcaatggaacacaacgataccaaggtatcgctgtgccatatggcgtgcgaggtggtcgagggagtaggaggtctggaagaagtgactttcctttatagattaacacctggtgcttgccctaaaagttatggtgtaaatgttgctcgattggcaggaattcctactaaattgcttcaaagagcgaatgaaaagtcgagtgaatttgaggccaattacgggaagcgacacaagatgaccaacgataagcacgtcagtgcacagagcgatgataagttttctgccataagggatctgtttcgaattgtgaagacatggcctcgtcctgaagatcaggaagcgagtataagcatgctccgtaaattgcagaagcgtgccaaggtataggctgtggaaggctaggtaggcgattgttacatagcatgctcgcctggtagagatggcctcgttttgctaccttggtggcattttttttgttggattggcgtcataccgagaggggagaaaattacgtggacacgggttccaatcgaggacagcattgccctaggtttagtgtggaagcagaaaaaggctcagtcccatcggatgtgtcaggattcattgatgggacgtggattgagaattctgcgtctacagctttactatcccttccaacaattttgtgccctcactaattctcctaccaggccaggagccccaaggtattggtctgtcctggtttgttcgagctcggtagggtgttggatcagtgctgacctgagacgtggagaaacatcccggactgtaactttcctgaagggttaattatgattactatatgtaaatcagaactactctctcgaagttgcaaggcaacttaggattaattttagtgcctttttgtattctgaaaagttcgagcttgtatttagtcgagatttgagctgtaatccaaaacaaaataggccccactccaacgttttatagccttatcgtagaacgatacaggacacgtggacatgaatcttactacggttattcccatctgggttagtttgtgaacttaaatcctttgggatctcctggggtgaggaattttaggagatactatttaaataagatatttaattatttatga

SEQ ID NO: 65847 - DNA, 3286 bp, Zea Mays
cccgccacttctccgcgccatttcccttgcccactcgcctcctacctactaataatcccctccagccagcaattctcccgcaaaaaaagacaaaaccctaaacccgcggagccggggtggagagcagccattccttcgctcccctccgcaatggcgtcgcgccgagccagcaacggccgctctcccctcgtgcggaaacagagtcagatcaccgcctttttctcctcccctaccccctctccgtccccctcgggcccgagccccggcgcatccaagccctctccatcgccgctgaaccctagtgcgaggacgaggtccccacttgccgcggtatccccctcctctcccaagctgccacagccgcagcagaaacagaaggaggtaaagaaggttaaggaggagcatgatgccgccttggtgcctgcgcccgcggccgcggaggtggtggggaggtgtttgcgggtgtactggccgctggacgacgcgtggtacaagggcaaggtggaggcctacgacgcggcctcccgcaggcaccgcgtgaagtatgacgacggcgacgaggaggaggtcgatctcaggaaggagaagttcgagtgggccgccgtcgttgaggagtcgaccttgctgccggcgaggaagctgcggcgtctccggcggatgtctgatatctcggtggcaaaatcaccggctgaggcagaggatggcgcaggggattccactgaggacgaggactggaagagggatactgttgtggaggatgcttctgaggaggtggagctggatgaggaagacgaggaggaagttgttgcagtgcgatcacgaaagagaaatccaaagaattccttgatgtcaggttcaacaccatcgacattgggttctggtttgacatcagaatcggagccaagaatttcgaagaggaggaaaaacgtggatgtggcctcattggattttgctaaaaggttcaccttcgaagcagttaataccaatagaaaagttgacccagaagtgccaatgagctgtggccagaaggggcaaactacggggaatgactacactgctcctactggggatgcagctgagcgctttgggcagcgggatgctgagaagtttaaattccttggagaagggcgcaaagacgcaaaaggcagacgtcctggaaacccgggctttgatccgagaacacttttattgccacctcagttcttgaagaatttgacaggagggcagaggcaatggtgggaattcaaatcacagcacatggataaggttctgtttttcaagatgggcaaattctacgaactatttgagatggatgcacatgttggagcaaaggatcttgatcttcagtacatgaagggtgaacagccccactgtggattcccagagaagaatttatcagtgaatttggagaagttagctgagaagggttatcgagttctggttgtcgagcaaactgaaacacctgaccagcttgaacttcggcgtaaggagatgggtataaaggacaaggttgtcagacgtgaaatatgtgcagtagtcacaaaaggaacactaatagaaggagagcacctactggcaaacccagatccttcatacctcctgtccgtgactgaaagttaccaacgaagtccaaataagagccaagacacatgtaccattggtgttagcatagttgatgtttctacaagcaaatttattgtaggacagttccaagatgatccagagcgccatggattgtgttcaattttgtctgaaatgaggcctgtggaaattataaagcctagtaaaatgctgagtccagaaactgagaaggcattaaacaacaacacaaggaagcctttaataaatgagctggttccgtccacagaattctgggacgcagaaaagactattgatgagataaaacagtactacagctcagccaataaacagaaaaaagccgatgatatacaagactgtgtggactgtctgcctaacttattacgcgagttaattggagcaggtgataaaacatatgcactttcagctctaggaggttccttattttatttaaggcaaacccttctggatgagaaaatacttccatgtgctgagtttgagccacttgcatgctcggggttcatcaacaatatccgaaaacatatgatacttgatacagcagcattggagaatctagaacttttggaaaatacaagaactggtggcctctcagggaccctgtatgcacaactgaatcattgtgttactggatttggaaagagattgctcaaacggtggatcgcaaagccattgtatgatcgcagagaaatacttcggcgtcaaagtgctgttgctactttcaagggagttggccaagattgtgctgcacagttccgtaaggatttgtctaggctccctgacatggaacgcctgcttgcacgtctttttctcaagctgtgatgaaaacaagagaagttcatcagttgttctttatgaagatgcatcaaagaaaactgcttcaacagtttacttctgcgctttgtggatgccagcagatgttccatgcatgttcttctattagtacattgatatgctcagagggatctcaacttattgatttgctgtcaccaggcaaaggcctatcaaatatttcatctattttagaccgattcagagatgcatttgattggtcagaagcagaccgcaatggtcggatcattccttctgaaggttgtgatcctgaatatgatgccacttgcaatgcaatagaagagatcaaatccagtctaaaagagtacttgaaggagcaacgaaagcttttgagacctgcatcggttaattatgttaatgttggaaaagatatgtacctaattgaagtgcctgagagtttgggaggttcagttcccagaaactatgagttgcagtctacaaaaaaggtaatcaaaatgtttctccctcttgtatttaagtgtaaataaatacttaaatgtataactgagctactactattgcatacatttgattcgctaatatatatctactacttgttttacaaataatgtgtaccttactacctactactaataacaaaaaaaataaaaaaataaaggcattcttcagaatttgattcagcgatttctttttcaaatagtgtgacctactaccactatcaccaccgtgtaatctagtgtagtctataatgtagttcaaggtgttaatgatgtgtgctgataaacttgaaaaggtacacactaaatacttagttgcaacattattgttctgttgtgcataaactaggtacattatt

SEQ ID NO: 65848 - DNA, 4751 bp, Zea Mays
cccgccacttctccgcgccatttcccttgcccactcgcctcctacctactaataatcccctccagccagcaattctcccgcaaaaaaagacaaaaccctaaacccgcggagccggggtggagagcagccattccttcgctcccctccgcaatggcgtcgcgccgagccagcaacggccgctctcccctcgtgcggaaacagagtcagatcaccgcctttttctcctcccctaccccctctccgtccccctcgggcccgagccccggcgcatccaagccctctccatcgccgctgaaccctagtgcgaggacgaggtccccacttgccgcggtatccccctcctctcccaagctgccacagccgcagcagaaacagaaggaggtaaagaaggttaaggaggagcatgatgccgccttggtgcctgcgcccgcggccgcggaggtggtggggaggtgtttgcgggtgtactggccgctggacgacgcgtggtacaagggcaaggtggaggcctacgacgcggcctcccgcaggcaccgcgtgaagtatgacgacggcgacgaggaggaggtcgatctcaggaaggagaagttcgagtgggccgccgtcgttgaggagtcgaccttgctgccggcgaggaagctgcggcgtctccggcggatgtctgatatctcggtggcaaaatcaccggctgaggcagaggatggcgcaggggattccactgaggacgaggactggaagagggatactgttgtggaggatgcttctgaggaggtggagctggatgaggaagacgaggaggaagttgttgcagtgcgatcacgaaagagaaatccaaagaattccttgatgtcaggttcaacaccatcgacattgggttctggtttgacatcagaatcggagccaagaatttcgaagaggaggaaaaacgtggatgtggcctcattggattttgctaaaaggttcaccttcgaagcagttaataccaatagaaaagttgacccagaagtgccaatgagctgtggccagaaggggcaaactacggggaatgactacactgctcctactggggatgcagctgagcgctttgggcagcgggatgctgagaagtttaaattccttggagaagggcgcaaagacgcaaaaggcagacgtcctggaaacccgggctttgatccgagaacacttttattgccacctcagttcttgaagaatttgacaggagggcagaggcaatggtgggaattcaaatcacagcacatggataaggttctgtttttcaagatgggcaaattctacgaactatttgagatggatgcacatgttggagcaaaggatcttgatcttcagtacatgaagggtgaacagccccactgtggattcccagagaagaatttatcagtgaatttggagaagttagctgagaagggttatcgagttctggttgtcgagcaaactgaaacacctgaccagcttgaacttcggcgtaaggagatgggtataaaggacaaggttgtcagacgtgaaatatgtgcagtagtcacaaaaggaacactaatagaaggagagcacctactggcaaacccagatccttcatacctcctgtccgtgactgaaagttaccaacgaagtccaaataagagccaagacacatgtaccattggtgttagcatagttgatgtttctacaagcaaatttattgtaggacagttccaagatgatccagagcgccatggattgtgttcaattttgtctgaaatgaggcctgtggaaattataaagcctagtaaaatgctgagtccagaaactgagaaggcattaaacaacaacacaaggaagcctttaataaatgagctggttccgtccacagaattctgggacgcagaaaagactattgatgagataaaacagtactacagctcagccaataaacagaaaaaagccgatgatatacaagactgtgtggactgtctgcctaacttattacgcgagttaattggagcaggtgataaaacatatgcactttcagctctaggaggttccttattttatttaaggcaaacccttctggatgagaaaatacttccatgtgctgagtttgagccacttgcatgctcggggttcatcaacaatatccgaaaacatatgatacttgatacagcagcattggagaatctagaacttttggaaaatacaagaactggtggcctctcagggaccctgtatgcacaactgaatcattgtgttactggatttggaaagagattgctcaaacggtggatcgcaaagccattgtatgatcgcagagaaatacttcggcgtcaaagtgctgttgctactttcaagggagttggccaagattgtgctgcacagttccgtaaggatttgtctaggctccctgacatggaacgcctgcttgcacgtctttttctcaagctgtgatgaaaacaagagaagttcatcagttgttctttatgaagatgcatcaaagaaaactgcttcaacagtttacttctgcgctttgtggatgccagcagatgttccatgcatgttcttctattagtacattgatatgctcagagggatctcaacttattgatttgctgtcaccaggcaaaggcctatcaaatatttcatctattttagaccgattcagagatgcatttgattggtcagaagcagaccgcaatggtcggatcattccttctgaaggttgtgatcctgaatatgatgccacttgcaatgcaatagaagagatcaaatccagtctaaaagagtacttgaaggagcaacgaaagcttttgagacctgcatcggttaattatgttaatgttggaaaagatatgtacctaattgaagtgcctgagagtttgggaggttcagttcccagaaactatgagttgcagtctacaaaaaagaactgaaagagctaatattagaactttcaaaggctgagtcagagaaagaatcaaaattgaaagccattcttcagaatctgattcagctatttgttgagcatcacactgagtggaggcagctggtttctgttgttgctgagcttgatgtattgacaagtcttgctattgcaagtggttattttgagggaccaagttgctgtccaactataaaagaatcaaatggcacagacgatactcctactttccatgctagaaatcttggacatcccattctacgaagtgattccttaggcaagggttcatttgtaccgaatgacgttaagataggtggtccagggaatgccagttttattgttcttactggtccaaatatgggtggtaaatcaactctcttgcgccaagtttgtcttaccattatactggctcagattggagcagatgttcctgcagaaaaacttgagctttctcttgttgaccgtatcttcgttcgaatgggagcaagggatcatattatggctggccaaagtacattcttggtggagctcgaggagactgcctcagtgctttcatcagctaccaagaattctcttgtggtgttagatgagcttggacggggtacatcaacttctgatggacaagctatcgcggcttcagttctggaatatctagttcatcaggtgcagtgtctaggcttgttttctacacactatcataggttagcaatggaacacaacgataccaaggtatcgctgtgccatatggcgtgcgaggtggtcgagggagtaggaggtctggaagaagtgactttcctttatagattaacacctggtgcttgccctaaaagttatggtgtaaatgttgctcgattggcaggaattcctactaaattgcttcaaagagcgaatgaaaagtcgagtgaatttgaggccaattacgggaagcgacacaagatgaccaacgataagcacgtcagtgcacagagcgatgataagttttctgccataagggatctgtttcgaattgtgaagacatggcctcgtcctgaagatcaggaagcgagtataagcatgctccgtaaattgcagaagcgtgccaaggtataggctgtggaaggctaggtaggcgattgttacatagcatgctcgcctggtagagatggcctcgttttgctaccttggtggcattttttttgttggattggcgtcataccgagaggggagaaaattacgtggacacgggttccaatcgaggacagcattgccctaggtttagtgtggaagcagaaaaaggctcagtcccatcggatgtgtcaggattcattgatgggacgtggattgagaattctgcgtctacagctttactatcccttccaacaattttgtgccctcactaattctcctaccaggccaggagccccaaggtattggtctgtcctggtttgttcgagctcggtagggtgttggatcagtgctgacctgagacgtggagaaacatcccggactgtaactttcctgaagggttaattatgattactatatgtaaatcagaactactctctcgaagttgcaaggcaacttaggattaattttagtgcctttttgtattctgaaaagttcgagcttgtatttagtcgagatttgagctgtaatccaaaacaaaataggccccactccaacgttttatagccttatcgtagaacgatacaggacacgtggacatgaatcttactacggttattcccatctgggttagtttgtgaacttaaatcctttgggatctcctggggtgaggaattttaggagatactatttaaataagatatttaattatttatga

SEQ ID NO: 65849 - DNA, 4705 bp, Zea Mays
cccgccacttctccgcgccatttcccttgcccactcgcctcctacctactaataatcccctccagccagcaattctcccgcaaaaaaagacaaaaccctaaacccgcggagccggggtggagagcagccattccttcgctcccctccgcaatggcgtcgcgccgagccagcaacggccgctctcccctcgtgcggaaacagagtcagatcaccgcctttttctcctcccctaccccctctccgtccccctcgggcccgagccccggcgcatccaagccctctccatcgccgctgaaccctagtgcgaggacgaggtccccacttgccgcggtatccccctcctctcccaagctgccacagccgcagcagaaacagaaggaggtaaagaaggttaaggaggagcatgatgccgccttggtgcctgcgcccgcggccgcggaggtggtggggaggtgtttgcgggtgtactggccgctggacgacgcgtggtacaagggcaaggtggaggcctacgacgcggcctcccgcaggcaccgcgtgaagtatgacgacggcgacgaggaggaggtcgatctcaggaaggagaagttcgagtgggccgccgtcgttgaggagtcgaccttgctgccggcgaggaagctgcggcgtctccggcggatgtctgatatctcggtggcaaaatcaccggctgaggcagaggatggcgcaggggattccactgaggacgaggactggaagagggatactgttgtggaggatgcttctgaggaggtggagctggatgaggaagacgaggaggaagttgttgcagtgcgatcacgaaagagaaatccaaagaattccttgatgtcaggttcaacaccatcgacattgggttctggtttgacatcagaatcggagccaagaatttcgaagaggaggaaaaacgtggatgtggcctcattggattttgctaaaaggttcaccttcgaagcagttaataccaatagaaaagttgacccagaagtgccaatgagctgtggccagaaggggcaaactacggggaatgactacactgctcctactggggatgcagctgagcgctttgggcagcgggatgctgagaagtttaaattccttggagaagggcgcaaagacgcaaaaggcagacgtcctggaaacccgggctttgatccgagaacacttttattgccacctcagttcttgaagaatttgacaggagggcagaggcaatggtgggaattcaaatcacagcacatggataaggttctgtttttcaagatgggcaaattctacgaactatttgagatggatgcacatgttggagcaaaggatcttgatcttcagtacatgaagggtgaacagccccactgtggattcccagagaagaatttatcagtgaatttggagaagttagctgagaagggttatcgagttctggttgtcgagcaaactgaaacacctgaccagcttgaacttcggcgtaaggagatgggtataaaggacaaggttgtcagacgtgaaatatgtgcagtagtcacaaaaggaacactaatagaaggagagcacctactggcaaacccagatccttcatacctcctgtccgtgactgaaagttaccaacgaagtccaaataagagccaagacacatgtaccattggtgttagcatagttgatgtttctacaagcaaatttattgtaggacagttccaagatgatccagagcgccatggattgtgttcaattttgtctgaaatgaggcctgtggaaattataaagcctagtaaaatgctgagtccagaaactgagaaggcattaaacaacaacacaaggaagcctttaataaatgagctggttccgtccacagaattctgggacgcagaaaagactattgatgagataaaacagtactacagctcagccaataaacagaaaaaagccgatgatatacaagactgtgtggactgtctgcctaacttattacgcgagttaattggagcaggtgataaaacatatgcactttcagctctaggaggttccttattttatttaaggcaaacccttctggatgagaaaatacttccatgtgctgagtttgagccacttgcatgctcggggttcatcaacaatatccgaaaacatatgatacttgatacagcagcattggagaatctagaacttttggaaaatacaagaactggtggcctctcagggaccctgtatgcacaactgaatcattgtgttactggatttggaaagagattgctcaaacggtggatcgcaaagccattgtatgatcgcagagaaatacttcggcgtcaaagtgctgttgctactttcaagggagttggccaagattgtgctgcacagttccgtaaggatttgtctaggctccctgacatggaacgcctgcttgcacgtctttttctcaagctgtgatgaaaacaagagaagttcatcagttgttctttatgaagatgcatcaaagaaaactgcttcaacagtttacttctgcgctttgtggatgccagcagatgttccatgcatgttcttctattagtacattgatatgctcagagggatctcaacttattgatttgctgtcaccaggcaaaggcctatcaaatatttcatctattttagaccgattcagagatgcatttgattggtcagaagcagaccgcaatggtcggatcattccttctgaaggttgtgatcctgaatatgatgccacttgcaatgcaatagaagagatcaaatccagtctaaaagagtacttgaaggagcaacgaaagcttttgagacctgcatcggtagtgctacaccatacttctttttcaagctttgcatgattaatgatttgttagtctctttgccaattaactattattcaacaaccattcaggttaattatgttaatgttggaaaagatatgtacctaattgaagtgcctgagagtttgggaggttcagttcccagaaactatgagttgcagtctacaaaaaagagcttgatgtattgacaagtcttgctattgcaagtggttattttgagggaccaagttgctgtccaactataaaagaatcaaatggcacagacgatactcctactttccatgctagaaatcttggacatcccattctacgaagtgattccttaggcaagggttcatttgtaccgaatgacgttaagataggtggtccagggaatgccagttttattgttcttactggtccaaatatgggtggtaaatcaactctcttgcgccaagtttgtcttaccattatactggctcagattggagcagatgttcctgcagaaaaacttgagctttctcttgttgaccgtatcttcgttcgaatgggagcaagggatcatattatggctggccaaagtacattcttggtggagctcgaggagactgcctcagtgctttcatcagctaccaagaattctcttgtggtgttagatgagcttggacggggtacatcaacttctgatggacaagctatcgcggcttcagttctggaatatctagttcatcaggtgcagtgtctaggcttgttttctacacactatcataggttagcaatggaacacaacgataccaaggtatcgctgtgccatatggcgtgcgaggtggtcgagggagtaggaggtctggaagaagtgactttcctttatagattaacacctggtgcttgccctaaaagttatggtgtaaatgttgctcgattggcaggaattcctactaaattgcttcaaagagcgaatgaaaagtcgagtgaatttgaggccaattacgggaagcgacacaagatgaccaacgataagcacgtcagtgcacagagcgatgataagttttctgccataagggatctgtttcgaattgtgaagacatggcctcgtcctgaagatcaggaagcgagtataagcatgctccgtaaattgcagaagcgtgccaaggtataggctgtggaaggctaggtaggcgattgttacatagcatgctcgcctggtagagatggcctcgttttgctaccttggtggcattttttttgttggattggcgtcataccgagaggggagaaaattacgtggacacgggttccaatcgaggacagcattgccctaggtttagtgtggaagcagaaaaaggctcagtcccatcggatgtgtcaggattcattgatgggacgtggattgagaattctgcgtctacagctttactatcccttccaacaattttgtgccctcactaattctcctaccaggccaggagccccaaggtattggtctgtcctggtttgttcgagctcggtagggtgttggatcagtgctgacctgagacgtggagaaacatcccggactgtaactttcctgaagggttaattatgattactatatgtaaatcagaactactctctcgaagttgcaaggcaacttaggattaattttagtgcctttttgtattctgaaaagttcgagcttgtatttagtcgagatttgagctgtaatccaaaacaaaataggccccactccaacgttttatagccttatcgtagaacgatacaggacacgtggacatgaatcttactacggttattcccatctgggttagtttgtgaacttaaatcctttgggatctcctggggtgaggaattttaggagatactatttaaataagatatttaattatttatga

SEQ ID NO: 65850 - DNA, 1065 bp, Zea Mays
agcagtcgtagaaaaaggatgtgtggaagcggaaagggcactgcatggaagccagcctgcgctgcttgtgccccggaatctgattcccaaaaagcacatagatcgagcccacacgggaatgaatcactcgagtgaagcgtccataaaagatcaggctcacaagttacaagtagtcaagtacggctgcaagcaaagcgaagcacaccaaagcgagcatcaagcagcgcctcgcacgctaatcccttcctttcctctgctggccgcccttaacagcactcggtcctcgctctccctgcggcggcctttttcacactctgcacctcctcccctccggccagtcgaaaccgtcgccgccgccgccgggaggagaagagctccatggactacaggcagcagtcctactgcatgaccctgaggatgaacatcgactgcaacgggtgctaccagaggatcaggagggcgctcctccagatgcgagagctggagaaacacctgatcgacaagaagcacggccgggtcgtagtgtggggcgccttcagcccgcaggacgtggccatcaagatcaggaagcggaccaaccgccgcgtcgagatcctcgacctcagcgaggcctcgccggcagccccagaaggcggccccgacggccacatgtcctgaaggaaccacgtcaccaatacgtactctggagaactgcttgctattctcttcactcttcaccaaggcaggcccgcctcagaggacgtaaccatatgcctgcctggcatcttttaccttcttgtaatttaggaatcctgcatcattttgttctgtaactgtgaaggcttgttgaagtaaccagaaaaaaaatctaggtaccgttctaaaagtccatctgatgcgaccagagaggctatgctcgtttgctttaactttactcaaaacaggaaaaaatgatctgttgaatttcctgtcaattagtattgtccagttaagacataaacaagatctatataggaaccaggaagcagcctctatcattattaatgccccaaagtgtttacacaattcatggtttcttgaatcagg

SEQ ID NO: 65851 - DNA, 1968 bp, Zea Mays
ctcctcgtcacgtggctctggttcgcaatggtggacggcgatggtgacagggaacaccagcaatagccggttgtggcagccgccaccgcgtcacatagcgccgagttggaggggcacatcacatgaatagatccgcgcaatcttgcatcatggcagtgccggcggcctcccgggcatggcgactctccccagtccaccaggcacctcttcgtcctttgggcccgtacgcctccgcttcctcgggcgtgtccgccggccatttggatgccgtcaaaccggttggccgtgtccgggtcatctccgcgctcctcctccaaatggccaaaccctaccttgttgtagctagcctacccctccagacgccattgtcttcctgatcagtctcgcccactacccgtctcatcaggtgtcgatgattgaagcatacctgcgagctaacaaaatgtttgtggacaagcatgagcctgagacggaacgagttttctcttcatatctggagctggaccttagtgaggtggagccttgcgtttcaggccccaaaaggcctcgtgatcgtgtccctttgaaggaaatgaagtcagactggcatgcttgcctggacaacgaagttggtttcaagggctatgcggtgccaaaggaacagcaaggcaaagttgtaaaattcgacttccatggaaggccagctgaaatcaagcatggcagtgttgttcttgcagcaatatgtagctccacaaacacatcaaatcccagcgtcatgattggtgctggccttgtggcaaagaaagcctgtgaattgggccttgaggtgaagccatgggtaaagacaagccttacccctggatctgtggttgctaccgagtacttgaaacatagtggccttcaagattatctgaaccagcaagggttccatgtcgctgcgcatggctgcgccacttgtgtgggcaactctggtgacctagatggatctatatctgttgctatcacagaaaatgatatcgttgctgctacggtgctgtcagccaaccgaaacttcgaggggcgtgtgaaccctcactcaggctaactaccttgcctcaccgcctctggttgttgcctactgttgacattgactttgagaaagagcccattggagttggaaaggttgggaaggaagttttcttgagggacatatggcctttaaaccaagagttgatgaggttgtggagtccagcgtgcagactcacttgttaattcaagaaagtgtacgactccatcatggaactcaaattttggtggttgcactagtgtggagacttgaattcatgtatacacttagttagactcaacgttagcgcaaacagttgatgaccaagttttttaattagtattttagtttggatgtatagtacacttatgtatgagttatttgacaatgcttatttatgagatattgaatgacacttgtctatgttatattaattataatgttattaaatatatgggcatgtgtgtatttctctttcaaattattataccgtggtatctcaaaaattcaaaaatgattataaattgaagaatgtactgtcatgtaagtcatttcatttaaattcccaaaacgtccaatatcagtctcctaaataagatggttcctaaaacgtccaataccagtatcttaaataagatggtttttctgtttaaaacgtctattattataggatattttagacagttcgataaatgctttgtgacttataatgttcgtattctcaaccgttgtttagaataagtgttttaaataaaaacataattcaagacggtttatcagacaaaatgacttaaacaaatatcttttttagacggttataaattaaaaaattgtcttatataatatcttttgagacggtttacaaccatcttaaatgtgagacatcttttgcgactccatcaaatttggacacttcataagcgtcttaataactgaaaattaac

SEQ ID NO: 65852 - DNA, 4634 bp, Zea Mays
ctcgtgtcgtgctgcgcccacggactcccctctgttctgtggaaccgccgggcggaacggaacaacacggcgttgttgaacgcgcagacgcgtactttgccgcgacagagacgggtcttgaacaatagcagcagcaccagctgtcgcttcacccgatgcgctcttggtcttggagccccgtcccgaccccgcacgaaaatcccacccaccgccgcccgtctcccgctcaagccccgcctgccgagctagctagcttccctccagccccgtccgctcgcctggaagctgcctgcgcttgcgcacgtgggcgcgcagtgggagaagaacccacccacctcccgcgtctgcgtacgtttttcacccggccgcctcgggggctcagggctcaggcaggccgataccctccccaatccccaccggcaccgaggcgctggccgacgaggccagcatgaagccgcgggcgttcctggagcgcctggcccgccccttctcctcctcccgccgctcctcctccgaccagtcccgccgcgacagggaggaggaggcggacctcgaggcgatcgcggcgcgggagcagcgcgcgttcaggtacgagaccctggcggcggcgacgcggagcttctccgagaagaaccggctcgggcagggcgggttcggccccgtgtaccggggccgcctggaggacggccgcgacgtcgccgtcaagcgcctgggcgccggctcgcggcagggcgcccgggagttccgcaacgaggccacgctgctgtcccgcgtgcagcaccgcaacgtggtcaacctcatcggctactgcgcccgcggggcggaggacaagctgctggtgtacgagtacgtgcccaacgagagcctcgacaagatcctcttctcctcctcctcctccgcccgctgtgagtcctcttccttccttccttccttctccattgttccctccctctctctctctctcccacgcacgccgtcaatttccactggttgcttcggtccatcgatcgctcaagttcgcgcgattcccgtttcgtgcgatctcacgacggggttgccacttcgttgggaggggattagattcgcagtttgtagtataccaccacaacacagggagaaatgcaattaatccgatccgtttgctgattgaaaacagaggcagccgatgcgtggttggtggcgatatttttttcccctaggggtagccgggtaggcggggtagcgcatcatcaatgcgccaggaaaattaaagtcgcgcatggtaccgttgttgtgttccctacggtctcaggctggctggttgattgatcattgatccgttctacaaaccacacaaaccgatggtatgaatggtcctcgcatccacttccacgcttccacttccctacgacgatagcctgtactcgtcctccgtgcatgcatgcgacgcgtccctcgtctctccaagggtcaattggtcataactcataactaaccagcacccgtatccacgagcattaaaataactaaacatgtgcagttgccagttgggctgtgatcatgacatcatgtagggcccaaagggtcccaccccaccagtcttctgacgtagtccgaaacatgtttgtttttaagaccaagcagtactaatcttttcggtatagttgtagttggctactacttggcgtccgataaacaatcattgtcatcaacttataatctttttggtagggccttgttgaagtttcgtcaccgtccagatgggaaaacagtttttaacgccaaaaatctaagtaatggttgctttaaggccatgaccctgacgagccactggctagcttctctgtatccgttgttttagacttgtgcttctcttatttggttccaaacctccaatggcagtgcgtgtgtttattaaaaaaaagcactgtaggtgcgcactagatttgtttgattttgttggactcggtctatccttccttgtacttaaggatagagtgccgcactagtggtactgctccatgtgcagcgtgtttgactcctctgtgtgtaaccgtgtgcgcgcacgcgctccaccggtcaccggagaccggacgcgctcttttgcttgcacttgcacgcgttccctccaccggtcaccggagaccggacgcacttgcaagcgtctgtccggtctctagccctgactcatgagtgtcgtcatcgtgatgcaagaacgcttgtaggagggagacgacaaaagaggctagtactagattgttttctcactggaacgtgcgtctctctgaagggagcatatctggtgcacatgccatcttggtgcacatgtgcacatattaaatctcagcccaccatctttgatctaacgtcaactgacaattttgcaaagagaccctcccgcagccctccatacgttggaaaccccctcgctcttttccatctcacggactcgattggaatctgaacgtttcatcttctttctcagcctcatcgccgccagccgagctcctcctgccgcagccgtggaactcgttccctggcacagcgtcatggccacgcctccggccgtcggacctggcggaggcttgatggccctactgactgccatggacacacactacggaggccccactgacgcacgcgaagcaggctgtgctggccactgacgcacgcgaagagcctgatgcctgatggcgctattgactgccatgacgcaccctgtagaggccgccctgacgcacgcaatgtgctggccacagcggcacacacctcctctcaatcctgtgttgcaacacgatggagcagcaaagcaggctgtactgatcctgttttcagccatgtagatgacgtccacataccttctcaattaaactactcgtgcaaaatttctgtatcaatcagaattcagaagaaatagtacagcaagaatactgatgagaagaaacaccagataatagaacaaaataagtagcagtcagagaaagtgctggtagttatttgcctgcgtaacttagtgaagatgagcaaaattgtaaaacaaaacagcaggaaattcatattttgaggtggctaattcattgcattctttcccttgcgtggcttaggcatttcttttgctctcttaattcttttactccttccctttgaacgaacttcagttggtggatgaatctcaactgtttttggaatttcacaaccaatgaaactctcatattcttcttgaggagcttgcactgtggtaggcataatttgaccaaaagaagcctctatattcatcatgcttgaaaccaagaaatctatgccttcatctgaaccctttcctctttgaatcaaatcttctagcttgtttcgaaccgacgctatctttttttctcaccatccacaagttcggcgttttatttctgccactgcgatttctggatcgttaattctgatttgtgagacgcacgacggcacgagagaacattgatcctttttttcttacactgtatctgcaattctgcatatgcctctcagcctctgaagctgacgctgcttgccaatgtgacatgtccagccagcagcaacagcgaccggtcacgacgagcggagctgacctggccgcggcggcacgaggttgtggtcggcgtggcgcgtggcctgctctacctccacgaggatgcgcacacgcccatcatccaccgtgacatcaaggccagcaacatcctcctcgacgaccggtgggtgcccaagatcgccgacttcggcatggcccgtctcttcccggaggccggcgatggccactcccgtgttcatacccgtgttgccggcactaacgggtacatggcgcctgagtacctcatgcacggcgacctctccaccaaggccgacgtcttcagcttcggcgtggttgttctcgagatcgtctcaggccgcaagaactccgcctttatcccgcccccggacgccgaggccgacagcctcctggaatacgcatggaggctgtacaagaaaggtcggagcttggagttgcttgaccacgcggtcaagtcgtcggcggtgccggagcaggtcgagctgtgcgttcgcatcgggctgctgtgcgtgcaggctgacccgcggctgcggccggacatgaagcgcgtggtaatcatcctgtccaagaagcagagcacgctcgaggagccgacgcgtccgggggtgcccgggtcgcggtaccggcggaggccccacggcctgcgcggcacgcactactctgctgggtcatcgtccggcaccagcttgccgtctacgtccgcaacatcggacgcgtcagcgtcagcgtcagcgtcggtctccaacgccatgacgacgtcgagcacccacaccatgaggagccaaggcttgccctcgcaccgagaagaacacgagtaggagtaacagggcgagccccaactgtgtacatttgtcaattctttcctgttttcttcagtttggtgttaattccgatcagggtggtgaatgggattgcagagtaggtatagatgtcatgattgttttgctagcttaggatggtgctgaaaattaagctattgacgggtccatcaccgaatctgtggtagactgcaggcaaaaactgtgtatatataaaaacgagaaaaagcaattttttttaacgagaaagaacaaattctaag

SEQ ID NO: 65853 - DNA, 2679 bp, Zea Mays
gccaggtaacatcattcactttggaacttctgaaaagtaactctgaactcaatattattcatatagcttaccacataacttgagaagcatgagtgaagtagccgctagtagaaataccatggaaattgcaacccagaagtactatgaaaagatgaagttgttagtaatagttatatctttagtccgcatataaggcatctagtcatctaaattaaaggcctcaaggaatgcatcattcatattagggatagctattgctggtatccaacataaacatggttatataattttatgttgaatcatgatgtaaacaatataacaacacatcaaatggcacattgtttcaatttgcaaatgtgctatctctaacaagtcatgggttaaaaaaggcttggagaaagaaaagtgtagccttacattcaatggcagagcaatagatagattgattattcccaaagctttgctatctaacaatgtatacatctaaaggagttgggaaaaactgagagggaaggggggtggggcggcatagcccatgctggtctcactgaagcctgtcgatgcttagttgcttacattctcctaaattttgtaattgtattataagatacttgttggaatataaatgacacctcttcctatcggcttaagtttttggattgaactggttagtgcatgcaatgaatatggtatcaaagccagaagcctcaagttcaaatcctattccatgtataaaaaaacttagccggtggtgaaagaccatccccacggtagcctcctagcccttacacgaggatccaccccttatagatcagtctgtctcatgtgcgcataacctggggcatcagcgagtgacctttttttaacccctacctaaaatccgcttccgctggaagtcgaacccatgacctaaccaactcaactagaggtccatttgctattccatgtctaagacctaaggctatctccagcaattcactcatatggtcactcaaaacattgttttacactgtacactgcactttcgcagagtggagtttgaatatggagatggggatgggtaaacagctggagatagcctaagagagcctcaacgtgagagggagtgttggaatataagtgaattatccatctttcctatcagcttaaacttttaagttgaactggttggtgcgtgcaacttaacaatatccattgacacttcaattcttcaagattcaattgctatgtttgaatacaatagccatttcataaatatactctttgaagccagacagcatggtggcactagcattggtaaagattcacgtaactaactagattcaagaaaaaaaaaaggggcagacccagtgccggaggctcccacatgagtgggatctgatgaagggataaatcagagcaagcctaaaaataagacacaaactggtccttataaaacaacaattaaaataatgctaatataagatgaatggttcattagagctccatattccaatccaccaacgccccgtttgaatccttggaattgaatttcattctaataatagtaatttaagcaaagattaatcaagctaatatggttttatgcgaaatatatttgtatactattattagcaatatgtgggagatatttatgtgctatattttattatagaggagtgagccaaacagcgtcttataagttgcaaagtagaaacatattccgttgatacataaaatcatttcacatatttcaccccagaatttgagataggcttatatctaagctttggaaagtggtggaatgtcaaattccaagctaaatatactaccttattaagtaaattcaaattcctccaaaatgaatagatccaaacggctcgtaagagaaacaaactcaatcattagatattagtatatcataatttgtttgttgtgaaagggactctagctgagttggttagctggactgagtagcactcctcagcccctaagtttgactctctgtgaaagcaaattccaggatagggttaaaaacacccccacatttaacccacgccaaagcacaggtctagatctaaggtctggcctcgggcgcgatcgttctcacatagactatgtccgttgtgtatgggtggggcaggggttcgaggattttctcgacctacgtgggaaggtcttctcttaatataatgtctgagggctatcttacccccgcaggacaagttttttttatatatttgtttgctggaactaaaacaggaaaaaactggagataccatcttctgtcatgaagactcccaaataagacttagaactaaatgattctagcatcaactgaagaaaagtttgtccaaaactagtcaaattgtttgaacatgtccaataaagacctccaaaggcattgattcttagtggaatcctaaagtgtggcaataatgtaaggagaggtaaagcagttattcacattactactcatgaatagcatttagatcccctataataataattactgttaatggttactcttatatgattttttatctttcttttctctttttgttggtggctcgtgtttggttccaagtctagcctacctcaatttgcttgggactaaacgtatttgttcttgtactagttgggagaatagattaccacaaaatgaaagttcaagggctacaggcgcaggtcttaaaagtc

SEQ ID NO: 65854 - DNA, 178 bp, Zea Mays
tgatattaggactgtgattaacctgatttgcgaagcaagcaaaataattttaaagaatgcatttccaacattcaaataatgccttatttgaatccttttgacatggtaccttaagcatggaaattacaactaggaccatttaacaacaataagaagaatcgtagcaagtgggattaga

SEQ ID NO: 65855 - DNA, 1520 bp, Zea Mays
atcgaatagtgtattgttaatgcattacgacattgtacaacaatcgttgtacatggttttccaaaaccagtgtcgaaagcttctgcacgaggagcgaaggcacgctacagcggggcaggagaagaacgatgccgatcgggtccccgtggcacacagcgcgcgcacaacaccacgaatctcaaccgcccaaggattgtgagatgctgccgtagccgtcaaaattagaacaatcatctattgcagacgtagatttgctcccgagatttttaggagttatggacgtttcatatatagatagaacagaattgtgtgcgggcctaaagcaattagaggctgtttgtttacatttataatctcctctgttcaaaataagttgtattatataatctggtggtaacctactctgtttaaaataagttatgttatataatatcctataattttataaatttataattcctctgttttactggacggaattttaacgaattaggtttctactaactaaaactatgacttcatagattttccatccaaaaaaagcgtttctactttaaactccacatttctagacattctggtagttcgaccgtgtattttttttgttttggtatctctagaatatgagtgtgtgaagcaggccagtattcctcagatatcaaaaacgatttacaacatttatcatgtgcagttgttcacacgatccaatcaattaactatcagaatgtaatataacatcgtaggaagtataaagtctgtagaaaatgaaacacaaacctatagacgatgaaatttttttgtgagggtcactatgtaaagggaagatgaaaatgtacggcaatactctgcaaatgcctcagatttaagtttttttcacagcggaatcgctacaaagtatatttaacaccatcatcggcaatttgctcgagataatacaccagcctaaacttgtgttaaacagcctaatggtacacttgacaacgatgataaaatgacagaaaaacgaattaatcacattggaaaaagaacagattcaagaccacagtctgcctcagtggtagtgacaatttgtggatcgtcatggaacaattccgataatacgtgcattttttatgcatcatcggcagccaacgaacatgacaagaagcaagaccccgaaagaaagatacacagagaaaggagatttagttttggaaaagctaaagcattagagggacggccattgaaggcgagttttggatttggaaaagctaaagcatcagagagattcccattatagacttggtctatcatgcccggaaaagggttctgatgtccctgtcttgttctcatcacctgcttgcatccaatctcaatccaaatcgacaagaagaaaaacgataaactcaagcaaccaaagatctcagagcataaaagaaagaagagcaaagaccagcccgcagcacgaatagaaggatgcaaacaacatagtggagagtatcgcatggaaggcgcggctgccgtcggcgaggactgtgaga

SEQ ID NO: 65856 - DNA, 1104 bp, Zea Mays
catcgatcggtcttcacacattggacacccggagaaaagaaaacggtaatcattcagttcagaggcaccaaactgatcgagttcacatgcatccatatgcatgcacagagacagagaaacacaagcagtgtagctagctagaggggagcactgcagcctggactggcgacgaattctgttccattttactacgtacattcatgtatcgcttccactttacatagagctgactagattcagacaagattcaatgatgggttctgacgtctcaccaaacaaaacatgcataatactgtggacccactacagttcaaacttcaatcagctaagcacagcagcagctacagctggagtacacagacacagcagcacacaacacgcgcgcccaaaaagggagaagaacacgaccaccagcttcttccgatcctatcctccaattttctcttccaaagctccaatcccaaagaacaagacagttgttgccggtgagatcgactggccggtcagtgcgtcggcggcgaggaggggtcgtccggcgacgggaccatgccgccgtgggtgttggtgttggcagtggggggcccgtagtccgtcgtcgtgtacgccatcatcgcctccggaagcaggcggccgccgccgaggggcgcgcgccgcacctgcaccttccgcgcttccaccagccctgcgctccatcacaacccaacacagcgacggcatcacttatacggaatcggaagagcaggcagcagcgctagctagcctggccgggcgcgcggcggccgcgtcaaccttaccttgcgagcaggagagcacgaggagggccgccaccaggaggagagcgagaagcctctgctgcgccattgcggttgttgggacgatcgaggaggacgaagagtagagtggtggtacccgtgggctttaaatgacgctttcggaggtttcgaaactgccgggtcgcttgcgtacgccagccgggtcagcttcacccgcctaattttacgtgccacaccgccggcaccactgcggctgtcaccttggggccaactgcccaccgctggtccctctgactttccggcccgttttccaggatggatgggccagcgg

SEQ ID NO: 65857 - DNA, 774 bp, Zea Mays
ccaatccaaaggccgaagccgtcctggatcaatcaaccaaaaccctagaaggcccacggccaccgtggcaccgtgccgcctccccaacctcagcgactccggcggtggtcgagtcgagcccgctagaaatctttctgcttcggttctctgcttgcagcgagggcgtcatcctgtgctgaaagggggaggaagctgacgatgaagaggctgttgatcctgcaaaggtgtgagccgatcgtgcggttcagctgctgcagcgtgcgctacggggactgccgtcggaaccatgcagcgagtactggaggccacgcagttgatggatgccgagagttcatcgctgaaggggaggagggcaccagtggtgctctaaagtgcgccgcctgcggttgccaccgcagcttccaccgcagggttcaggtgtatgaggttgcatggggttatggatccgacacgtcgtcgactgagtagagaggggaggtgcaagccacttggagcttggatttgtgcttcctgcagcggcaaacgcccaacaatattggccccccttcttctctgtctccggtgacaagctgaccggtggatgtataggagccttttgtgattgtttgtagctccgtacgccctgatttgacacgtcggaattcttacctaaagtttctttgtctgctatgctacacccgtgtattgtattctgagtgaagtatacatgagatgagagttcaaactatctatgtattctttccacctgaaatttcgtgttggtgggattaattc

SEQ ID NO: 65858 - DNA, 887 bp, Zea Mays
caaccaaaaccctagaaggcccacggccaccgtggcaccgtgccgcctccccaacctcagcgactccggcggtggtcgagtcgagcccgctagaaatctttctgcttcggttctctgcttgcagcgatgatggacagctctttgcaagtctagatgtgtgacctagtacctaagaaagattaatgcattgtggccttgtaccccccactcaagttaggaccagccacaggtcatagcattttgtgccggccttcgaggccttaatgtttctgagggcgtcatcctgtgctgaaagggggaggaagctgacgatgaagaggctgttgatcctgcaaaggtgtgagccgatcgtgcggttcagctgctgcagcgtgcgctacggggactgccgtcggaaccatgcagcgagtactggaggccacgcagttgatggatgccgagagttcatcgctgaaggggaggagggcaccagtggtgctctaaagtgcgccgcctgcggttgccaccgcagcttccaccgcagggttcaggtgtatgaggttgcatggggttatggatccgacacgtcgtcgactgagtagagaggggaggtgcaagccacttggagcttggatttgtgcttcctgcagcggcaaacgcccaacaatattggccccccttcttctctgtctccggtgacaagctgaccggtggatgtataggagccttttgtgattgtttgtagctccgtacgccctgatttgacacgtcggaattcttacctaaagtttctttgtctgctatgctacacccgtgtattgtattctgagtgaagtatacatgagatgagagttcaaactatctatgtattctttccacctgaaatttcgtgttggtgggattaattc

SEQ ID NO: 65859 - DNA, 2562 bp, Zea Mays
aaccccttccttttgctctcccgttgcgcgcttctcctcctcctcctcacacccctctctttctgtcggcggcgactgggcggccgtcgctgccgtcctacgccagctgcccaggtcttcctcgcgcccttcgccggcggcaaccaccgccagggtaagccagccatcagccatggctttgaaggcgagctccagcgacaaccggaccaggagcacggtatccctgtgcatagtgattggcatgtgctgcttcttctacatcctcggggcgtggcagaagagcgggttcggcaagggggacagcatcgcgctggaggtcaccaagcgcaccgactgcaccgtcgtgccgaaccttagcttcgacacccaccattctaaagccagtggcaactctagcagcctggtttctccgtcgaagaagttcaagccgtgccctgatctctacacggactacaccccctgccaagaccagaacagggcgatgaagttccctagggagaacatgaattacagagagcggcattgcccggcgcagaaggagaagctgcactgtttggttccacccccaaaaggctatgtggctccgttcccgtggccgaagagccgggactatgtccctttcgcgaattgcccatataagagcttgacagtcgagaaagccatccagaactgggtccaatatgagggtaatgtattcagattccctggtggagggacgcaattcccgcagggagcagacaagtatattgatcagcttgcatcagtcgttccgatcgccaatggaactgtcaggactgcacttgacactgggtggctagctggggagcttatttgttgaagaggaatgtcttggccatgtcgtttgccccgagagattcacacgaggcacaagtgcagtttgctctggagagaggtgtccctgctgttattggcgtccttggtacaataaaacttccctatccatcgagggcctttgacatggcccattgttccaggtgcttgattccatggggagcaaatgatggaatgtacatgatggaagttgatagggttctaaggcctggtgaactacaagggctggcaacgcacaaagaaggatcttgaggcagagcagaacagaatagaggaaattgctgaccttctatgctgggaaaaagtctcagagaagggcgagatggcgatatggaggaaaagggtgaataccgagtcttgcccttctaggcaagaagaatcagctgtgcagatgtgtgaatcaacaaacccagatgatgtctggtacaagaagatgaaggcctgtgtgacaccccttccagatgtaaaagatgaaaacgacgtagctggaggtgcaatcaaacccttcccagccaggctcaacgcagttcctccaagaatcgctaatggtttggtcccaggcgtttcatcccaggccttccagaaagacaataaaatgtggaagaagcatgtgaagtcttacagcagtgtgaacaagtatctgcttactggtagatacaggaacattatggacatgaatgcacagtacgggggattcgccgcagcaatagagtccccgaaatcttgggtgatgaatgttgtgccgaccatcgcgaagatgcccaccctgggggctgtgtatgagcgaggattgatcggcatatatcatgactggtgtgaggctttctctacttatccaaggacgtatgatcttatccacgctagcggtcttttcaccttgtataaaaccaagtgcagcatggaagatgttctcctggagatggaccgcatcttgaggcccgaaggcgccgtcataatacgggacgacgtagacgtcctgaccaaggtgaacagcctcgctctgggtatgaggtgggacacgaagatggttgatcacgaggatggccccctcgtgcgcgagaagatcttgtatgccgtgaagcaatactgggttggtggtaagcagacggctgtagcttgaagcaagcacgtttcatgaggctctaacatgaggaattctgcaaccaaaccttacccgacaaacaaggattagcttaaatgatcaacccttgtagggcttgttcggttacaacaattcagaagcggattggaggggattaaatccttttctagttaaaaatgactagaagaggatttaaacctcaccaatccccttatggattggtgtaaccgaatatgcccgtagggggtagcactgaagcagccaggataccgtgctcgctggtgatcactgcaaccacataatcttctttggtcgtgtactcttttcaaaaagcttgtatctttggaaatttctttacggtcctcgtacagattcgggtgtaacgtattaagtagactagctttatgtaagcgagaaatacatgttttctttggacaaccccaggtctatttgtgtactcccgaatgatcctgaagaaaagggctccttacggctccactgttgcaacttgaaatatgctggcgccaggcacaacttcgaagccagaatttatttgggtgtccgtgtacctttctgtaagcaagaaaagaagtacagataaaaaaaaa

SEQ ID NO: 65860 - DNA, 2569 bp, Zea Mays
aaccccttccttttgctctcccgttgcgcgcttctcctcctcctcctcacacccctctctttctgtcggcggcgactgggcggccgtcgctgccgtcctacgccagctgcccaggtcttcctcgcgcccttcgccggcggcaaccaccgccagggtaagccagccatcagccatggctttgaaggcgagctccagcgacaaccggaccaggagcacggtatccctgtgcatagtgattggcatgtgctgcttcttctacatcctcggggcgtggcagaagagcgggttcggcaagggggacagcatcgcgctggaggtcaccaagcgcaccgactgcaccgtcgtgccgaaccttagcttcgacacccaccattctaaagccagtggcaactctagcagcctggtttctccgtcgaagaagttcaagccgtgccctgatctctacacggactacaccccctgccaagaccagaacagggcgatgaagttccctagggagaacatgaattacagagagcggcattgcccggcgcagaaggagaagctgcactgtttggttccacccccaaaaggctatgtggctccgttcccgtggccgaagagccgggactatgtccctttcgcgaattgcccatataagagcttgacagtcgagaaagccatccagaactgggtccaatatgagggtaatgtattcagattccctggtggagggacgcaattcccgcagggagcagacaagtatattgatcagcttgcatcagtcgttccgatcgccaatggaactgtcaggactgcacttgacactgggtgcggggtggctagctggggagcttatttgttgaagaggaatgtcttggccatgtcgtttgccccgagagattcacacgaggcacaagtgcagtttgctctggagagaggtgtccctgctgttattggcgtccttggtacaataaaacttccctatccatcgagggcctttgacatggcccattgttccaggtgcttgattccatggggagcaaatgatggaatgtacatgatggaagttgatagggttctaaggcctggtgaactacaagggctggcaacgcacaaagaaggatcttgaggcagagcagaacagaatagaggaaattgctgaccttctatgctgggaaaaagtctcagagaagggcgagatggcgatatggaggaaaagggtgaataccgagtcttgcccttctaggcaagaagaatcagctgtgcagatgtgtgaatcaacaaacccagatgatgtctggtacaagaagatgaaggcctgtgtgacaccccttccagatgtaaaagatgaaaacgacgtagctggaggtgcaatcaaacccttcccagccaggctcaacgcagttcctccaagaatcgctaatggtttggtcccaggcgtttcatcccaggccttccagaaagacaataaaatgtggaagaagcatgtgaagtcttacagcagtgtgaacaagtatctgcttactggtagatacaggaacattatggacatgaatgcacagtacgggggattcgccgcagcaatagagtccccgaaatcttgggtgatgaatgttgtgccgaccatcgcgaagatgcccaccctgggggctgtgtatgagcgaggattgatcggcatatatcatgactggtgtgaggctttctctacttatccaaggacgtatgatcttatccacgctagcggtcttttcaccttgtataaaaccaagtgcagcatggaagatgttctcctggagatggaccgcatcttgaggcccgaaggcgccgtcataatacgggacgacgtagacgtcctgaccaaggtgaacagcctcgctctgggtatgaggtgggacacgaagatggttgatcacgaggatggccccctcgtgcgcgagaagatcttgtatgccgtgaagcaatactgggttggtggtaagcagacggctgtagcttgaagcaagcacgtttcatgaggctctaacatgaggaattctgcaaccaaaccttacccgacaaacaaggattagcttaaatgatcaacccttgtagggcttgttcggttacaacaattcagaagcggattggaggggattaaatccttttctagttaaaaatgactagaagaggatttaaacctcaccaatccccttatggattggtgtaaccgaatatgcccgtagggggtagcactgaagcagccaggataccgtgctcgctggtgatcactgcaaccacataatcttctttggtcgtgtactcttttcaaaaagcttgtatctttggaaatttctttacggtcctcgtacagattcgggtgtaacgtattaagtagactagctttatgtaagcgagaaatacatgttttctttggacaaccccaggtctatttgtgtactcccgaatgatcctgaagaaaagggctccttacggctccactgttgcaacttgaaatatgctggcgccaggcacaacttcgaagccagaatttatttgggtgtccgtgtacctttctgtaagcaagaaaagaagtacagataaaaaaaaa

SEQ ID NO: 65861 - DNA, 2462 bp, Zea Mays
agattatattttggtatctgaaaatttattaggatattttaactattacaagggtatttaaatcactgtccacttctcttcggacagtcagtagatacgtattcctatctgtatctcaacggcccgatgcatgagttagcttagctgtcgtcctgctcgccgcttatgtaagcaaccgtagacccatccccaacatgctggctctctgtgtcccccattcacttcacactctagactctagttcgccccatgagtctggcaggtcaaagaagggaagagacaaccgaaggatcaacggatcaagcgaggtagtcgactccgcgtctaattaaacctgtggtctgcggacgggcggtcgtcggttagagcattgcttccgtgtggtgcggttgatagctcggatcttctgctggccgagttcgtcttggaggagaagagagagagagagagagagagagagcgccgggatcggagccaggaagcatccagcagcgatggcgggcggaggggtggcggcgctgggcgtgaagacggagcgcgcggcgcagtacaaggggcgcatgacgctcgccgtcgccacgacctgcctcgtggccgccgtcgggggcgccatcttcggctacgacatcggcatctccggaggcgtgacatccatggacccattcctggagaaattcttcccggtagtgttccaccggaagaactccggcgggaagaacaactactgtaagtacgacaaccagggactagcggcgttcacatcgtcactctacctcgccggcctcgttgcctccctcgtcgcgtcccccgtgacgaggaactacggccgcaaagctagcattgtctgcggcggcgtgagcttcctcatcggcgcggccctcaacgtggccgccgtgaatctggctatgctcatcctcgggcgcatcatgctcggcgtcggcatcggttttggcaaccaggctgtgccgctgtacctgtcggagatggcgccggcgcacctccgcggcggcctgaacatgatgttccagctcgcgacgacgctgggcatcttcacggcgaacctgatcaactatggcacgcagaacatcaagccgtgggggtggcggctgtcgctgggcctcgcggcggtgccggcgctgctgatgacgttgggcgggctctttcttccggagactcccaacagcctcattgagcgcgggcgcgtggaggagggtcggcgcgtgctggagcgcatccggggcacggccgacgtggacgccgagttcacggacatggtggaggcgagcgagctggccaacaccgtcgagcacccgttccggaacatcctgcagccgcgcaaccggccgcagctggtgatggccgtgtgcatgccggcgttccagatcctgacgggcatcaactccatcctcttctacgcgccggtcctgttccagagcatgggtttcggcgggaacgcgtccctctactcctccgtgctcaccggcgccgtgctcttctcctcgacgctcatctccatcggcatcgtcgaccgcctcggccgccggaagctcctcatcagcggcgggatccagatgatcgtctgccaggtgatcgtggcggtgatcctgggcgtgaagttcggggcggagaagcaactggcgcggagctactcggtcgcggtggtggtggtgatctgcctgttcgttctggcgttcgggtggtcgtggggcccgctgggatggacggtgccgagcgagatcttcccgctggagacgcggtcggcggggcagagcatcacggtggccgtgaacctgctcttcaccttcgccatcgcgcaggcgttcctgtcgctgctgtgcgccttcaagttcggcatcttcctctttttcgcggggtggatcaccgtcatgaccgtgttcgtctacgtcttcctgccggagaccaagggcgtgcccatcgaagagatggtgctgctatggcggaagcactggttctggaagaaggtcatgccggacatgccgctcgaggatggctggggcgcggctgagggtcatgcggcacctgccagcaacaatcacaagggatgactggagtgaagcatgcatggttgcctggttggtttcgtggacactttatataataactgaagaaaacaagacacacactaacatgtaggcggctgcttattcttattgtattttgtataaagcaggctgtgtgatatgcagggataaaaacgaacgagatcgttccaaataacctctcttttgttttcatttttacattttatttgggaaaaaagattgaagaagggactagcgggataacgaaaacgaactaaaatgaacataacaaattaataatagatcaaaatcgaatataaaaagtatgaacatcaccgctttctcttttctaaaaaccaaaaaaatgatcaaaatatctataaatacgaattcgaacgaatcaatgaggaatcggagcga

SEQ ID NO: 65862 - DNA, 2388 bp, Zea Mays
cttcggacagtcagtagatacgtattcctatctgtatctcaacggcccgatgcatgagttagcttagctgtcgtcctgctcgccgcttatgtaagcaaccgtagacccatccccaacatgctggctctctgtgtcccccattcacttcacactctagactctagttcgccccatgagtctggcaggtcaaagaagggaagagacaaccgaaggatcaacggatcaagcgaggtagtcgactccgcgtctaattaaacctgtggtctgcggacgggcggtcgtcggttagagcattgcttccgtgtggtgcggttgatagctcggatcttctgctggccgagttcgtcttggaggagaagagagagagagagagagagagagagcgccgggatcggagccaggaagcatccagcagcgatggcgggcggaggggtggcggcgctgggcgtgaagacggagcgcgcggcgcagtacaaggggcgcatgacgctcgccgtcgccacgacctgcctcgtggccgccgtcgggggcgccatcttcggctacgacatcggcatctccgcaggaggcgtgacatccatggacccattcctggagaaattcttcccggtagtgttccaccggaagaactccggcgggaagaacaactactgtaagtacgacaaccagggactagcggcgttcacatcgtcactctacctcgccggcctcgttgcctccctcgtcgcgtcccccgtgacgaggaactacggccgcaaagctagcattgtctgcggcggcgtgagcttcctcatcggcgcggccctcaacgtggccgccgtgaatctggctatgctcatcctcgggcgcatcatgctcggcgtcggcatcggttttggcaaccaggctgtgccgctgtacctgtcggagatggcgccggcgcacctccgcggcggcctgaacatgatgttccagctcgcgacgacgctgggcatcttcacggcgaacctgatcaactatggcacgcagaacatcaagccgtgggggtggcggctgtcgctgggcctcgcggcggtgccggcgctgctgatgacgttgggcgggctctttcttccggagactcccaacagcctcattgagcgcgggcgcgtggaggagggtcggcgcgtgctggagcgcatccggggcacggccgacgtggacgccgagttcacggacatggtggaggcgagcgagctggccaacaccgtcgagcacccgttccggaacatcctgcagccgcgcaaccggccgcagctggtgatggccgtgtgcatgccggcgttccagatcctgacgggcatcaactccatcctcttctacgcgccggtcctgttccagagcatgggtttcggcgggaacgcgtccctctactcctccgtgctcaccggcgccgtgctcttctcctcgacgctcatctccatcggcatcgtcgaccgcctcggccgccggaagctcctcatcagcggcgggatccagatgatcgtctgccaggtgatcgtggcggtgatcctgggcgtgaagttcggggcggagaagcaactggcgcggagctactcggtcgcggtggtggtggtgatctgcctgttcgttctggcgttcgggtggtcgtggggcccgctgggatggacggtgccgagcgagatcttcccgctggagacgcggtcggcggggcagagcatcacggtggccgtgaacctgctcttcaccttcgccatcgcgcaggcgttcctgtcgctgctgtgcgccttcaagttcggcatcttcctctttttcgcggggtggatcaccgtcatgaccgtgttcgtctacgtcttcctgccggagaccaagggcgtgcccatcgaagagatggtgctgctatggcggaagcactggttctggaagaaggtcatgccggacatgccgctcgaggatggctggggcgcggctgagggtcatgcggcacctgccagcaacaatcacaagggatgactggagtgaagcatgcatggttgcctggttggtttcgtggacactttatataataactgaagaaaacaagacacacactaacatgtaggcggctgcttattcttattgtattttgtataaagcaggctgtgtgatatgcagggataaaaacgaacgagatcgttccaaataacctctcttttgttttcatttttacattttatttgggaaaaaagattgaagaagggactagcgggataacgaaaacgaactaaaatgaacataacaaattaataatagatcaaaatcgaatataaaaagtatgaacatcaccgctttctcttttctaaaaaccaaaaaaatgatcaaaatatctataaatacgaattcgaacgaatcaatgaggaatcggagcga

SEQ ID NO: 65863 - DNA, 5729 bp, Zea Mays
catacatgtgcatcatgcatctcatgaggtacgataaataatcgcgtgaagcggaagatgatccaagtcgaccccaagcgtgggctaatccacaggatgatgctgatggacgaacaggaagatggataatttgaacgagtgccaagccaaaggatgctcgccaagtggtcgccacttaacaacactaacctagtgtttattccaggcaagccccggtgcatgcaaccccttccttgtgtttttaaataatctttgacactttaagtctagtgaaatgtgcactaggtttataggagttgcttggaaaccctttgatgcactgcctaccttgatatccatacctttatagatacttctaatgaagtatcaaatatgatttacaaaatttcttagccttgcttagaggtaaatcttgtggatagaggttgtcctttgcgttaatgcctagctctggggttatccctgaggaaggatggcttctgcttgcaagaatattttcattaggagcaatggtgggatcttactgcaaagttacctttgatgctcttttcatcctaaggaatacaaacaatcctaaggatggaagtacttaaatcaggacttgggctaggaacaggtgatgttctacccaggttgattaaggattggatgcgtatgtaggcctgttgaccgaggaccctttaactagtcacatgcctcatcatgggtaagctttgcctcggacagactaataccagaataagataacgcgcaataagagtggagagatggtgagagtagcgtgtaccctccgtggcaagaggctggacagtggtgtatctgtgctctcggttggcatgaacctgatctggtcttaagaaccccggtggtgagttgacatatgcaagggttaagtgctacatatgtcgtgtgattggagatcctcacctgagtataatcgattcagatcgtcgtaacttcacggacatgaagacttggtcactgacctgcaaccgaagtcaggatgtgaacctcatgaataaaaatgatgttgtattgatgagatggtgaaattagaccagatgcaaacatagtctattaatatttaatctggcgttaaaatattgaaagtaaggactcactttagtaagctatttctgcaaaagtatctaatttgattcttgctaaaacttttccttgattcccaaatccagcatacccttagcttgagagtcttttctttagttgggtaagtcttgctgagtaattttgtactcagggttttattccctgttgtttttcaggtcatagttttgtgctgctgatgatggtgttaagtgccggtgggctcaaccttcttataaatctaagtaactcccttatacttcttactgaggatggtcacttgagctagcatatatttcaaacttatacttttgtaatcactctgataaatatagtgtaaaatttttgtaacttgtaaaatttggtaataagatttccgctgcaaactattggtgtctgtgatttgtgttacttaatcttgcgattttggttgtaagtggtttatccggggtccttgggacactaggacggatcctgttaagttatttggtgcacatgcatagccgtctgaggtctttgagacaagaacaggtgtgtgtgggcccaataacttgggaggttctgccacagctggtatcggagcaggattaagtatatacggtcacatacgtattttcaaaacaaaagttttggtttcgaaaaacctattttcaactaaacacattgtttggctttgaaaaacagttttgaaaaaccataatgctagcgacatcctctgttaagccctaaattaaggactatcaggtggcttagttgaaaactataacccataatcgggtgggtattgaatacatgtgtattgttattttaaggccattcagttttgaatggatcgacgctcaggtaaggtgagatgtgagagcatgaccgaacaatcgttggtctagggaagagtatagaaagcgcttgattatatacatgttccacatatgtatatatgaaggctacgatgtggagtatttactttttcgggaattcaataccccatggatgtgtacgggtatacatacatggaaatactgagaaatgtaatgtacttgtaacgacgcacctacgctcaggtaagaaggtgagttaccataatgagtttccctatggttaaagtgtggcaatggcgcctatgcgtggctcgacgcttaatgatgagctggcctccatatagaaatatatagagtataaactgtgataaactgtcatgtgtgaattgcatcattggaaattgggccgtgatggatttttctgcaggtacactaaccccgaaacgtatttgtagctgacgactagcaaaataccgtgagagtcgtaagtatgccaccgagatagaacgttattgccacattatgttggcaaactcagtgaggacgaataggacgagcatgcatcctgattgttgcatcatgtttgtcacctatacacccaaaatgcttctctcatctttattccagtagccgatgattgtagataatgtggtgtaatgcttgtattatgaacttcagtgaaatagttattctctgtttccttaggtaatatgcttagaggttatatgtgtttgctctggtacttgatgtgccgatagacggttggtaatttgtttgcctaaacccaaaactaggccatattcttatttaatgaactatgacccaaatttgaattttccatcatcactccatgacccaactcatgcaaataaatgcttagataacttcttcgttggacataaagtgtacccggaattgaaacaagaatctcaagtcatgtttccttctaaaaccattcccttgtttgatttgtgcaagctgatgtctctattccagtttgcctgttcttgaagatcactgtgttttatcaacctaatttaggaaagacatgtccgatcattttcttgagtttagtgcctttgattttctcatatctattgaaggcataccaacttaaccttgtgattgtttttcctccgtatctaatcagatactaatccttgaccttgtgatctctgcgatgggcgtagaaatattcttgggctaaagtaacagtctcccatcatactcctttcatcaagtttaggttatggccatgccttgttcatttcatcgggccataatctatttggctctctacttgtaaccgttttgacaagtagagtctctttgtatattatcacccttgctcaatccatttgtgttacgtgagatttcttattggttacgtctggtaatggtgttatgactaaaaccgatggtgccacgacgagacggagggcctcctgtgaatgtacgcacatggttgtgctgctcggcacgcgctggtatcatggttagtagttgtaatctatcatgagactatatcaatgtgttgtcttagcacaatctgtttttgctatgtgagattcattattagtgccagttttgtaatggtgtcacgattaaggacttatggtgccgcaacgaaactaagagccccttgtgaatgtacacgcaaggttatgctggttggcgcatgcgggtatcgaagtctctagtcatgatccattatggaattacactaatgtgttatcttttgtggaccttcccttgaaacaaattctatgttgtttgtcaagtgaccaagcaacaactattatctctattggatcaaaaggggcataccactttcatgtgtggtctcttttcttttgatcttggtagtgactactcatacaagttccctttgcatccttgttgtaaaggtgaagccttggagctttttagtgtcgagagacagctaattagttctcaaaatggagattggatttcccctgctgctgaggtgcaggagtttattcattcgctctcttatttaatctgtgcatttctgaacaaagtcggttcatctcgcatgaagaaacggatgaacaaccagaccaaatggatttttacccaaacgcatgaccttttgatagcaaatgggaactctcaacccttggcttaccgatggtactgagagaacatgcccaatgtcaaaagtacttcaacaagttggttttactaacttgtaactgcctagtgaacaaaggttgagtttagagatcgttttgtcgagttgtctaaactcactttggttcaacccaccctaaagaaagtacttacaaaaatcaaattaagtcggctagtaaccacctaatcatcactctagtcatgcctcaatcgcctcatgtgtgtcttcccagcataggtgatcaagtcgagccatgattagtactggataaaacgaattggttgcaaagtccgcatctacagatcccttcgcgggtgattttctcgaatctataccatcttttgtagacttgaattcttgggttaaccacatgttaaccgcgacaatattcgacatccacatccgtctcatgtgctgcgaactcactgtaaccacttgttggtaaacctctttctgtgtgttttacccaagatggtgcatctgattctgtttgggtaaaatcgtgtattagtcgctcgctcaacagactcagatagtacagtgtcatcagaaaaagcaaactgtacacatggaaccttatgtgttcttctggtagacatcgtctctattggtggacatttcttgattagtctaaggcaatacatgttatgtccgctagagaaaccacattctgagacactcgcctttgctcaggactgtctcacgattatcgctgatacggacatgggttacatgctgctctactcttagaagtctttcgttctgaatctcgggatgagattcttttaagaggggagggctgtaacacaccaggtgtttatattccgctcgacaacgagtacggatttaagcacgtaatcagtgaataaaacggatgttaaattttaaacatcttcgtctatcgcgatttcaatatcgcatttgttccgtctgtcgcgagttcggcatcggttgtatctatctgggctcttcccaaatttttgcgatgttcggaacagcgtggttccaaaaatcggtgcgtccggtgactatttaaaattcatcgctcgcgcgaatacgaaattcggaaactcaacccactttgatgattttgttccgagcaaattagtttaaactcgacgactaaaatgttctgggcaaaataaatcaaatcgcgcaaaatcgtgtgcgaggttatgaccccatttgttctttagcccactctgtacgataataaaatcaactgtgttttggatatcggataaatttttatccgattttgactaacccagtgttgtctcaaataatgtatccgatatttagtccggtttcgcgttgcccaaaatagtctcgaaaactatctaaacgaaatgtagtcgaaaccgtaaacctcggatttttccgtttcgtaactcggtaaatgcgctacttggggtaggctgtttaaatagaccaaaatcagaacaattgctagccaactcagtttcttatttcaaaagccgagaagttaatatacatagttgtatagtgcgtcaagcttttaatccctaaaaacccctattcaaaaatatcggtgattttgcggttaaagaaaagaagaaataaataaaaaaagggaaatatcctctcccagcttatctccgcgccgcccctcccctcagattatttttttc

SEQ ID NO: 65864 - DNA, 1529 bp, Zea Mays
catacatgtgcatcatgcatctcatgaggtacgataaataatcgcgtgaagcggaagatgatccaagtcgaccccaagcgtgggctaatccacaggatgatgctgatggacgaacaggaagatggataatttgaacgagtgccaagccaaaggatgctcgccaagtggtcgccacttaacaacactaacctagtgtttattccaggcaagccccggtgcatgcaaccccttccttgtgtttttaaataatctttgacactttaagtctagtgaaatgtgcactaggtttataggagttgcttggaaaccctttgatgcactgcctaccttgatatccatacctttatagatacttctaatgaagtatcaaatatgatttacaaaatttcttagccttgcttagaggtaaatcttgtggatagaggttgtcctttgcgttaatgcctagctctggggttatccctgaggaaggatggcttctgcttgcaagaatattttcattaggagcaatggtgggatcttactgcaaagttacctttgatgctcttttcatcctaaggaatacaaacaatcctaaggatggaagtacttaaatcaggacttgggctaggaacaggtgatgttctacccaggttgattaaggattggatgcgtatgtaggcctgttgaccgaggaccctttaactagtcacatgcctcatcatgggtaagctttgcctcggacagactaataccagaataagataacgcgcaataagagtggagagatggtgagagtagcgtgtaccctccgtggcaagaggctggacagtggtgtatctgtgctctcggttggcatgaacctgatctggtcttaagaaccccggtggtgagttgacatatgcaagggttaagtgctacatatgtcgtgtgattggagatcctcacctgagtataatcgattcagatcgtcgtaacttcacggacatgaagacttggtcactgacctgcaaccgaagtcaggatgtgaacctcatgaataaaaatgatgttgtattgatgagatggtgaaattagaccagatgcaaacatagtctattaatatttaatctggcgttaaaatattgaaagtaaggactcactttagtaagctatttctgcaaaagtatctaatttgattcttgctaaaacttttccttgattcccaaatccagcatacccttagcttgagagtcttttctttagttgggtaagtcttgctgagtaattttgtactcagggttttattccctgttgtttttcaggtcatagttttgtgctgctgatgatggtgttaagtgccggtgggctcaaccttcttataaatctaagtatgataaataatcgcgtgaagcagaagatgatccaagtcgaccccaagcgtgggctaatccacaggatgatgctgatggacaaacaggaagatggataatttgaacgagtgccaaaccaaaggatgctcgccaagtggtcgccacttaacaacactaacctagtgtttattccaggca

SEQ ID NO: 65865 - DNA, 934 bp, Zea Mays
gaaaccacgttttagcgttctaatttctaaactataaaacacgatgtttcatgcgttttagaccattagctacttttgggcccagtttgttagttacttttggggtccaatccggctcatgggtgatgttttggtaagccactaacctcttttttttggtacttaacttcatgttattgtctaaaattatgatatattggtatttttcctatgttgtttaaaactacgcttaaactttgtttaaacatttaaaagtcaaaacttcacccatgagcatttcaacgttttatcgttttaataaccttgctcaccatacccatgtacagaaagtgcggagccaaaagctcgatacaaagagtagcggcgtcgggcagagaaacgtgtggcgtgggcgcggcttcccacagcacggtcgtgtagagggcgtcgagggaggcaggggatccgatatcatgttagtgggactgaaaccctaaccctaaccagagttagaagatgtatttataataggtgtagttagggcctaagcccattacacaaatacaacacattacaatagacattacacagtagctctaacaattaacattgtttattggtgcaagggtcccgaactttataatagtaatgatacctcagaacacatactagaacaattgtatattaagtagcatatggttcagagctatcttccagagctatcttccagaaaacaacctacctagtgaccatgcatattgtacaaaagatagcatgcatggtgctcagtaaactcaccaaaaacatataaaaataactattgtgagtacaaatttgacaccgcatctatgctattaacaagttaacatgtgttgttccattcatcaacagaacgggtagacctagtttcggaggctcctgcataagtgtggtctgtgatggaacaagtcttgag

SEQ ID NO: 65866 - DNA, 435 bp, Zea Mays
gtataccttaaggttttgctgtctccagaacttactgtttgcactgtgttcttgaggaatatcggccgatacagaggttcgcagggaggtcggatggcgtgcccaggtagccggatgggttcacttgcgtgcacagacagccggcggtgggctcagggcatctggcgttgggcgcgcaagctagcagggttaggcggaggcgcgggcgcacgcaagccagtcggcggcggccacacgcagggttaggaacagggtgcacacagggtaaggctgcggcgcgcgcaggccagcgggcggcgtagcctatcagcgaagacggcggctggagaacgcaggaagtggagagaagaacggcgggggctcagtgagatcggcccacgagcgagatggaagccacctcgccggctgtgtgggtgacggaagctagggtttacg

SEQ ID NO: 65867 - DNA, 3467 bp, Zea Mays
cttctctgtcccagcgcctacttcctttgcttctccctcacggcgctcctgctccatctccggcgctcctccagctcgcccatggtgtcgcgcgcgctgctcccctgcaatcttcagccttcccgcacgccctcctgctccctagccgtcatgccatgccggccggagctcgctcggctacagtctcatcctggctcggctcacttctccctcaaggtccctcgcgctcgccgtgctctggtcggagggtgatttgctgcgcgcccatctaattctgctcggaccacgccctgtcatcctccatggctgcgcgcgcgagttcgacggtcctccctaccccgagcttgtccctatggcgctcggaccatgcccctcaagctccagctcaatcgcgacctagccgagctctctctccctcgtcttcttcccctacagcgcgctccttacttgcggcagtcggcctccatctcgttctccgccttgtcgtggccgcgcctagccccagttctgttggtcgcttcttccctacgcaagccgaccccatgccgctacgcacctatctttcttcctctctgctcggcggatcgcacagctcctgcgcgtgcacagccgagcggcttcccgcgcgcgctgctccctgcccgtttctctgctcgtcggcgtgctcttcctgctgccgcgcccggtctttgtctctgtcgcgctgatttgcgctcgtccgtggccatcgaacccgcctagctccttgctcgccatggccctagtcgtctcatcactgtgcgcaacggaagcgtggtgggtattggtcgcgggcatggttgggcgacgcgagatctgggaacaccgtcgtttcattatgcccagcatcgtgccttttgtgctagtcgtcgatttattattcaccacaacaccgtcatcccctgctgtgccccggatgtcatgctcgctgtggtcggctcaggtggtcgacatcgtcgactgtcaattccgtcaatagccacgttcattcgttattgttcagtactccacgagaaagaaatctatggaaatctgggtaaagaaaaagtgaaccccatctgtcgcttccatggtgtgctgagaaatgctcccaccagacatcgtcgtcaatctcacgaattcagatcgggtttaggtacgcttattaatcatgagatgtggaggacaagagtcaagtcggccccaagcgcgggctactccgcatggtgatgctgatggacaaacctgcctgatcaagtgctaggacaaggatgatcgtcaagtggatgtcatctaacaacactaacctagtgttatccaggcaagcctcggtgcatttgccccttccttgtgttttaaatgctttatcacctgatatgatgcattaggttgataggagttatgtgataaacaattgatgccttaccattccttggaaacttcttaatccctattttataaaaagaactgataatgcttagcccttcttagaaactgaaaaagcatttgttttcaaaaagaatgattgtggaacattggttatgggctttttgattcaaaaatcaaagcaaactaaggtgatgactccacttcggccggagtgggctcatcattggaaaagagtacccctgtcgggtaccaaaaataggaaaatggtttgaataaatctagactaggcgctgagccgacagagtcgcccgtttgcgtcaattaaggatcgtatcgattgttggcctgctgatctaggaccctttaactggtcacatacctcatcatgggtaagcttaaacccgactattccatacatgaaaagacaatcgcgcactgggagtggagagatggcgagagtggcacataccctcctggcaacggaccacataaaaggggtggtgtgctctcaggtagcgcagaccagttcatgtagtggaggatccgtgggaatggttgacatatgcaagggttaagtgctacatatgtcgtgtggttggagatccccagctgggtattaatcgattcagattgccgtacttctcggatatgaagactggatcactgccctgcatcgtagtttaataagtgaaacatgattgtggtttggttaaaaggaagctagtgtaggacaagtgaatgctctatatttaggcaaatctagattcaggaaaaagtacttaacttgtgaagtaaaagtttggcataaggatatactagtgtaggatcccaaggccgctcataaccgtgagcacggctgatataccagtttctaacactctacagaggttgcacactttatcgaaaagccatgattcccattctgcccggggttctagcctcccccattgatcactaccaaggtgacccagcagggtctcactatgtagcctttacaaagatttcccagaggtcatagccgcccgttaggtttctccagtttgataaacacagtacatctccccaaaggaaggtgactaacaaaaccaagttaaagaacctctgcaaccagcctcggcagagcaagtactgtgcctggaccccattgacggccctacgacgaagccaactactcatctgattcctctaattactcagctaagggcgtcccattccaccctcatggttgcactgttatcccgagttgtcactccccaaataggtccttacggagaggtactctggaaacagcctgagccccctaaagtaaacacaagaacctcatcgggataacatcatcatatcataaataatcacatcatgttcattgattaagttaaagcaatagcataagctaaccatgattaacccaaaaggtaaacaagggtaaggtaaatacagactagtcaatccttaagtttcaataatgtaatgcacaacagtgaattataaagtaaagtaggacatgataggtctgaggacacttgccttcaccaggttgttgctcagagggatcttcggcaacacactcaagaactacgagttgctcgttgtctaaataaagcgagcatacattcaatacatttggaaagtaaaaatgaatatcacatcaaacatgtacaaacattggaatcacaactcaaaagaggtagtactaaataaggagaataagattaagttataaaatggactaatcttaattggggattgattactctctatgtgttggaacatagctcaaaaagtaaagtagtgattaaacaaagaaaagattaaattctaagatgaactactctcatctaggaatttaatgatcctttaagtgttatccataattacataacctaattctattcatttcattaagacctaaaggttaaaccaaaaataaattcatgtaatgcatatcactaatctcacaatattaaatatactttaactccgaggattctccttttatttatttcattaaataaataaatcaacatatgctttaatcctatattctaagtgtaaaattaaagtgtatagactacagttgg

SEQ ID NO: 65868 - DNA, 7814 bp, Zea Mays
ggatttgaaaattaaaaatgagaaatagaaatgaataaaaaaaggaaaacaatttttctcctgttgggcctattcccttagccggcccaccctagcaccaccgcgtggcccatcgtccaccgcgagcctttcatgcgtcgacaggcgggccccctgtactagcctcaccctccccatggcatgcatcttcagctcgttgacaggtgggaccatcttgtcatctctatcccctccgcggtaacatactccgtgtaacagaacccgcacgcgcgacggagcgcacggtggacttcgcgcgagatccgtggccctcctctacttggaatccgcggcgtagaccctataaaacctggccccgtcctctgtttctccgctgcatttaatcaccgtcgccaagaacaccgagagagagagagggagatggagaatggagttggtgttgccgctaccacactccaggcaattcactgccaccttgcacctgctgtgggggcgccggtgatcgcacgggtcaccgggaacctggatgcagcggagatagtcgcgtggggagcctcgggctgtgatgaatctctcaccggagtacggattctcggtcatggccgcagtttatcgtggcctggctactcgacacatcatgggacagtaattcacctcctatcgttttcgccctggtaccttctgcatgcggcactttattatgcacgaatccacgtaccgggcgccgggttgggctagtctggcatcgcctccaccgtagggagttggcggcaccgctgtcgggctaggtaggcggtaggcgtgcaccgtggaccattgattgtgagatcgatgactgtggttagatcccatgataacctttcgactaaggaaatggtgtccactagatcgtcgacagaggggtagtaatggacctgtgttcataaaatcgtaactattggatctatatccaacactctagaatagattatgtctgagcgtgatctgcggccgtccaaatctaatccaacggccagcatgcgcagatacccttcggtggccgattttctaaagtcccccggaaaaggagtaaacaacccgcagtctagctcggctaaggttgagcctgtgatattttgcgagttaaaccccgatcttctctgtattagtgcgcccagtctaggagttaaagaaagcaggaaaaagagatttagaaattgattttgagtataaatataattgtaaaacttgtataattcatagaaaactaggtgagtgttcgtgcgttgcaacggaaacatataatagttaagtgctcgtacgctgcgacgcagctagttgcaaatcggggctttccgacgtaaatgttgctactttattcgttgtttgacaacaaatgttttcgttttggatcgcacaagcttggataaaaaatagttagctattttttagcaagcataggcccataaatagagagaccacggtttcgtgagcaaaaatataataaattacaataatttttggacaataaacctcgtggacagcaactttgataacacttctctaattttgggttaaatagttattgccatattatgcataaccagtcttattcggagactttttttaggagttgcaaaatcaggtggtctattctcgatggattagcgtaaccatggttatcatgaaaatgctttatacagtaccatcaattgccgaactatcatctagatgcaatgcaaccaccatgcatctaccagtttaccactgtcaacacatagtagttgtaaagccaaggatctttggcaaaaattcaatcatgagtatcatacaagcatttttaggtggaggggaatgggtgtaaaaaacaaaagtgttggtacctttacatgtacatgtatcataggctgcacattttccctcattccagttgcttgcatcttctgtttctattctttacatcgtctggcttattgacgtggaatgctccacctacagatcacataacatggcaaacttctcggagattagaatgtcaaagagagagttgtagcacattgccttgttggcttctaaagatgaagatgtttccatctttaacttaagaagcaatgataatgcagaaaatggaaaggatgcaaactattggtgaactgctcaactactacaacatattcaatttagtgctccatgaaacgattaaaataaaactgaccttctagaaagtgaaagaaactatgatgaattccttttgatgacttgaccacccacgacatcaatctaaaataaaacacggcacaaacattagcatgttaacaaatccaacaagtgtctaagaaaacactgctttacataggattgaatttgtgcattgtgaataacatggaacgcagcaaaagcaatgcataggattgaagaatacatactttatgatgctatatagtgatgccaggaataacgaccttctcctgacatcaataacatggactagattttcattaccacttaaccagcagcatggccaagctccacttccaaaccaacagttaccttctagtcatcaacatctgcccttagtagccagccaaatattcctagagttggtgggcctttatatccttccaagcatctgcctggtgggtcattctctgctgagactaataacatgggttttatgaactcacctgctcaaatgcatcaaggtagagcaggtacaaactaccagcaaaagtaagttaatggtcatgcagttccaaattttcacacccgggctttaagggacaatgccgggtgcctctcatacatgcgccaaagaagacaacatatataataacagagtgtatagagaaaatgtcacaataacatcagagtatttattacatagcggaagtcttacaaaataaaagataaatataaaacaaactaaggatcgtccatggcgcaataaagtcaactgggagacaccacctcgatcagatcaaactcctcattgtgtggctcctcttgaaccacctgttcttctcctgtgaggtgtgtgagacagcaagggtgagctcacacatgatcatagctcaacaagttgtggggaaaccagtgtgcatgaactcaccaaacgtgggagtccatgtgaagtgtaaggctgatcaacaataggggttaaagctgagcattgcttttaataagttggtcaaattttattagcagttacaaatgtaagtgaataccaaaccacaataaaaataatacaacaaaattaataaataatcccatgcaatgcaaatgacaaattgaatttaagttccataaattaatcatacgagagtccttagccgctcatgaccgtgagctcagctagtataccagttttacacactgtagaggttataccctgtacccacaagtcatgttacccatctgccaagggatcacgactcccatacacctctaccaaggaagcgaggcatggcaacactacgaggcctttacaaagttccactagcttccgaaaacccgctacagtttatgggaagagcacttgccagaatcccccgtcggaccgccatcgcagcaaaatcaacccgagaacctccttgcatgcaacttccctactgcccttgcccctttcaggtaaggtagtcttccactagctttcctaattagtcagccaagggcgtcccattaaacccttatggtggcacgtgtttctcaatttaagctccatgttccaattaacattaatgatcttgacatgaacataaataaaataacagaataactggaacatggatataacgaaatattaacccaaaaccatataaagcaatagcaaaactacccaagtgattcaggggttgtaggggacttgttctcaaatgctatgaattaagaataaggcaacacaaaatgttaactgttaatgcccttcgtccttcaaagcattatttcccttaagatataatgatcttcagacgaaggtcatgaaggacataccttcgtaaattgcgatatatgttaataaaagaagaagcatatgaaatataagagacaacaaaaacaatcatataacattattaactcattctcattatattaccatggaaggacagaaacaatattgaattacaaatgtacctttcggcttgatagaaggtaaaagtacaagcgtgacgcacaagtgagtacaagtcagcgtgaacagtatgggggtactgttcatctatttataggcacaggacgcagcctgtgagaaattacattcatgcccttcatatttactatagacttttagacaacccaatggggactagatagccttttcccctttaagtcggttcctttttccgccatttagccgaagctctcttatccgtagctttggggcaacaccaaccttcgtcatgaccatgatcttcacgttgtatatgctttcaacctgagtccgaaggtacctgttcatatgtcacacttggaagacattgttaaatcatgtttttgaggaccttcgtaagacgaaggcccccaacagtagcccctcgtagtattaatttgttaagataacgaattcagactgtgacatggacaaaggccttaagccaaaggtctgaaaaaacaccttccctttgctagaatagcaacagtcaatgacggacgggaccccccaatttggagcacgctgagcgtataaataagaactcacaccagctatatttgatacgctgcttgtgccatttgctttattttctcaattttatagctcttgctcaccagcgcttgctagtttttcaagctctctgagcttcgggttaaaagacacattttcatcatttcggaagaagaaatgtctcaagacaagaaggttgctgctgagacgaagctgactgaagaggagaaggtttttgaggagaaggtttttgaggagaagaagactatggattcttatgttgctggatttgtcgagtcgatggcaaaaacaaatacggagaagattactaaagaaatactggagggctcgtccgaagatactggtgacagcgatagctatgatgtagaaagtggggacaaagattctgaggatcggccctggaggccaagtcattcaatcttcggaaaatcaaccatcaaacagagtcatcttgagaatatgagaggaaggtactttcagggtatatctattgtgagggttggcggagacaacaacgtccctgcccctgaggagaacgaagttgtaattttccgaagcttcttcaaggctgggcttcgatttcctttgagtaagtttgtagttgaagtgctgaagacctaccaaatctttcttcatgagatcacccccgaagccataataaggatggggatttttgtctaggcaataaggagctaggggttagaaccaagcgcaatgtgcttctgcaatatgaacgaattgctatatgagacgaaggccatgggtaaagaacagtaccacaacaactttggttgttatgggtttatttcccatcccaacgcaagccatccagtaccaacatttcagaagagatggcctggagcttggatggaagagtggttttatgtgaaaaatgatttgaaagcaagagaagatattaaggaagtcattatgtgccctatctggtcctgcttcggcctccgaaggccgaaggttgaaattgatgatgtcgccgaagcgtgccagagtgccttcagtactgtttgctctttcattgggacaagggatttaattcaagaacatatagcctttagggtgtggccgcttgtagaaagctaggaaatgccgaaggaaaccatcactaactctagcgaaggtgatttggtccggctgaagtatacattcaggtttggggataagttcgatgaaccaaacaacgactggctgaaatgtatcaaagctacaagtgatgaactgcttggagcatattccaaggcagaagataatgcgctgtctacagccttcggaggttggggaaaaaagagaatgaacatagtttttgacaccatcggctttgtctaccccgattaccgctacccactgcggggacaggggaagaagagaaaggctgctgcttcagccgccctagttgagcctgtgccgaagggcaaaaagatgaaggttcttacccaccggccgcattacattgaaccggccgtggtgcctgagtttggtggggaggcctcttcagctgctgaaacaaaagtgactgctccgattgtgcagagcactgaagagccggttgtaatgccgaagttaccttcagttaagttggttgagacaaaggctgataaggataaagctgaagggtcgaaagttgaaaaataacaaaaatgctagaacatttgagcccgtcaacagagataacagtgccaaaggcacaaaagggttctgccgcaactcctaagaggagaaggatggcaaatgtgttagatgttgtgctagaaacagcaaaatccttgagtccttctcctttaagaaaaattgtcgaagctttcaaagctctacccgaggctgaaacgaagcaagcagaagtcgaagctgcaaaaattcaagctgaaaccgaagttggcccttcagagcccactaagacagagcctgccgtagctgaagaaaaaacggcagagcaaattgcgtctgaaaaggttgaagctactgctaccgaagcttcaaaagaaagcactgattatgtcatttgtcatgcttcggggaagagactttctcaagaagagaagctagaagcgctacactatgcccaaaatttaaaatacccgaagggggcattagtgtttaatggtagtggggaagaagattttctgtactgtctcccggataataaagagatatccgtctgccgggagataggtagaagcatcggattctcgaagctagaagatggcctttcaatattatcaaaggatgagcttgctgacagtttggcgtataatagcataaaggtataaaagctaattttgtattttgaaaacgaaatattttatttgtttatacttaattctgtcctcctcttgtagggcttaattcttagcaatgcccttagagcatagaaaaacattgaagatgaaggatatacaatggctctgaacaaccttcgttcagaggtaatcgaactaaggaacgaaggtcttgaaaaagtgaaagggaaatgtgcccttgggccatttctaagtattttggtgattgagtgccaacacaattgcttaagtgttaatctatgccaattaatggacaaagtgcaaatcaagagtaaaggtatgtttctaagacttagtacattgttttagagactaaagtattgtgtctaagtgctagaaacaggaaaagaccaatttagaaaagacttggctaagcagccaagactctacgcagtctgggtgcaccggactatccggtggtgcaccggacagtgtccggtgcgccaggctggcgactgtcaactggctgctctcgggaagcgatcaacgacatacggctatatatcaccggactgtccggtggtgcaccggactgtccggtggtgcaccggactgtccggtgagccattcacaggcgaagtcgtcgctctcgggaagcgattaacggcgtacggctataaatcaccggactgtccggtggtgcattggactgtccggtgagccaacggtcggccaggccaacggtcggctgcgtaatccacacacgacgcgtggccgagccaacggtcagatgggggcaccggactgtccggtgtgcaccggacagtgtccggtgtgccaatggctctggatcttcaacggtcggctgcgccacagaaggaaagaaatctgcaccggacagt

SEQ ID NO: 65869 - DNA, 1057 bp, Zea Mays
atcaatgtgggcagcctaaaccctatcttccgtcacccgcacagccgccgaggtggcttccatctcgctcgtgcgtcgatctcactgagcccccgccgttcttctctccacttcctgcgttctccagccgccgtcttcgctgataggctacgccgcctgctggcctgcgcgcgccgcagcctaaccctgtgtgcaccctgttcctaaccctgcgtgtggccgccgccgactggcttgcgtgcgcccgcgcctccgcctaaccctgctagcttgcgcgcccaacgccagaagccagatgccctgagcccaccgccggctgtctgtgcacgcaagtgaacccatccggctacctgggcacgccatccgacctccctgcgaacctctgtatcggccgtattcctcaagaacacagggcaaacaataagttctggagacagcaaaaccttaaggtaacacatcagcaagttcgagactgccaaaaatatgcaaggcagctggctggaaagaaccatcatttgactttgaagaacaaggacctccgcataacagaatattcacatgcaaggtgaccgtccacttggatggactggtcaacaccattatggagtgtttcagcgaccccaaacctaagaagaaagctgcacgggagaacgccgcacaaggggcattatggtgccttgagcgctctggttatgtcaagtcatcttcagatgttcctgacctgtgcggccatcagcccttctgctagccagatctacccttgtaggagtattaatgttggtagacgggtgcagcttgttgctgtggcacagtggttatccatgcactgatgccatgatactcttgagaagttgagtcccttatgaatcttgagccggctgtgttggctcgtgtacctagtctctagctcgtttggttacatgcccaacgcctgcacttgtactgtgtaaatactgaactccggcgatcagtgcaatcaaactggagctcctagtcgagctctgtcttgcaattcgatgtccggccttctcatgttggatgttaaacaggagccacg

SEQ ID NO: 65870 - DNA, 1151 bp, Zea Mays
atcaatgtgggcagcctaaaccctatcttccgtcacccgcacagccgccgaggtggcttccatctcgctcgtgcgtcgatctcactgagcccccgccgttcttctctccacttcctgcgttctccagccgccgtcttcgctgataggctacgccgcctgctggcctgcgcgcgccgcagcctaaccctgtgtgcaccctgttcctaaccctgcgtgtggccgccgccgactggcttgcgtgcgcccgcgcctccgcctaaccctgctagcttgcgcgcccaacgccagaagccagatgccctgagcccaccgccggctgtctgtgcacgcaagtgaacccatccggctacctgggcacgccatccgacctccctgcgaacctctgtatcggccgtattcctcaagaacacagggcaaacaataagttctggagacagcaaaaccttaagggctactctccatttagtggttatggagtctcccaggaagcataaggccagtgccgtgccagtcaaggagaaagtgaagttagaagatggaaatgtaacacatcagcaagttcgagactgccaaaaatatgcaaggcagctggctggaaagaaccatcatttgactttgaagaacaaggacctccgcataacagaatattcacatgcaaggtgaccgtccacttggatggactggtcaacaccattatggagtgtttcagcgaccccaaacctaagaagaaagctgcacgggagaacgccgcacaaggggcattatggtgccttgagcgctctggttatgtcaagtcatcttcagatgttcctgacctgtgcggccatcagcccttctgctagccagatctacccttgtaggagtattaatgttggtagacgggtgcagcttgttgctgtggcacagtggttatccatgcactgatgccatgatactcttgagaagttgagtcccttatgaatcttgagccggctgtgttggctcgtgtacctagtctctagctcgtttggttacatgcccaacgcctgcacttgtactgtgtaaatactgaactccggcgatcagtgcaatcaaactggagctcctagtcgagctctgtcttgcaattcgatgtccggccttctcatgttggatgttaaacaggagccacg

SEQ ID NO: 65871 - DNA, 1335 bp, Zea Mays
atcaatgtgggcagcctaaaccctatcttccgtcacccgcacagccgccgaggtggcttccatctcgctcgtgcgtcgatctcactgagcccccgccgttcttctctccacttcctgcgttctccagccgccgtcttcgctgataggctacgccgcctgctggcctgcgcgcgccgcagcctaaccctgtgtgcaccctgttcctaaccctgcgtgtggccgccgccgactggcttgcgtgcgcccgcgcctccgcctaaccctgctagcttgcgcgcccaacgccagaagccagatgccctgagcccaccgccggctgtctgtgcacgcaagtgaacccatccggctacctgggcacgccatccgacctccctgcgaacctctgtatcggccgtattcctcaagaacacagggcaaacaataagttctggagacagcaaaaccttaagggctactctccatttagtggttatggagtctcccaggaagcataaggccagtgccgtgccagtcaaggagaaagtgaagttagaagatggaaatgatttgttagtcaagcgcagaaagactgaattttcagggtccattgtccaaccagaacgggaaattgaagtctttgacccggagaacaaagtgcctgatggtctcccagttgaatattctactgacaaggatcccatggatgcgctcactagttgtgcagtacagaactttggtcaagcgaaaggtaacacatcagcaagttcgagactgccaaaaatatgcaaggcagctggctggaaagaaccatcatttgactttgaagaacaaggacctccgcataacagaatattcacatgcaaggtgaccgtccacttggatggactggtcaacaccattatggagtgtttcagcgaccccaaacctaagaagaaagctgcacgggagaacgccgcacaaggggcattatggtgccttgagcgctctggttatgtcaagtcatcttcagatgttcctgacctgtgcggccatcagcccttctgctagccagatctacccttgtaggagtattaatgttggtagacgggtgcagcttgttgctgtggcacagtggttatccatgcactgatgccatgatactcttgagaagttgagtcccttatgaatcttgagccggctgtgttggctcgtgtacctagtctctagctcgtttggttacatgcccaacgcctgcacttgtactgtgtaaatactgaactccggcgatcagtgcaatcaaactggagctcctagtcgagctctgtcttgcaattcgatgtccggccttctcatgttggatgttaaacaggagccacg

SEQ ID NO: 65872 - DNA, 768 bp, Zea Mays
cttcttttgaattcactgccacatgcttgagaacgggaaattgaagtctttgacccggagaacaaagtgcctgatggtctcccagttgaatattctactgacaaggatcccatggatgcgctcactagttgtgcagtacagaactttggtcaagcgaaaggtaacacatcagcaagttcgagactgccaaaaatatgcaaggcagctggctggaaagaaccatcatttgactttgaagaacaaggacctccgcataacagaatattcacatgcaaggtgaccgtccacttggatggactggtcaacaccattatggagtgtttcagcgaccccaaacctaagaagaaagctgcacgggagaacgccgcacaaggggcattatggtgccttgagcgctctggttatgtcaagtcatcttcagatgttcctgacctgtgcggccatcagcccttctgctagccagatctacccttgtaggagtattaatgttggtagacgggtgcagcttgttgctgtggcacagtggttatccatgcactgatgccatgatactcttgagaagttgagtcccttatgaatcttgagccggctgtgttggctcgtgtacctagtctctagctcgtttggttacatgcccaacgcctgcacttgtactgtgtaaatactgaactccggcgatcagtgcaatcaaactggagctcctagtcgagctctgtcttgcaattcgatgtccggccttctcatgttggatgttaaacaggagccacg

SEQ ID NO: 65873 - DNA, 1209 bp, Zea Mays
aattctctgcctccgccgccaggacgacggcaaatccgcccagacagggtggacgtcgacgccggcgaatcctgctcggattgcttggtgttcgggcaatccttgttctcgcctcagcacaaatagatcgccaagatgaatagaagttggttgaatggtacattgttttcccctgaatatatcaatggtgtcaaagaatttatgagctttattcaaagaaaattcggtgaggatgaagatattttgtgtccatgtagtagatgtctcaaccaaaagtcctttcatcaagcctttgtggagaagcatatattaatgaatgggatggaaagtacatatactcgatggattcatcatggagagaactttgaggaagatgccggtcattcgatacatgggacaggtgtgattgatgatgacagctatggtgatgattgttttgatgggatgttacaagacctatgcactgcataagagcaagataaagaggatggtgaaaatgaggatggagacaatactaatgatgacaatgagtcattttatagtgtagtgctgaaagaggcgaaacgtcatatttatcctggttgtaccaaattttcaaggttgtcctttgttgtaaagcttcttcatatgaagtcattatataggatcactaactctgcatttactgcaatattaaagttgttggttgaagcattcccaaagtgcaatacactcccaaaatcatataatgaagcaaagagtcttctaaagaaattaggtcttggatatgtatcaagattagagagcaagaagagatgaagaagaagcaagatgccatggatgctaaacttgagcttatgctaagtcagattcaaccaagttaaagctaactagtatggggtgttaggctttgttggtacttctcttttgctgatgctattgcattctattgatggataaatacgtttcaatccattttttgtctgttgtgctgctagagtagctttagcggcatgtgtggtgtgttggagtggcttacgtgtcagtggttggatacttgctgtaatgacatgctattggatacttgcatgtaatgacatgctggagtgtggtcagtattttttgtgatgagatgctggattaaaatctgagttgtgatgtaatagaattcaacattttgtcattatgttctggattataattaatatatatttaaattattgtgtttgc

SEQ ID NO: 65874 - DNA, 335 bp, Zea Mays
cttgttctagcctttcgccgagcacttgggctatcgactaggggattgcttctccacatcttcttgggaggcttttgtcggcgtgaacataagttggagacgacacgcaggaaccggcatcgaggcaagtgaccgaacgacgatgacaagacaaaggaaacaggggcgtgcttgaccaacaactaaaacccgcgaaagaacacaaccacgaagatgcggccagatactcggcaacgtagcgactgcgagctgaagcagagggcagggccgagaacgacgatgatctctgattgacattgcatcgaacacccagagcacgccaaatgagatggacg

SEQ ID NO: 65875 - DNA, 1929 bp, Zea Mays
ccgatggcgacacctgccgcagagaagccggaagatgtagagatccgtgaggtttgggcggacaacctcgagacagagttcgccgtgatccgcgacatcgtcgacgactatccgtatgtggctatggacactgagtttccgggcgttgtgtgtcgtccgctcggcacttacaagtcggcggccgagttcaactacgccactcttaaagctaacgtggacatgctgaagcttattcagctcgggctcaccttgtccgacgagcatggtgggctgccggcgctaggcccagacggtcgtccctgcgtctggcagttcaactttcgaggatttgaccctcggactgatgtggctgcagcggactccatcgatcttctacgccgtagtggtattgacttctctcgccatgctgctgatggagtcgactctcgctgctttgctgaactgctcatgtcctccggcgtagtattgaattcagatgtgcattgggtgacttttcatagcggctacgactttggctacctgctcaagctactcactggcacaaatctccctgatacgctgccaggattcttcgatctcatcaagatttactttcctgttatctacgatataaaacacttgatgaggttctccaatagcctccatggagggctgaacaagcttgctgagctgcttgatgttgcaagggttggaatctgccaccaggcagggtctgattcgcttctgacagcactgtctttcaagaagcttaaagaggcatacttcaacggattaactgagaaatatgctggtgtgttgtatgggcttggctttgagggtgtagagaccacctctgctcactgagtaatggataattaaataaaagatgaactatttatgaaaatggagaaatctgtttggtgtctttgtctgacaatttcctgttgcttgcgctggtgaagatgtcttatatgtatattaatattaagggatttactgtgacaagcattggatatatcctgtttgttgagctagtattacccatataccagacaatcagatttgcacctgagcttccctggacataataatgttacaagttgggtgatctgtgatcttggtgatgccattatcacttgaaactaccaacttgataaaattgtgtaggcagtggaactgggttactagccccctggccttgaagccatattttaattttcgcggaatccatttgaagtacaggggaatcgacttgattagggctagtttggaaacttaaatctcctccgggattccggggattgagtgggaaattaactcattttccgctcaattattgagaatcccggatgggatttaagtttctaaactagccctcgctaatgtttggcttgttctggagtactggaaaacaatggaaagatcagcaatgttactgccaactgccaagcgctatgatatgtactatccagattaccctgtctctgcaattctgcatcaagttattctgaaaccttttgttacgcttgtttcacatgtctatcacatccttcgtaacacttgtgccaacgcttgaagttagccgtgtgtaaaacagcgggcagaatcttgatagcaggttgatttggaatttgcttcgtttgggccgattgtatgtgggatcgacgtctctgtctgctggtcaattgttttccggttggtgttaaaaagggcttctggttacagtgaaaccagtttttttttctgctgccgtgccgacatcaaggcacagtattgtcgtccagcacgatatgttcagcagtgccaagggcgtcgggcccgagggtaggaggaccgcggctccgaaggtcgtagccgccgtccgtgttgccgaccgggttaatgcccccaggaacggcggtcttcgtcaacgggttatgccccctgttgccgagtagagagaggtaggag

SEQ ID NO: 65876 - DNA, 2144 bp, Zea Mays
ccgccacgccttcctccggacgccagtctgcgagcgccgagcgcccgagcgcagccaggtgtcgcccgcccgcccgcctccggcaaatgtgacttgcagacgaaggtcgctgcagtggcccgtgctcgatggtggcaaggtgcgcgcacgccgacgccggcgggttccgcatctggccgatcttctccgccgcctcgctgcggaggaaggtgctagaggttctcgcgtgcggcggcggtggcggtggcggtgacggaggcggttcctgccgtggacggacggcctaccggtcgccacagcggattccgaggccgagaccgcggtcggacaggctcgcggagctgctcagggccgagcagccgtccgagtgcagcgacgaggccggcgcctcgtccgcgctcctggagctcacgctcgtgggcacggcgctcgcgcagaagcgcgcgtccaggatcctggagatcctccgcgccgacaagggcaagcaggtcgcggaagacgcctcgggcgtcgtggcgacggtgtcggcgccgcaggagcgcgggtgccgcggggaggagtcggtggacggggagttcgccgacgccggcatgagcgcggagaagcgcgccgtgcggcagctggttcagcagagcctgcagagcaacatgcgccgcatcgtccgccgcgcgcggctgccgcaggacttggctccggcaccgactgagagcctcaaggcgctcactgcctcctccacctccaagagcctaccgttctaggagatcatgcagaatccatatgccagaagaagaagaaaaaaacgcacagtcgttggctgaaccattgtctcacaaaaggctgctactaaacaacaagtctaatcagccatggaaatttccacttggccctagcaaacaataatatatttcccacgaaccaactaagcacatttttagactttttctcagtttctttaatctttgaccaatgtccaatccaccacagccaacgagtacacgaacttgaagggtctagtagtatttttgtactgtcctaaactacaacatcaggcatttttctggaagaaggttgaagtcttgttcctggcttgggttgtgtcgtcagtcgccactcctttacctcgacctcgagagcgagaccgcggtcattaacagctgctttgttgctttctgggaaagcaagctcgagtccctacagtccattgtcgccccctacccaaaaaagctcgagacaggtcatcatcgcgctcacttttgttagttttatcctgcaagtcacagctgaatagctcatccactgtcattactcctgtaaaccagctctggaatccatggaatagtttatactactactagacatttttctatatcctgctgaactgtactgttgcttttgatggcgggccagacagttaaaaaagaagaagaagaagaaaaactctctctgaatctgtcttggcagcagggaagatgaggccaggagagttgatgaggagactttgctgcgttccgttccgttgctgcatgcgtcggagaccgggaatctttcgggcgccctgaagcggaagcggagtgacgagaagatgggggctaatctaaagcagttgtttaaccgcgctgctcgttgccgcttttttttcttctcgtgcctgctgacggaacccacgtgcgcggaccgacctgttcaagtccaggctctgacagacgagagctggcctcgagatgttctcctaatcgctttcgcatttcttaatcgccttcgactcgttatcttccgcttctgtatatgggaatagctataggatagtaagtagtttgtttagccatactacacctagtggtcagtgtgttcggggcttgctctttgggcacatgttctttcttgttgttgctgaatgtggtagtagggtagtggaaagtcttagaagaactagaaagaggatgcgtgtggacgttttatatatatgtaaactatgatgatggtttcatctttgagtacctgatttcagtgcacgggacagcttcagatttacttcaaaacagtcaaattgtataaaaagttattcaaacgctctagctacaacaaaatggtgaacccgcctctgcccctgcccgtgcttggcaacgacccggctgcgctcgtca

SEQ ID NO: 65877 - DNA, 707 bp, Zea Mays
ctcgtgctctccctccgaggcgtgtgggcatctcatggcccgtgggcatccacggcaagccaccgctgtccgctgcatctgggtcagttcatcggtgtgcgacggggcggcatcagctaacggtgaggcggcgtcggcaagcggtggctccaacaacacggcgcggcaagaagagcgccagcaactccacgtctactcccacttctccgtgagctccaaccgtcagttgcgccaccgtcgtctgcggcaccccagcggagattcccctcgcacctgcaggctgcagcaaccaccaccatcaattgatggtttctggcccagacacagcggcagcagtggagcaggtcactcaccgcaaggaaatcaagctaccaatatgtgatttgttctgtcgacatgtgaggtactgagctatctgaatgtcagccggtggtgttagacttttcatgaattgcagatttgttttgttctgaatatatagatagatagacaattgttagaatgatcctgctgcacacctgtcaatgatgttagttttttcatggagtattgctcaaagtttggagtcagcagtatttaacaacttaaattgtaaacaggatgacactttctaaccaaattctatgtgttagaggatttcttcaaggtcgatttgtaaatttttataaatcaaaatcaatttccggtgctgcccccacctacaggag

SEQ ID NO: 65878 - DNA, 1043 bp, Zea Mays
tcagtatcttaaataaatacatttttacttgttacagctgaacaagataattaaagaaataatcgctagtgtgtgcaaaagatcagaaaccaaaacgctcgaatccagcttgaatgtttggctccttttccccatgcatgacggtgtagcctccgctaatctctcggtgtatggttcgatcggaaggagtcgtagaagtggccagcagtcatggcagatccaaactacatgcgctccttatcgcttgccgccgtcgcacccccatgacgcgcgcgatcgaccttcacaccgtttcgtcctcccgctcccactcctgcacgtgcatccgccgttgatgttgtgccgcctctcatgccgttatattcaactcatcctcctctgccgacctcgcggagctggagacatcgtcagggctggaccatccgcaggcgcccgcccacttcaaccactacctggagcagtacgacggcaccaccaacctcctccgcgacacgctggacaacctcaaggcgaagatctacggcaaggccatggagcagctgaccaccatgatgggcacctccgagagctgtgagaacgcgtggaagggcaagcaggcgtcgccgacaacctcaagacaaagatctacgacaagaccatggagcagctccgatgaagatatatgataatgccatggagcagctgaccgccatgatcgacgcctctgagagcctctgagagcctctgagagctgcgagaacgcgtggaagggttgcgtagagcttgtgatgactgtaggatgcagaactgctgtggttgttgccttgttagacgggagcacatgctgcttcttcggtgcggcatgcgcgagatatgatgggagcgcgacatgcatgggagagatggccgggcagggcttgatctgaagggacgacgggtttattttggaggaatgtaagggatatttttgtaaaatattgacgcacgacaaccgttgaaactggtgcattatagtagtatagattacaacgactcaaccgattatgtgtttatgttgattttgg

SEQ ID NO: 65879 - DNA, 2460 bp, Zea Mays
gacggctatagtaagtgtgggaatgaattcggtaacatgacttcacacttaaaaatatatatatagggcccttttgtcataaattttctcacaaccatagccggaaaaggcaccaatctagctagtacgcctagcaataatcagcaccttaggccgagtattttctttagatgaaataaaaaaatggacagaatcccatcctcgattcctcatgaaccatactatctcccaagtccaaccctagcaacggcgccactggcaagaacaaggtaactaggggaccatctcctctatataagcactcttccacggggtagacggtaccaccagaacgggtgtagaagcccagccagtaggataagccctcccagatctggccgggcggccggctgctgccttcttccccaattcgggaaagacgactatgaagatcagtttgtgtagcgtggtttggttcttctctctagctgtatctccttgctcccccgcgcgcgctctctctctctccgtgtccagttcttgttgcgtctgcttggtactgtactttgcagcggtggtcgacgttgggatgatgggggcgctggctggagccagcagctcgacggtgtggctgacagaagagagtgagcacgcatcggccagactgcatctatatacggctgctcctggcgaatggatagatgccaaggcgcagctgctgttgcgtgctcacttctctttctgtcagctccctctcctcctagggacttgttccgccgtatgcatccaccaccgtcccagtagtcccacttccgtccatcgcagcgcgccaatgatgcgtcgtcgtcgtcgtccaggcgcagccgttccccttatcacatcggtcgccgttctctgaggcgcctgccggccttgtcgtgtccctacctgaaaccttatcttgtctcccgctcggatttcgatgacctctgctctttggaataaggtactcttaaaatctcagggaagcttagccgcccagcgcatgtacgccatggacccttgcgctgcgggctgcggctggcaacgtttcttttcttttatcggtgaggtcctcgttgccgtctttgtggcttccgatgatggaattttagccagctccgttccgtccttcaggcttcaaccttgggggaagggacgcgtgaaggtttggttaacttaacacctgtgtctttgctctcctccctaggagtccgcttaacggaaagcactgtttgactgctctctctctctcccccctccctctcttatctactcttcctttccgtaaagatttcacacaaaaactattggatcttttccccttttgttgtgctcatctcatgtggttctgtgactgctgagagataggtgggcgaggcagccatggagttgatggtcggaggcagatctgcttggatgcaagtggagagggggctggcgcgccgcacgcggcacctacctccagcagcggcgccagcgccggcggcttcttgtagatctggaagcgccaatattttcttctctagccgtttagcaatcatcatatataggaatgtggacgtgctccatgtacctcttcccctactaatcaagcaaggtagcaagaatatgtactgcttgggaccatgagatgctagagcctgacatgctagagccctcatcctccatgtttgatgtggttatcatctgattcaagtaaccttgtcacttgggcaggtgtcatctaaagaaagaaaaagagaggttcttggaagccaaatccagagttgatgctgacttcagaagaaaggggtaccttgtattagtggattcatacacgaaggtcactaaaatggaatggtttttccacatagatagagcacaaaataattgatctcgatctagatgaagttaattttgtgtacaagttatttttcatgcatggattaatgatcaacacgcgtacttattttcctaaaggtcaacaaggctaatattaacatgcttcgcagggtcgagccatatgttgcatatgatttgctagtttgctcttgttgaccgtgcatggcatgtaaggagctggatctgtacagtgacaacatgtacctcaggagcacaagttctgctgatcagctgattgcgggagcacagtggtgttgtacttataaggttagctatgagtaattctaatcttcatgtacaatagttttcagttcctatatatgtggttaagtgtccataggttatgccataccttgtaaactaaacatcaattataagagagttgtgattgcggtcatcatagtgagatatgtgggcgctatgggagatgcggcaaacccgcgtctgtgacctttacgcttctattgtgtgcttttaatttctgacacagtgtatgtaaccaagttcaatagcaacgatgtctatctgcatgtgtgaagtatatgacttggtaataaatatgaatccatgtacatatat

SEQ ID NO: 65880 - DNA, 1360 bp, Zea Mays
aagcgcagcaggctgctgggccaaatgtcaaacaacatgctgctgggccaaatggcaaacacaccctaaaagaccgcgggtggctgatcaacggtttccagtagcagcagcacaactgcacgacccctcgccggccatggaggcctccgccaccggcgccgcggatccgcacttcccgatttacatctcctcggacgaggaagacgggcacgcctatttcatcgagtcctatagccccgaggaggtccagattcagcagaccattcttctctccctgtatacctctcgcgcccagacggccgccgcctgctccgcttcctcctcttaccctactggtgcctcctccacccctaaggccggtacctcctccacccctaaggaaactcctatcgatcacaaaagaaagcgcaagcttaaactagaagacgacacgaacgactccaaaatgaagcggtccacgcgcaaccgcttcaactgcgccatctgcttcgagatggttctggctgcggagaagtttgttgtgagtcactgccctcacgcgttctgcaacagttgcatcggaaggtatgtcgccggcaaggtagccgacaacgtagccgtgatcgggtgccctgaccccgcgtgtgagacggggtttattgagatggatctgtgtcgggatatcatcccgcctgaactatttgaccggtggagtgtcgtgctgtgcgaggagctactgggtgatgataagttctactgtccgttcaaggattgctcggcactgttactaaatgatgattcggcgaagatcagggaaacagagtgtccccactgtcacaggctgttctgtgctcgctgccatgtgccatggcacgatgggatcgagtgcaaggaatttaggaagcttggggatgacgagaagggggagaatgatttgatgcttaagaaacttgctgacaaggagaaatggcagaggtgccccaagtgcaggatgtatgtttcgcgaaaatctgggtgcttgttaataaattgcagtacttctgttaccattgtgctgcaccaatggatagggaaactcactattgtgagaattgcaagcactagagaagtagattaaggtctttttagataatgagtaggtaaagctcttagttaacaatgcaggctccgtgcgcagtcgtaggtgatacctaagtagaattttatccccttttagtggaagtaagttccacctttctgccatcgtgatattgttgagctatagagttgatgtgctgaagttatccttaaagcatcctgcattcctgcatcatgaactccctccgtcttgtaatataatgctttacaaaatattttaagataacttgagagaatatccaaa

SEQ ID NO: 65881 - DNA, 639 bp, Zea Mays
tggtgtgtcaatccagtatccaactggatatggggaacactacatctgtgcaagctgaggcttcagattcagcgcagaaacctgccacaacagctcctgcacctgggtcaaagccgaaaaagatctgctgtgcttgcccagatacaaagaagctgagggacgattgcatcgtgcagaatggcgaggatgcctgcggaaagctcatcgaagcccacctgaaatgcctgagagccgaagggttcagcgtctgacgtggtgctccatcatggcaactccacacacctgtttctgcagtaatctgattttgatcatgaacagtgtgatgaataaggacttctggtagagtgatagaaacaactcgcagttttatttctagactggaaggaggaaatcccctgaacattgccagtttgcaagagtttttctatcttttttcaatgcatttagtgccacacatatctgcaattctggataatactttatggagcatatgtatatggaaattgcttttttttggtccactgtttggagattgagcaccacactgtatggaacaactgttgcaaaagttttctactggctagagctttcagtcacttaatccagtgatgtatgaatgaagaagatattaccctctac

SEQ ID NO: 65882 - DNA, 829 bp, Zea Mays
ccgcatcttcctctgcctcagctcgcccgcgtggacgcacacggcgctgtcgccgccccgtgctttggcaagcacgcccggcgcctcacctccctgccgtgacccctcgcctcctctcaccacctcaccctcccatgcaagtaacggctgcccgtttcccctccatctcctctacccattcactccaagaaggaatggccgccatgccattaatggcgttgaagacaccgaccgttctccctctctctacgacgtccctccctcctccttctctctataaaacgcgagctcgtgcacatggagctgattcttggtcgccccaacctctccatgatctctccctctctcccgccgtagagaatcgctgtcggttcgctgctcgccgccgttcgacgtccggagccgaagccgatgccgcgccgacgacccccactgctgagagggtgaggaagaagactttgcagatgatgtcgacaagtactaagtctaccgatgcgccagtcaccttcctgtggaagagtgtccaagcttaattctgttgtactttgataatgatactttttaagacactatggtctggatgatgtaataaagttactctactctctttacgcctttattgcattgtcttttaatatattacacttgtgacgtcaacatatgtgtggaaaatggatcctggcatacaatatgctatgcatttggttttgcccccaaagccggctatgacaccatgttaggtggtgctcttatcttagagtaagcctttgggatgctttggggtacccttggtatgtgtacatgtcagtagcccctaagctatcaaatg

SEQ ID NO: 65883 - DNA, 924 bp, Zea Mays
ccgcatcttcctctgcctcagctcgcccgcgtggacgcacacggcgctgtcgccgccccgtgctttggcaagcacgcccggcgcctcacctccctgccgtgacccctcgcctcctctcaccacctcaccctcccatgcaagtaacggctgcccgtttcccctccatctcctctacccattcactccaagaaggaatggccgccatgccattaatggcgttgaagacaccgaccgttctccctctctctacgacgtccctccctcctccttctctctataaaacgcgagctcgtgcacatggagctgattcttggtcgccccaacctctccatgatctctccctctctcccgccgtagagaatcgctgtcggttcgctgctcgccgccgttcgacgtccggagccgaagccgatgccgcgccgacgacccccactgctgaggtcgtgccctgcttccccttgctgctccatcggtcatcgcaccctgctcctttaccgaccccctgctcttcaatttcgtccacacgcaagaaccaagggtgaggaagaagactttgcagatgatgtcgacaagtactaagtctaccgatgcgccagtcaccttcctgtggaagagtgtccaagcttaattctgttgtactttgataatgatactttttaagacactatggtctggatgatgtaataaagttactctactctctttacgcctttattgcattgtcttttaatatattacacttgtgacgtcaacatatgtgtggaaaatggatcctggcatacaatatgctatgcatttggttttgcccccaaagccggctatgacaccatgttaggtggtgctcttatcttagagtaagcctttgggatgctttggggtacccttggtatgtgtacatgtcagtagcccctaagctatcaaatg

SEQ ID NO: 65884 - DNA, 1609 bp, Zea Mays
actgctggcggccgttgcaattgcagccacattcaactcaggctccaggccgctgcaacccaagccgccagcagcctgcccctcctctccgactccaaaccaatccaatggccctccgccccccgctgtctcacctcacgcgctctctgccctggcctgcccccagcatgacgcgatgctccgcactgcgtcggatacatggacgatattgctggggagcgggggaggaaaggagacgactcttcccgtgccgtgctgacgccaccacgcggccccggtctcctctcgccctcctctccgtctagatctgatcctatcccctccccaccctccgccgccgtcctcgccctcccggccgcagccacgagcccgagcgccgggctcctggcctcgtctcgcctcaccggcgagatggacggcggcggggagacgctgctggtgcggaggagcaagggcaagaagaggcggcagccggcggcgcccgcggagaggggctccggcagcggggacaggttccgcgcgctctggcgggactaccacgacctgctgcaggtgagtcagtgagtgtcgccgatcgattcttgctccgcccactaatctcttcgccctttctagttttcgtgcagctctcttgtttcgacctgttcttaaatggatgattcagcgccggcttgattgctgaattcctcgtgctatccccacttgttccggttgctagtactcgtattatgtttgtgcttggctgtttgattctttgctgccgtgggacggggtcacggggattcaagaattccatccaatagcatggctaaaaccaacaattaagtatacctgtgattagacttggaagctgatacaatacaatacaacattgatgcaggagaccgaggcaaagaagaggaggctggcgagcaagaagcgaagaagcctcgccctgcttgctgaagtcaagttcttgcgaaggaagtatcagtcctttccgaagggtggctcgcagcagacacattacaggttgaagaagcaggctcggtacatgccatccccattgggccatggtgcagggaccgaagtgccttctaccagcagaaacccaaaccttgacttaaatcaagattctgtcctgaacgatgtggggaatgattgccaggggcaacatggccatccagaagttgaaaagttagatcaggtcgaggtgaatgaagatacgatgacacctgatgtcaaattatcagtttgtagggatacaggagagtactctcctgtaagtgaaggtaagagggcggttccatggcaagaccggttcgcgttgaagacctaggccctcagttgatgtggctaagaaataagctgcttctctgacagctagttttgctactgtatccctcaaatgctcagtagtgctctgtacagaaacaatgggacatgatacttatatgcatgttacattgcctgattgacaaactcagatgtttgtagcatgcttctaagcaagttagacaagtgagttgtgattctatgaatggttctgtccagaatttggattggcccatttgattttgcctttgtgcatcgaatgtttcttcaatcagcaagatcatgaattctgtga

SEQ ID NO: 65885 - DNA, 2685 bp, Zea Mays
cttggtcaaaaatattggctagaaatcggtctcgctacatttgttggttttcatcaatttgtgaacgccttctgatgggtcagcaggtcagccctcaacttcaacttcacaagctcaagtcttccccagtccattccatctcgatcccccacgagctccaataaactaattacagatttcaagctcgcttcaaattcttaaatccaaccccattttcacctgagcacacgcattgctcgagaactcgcgtagcaagaaaccatcaacaagggaagggagcttaggcaaagaatccaagaaggcaagaaccatgctggaagatgacgccgccatggacgcggatagcctcgtcggccaggacccgaggtcgggggtgcggccaagcggtggtgagcgcgactgggcggcggccgtgctggagccagtgcggtggatgcggatgctgtgccgggagctgggagcgacgttcgtggctggggtggtgctggtgtacggcctcagccagggcttcgccggctccttcttccgagtggcgtcggactactactggaaggacgtgcagcgggtgcaaccagccactgtgcagttcctctccgtcttcttcttcattccatgggtgctcaaaccgctctgggggatcatgaccgacgtctttcccatctgcgggtaccgccgccgcccgtacttcctcttctcaggaatacttggaacggtttcagctgctatcgttgcagtaactattggattgccaatgagttctgctgtactttgcttgatgggaatctcaacagcagtcgccattgctgatgtaacaatagatgcttcaatcgcaaagaatagtattgataagccggcgctggctccagacatgcagagcctttgtgcattctcctcatctctaggtgcacttgttgggtatgctacaagtggattatttgtccatcatcttggagcacagggtgcgttaggtgttatggctatacctcctgccacagtggttttccttggttttttcatatatgagctgaaaacacatcaacataatgttaaagagaaggttttaaacaaggttggtggggcagtgaaaggaatggttcggactataaggtatccagtagtgtggaggccatctctttacatgttcctttcgctggctctgagtatcagcacccatgaggggcaattctactggtatactaacaagacaccacctaatcctggattttcacaggtaaaaaagttcgtttccttgcctgcttgatgtcattgccaatcagtagaaccattaaacagagcaatagtaatctttttttagagatcagaacaatgttaatcttaagtctaggtacaacaccaatcacccatataaactgaaactaacaaaagcaagatctaactgaaagaaacccagataaaagctgccctccttcagtctgggaatctgtgatgcagtttgtggtcccatcccaccaatattgcttgttcaataatactgtcctgaatgtccctaccagatgcctatgatgaactggtaaactacattatcctaggggtttttatttatttcttcttattttagcttggaatgttataagttactgtataaacgagtttgggttataatcaagtactcttgtagaagaagaaaaaaaactccgaaaatgcaaacagaacattattagggcatcactatcattagaataacaattacatcagatgcatggaagtcattgttgcaccccccacctcgtgcacggatgtaggaattcgtcgggctggtccacgccatcggcgcggtggcgtccatgctgggcgtgctcgtctaccacaagtgcctcaaggattacccgttccggagcatcctcttgtacgcgcagctcctgtacggcgtgtcggggcttctggacctcaccttcgtgctccggtggaacctggcgctgggcatccctgacgcggcgttcgtgaccctggaggagtgcgtctcccgcgtggtggcccgcgtccggctgatgccgatgatggtgctgagcaccaagctgtgcccgccgggcatggagggcaccttcttcgcgctgctcatgtgcatcgacagcctcggcatgctggcggccaaggccggcggcgcggcggtgctgcgcgcgctgcgcgtcaccaggaccgacttcggccacctctggctcgccgtgctgctcaggaacgtgctcaggctcgccacgctgggggccatcggtctcgtgcccaccgcgggccagactgacgtgctggtgccgcgcgagctccttgtgagctcgccggctggtgtggccgatgacgaggaagagaggctgcagctggcgatgctcacttcacacactgacgatgtataataatgatccaggttgtcttacacagagggagatactgatccattgagcaagagcaggagcgaggcctccaggaaaaatgtttcttcgtcgaggatgatctgggcatccttacttccgcttccgagtcctgttaaaaatcagattcacatactctagccaggggcgtcttgagatttttggaggccatgtgcaaaattaacacacataaggtctctttgattcaacttttttttactagcttttctaaaaaaaactgtctgtagtgagaatctaaatatcatgtggattacgtgtggagtaagattatggtgttcataaa

SEQ ID NO: 65886 - DNA, 7286 bp, Zea Mays
tcacttagcgtttcagtctatttatataaaaactgtttttggtgaaaatcatctaaatcaatatgaagcagaatcggtcgagtcgtcgtgatagtaagacgtcgtgatagaacggagttacataccacctatcaaccaatgctatagctctgtgaaccaatacaaaatgttctaaccaaacacgaaacaacgtaattaatttactccatgaatcgataacggacaaaaagaccaaaccaaaccgcacgatagtcttagtcgttgctgcgtgcagctgttctaaattataaaatattttagcttatagtttttttactatacatatgtatatatatacattacgtataaaaaagtgttaaaatatctttgtaaagggactagggcactagcacagccacagccacaggcccacagcagcagagcagctgatgctcaaactgcctaaggaacaggactggtgttagcgcgatcgatcgaaccagtggacccagtgggaacaggaggcccacgataccctgcctcctgccgccccgcctctctcctacccgaagcgaagcgccggaggagtccctccgtgcgatgcagacgccggcggcgaccatctgcggggcccacggggcagccttcaccccatgcccccgtcgccccacccctcctggaagcctccggaagcctttcactggctcttctcggcggactccaaggcgccggctcctcgctcccatggcctccaccgtcgactcacccgggagctcatccgacttcaccaagcgtatagagcgcgcctggctaatctcccagcaaccaagaccagtttcttgctcttcctgtcaatctgctggccacgttgagtgcaagtggtgtgcaggaacaggcttctttatccttggtgacaacatattgtgtgaagtaccctcaagaaattcaaaatgtgtgatatgctctggaaagggcttcacaagttgtgctgattgccaagggacaggttttcgtgccaagtggctggaagaacctcctattgacaaatgaggaagtcaatcatactgtaaaatttaccatttcacagtaaactagctacttttatgcttttctgtccatatccttcaatgtaactctgataatattattttccttttcctgtaattgcatcaattccatattatgacatgttcttaattattcaacatacattttctgtaagaacatgagtatcaagaggtattttttgctctaacttgcaagttttgcctcagcatcctgcatcttttcttgtgcagtgcccaacatgcagaaaattaggatataccagtttctctctctcttgcttgttttgtacgtaagcagataaaaatgcatactaccattctgagctgtattattttgacaaaacggtcaggaaataaaactatttatgtttaagttattcataatcagtgtttcccgctaaacaatcactcacctaccgttagcctggtgaaacagccgtttaaatgggataaatggctgattaaacagacatggtgtaccactgtttagactttagagtttaatgggataaatgactatctagagccactttggtagagctctccttgattcttgagctttacttcttgtaggaccttgtacctttctccttattaatataatgatacacaactctctgcgtgttcgagaaaaaaaagattttctaatggactgattcttgtgaggagcaggcgagaagtgattctggtggtgaactggtgattgaatggggagcattttttagctcccagtttgtagtgtagattgagaagtgattcttgttagctccccactagaatccagttgcattttaaccatttggtgggagcccacaaaatccaccatgttgtttttgtttaacaaactacataattgtgagattagataatttataggagtagagatagagatatttcctttggtcatgacatggaaaaatgccatatatgtctaaaaatagtgaaaataaactgcaatttaaatttaaatttcatcatcaaatggtagagtggtctcatctcatgttagcacaagcaaataacttgacgattgaaggtaaaatgtgtaaaggccccaaagtaagatgaaaaagatagtagatagtttaacagctatgaatgccaagtttacttagttttatcttgtaggacctttcttttctctctctaatataaaagatgcacaactctcttgcgcattcgagaaaaaaacaaataagcccttgcagaactggaattctttggttaagtagtgatattcactcttgtgtattccttttacttgttgcttttttatcgaaatacctcagtgcatgttacaaccatggcgaaagggtctctagctgagttgattaggttatctgagtagcattcctcatgttttgggtttgactctctgtgggagcgaatttcaggctgtagttaaaaaaaccctcgtttgtcctacgttaaagcacaagtctaaggtctggccctggtcacggtcgttctcacatggactacggtgtcactgtgtatgggtggggcaagggtttgggggttttctcgacctgcatgagaaggtattcttcttaatataatgtcatggggcgatcttaccctccatagttattaaggcgtcacgctaaagtgatcaggcgagggccgcgaggctacagggcaagtcgtcgcggtcgccttaatcgtcggcgtaaggcgtcagccttaggctagagcgtcgcctttggggcgcaaggcgttcataaggcattggatactggacgccttggccttgggtagggttggtgacagggtacaaatggaggcacagactgcggacctttggtggtggcggtggcttttctgttgacggcggtgacccttctttgccttctgctgtggcgtgggcgcacagggtcttgctccgctcaccagtccgcccttccacgacggcacagctctaccctcccttccacggttgtgcggctcggtccttccttcgcggaggcgctggcacatgtcctcctctctctatctcttagacggtcaacaacctcccctcctccctctcctctctctggtggttgcaaggtggcagctcccctcccttcctcgaggggtactatggagcaggataagttaggtcaagtagtgggctggctgggccgagaaacagcaggccggtggcccatctcctttattttttcttttctttttacttctctattaaaccagtaaatctattagttatgtattcattttttcctaatattctactactatctattagttatgttggatttttaattctattatgttggtttatgttgaacttgtactcctatttggtattattatccctacctatttaagaatatgttcctatatttatatattagtaaggtgtcgcctcaccttacaccttaccactgaaaagataaaaagggggccggctcccttacccccttaactcgtccggtgggggaaagaccgcccccacggtattatattaagaaaaagttcaatcggagccccgatcaataaaaggtcacaaaagctagtcccccgtgcaacatgagggttcgccccccccccctatagatcagatttttactcgtgctttgagctctcccagcccccacccgaggatccgccctctataggttagtccatctcgtatgcacacaatcaggggaaccagtgagtgaccttttttaaccttagcctaaaattcgctccagctgggattcgaactaaggacataaggaatgctactcagaccaactaaccaactcagctagaggccctatgcttacccccacaggtcgagtttttttatgttacaaccatgaaatcttgtaaagtttttaagccaaatcatctttggaaacacagatgtgtcctttttgtaattgcatattgttctttgcaattgcagtattgaatcttgtttttcatttgaattgatgtgcagaaaatgttgctagtttagaacagcgtcagattagctgtctacaaatccttgtgctttgtagtttctacaagaacaaaatattttggaatttggaagggatatggtacttttgtattaagcaaacgaacctgtacaaagctgccataatacttttttgacaacttatctaaaaataatttgagtatgtgcctttctttgtcagtgtgcttgcacatattctgatgattatttggcaccatatttgcacatggctgtatttggtactttcttctcatatgggagggttaggttttatatgtattttactaggaacaaattttagaacccacttgatttgaagttcatcggataggaaccttggatgagctggcttgtagaaatgaaatttgatgagagcaaagctatccaatgtaaatagtcatggtgtattttttgtgttttgtgatagttgactatttgaagatgtcaaaatccctttccgcaccactttgaggtccacagcatatctttcgttaaatgaatttatgatgtcattaatggacttactgctgtgtgctgtgacttaaaatatagcattccatagctgtttcctggacaaaattattagttggctttggcactgtcacttaacctatacatcagggccaagtacgcaaaagacaatgtttctatgtaccctatgcttactattttcttcatttataagttaatgaagttatccgtaagatttgaagggatgacattgtcaagtacaaatcgtcaagcttgcaacattgttgtagcgctatggacaagcttgttatttgtccccagcaattatggcttttattctagggatgattttgtttacttggttgtccattcggttagggttggtttggtgacccggaaattggaggggatccataaagtagaaatccccttgatatattcattaaatagcaaagggattcctcctccatagacccccaccaattccctggtcaccaaactagcctttgggctcatttgagagcccgaaaaccgggattgaaggagctaaaatcaccttcttatttaatttgaataagaaggtgattttagcccctctaatccccttcagttttcggactcccaaactagcccttaatgtcttgtaaattccatggtggccatttaatatgagggttgagtactgcatattaccctttgtaattgcaatattcacagcgttaatgaatcaacaatgactgcgtttactgttcaaatttattttttaatgtagcttttgcttgtcctgattaacttgaaattgcaattttggactgtgtgcattgtatgtggctggtgcagtggtgagagctgtttcactaagtcatcaggttacgggttcgaaacagtcaatctgcatttgtgggagaaggttcgccccagtttattccttccctagaccttacttatgtggaagcctccgtcattgcatctgccattttttattgtatttggctttatgcattgactgttgcactgttgtaccatgccatcaaatttatctttgagagcattaccttaggaaaaactaaagaagagcaattttgtggaaaataagatgatgcattgatacctggaactccttgatatttcattgttttgtcatttctattttgttgtgggctattttatcttttctgttgggctcattctatctgtggtagagatgctgtcagcagttaagacaaaaaatgtaccaaggattggactgctttgagcaatacaacacagatcctccaaatggaagtagccaaagttgtttgtttatttgccattgctattgatagaacttacagtgcaaaacaaacgacaattgattggagttgtatgaattgattgtgacttttatggcatatttctgcattatcctgacttgttaaagttctaggttggatacttggaatttatgcagccttcgtgcaaaacaatgtatcagtatataggattatgtagttactgatctttggcaagggcttgaagttagatgtcttaatgactagagctaccttgattttttttcctgaaagacctgccttgatgattttttttgcagctttgcttctagatttgctgtattttagctttgtttctagattttctgtatccagaaaaaaatggtgtagtatcaaattatcaaaatttacacttatgttatgtgatgattgattgggacacctttaagaaatttatgagatcaaaataagcaagatattcaaggtcatttttaattagtcaataaatagttatgatgttacaagcctactcttcatatcttcaggtacattctcaaaccatccttgctccctgtcaggaataaaaagatggattgctatttattatttctttaatgttcctctagagaattggttgaaaatgacgtgtacattgggaaactttgtcatgcaccatatagcactttgcacggtccattagctcacgattcaaatacatgaatgggatccaattgcttgttggttagggaatcttgaggggttgtcggaattggtgttagcacttggcaaaataatggtgcagagttgggtttgcgttgcgtgtggtgctggtttacgctgcctagttcaaaataacaaacatgactagtccatttggtgcatgctgagcgagccatgctgaacctggttgatccctggaagctgctggggcgtcgtatgactgacgatcaggggttgctttaaagcacaggtgtgggaatgcggaactgtccatctacaaaatcagtggcagggatcctctcattataaagttatctatagagagcaaggacaagaaagaaaatagatatcttggctattcttttgtccagctgggcaatcgacaaggtgatgaacgcagcagttggacagaatgagtgtagttcaaaatcttcgttgtggagtagcttcacaaataatggagttggaatacggaaggtgtttggcttggagattagctcgagctctaggaatacaattcaagagggttttgtgggaattatctagtgtgctctgcttttgtatgtacgccattttgatgcacctaagcatttatgcatttgtaaatgataagtgctcctttggatagcaggaactttggagtatttgaatcattagaattattttttttcataaggaattcttctgggttgccattcttaaccccaattccatagagagatcaaacatgagcttgaacctcaaatttagagaagtcagctacattttcccctttttattggtctactctcttacaaattacaatgcaccatccctccaaatctt

SEQ ID NO: 65887 - DNA, 6509 bp, Zea Mays
caaacatccattccagcgccacagcaaccaagaccagtttcttgctcttcctgtcaatctgctggccacgttgagtgcaagtggtgtgcaggaacaggcttctttatccttggtgacaacatattgtgtgaagtaccctcaagaaattcaaaatgtgtgatatgctctggaaagggcttcacaagttgtgctgattgccaagggacaggttttcgtgccaagtggctggaagaacctcctattgacaaatgaggaagtcaatcatactgtaaaatttaccatttcacagtaaactagctacttttatgcttttctgtccatatccttcaatgtaactctgataatattattttccttttcctgtaattgcatcaattccatattatgacatgttcttaattattcaacatacattttctgtaagaacatgagtatcaagaggtattttttgctctaacttgcaagttttgcctcagcatcctgcatcttttcttgtgcagtgcccaacatgcagaaaattaggatataccagtttctctctctcttgcttgttttgtacgtaagcagataaaaatgcatactaccattctgagctgtattattttgacaaaacggtcaggaaataaaactatttatgtttaagttattcataatcagtgtttcccgctaaacaatcactcacctaccgttagcctggtgaaacagccgtttaaatgggataaatggctgattaaacagacatggtgtaccactgtttagactttagagtttaatgggataaatgactatctagagccactttggtagagctctccttgattcttgagctttacttcttgtaggaccttgtacctttctccttattaatataatgatacacaactctctgcgtgttcgagaaaaaaaagattttctaatggactgattcttgtgaggagcaggcgagaagtgattctggtggtgaactggtgattgaatggggagcattttttagctcccagtttgtagtgtagattgagaagtgattcttgttagctccccactagaatccagttgcattttaaccatttggtgggagcccacaaaatccaccatgttgtttttgtttaacaaactacataattgtgagattagataatttataggagtagagatagagatatttcctttggtcatgacatggaaaaatgccatatatgtctaaaaatagtgaaaataaactgcaatttaaatttaaatttcatcatcaaatggtagagtggtctcatctcatgttagcacaagcaaataacttgacgattgaaggtaaaatgtgtaaaggccccaaagtaagatgaaaaagatagtagatagtttaacagctatgaatgccaagtttacttagttttatcttgtaggacctttcttttctctctctaatataaaagatgcacaactctcttgcgcattcgagaaaaaaacaaataagcccttgcagaactggaattctttggttaagtagtgatattcactcttgtgtattccttttacttgttgcttttttatcgaaatacctcagtgcatgttacaaccatggcgaaagggtctctagctgagttgattaggttatctgagtagcattcctcatgttttgggtttgactctctgtgggagcgaatttcaggctgtagttaaaaaaaccctcgtttgtcctacgttaaagcacaagtctaaggtctggccctggtcacggtcgttctcacatggactacggtgtcactgtgtatgggtggggcaagggtttgggggttttctcgacctgcatgagaaggtattcttcttaatataatgtcatggggcgatcttaccctccatagttattaaggcgtcacgctaaagtgatcaggcgagggccgcgaggctacagggcaagtcgtcgcggtcgccttaatcgtcggcgtaaggcgtcagccttaggctagagcgtcgcctttggggcgcaaggcgttcataaggcattggatactggacgccttggccttgggtagggttggtgacagggtacaaatggaggcacagactgcggacctttggtggtggcggtggcttttctgttgacggcggtgacccttctttgccttctgctgtggcgtgggcgcacagggtcttgctccgctcaccagtccgcccttccacgacggcacagctctaccctcccttccacggttgtgcggctcggtccttccttcgcggaggcgctggcacatgtcctcctctctctatctcttagacggtcaacaacctcccctcctccctctcctctctctggtggttgcaaggtggcagctcccctcccttcctcgaggggtactatggagcaggataagttaggtcaagtagtgggctggctgggccgagaaacagcaggccggtggcccatctcctttattttttcttttctttttacttctctattaaaccagtaaatctattagttatgtattcattttttcctaatattctactactatctattagttatgttggatttttaattctattatgttggtttatgttgaacttgtactcctatttggtattattatccctacctatttaagaatatgttcctatatttatatattagtaaggtgtcgcctcaccttacaccttaccactgaaaagataaaaagggggccggctcccttacccccttaactcgtccggtgggggaaagaccgcccccacggtattatattaagaaaaagttcaatcggagccccgatcaataaaaggtcacaaaagctagtcccccgtgcaacatgagggttcgccccccccccctatagatcagatttttactcgtgctttgagctctcccagcccccacccgaggatccgccctctataggttagtccatctcgtatgcacacaatcaggggaaccagtgagtgaccttttttaaccttagcctaaaattcgctccagctgggattcgaactaaggacataaggaatgctactcagaccaactaaccaactcagctagaggccctatgcttacccccacaggtcgagtttttttatgttacaaccatgaaatcttgtaaagtttttaagccaaatcatctttggaaacacagatgtgtcctttttgtaattgcatattgttctttgcaattgcagtattgaatcttgtttttcatttgaattgatgtgcagaaaatgttgctagtttagaacagcgtcagattagctgtctacaaatccttgtgctttgtagtttctacaagaacaaaatattttggaatttggaagggatatggtacttttgtattaagcaaacgaacctgtacaaagctgccataatacttttttgacaacttatctaaaaataatttgagtatgtgcctttctttgtcagtgtgcttgcacatattctgatgattatttggcaccatatttgcacatggctgtatttggtactttcttctcatatgggagggttaggttttatatgtattttactaggaacaaattttagaacccacttgatttgaagttcatcggataggaaccttggatgagctggcttgtagaaatgaaatttgatgagagcaaagctatccaatgtaaatagtcatggtgtattttttgtgttttgtgatagttgactatttgaagatgtcaaaatccctttccgcaccactttgaggtccacagcatatctttcgttaaatgaatttatgatgtcattaatggacttactgctgtgtgctgtgacttaaaatatagcattccatagctgtttcctggacaaaattattagttggctttggcactgtcacttaacctatacatcagggccaagtacgcaaaagacaatgtttctatgtaccctatgcttactattttcttcatttataagttaatgaagttatccgtaagatttgaagggatgacattgtcaagtacaaatcgtcaagcttgcaacattgttgtagcgctatggacaagcttgttatttgtccccagcaattatggcttttattctagggatgattttgtttacttggttgtccattcggttagggttggtttggtgacccggaaattggaggggatccataaagtagaaatccccttgatatattcattaaatagcaaagggattcctcctccatagacccccaccaattccctggtcaccaaactagcctttgggctcatttgagagcccgaaaaccgggattgaaggagctaaaatcaccttcttatttaatttgaataagaaggtgattttagcccctctaatccccttcagttttcggactcccaaactagcccttaatgtcttgtaaattccatggtggccatttaatatgagggttgagtactgcatattaccctttgtaattgcaatattcacagcgttaatgaatcaacaatgactgcgtttactgttcaaatttattttttaatgtagcttttgcttgtcctgattaacttgaaattgcaattttggactgtgtgcattgtatgtggctggtgcagtggtgagagctgtttcactaagtcatcaggttacgggttcgaaacagtcaatctgcatttgtgggagaaggttcgccccagtttattccttccctagaccttacttatgtggaagcctccgtcattgcatctgccattttttattgtatttggctttatgcattgactgttgcactgttgtaccatgccatcaaatttatctttgagagcattaccttaggaaaaactaaagaagagcaattttgtggaaaataagatgatgcattgatacctggaactccttgatatttcattgttttgtcatttctattttgttgtgggctattttatcttttctgttgggctcattctatctgtggtagagatgctgtcagcagttaagacaaaaaatgtaccaaggattggactgctttgagcaatacaacacagatcctccaaatggaagtagccaaagttgtttgtttatttgccattgctattgatagaacttacagtgcaaaacaaacgacaattgattggagttgtatgaattgattgtgacttttatggcatatttctgcattatcctgacttgttaaagttctaggttggatacttggaatttatgcagccttcgtgcaaaacaatgtatcagtatataggattatgtagttactgatctttggcaagggcttgaagttagatgtcttaatgactagagctaccttgattttttttcctgaaagacctgccttgatgattttttttgcagctttgcttctagatttgctgtattttagctttgtttctagattttctgtatccagaaaaaaatggtgtagtatcaaattatcaaaatttacacttatgttatgtgatgattgattgggacacctttaagaaatttatgagatcaaaataagcaagatattcaaggtcatttttaattagtcaataaatagttatgatgttacaagcctactcttcatatcttcaggtacattctcaaaccatccttgctccctgtcaggaataaaaagatggattgctatttattatttctttaatgttcctctagagaattggttgaaaatgacgtgtacattgggaaactttgtcatgcaccatatagcactttgcacggtccattagctcacgattcaaatacatgaatgggatccaattgcttgttggttagggaatcttgaggggttgtcggaattggtgttagcacttggcaaaataatggtgcagagttgggtttgcgttgcgtgtggtgctggtttacgctgcctagttcaaaataacaaacatgactagtccatttggtgcatgctgagcgagccatgctgaacctggttgatccctggaagctgctggggcgtcgtatgactgacgatcaggggttgctttaaagcacaggtgtgggaatgcggaactgtccatctacaaaatcagtggcagggatcctctcattataaagttatctatagagagcaaggacaagaaagaaaatagatatcttggctattcttttgtccagctgggcaatcgacaaggtgatgaacgcagcagttggacagaatgagtgtagttcaaaatcttcgttgtggagtagcttcacaaataatggagttggaatacggaaggtgtttggcttggagattagctcgagctctaggaatacaattcaagagggttttgtgggaattatctagtgtgctctgcttttgtatgtacgccattttgatgcacctaagcatttatgcatttgtaaatgataagtgctcctttggatagcaggaactttggagtatttgaatcattagaattattttttttcataaggaattcttctgggttgccattcttaaccccaattccatagagagatcaaacatgagcttgaacctcaaatttagagaagtcagctacattttcccctttttattggtctactctcttacaaattacaatgcaccatccctccaaatctt

SEQ ID NO: 65888 - DNA, 6674 bp, Zea Mays
cgccccttttgcaaaagagtcattatacttctttctaatctaacatgtggtcatctacggagattcccctcatctcttgcgcccaactaacatgactcccctgcatctaacttactcacgcggggacgacgttcctcgacgacaggcaaggcctatatggcgggtcgtgcaccggttgggtgggccctgcaaccaagaccagtttcttgctcttcctgtcaatctgctggccacgttgagtgcaagtggtgtgcaggaacaggcttctttatccttggtgacaacatattgtgtgaagtaccctcaagaaattcaaaatgtgtgatatgctctggaaagggcttcacaagttgtgctgattgccaagggacaggttttcgtgccaagtggctggaagaacctcctattgacaaatgaggaagtcaatcatactgtaaaatttaccatttcacagtaaactagctacttttatgcttttctgtccatatccttcaatgtaactctgataatattattttccttttcctgtaattgcatcaattccatattatgacatgttcttaattattcaacatacattttctgtaagaacatgagtatcaagaggtattttttgctctaacttgcaagttttgcctcagcatcctgcatcttttcttgtgcagtgcccaacatgcagaaaattaggatataccagtttctctctctcttgcttgttttgtacgtaagcagataaaaatgcatactaccattctgagctgtattattttgacaaaacggtcaggaaataaaactatttatgtttaagttattcataatcagtgtttcccgctaaacaatcactcacctaccgttagcctggtgaaacagccgtttaaatgggataaatggctgattaaacagacatggtgtaccactgtttagactttagagtttaatgggataaatgactatctagagccactttggtagagctctccttgattcttgagctttacttcttgtaggaccttgtacctttctccttattaatataatgatacacaactctctgcgtgttcgagaaaaaaaagattttctaatggactgattcttgtgaggagcaggcgagaagtgattctggtggtgaactggtgattgaatggggagcattttttagctcccagtttgtagtgtagattgagaagtgattcttgttagctccccactagaatccagttgcattttaaccatttggtgggagcccacaaaatccaccatgttgtttttgtttaacaaactacataattgtgagattagataatttataggagtagagatagagatatttcctttggtcatgacatggaaaaatgccatatatgtctaaaaatagtgaaaataaactgcaatttaaatttaaatttcatcatcaaatggtagagtggtctcatctcatgttagcacaagcaaataacttgacgattgaaggtaaaatgtgtaaaggccccaaagtaagatgaaaaagatagtagatagtttaacagctatgaatgccaagtttacttagttttatcttgtaggacctttcttttctctctctaatataaaagatgcacaactctcttgcgcattcgagaaaaaaacaaataagcccttgcagaactggaattctttggttaagtagtgatattcactcttgtgtattccttttacttgttgcttttttatcgaaatacctcagtgcatgttacaaccatggcgaaagggtctctagctgagttgattaggttatctgagtagcattcctcatgttttgggtttgactctctgtgggagcgaatttcaggctgtagttaaaaaaaccctcgtttgtcctacgttaaagcacaagtctaaggtctggccctggtcacggtcgttctcacatggactacggtgtcactgtgtatgggtggggcaagggtttgggggttttctcgacctgcatgagaaggtattcttcttaatataatgtcatggggcgatcttaccctccatagttattaaggcgtcacgctaaagtgatcaggcgagggccgcgaggctacagggcaagtcgtcgcggtcgccttaatcgtcggcgtaaggcgtcagccttaggctagagcgtcgcctttggggcgcaaggcgttcataaggcattggatactggacgccttggccttgggtagggttggtgacagggtacaaatggaggcacagactgcggacctttggtggtggcggtggcttttctgttgacggcggtgacccttctttgccttctgctgtggcgtgggcgcacagggtcttgctccgctcaccagtccgcccttccacgacggcacagctctaccctcccttccacggttgtgcggctcggtccttccttcgcggaggcgctggcacatgtcctcctctctctatctcttagacggtcaacaacctcccctcctccctctcctctctctggtggttgcaaggtggcagctcccctcccttcctcgaggggtactatggagcaggataagttaggtcaagtagtgggctggctgggccgagaaacagcaggccggtggcccatctcctttattttttcttttctttttacttctctattaaaccagtaaatctattagttatgtattcattttttcctaatattctactactatctattagttatgttggatttttaattctattatgttggtttatgttgaacttgtactcctatttggtattattatccctacctatttaagaatatgttcctatatttatatattagtaaggtgtcgcctcaccttacaccttaccactgaaaagataaaaagggggccggctcccttacccccttaactcgtccggtgggggaaagaccgcccccacggtattatattaagaaaaagttcaatcggagccccgatcaataaaaggtcacaaaagctagtcccccgtgcaacatgagggttcgccccccccccctatagatcagatttttactcgtgctttgagctctcccagcccccacccgaggatccgccctctataggttagtccatctcgtatgcacacaatcaggggaaccagtgagtgaccttttttaaccttagcctaaaattcgctccagctgggattcgaactaaggacataaggaatgctactcagaccaactaaccaactcagctagaggccctatgcttacccccacaggtcgagtttttttatgttacaaccatgaaatcttgtaaagtttttaagccaaatcatctttggaaacacagatgtgtcctttttgtaattgcatattgttctttgcaattgcagtattgaatcttgtttttcatttgaattgatgtgcagaaaatgttgctagtttagaacagcgtcagattagctgtctacaaatccttgtgctttgtagtttctacaagaacaaaatattttggaatttggaagggatatggtacttttgtattaagcaaacgaacctgtacaaagctgccataatacttttttgacaacttatctaaaaataatttgagtatgtgcctttctttgtcagtgtgcttgcacatattctgatgattatttggcaccatatttgcacatggctgtatttggtactttcttctcatatgggagggttaggttttatatgtattttactaggaacaaattttagaacccacttgatttgaagttcatcggataggaaccttggatgagctggcttgtagaaatgaaatttgatgagagcaaagctatccaatgtaaatagtcatggtgtattttttgtgttttgtgatagttgactatttgaagatgtcaaaatccctttccgcaccactttgaggtccacagcatatctttcgttaaatgaatttatgatgtcattaatggacttactgctgtgtgctgtgacttaaaatatagcattccatagctgtttcctggacaaaattattagttggctttggcactgtcacttaacctatacatcagggccaagtacgcaaaagacaatgtttctatgtaccctatgcttactattttcttcatttataagttaatgaagttatccgtaagatttgaagggatgacattgtcaagtacaaatcgtcaagcttgcaacattgttgtagcgctatggacaagcttgttatttgtccccagcaattatggcttttattctagggatgattttgtttacttggttgtccattcggttagggttggtttggtgacccggaaattggaggggatccataaagtagaaatccccttgatatattcattaaatagcaaagggattcctcctccatagacccccaccaattccctggtcaccaaactagcctttgggctcatttgagagcccgaaaaccgggattgaaggagctaaaatcaccttcttatttaatttgaataagaaggtgattttagcccctctaatccccttcagttttcggactcccaaactagcccttaatgtcttgtaaattccatggtggccatttaatatgagggttgagtactgcatattaccctttgtaattgcaatattcacagcgttaatgaatcaacaatgactgcgtttactgttcaaatttattttttaatgtagcttttgcttgtcctgattaacttgaaattgcaattttggactgtgtgcattgtatgtggctggtgcagtggtgagagctgtttcactaagtcatcaggttacgggttcgaaacagtcaatctgcatttgtgggagaaggttcgccccagtttattccttccctagaccttacttatgtggaagcctccgtcattgcatctgccattttttattgtatttggctttatgcattgactgttgcactgttgtaccatgccatcaaatttatctttgagagcattaccttaggaaaaactaaagaagagcaattttgtggaaaataagatgatgcattgatacctggaactccttgatatttcattgttttgtcatttctattttgttgtgggctattttatcttttctgttgggctcattctatctgtggtagagatgctgtcagcagttaagacaaaaaatgtaccaaggattggactgctttgagcaatacaacacagatcctccaaatggaagtagccaaagttgtttgtttatttgccattgctattgatagaacttacagtgcaaaacaaacgacaattgattggagttgtatgaattgattgtgacttttatggcatatttctgcattatcctgacttgttaaagttctaggttggatacttggaatttatgcagccttcgtgcaaaacaatgtatcagtatataggattatgtagttactgatctttggcaagggcttgaagttagatgtcttaatgactagagctaccttgattttttttcctgaaagacctgccttgatgattttttttgcagctttgcttctagatttgctgtattttagctttgtttctagattttctgtatccagaaaaaaatggtgtagtatcaaattatcaaaatttacacttatgttatgtgatgattgattgggacacctttaagaaatttatgagatcaaaataagcaagatattcaaggtcatttttaattagtcaataaatagttatgatgttacaagcctactcttcatatcttcaggtacattctcaaaccatccttgctccctgtcaggaataaaaagatggattgctatttattatttctttaatgttcctctagagaattggttgaaaatgacgtgtacattgggaaactttgtcatgcaccatatagcactttgcacggtccattagctcacgattcaaatacatgaatgggatccaattgcttgttggttagggaatcttgaggggttgtcggaattggtgttagcacttggcaaaataatggtgcagagttgggtttgcgttgcgtgtggtgctggtttacgctgcctagttcaaaataacaaacatgactagtccatttggtgcatgctgagcgagccatgctgaacctggttgatccctggaagctgctggggcgtcgtatgactgacgatcaggggttgctttaaagcacaggtgtgggaatgcggaactgtccatctacaaaatcagtggcagggatcctctcattataaagttatctatagagagcaaggacaagaaagaaaatagatatcttggctattcttttgtccagctgggcaatcgacaaggtgatgaacgcagcagttggacagaatgagtgtagttcaaaatcttcgttgtggagtagcttcacaaataatggagttggaatacggaaggtgtttggcttggagattagctcgagctctaggaatacaattcaagagggttttgtgggaattatctagtgtgctctgcttttgtatgtacgccattttgatgcacctaagcatttatgcatttgtaaatgataagtgctcctttggatagcaggaactttggagtatttgaatcattagaattattttttttcataaggaattcttctgggttgccattcttaaccccaattccatagagagatcaaacatgagcttgaacctcaaatttagagaagtcagctacattttcccctttttattggtctactctcttacaaattacaatgcaccatccctccaaatctt

SEQ ID NO: 65889 - DNA, 2295 bp, Zea Mays
ggtcatagtcctaagcagcagagaaaacccgaagcccagcgcaacagcgcctgtgggcgccggcacgagcgggggcggcgggacccggtacgaggccgtggcccgtggctgctgcacgcctgtgccgtggggcggggctttgtttgcgttacgggggtgccaggccagcccgctcggcgctcgcttcgcacgcagctcgctaggggacaacaggaggccgttcttcgccggccaatgagatggagcagagcaaagaatttcagagagagagagagagaggagagagaaaggccggcctgtctctcccgtctctcttctttcctcctcctttgctcatttggcatttgccctgctctccaaacatcaactaaatttggccgccccatcaccaatcccttcccagtctctccctccgcgtcgtctttaaaacggccacctccaaaggccccctgtagttggccacccacctctccctcctcctttcttctgtcgtctctctctccgcacgcgcaatggcgaggcctcgcaagaacagcgccgccgccgccaacaacaacaacagcaacaccaccaacgccggcaacgccgccgtcgacctcgcggcgcgcgtcaagccgaagcgcacgcggaagagcgtgccccgggagtccccctcgcagcgcagctccgtctaccgcggcgtcacacggcaccggtggacggggaggttcgaggctcacctgtgggacaagaacagctggaacgagtcccagaacaagaagggcaagcaagtttacctcggtgagtgaggctctcgagtcacggtcttggcatgacacacatgaggaggaggaggaggagctccgcccacactccctccctctctctctcggaaaaagaaaaaagaaaaacattttttcagctctggtatgtatccatcaatggcgtagcgtgttgctcaccatcgtctccctccatggtctccatgcaggcgcgtacgacgacgaggacgcagcggcgcgcgcgtatgacttggcggcattgaagtactggggccccgacaccatcctcaacttcccggcgtctgcatatgaagcagagttgaaagaaatggaggggcagtccagggaagagtatattgggtccttaaggaggggtccatgaaatttatccacaggaaaagcagtgggttctccagaggtgtttccaaataccgaggtgtcgcaaggcatcaccacaacgggagatgggaggcgaggattggtcgcgtcttcggaaacaagtatctctacctcgggacttacgggacgcaggaggaggcggcgatggcgtacgacatggcggcgatcgagtaccggggcctgaacgccgtcactaacttcgacctcagccgctacatcaagtggctccgcccgggcgccggcgccgcgcagaacccgcacccgatgctggacggcctggcgcagcagctgctgctgtcgccggagggcaccatcgacggcgccgcgttccaccagcagcagcacgaccaccgccagcagggcgccgccgagctcccgctgccgcccagggcgtcgctgggccacacgcccaccacgtcggcgctcggcctgctgctgcagtcgtccaagttcaaggagatgatccagcgggcgtcggcggccgagagcggcaccaccaccgtcaccaccacgtcgtcgtcgtcgtcgcagccgcccacgccgacgccgacgccgtcgccatcgccacctccgacgccgccagtgcagccggccagggacgcctcgccacagtgcagcttccccgaggacatacagaccttcttcggctgcgaggacgtcgcgggcgtcggcgccggcgtcgacgtggacgccctcttcttcggcgacctcgccgcgtacgcgtcgccggcgttccacttcgagatggacttgtagctcatcacacgccattactcgttaatcactatctgggttttttttttgtcgataggagaatggagctctctcgccatttgagaaccaagaaaatggtgagacacacaaaacaagagaggcagcagaacagacagacggcgcctagtctgttttgagagatttatttacagtggtaactagtgacatttactgaacggttaagattgtattattcaaatttttttcacattggtaacaagggattgtttcatttgtttcattcctcagttctgataaaagaaaagaagcaaccaatcaatatatagtatattgtacatatatgagaatttctttttttcacgaaactaattaagaggtaccgtttcaattcacaggtgtt

SEQ ID NO: 65890 - DNA, 1232 bp, Zea Mays
gctctccggtagaggaagggtgggtggacacgacggcggtgtgcttcaactgtcgcaacactggaatgcggttgcacggcgtccaaaatcctccacacgccgtgttccgggcagtcacttttggatggaacgagggggaaaaattagcaattttacctgcagaattttcatataagatatatatacgtagttcctatcggggaaaaagaaaatcattccatgcaaagaaaaattcaaattcctgcgaaagatggcgtgtttttttggtgctgatcagcctgttgcgtttgcgtgtggaccgtgctgtgcgcgccagggacgcaggaggaggcggcgatggcgtacgacatggcggcgatcgagtaccggggcctgaacgccgtcactaacttcgacctcagccgctacatcaagtggctccgcccgggcgccggcgccgcgcagaacccgcacccgatgctggacggcctggcgcagcagctgctgctgtcgccggagggcaccatcgacggcgccgcgttccaccagcagcagcacgaccaccgccagcagggcgccgccgagctcccgctgccgcccagggcgtcgctgggccacacgcccaccacgtcggcgctcggcctgctgctgcagtcgtccaagttcaaggagatgatccagcgggcgtcggcggccgagagcggcaccaccaccgtcaccaccacgtcgtcgtcgtcgtcgcagccgcccacgccgacgccgacgccgtcgccatcgccacctccgacgccgccagtgcagccggccagggacgcctcgccacagtgcagcttccccgaggacatacagaccttcttcggctgcgaggacgtcgcgggcgtcggcgccggcgtcgacgtggacgccctcttcttcggcgacctcgccgcgagaatggagctctctcgccatttgagaaccaagaaaatggtgagacacacaaaacaagagaggcagcagaacagacagacggcgcctagtctgttttgagagatttatttacagtggtaactagtgacatttactgaacggttaagattgtattattcaaatttttttcacattggtaacaagggattgtttcatttgtttcattcctcagttctgataaaagaaaagaagcaaccaatcaatatatagtatattgtacatatatgagaatttctttttttcacgaaactaattaagaggtaccgtttcaattcacaggtgtt

SEQ ID NO: 65891 - DNA, 1905 bp, Zea Mays
gtccgtccgaccgtccccgcgtcggcgcgtcccgcacaccgcgctcccgctcggccgctcctgcctgcgcgctgcagcagctcggctgctcgcggtcgcttgtcccgtgcgcccggcggccggctgcttgccccgccgacctattcggctgcttcctgcttgagtgcttgtcccatccggcggcccggctgcttctgcttgttcgcttagtatcaatccaggctctgatttggtggctgaagctctgtttctccatggcgcttcgtttcgagatattaggaagattcaatcgcgcccgcgcagctcgcttaactcttcccccactttacttgtcaaacaccactttttatgcctgttggaactcaaggtacaataaaagggttaaccactgaccagttagaggagataggttgccagattatacttggaaacacctaccatcttgaattacgtccagggtctcaacttattgatgatttgggtggcctgcacaaatttatgaattggaaaagggcattgctgactgactctggtggtttccaaatggtttcgttgctgcatttggctgatattactgaggaaggagttacgtttcagtcacctgttgatgggaagcccatgctcttgacacctgaggaatctattcatattcagaacaatattggagctgatatcatcatggcacttgatgatgttgtaaagaccacaattactggcccgaggataaaagaagctatgtatcgcaccattcgttggattgacaggtgcatagctgaatttatttgggattgtgcaaggaggattggatcctgttcttagagatatctgtgttaggagcttggttgagcggaatcttcctggatatgcaattggtggtcttgctggtggcgaagacaaggattcattttggcgtgttgttgcccaatgcactgctggattgcctgaaaataaaccacgatatgtcatgggtgttggctatccacttgatattgtagtatgcagtgctttaggtgcagatatgtatgactgtgtttatccaacacggactgctcgttttgggactgcacttgtgcctgagggtgtcctaaagttgaaacataattcaatggcgactgatgaacggccaattgatcatacgtgttcatgcatggtctgcaaaaaatatacgcgcgcctacttacattgcctggtcacaaaagatgctatgggttctcagctgctgtcatatcataacttatcatttatgatgcggttaagtagagacctccacatgtctattcttgaaggacgatttccagaattcgtgcgaggattcttgagggtgcagtttccaacgggagacgttccgcagtgggttcgcaacgcgatggaggtcgctggcattgacatatccgagtgctgtgcttccaccaatgtctgacaccaagcgtataggggccacctttaactgtaccggttgactgcaaatggagttgtgccgagttaagactcttcggcaagcaaaagacgacgacaggctttcacaaagaagtttttttccgtcatacatgtagggtctcacacggattcagcataggattttccaatagtatgctgaagcttggcgacaggttttgttagtgttttgtgttgtgtttggaaaccgcagaggtatgctatgctattcttctggggtctaggttatgcttcgtcttaatcactggatgtgatttttagtggtacggtcagatcaaaggaaggtgtacccaactctgacgaatattttttgttataacgaaaagaatgttatagtccttgcaatgatctgaacctgactggctgactgggtctgcagcatgcagcagctggaacagtccagtcccggcgtgctgctgctgcctctccctatgacaattgacaagcgag

SEQ ID NO: 65892 - DNA, 1819 bp, Zea Mays
gtccgtccgaccgtccccgcgtcggcgcgtcccgcacaccgcgctcccgctcggccgctcctgcctgcgcgctgcagcagctcggctgctcgcggtcgcttgtcccgtgcgcccggcggccggctgcttgccccgccgacctattcggctgcttcctgcttgagtgcttgtcccatccggcggcccggctgcttctgcttgttcgcttagtatcaatccaggctctgatttggtggctgaagctctgtttctccatggcgcttcgtttcgagatattaggaagattcaatcgcgcccgcgcagctcgcttaactcttcccccactttacttgtcaaacaccactttttatgcctgttggaactcaaggtacaataaaagggttaaccactgaccagttagaggagataggttgccagattatacttggaaacacctaccatcttgaattacgtccagggtctcaacttattgatgatttgggtggcctgcacaaatttatgaattggaaaagggcattgctgactgactctggtggtttccaaatggtttcgttgctgcatttggctgatattactgaggaaggagttacgtttcagtcacctgttgatgggaagcccatgctcttgacacctgaggaatctattcatattcagaacaatattggagctgatatcatcatggcacttgatgatgttgtaaagaccacaattactggcccgaggataaaagaagctatgtatcgcaccattcgttggattgacaggtgcatagctgatatgcaattggtggtcttgctggtggcgaagacaaggattcattttggcgtgttgttgcccaatgcactgctggattgcctgaaaataaaccacgatatgtcatgggtgttggctatccacttgatattgtagtatgcagtgctttaggtgcagatatgtatgactgtgtttatccaacacggactgctcgttttgggactgcacttgtgcctgagggtgtcctaaagttgaaacataattcaatggcgactgatgaacggccaattgatcatacgtgttcatgcatggtctgcaaaaaatatacgcgcgcctacttacattgcctggtcacaaaagatgctatgggttctcagctgctgtcatatcataacttatcatttatgatgcggttaagtagagacctccacatgtctattcttgaaggacgatttccagaattcgtgcgaggattcttgagggtgcagtttccaacgggagacgttccgcagtgggttcgcaacgcgatggaggtcgctggcattgacatatccgagtgctgtgcttccaccaatgtctgacaccaagcgtataggggccacctttaactgtaccggttgactgcaaatggagttgtgccgagttaagactcttcggcaagcaaaagacgacgacaggctttcacaaagaagtttttttccgtcatacatgtagggtctcacacggattcagcataggattttccaatagtatgctgaagcttggcgacaggttttgttagtgttttgtgttgtgtttggaaaccgcagaggtatgctatgctattcttctggggtctaggttatgcttcgtcttaatcactggatgtgatttttagtggtacggtcagatcaaaggaaggtgtacccaactctgacgaatattttttgttataacgaaaagaatgttatagtccttgcaatgatctgaacctgactggctgactgggtctgcagcatgcagcagctggaacagtccagtcccggcgtgctgctgctgcctctccctatgacaattgacaagcgag

SEQ ID NO: 65893 - DNA, 1749 bp, Zea Mays
gtccgtccgaccgtccccgcgtcggcgcgtcccgcacaccgcgctcccgctcggccgctcctgcctgcgcgctgcagcagctcggctgctcgcggtcgcttgtcccgtgcgcccggcggccggctgcttgccccgccgacctattcggctgcttcctgcttgagtgcttgtcccatccggcggcccggctgcttctgcttgttcgcttagtatcaatccaggctctgatttggtggctgaagctctgtttctccatggcgcttcgtttcgagatattaggaagattcaatcgcgcccgcgcagctcgcttaactcttcccccactttacttgtcaaacaccactttttatgcctgttggaactcaaggtttcgttgctgcatttggctgatattactgaggaaggagttacgtttcagtcacctgttgatgggaagcccatgctcttgacacctgaggaatctattcatattcagaacaatattggagctgatatcatcatggcacttgatgatgttgtaaagaccacaattactggcccgaggataaaagaagctatgtatcgcaccattcgttggattgacaggtgcatagctgctcacaagaaacctgatgtccagaatttatttgggattgtgcaaggaggattggatcctgttcttagagatatctgtgttaggagcttggttgagcggaatcttcctggatatgcaattggtggtcttgctggtggcgaagacaaggattcattttggcgtgttgttgcccaatgcactgctggattgcctgaaaataaaccacgatatgtcatgggtgttggctatccacttgatattgtagtatgcagtgctttaggtgcagatatgtatgactgtgtttatccaacacggactgctcgttttgggactgcacttgtgcctgagggtgtcctaaagttgaaacataattcaatggcgactgatgaacggccaattgatcatacgtgttcatgcatggtctgcaaaaaatatacgcgcgcctacttacattgcctggtcacaaaagatgctatgggttctcagctgctgtcatatcataacttatcatttatgatgcggttaagtagagacctccacatgtctattcttgaaggacgatttccagaattcgtgcgaggattcttgagggtgcagtttccaacgggagacgttccgcagtgggttcgcaacgcgatggaggtcgctggcattgacatatccgagtgctgtgcttccaccaatgtctgacaccaagcgtataggggccacctttaactgtaccggttgactgcaaatggagttgtgccgagttaagactcttcggcaagcaaaagacgacgacaggctttcacaaagaagtttttttccgtcatacatgtagggtctcacacggattcagcataggattttccaatagtatgctgaagcttggcgacaggttttgttagtgttttgtgttgtgtttggaaaccgcagaggtatgctatgctattcttctggggtctaggttatgcttcgtcttaatcactggatgtgatttttagtggtacggtcagatcaaaggaaggtgtacccaactctgacgaatattttttgttataacgaaaagaatgttatagtccttgcaatgatctgaacctgactggctgactgggtctgcagcatgcagcagctggaacagtccagtcccggcgtgctgctgctgcctctccctatgacaattgacaagcgag

SEQ ID NO: 65894 - DNA, 3125 bp, Zea Mays
gtccgtccgaccgtccccgcgtcggcgcgtcccgcacaccgcgctcccgctcggccgctcctgcctgcgcgctgcagcagctcggctgctcgcggtcgcttgtcccgtgcgcccggcggccggctgcttgccccgccgacctattcggctgcttcctgcttgagtgcttgtcccatccggcggcccggctgcttctgcttgtgagtttgtcccgcgcttgcacggctgcttgtcccgctctgcacttgatttccaccgcgataaaggtgttctatgaaccacctgcagaactactgaaggactcagaggttctgggcaagcatgtttgttgcgttgggtgcttgtgcatttgttctgattccagtagaatatttcctattcggattagctgctgggaagcttctggagcgcgtacgatcacttgattttcaaaacgatcaaagtttaatttgttctctaagtttgatgtggataagcttgctcgactcgcggatatatatcctgatgatttttcttttaatgattgcaagactataaaagattagataagaacttttattattcatgtacgaagaattgaagagtacaaagcttattgtgatcttgctacaaattgttttaaactatgtcataattttttttaaactgtgtcataattttttttcttcgttgcgtcagcaacacttaaattttttggcgtcctccgccactgtgcacggccggcactttctaggtgcagtgttggccctccctctcccacatccgattgaagcttcaagtgcaagctggttaataggggtaaaaacggtgctgtactaaggttagactgttaaataaataacagtgagttaatctagcgagaaacatttagctattgataattaaaagtattttagctattgacaatgtaggagcatctgcaagtgactcttcatttttacctctctatttaactttctatttcttttttcataaagattacattttatatgtagcatttcactccaacatgccatatatctagtttcgctagttagagtggctagccaaatttgactagttaggggatcaatttgaaaagttagatagattgacgggttagatgattaatctgttgaaaagttgttttgctgttgagtatttaaaatttaaattaacaaatcatttagctagtctattgaagatgctataaacgagcggcaatgtaccggtcgacccaaataagcaaatttgcccagctccgggcccaactgagtccaaacgtccaagtggacgcgaaccactcttctgaaccctaaaccctcgcgctttcgcctcccataccgccgaaactgacaacccatgaccacctcgcttcccctccttcctcgtcctctttggttggactgaggtgtggattcatccatcgctggttcgcttagtatcaatccaggctctgatttggtggctgaagctctgtttctccatggcgcttcgtttcgagatattaggaagattcaatcgcgcccgcgcagctcgcttaactcttcccccactttacttgtcaaacaccactttttatgcctgttggaactcaaggtacaataaaagggttaaccactgaccagttagaggagataggttgccagattatacttggaaacacctaccatcttgaattacgtccagggtctcaacttattgatgatttgggtggcctgcacaaatttatgaattggaaaagggcattgctgactgactctggtttcgttgctgcatttggctgatattactgaggaaggagttacgtttcagtcacctgttgatgggaagcccatgctcttgacacctgaggaatctattcatattcagaacaatattggagctgatatcatcatggcacttgatgatgttgtaaagaccacaattactggcccgaggataaaagaagctatgtatcgcaccattcgttggattgacaggtgcatagctgctcacaagaaacctgatgtccagaatttatttgggattgtgcaaggaggattggatcctgttcttagagatatctgtgttaggagcttggttgagcggaatcttcctggatatgcaattggtggtcttgctggtggcgaagacaaggattcattttggcgtgttgttgcccaatgcactgctggattgcctgaaaataaaccacgatatgtcatgggtgttggctatccacttgatattgtagtatgcagtgctttaggtgcagatatgtatgactgtgtttatccaacacggactgctcgttttgggactgcacttgtgcctgagggtgtcctaaagttgaaacataattcaatggcgactgatgaacggccaattgatcatacgtgttcatgcatggtctgcaaaaaatatacgcgcgcctacttacattgcctggtcacaaaagatgctatgggttctcagctgctgtcatatcataacttatcatttatgatgcggttaagtagagacctccacatgtctattcttgaaggacgatttccagaattcgtgcgaggattcttgagggtgcagtttccaacgggagacgttccgcagtgggttcgcaacgcgatggaggtcgctggcattgacatatccgagtgctgtgcttccaccaatgtctgacaccaagcgtataggggccacctttaactgtaccggttgactgcaaatggagttgtgccgagttaagactcttcggcaagcaaaagacgacgacaggctttcacaaagaagtttttttccgtcatacatgtagggtctcacacggattcagcataggattttccaatagtatgctgaagcttggcgacaggttttgttagtgttttgtgttgtgtttggaaaccgcagaggtatgctatgctattcttctggggtctaggttatgcttcgtcttaatcactggatgtgatttttagtggtacggtcagatcaaaggaaggtgtacccaactctgacgaatattttttgttataacgaaaagaatgttatagtccttgcaatgatctgaacctgactggctgactgggtctgcagcatgcagcagctggaacagtccagtcccggcgtgctgctgctgcctctccctatgacaattgacaagcgag

SEQ ID NO: 65895 - DNA, 1718 bp, Zea Mays
gaccgtccccgcgtcggcgcgtcccgcacaccgcgctcccgctcggccgctcctgcctgcgcgctgcagcagctcggctgctcgcggtcgcttgtcccgtgcgcccggcggccggctgcttgccccgccgacctattcggctgcttcctgcttgagtgcttgtcccatccggcggcccggctgcttctgcttgttcgcttagtatcaatccaggctctgatttggtggctgaagctctgtttctccatggcgcttcgtttcgagatattaggaagattcaatcgcgcccgcgcagctcgcttaactcttcccccactttacttgtcaaacaccactttttatgcctgttggaactcaaggtttcgttgctgcatttggctgatattactgaggaaggagttacgtttcagtcacctgttgatgggaagcccatgctcttgacacctgaggaatctattcatattcagaacaatattggagctgatatcatcatggcacttgatgatgttgtaaagaccacaattactggcccgaggataaaagaagctatgtatcgcaccattcgttggattgacaggtgcatagctgaatttatttgggattgtgcaaggaggattggatcctgttcttagagatatctgtgttaggagcttggttgagcggaatcttcctggatatgcaattggtggtcttgctggtggcgaagacaaggattcattttggcgtgttgttgcccaatgcactgctggattgcctgaaaataaaccacgatatgtcatgggtgttggctatccacttgatattgtagtatgcagtgctttaggtgcagatatgtatgactgtgtttatccaacacggactgctcgttttgggactgcacttgtgcctgagggtgtcctaaagttgaaacataattcaatggcgactgatgaacggccaattgatcatacgtgttcatgcatggtctgcaaaaaatatacgcgcgcctacttacattgcctggtcacaaaagatgctatgggttctcagctgctgtcatatcataacttatcatttatgatgcggttaagtagagacctccacatgtctattcttgaaggacgatttccagaattcgtgcgaggattcttgagggtgcagtttccaacgggagacgttccgcagtgggttcgcaacgcgatggaggtcgctggcattgacatatccgagtgctgtgcttccaccaatgtctgacaccaagcgtataggggccacctttaactgtaccggttgactgcaaatggagttgtgccgagttaagactcttcggcaagcaaaagacgacgacaggctttcacaaagaagtttttttccgtcatacatgtagggtctcacacggattcagcataggattttccaatagtatgctgaagcttggcgacaggttttgttagtgttttgtgttgtgtttggaaaccgcagaggtatgctatgctattcttctggggtctaggttatgcttcgtcttaatcactggatgtgatttttagtggtacggtcagatcaaaggaaggtgtacccaactctgacgaatattttttgttataacgaaaagaatgttatagtccttgcaatgatctgaacctgactggctgactgggtctgcagcatgcagcagctggaacagtccagtcccggcgtgctgctgctgcctctccctatgacaattgacaagcgag

SEQ ID NO: 65896 - DNA, 3131 bp, Zea Mays
gaccgtccccgcgtcggcgcgtcccgcacaccgcgctcccgctcggccgctcctgcctgcgcgctgcagcagctcggctgctcgcggtcgcttgtcccgtgcgcccggcggccggctgcttgccccgccgacctattcggctgcttcctgcttgagtgcttgtcccatccggcggcccggctgcttctgcttgtgagtttgtcccgcgcttgcacggctgcttgtcccgctctgcacttgatttccaccgcgataaaggtgttctatgaaccacctgcagaactactgaaggactcagaggttctgggcaagcatgtttgttgcgttgggtgcttgtgcatttgttctgattccagtagaatatttcctattcggattagctgctgggaagcttctggagcgcgtacgatcacttgattttcaaaacgatcaaagtttaatttgttctctaagtttgatgtggataagcttgctcgactcgcggatatatatcctgatgatttttcttttaatgattgcaagactataaaagattagataagaacttttattattcatgtacgaagaattgaagagtacaaagcttattgtgatcttgctacaaattgttttaaactatgtcataattttttttaaactgtgtcataattttttttcttcgttgcgtcagcaacacttaaattttttggcgtcctccgccactgtgcacggccggcactttctaggtgcagtgttggccctccctctcccacatccgattgaagcttcaagtgcaagctggttaataggggtaaaaacggtgctgtactaaggttagactgttaaataaataacagtgagttaatctagcgagaaacatttagctattgataattaaaagtattttagctattgacaatgtaggagcatctgcaagtgactcttcatttttacctctctatttaactttctatttcttttttcataaagattacattttatatgtagcatttcactccaacatgccatatatctagtttcgctagttagagtggctagccaaatttgactagttaggggatcaatttgaaaagttagatagattgacgggttagatgattaatctgttgaaaagttgttttgctgttgagtatttaaaatttaaattaacaaatcatttagctagtctattgaagatgctataaacgagcggcaatgtaccggtcgacccaaataagcaaatttgcccagctccgggcccaactgagtccaaacgtccaagtggacgcgaaccactcttctgaaccctaaaccctcgcgctttcgcctcccataccgccgaaactgacaacccatgaccacctcgcttcccctccttcctcgtcctctttggttggactgaggtgtggattcatccatcgctggttcgcttagtatcaatccaggctctgatttggtggctgaagctctgtttctccatggcgcttcgtttcgagatattaggaagattcaatcgcgcccgcgcagctcgcttaactcttcccccactttacttgtcaaacaccactttttatgcctgttggaactcaaggtacaataaaagggttaaccactgaccagttagaggagataggttgccagattatacttggaaacacctaccatcttgaattacgtccagggtctcaacttattgatgatttgggtggcctgcacaaatttatgaattggaaaagggcattgctgactgactctggtggtttccaaatggtttcgttgctgcatttggctgatattactgaggaaggagttacgtttcagtcacctgttgatgggaagcccatgctcttgacacctgaggaatctattcatattcagaacaatattggagctgatatcatcatggcacttgatgatgttgtaaagaccacaattactggcccgaggataaaagaagctatgtatcgcaccattcgttggattgacaggtgcatagctgctcacaagaaacctgatgtccagaatttatttgggattgtgcaaggaggattggatcctgttcttagagatatctgtgttaggagcttggttgagcggaatcttcctggatatgcaattggtggtcttgctggtggcgaagacaaggattcattttggcgtgttgttgcccaatgcactgctggattgcctgaaaataaaccacgatatgtcatgggtgttggctatccacttgatattgtagtatgcagtgctttaggtgcagatatgtatgactgtgtttatccaacacggactgctcgttttgggactgcacttgtgcctgagggtgtcctaaagttgaaacataattcaatggcgactgatgaacggccaattgatcatacgtgttcatgcatggtctgcaaaaaatatacgcgcgcctacttacattgcctggtcacaaaagatgctatgggttctcagctgctgtcatatcataacttatcatttatgatgcggttaagtagagacctccacatgtctattcttgaaggacgatttccagaattcgtgcgaggattcttgagggtgcagtttccaacgggagacgttccgcagtgggttcgcaacgcgatggaggtcgctggcattgacatatccgagtgctgtgcttccaccaatgtctgacaccaagcgtataggggccacctttaactgtaccggttgactgcaaatggagttgtgccgagttaagactcttcggcaagcaaaagacgacgacaggctttcacaaagaagtttttttccgtcatacatgtagggtctcacacggattcagcataggattttccaatagtatgctgaagcttggcgacaggttttgttagtgttttgtgttgtgtttggaaaccgcagaggtatgctatgctattcttctggggtctaggttatgcttcgtcttaatcactggatgtgatttttagtggtacggtcagatcaaaggaaggtgtacccaactctgacgaatattttttgttataacgaaaagaatgttatagtccttgcaatgatctgaacctgactggctgactgggtctgcagcatgcagcagctggaacagtccagtcccggcgtgctgctgctgcctctccctatgacaattgacaagcgag

SEQ ID NO: 65897 - DNA, 1632 bp, Zea Mays
gaccgtccccgcgtcggcgcgtcccgcacaccgcgctcccgctcggccgctcctgcctgcgcgctgcagcagctcggctgctcgcggtcgcttgtcccgtgcgcccggcggccggctgcttgccccgccgacctattcggctgcttcctgcttgagtgcttgtcccatccggcggcccggctgcttctgcttgttcgcttagtatcaatccaggctctgatttggtggctgaagctctgtttctccatggcgcttcgtttcgagatattaggaagattcaatcgcgcccgcgcagctcgcttaactcttcccccactttacttgtcaaacaccactttttatgcctgttggaactcaaggtttcgttgctgcatttggctgatattactgaggaaggagttacgtttcagtcacctgttgatgggaagcccatgctcttgacacctgaggaatctattcatattcagaacaatattggagctgatatcatcatggcacttgatgatgttgtaaagaccacaattactggcccgaggataaaagaagctatgtatcgcaccattcgttggattgacaggtgcatagctgatatgcaattggtggtcttgctggtggcgaagacaaggattcattttggcgtgttgttgcccaatgcactgctggattgcctgaaaataaaccacgatatgtcatgggtgttggctatccacttgatattgtagtatgcagtgctttaggtgcagatatgtatgactgtgtttatccaacacggactgctcgttttgggactgcacttgtgcctgagggtgtcctaaagttgaaacataattcaatggcgactgatgaacggccaattgatcatacgtgttcatgcatggtctgcaaaaaatatacgcgcgcctacttacattgcctggtcacaaaagatgctatgggttctcagctgctgtcatatcataacttatcatttatgatgcggttaagtagagacctccacatgtctattcttgaaggacgatttccagaattcgtgcgaggattcttgagggtgcagtttccaacgggagacgttccgcagtgggttcgcaacgcgatggaggtcgctggcattgacatatccgagtgctgtgcttccaccaatgtctgacaccaagcgtataggggccacctttaactgtaccggttgactgcaaatggagttgtgccgagttaagactcttcggcaagcaaaagacgacgacaggctttcacaaagaagtttttttccgtcatacatgtagggtctcacacggattcagcataggattttccaatagtatgctgaagcttggcgacaggttttgttagtgttttgtgttgtgtttggaaaccgcagaggtatgctatgctattcttctggggtctaggttatgcttcgtcttaatcactggatgtgatttttagtggtacggtcagatcaaaggaaggtgtacccaactctgacgaatattttttgttataacgaaaagaatgttatagtccttgcaatgatctgaacctgactggctgactgggtctgcagcatgcagcagctggaacagtccagtcccggcgtgctgctgctgcctctccctatgacaattgacaagcgag

SEQ ID NO: 65898 - DNA, 2952 bp, Zea Mays
gaccgtccccgcgtcggcgcgtcccgcacaccgcgctcccgctcggccgctcctgcctgcgcgctgcagcagctcggctgctcgcggtcgcttgtcccgtgcgcccggcggccggctgcttgccccgccgacctattcggctgcttcctgcttgagtgcttgtcccatccggcggcccggctgcttctgcttgtgagtttgtcccgcgcttgcacggctgcttgtcccgctctgcacttgatttccaccgcgataaaggtgttctatgaaccacctgcagaactactgaaggactcagaggttctgggcaagcatgtttgttgcgttgggtgcttgtgcatttgttctgattccagtagaatatttcctattcggattagctgctgggaagcttctggagcgcgtacgatcacttgattttcaaaacgatcaaagtttaatttgttctctaagtttgatgtggataagcttgctcgactcgcggatatatatcctgatgatttttcttttaatgattgcaagactataaaagattagataagaacttttattattcatgtacgaagaattgaagagtacaaagcttattgtgatcttgctacaaattgttttaaactatgtcataattttttttaaactgtgtcataattttttttcttcgttgcgtcagcaacacttaaattttttggcgtcctccgccactgtgcacggccggcactttctaggtgcagtgttggccctccctctcccacatccgattgaagcttcaagtgcaagctggttaataggggtaaaaacggtgctgtactaaggttagactgttaaataaataacagtgagttaatctagcgagaaacatttagctattgataattaaaagtattttagctattgacaatgtaggagcatctgcaagtgactcttcatttttacctctctatttaactttctatttcttttttcataaagattacattttatatgtagcatttcactccaacatgccatatatctagtttcgctagttagagtggctagccaaatttgactagttaggggatcaatttgaaaagttagatagattgacgggttagatgattaatctgttgaaaagttgttttgctgttgagtatttaaaatttaaattaacaaatcatttagctagtctattgaagatgctataaacgagcggcaatgtaccggtcgacccaaataagcaaatttgcccagctccgggcccaactgagtccaaacgtccaagtggacgcgaaccactcttctgaaccctaaaccctcgcgctttcgcctcccataccgccgaaactgacaacccatgaccacctcgcttcccctccttcctcgtcctctttggttggactgaggtgtggattcatccatcgctggttcgcttagtatcaatccaggctctgatttggtggctgaagctctgtttctccatggcgcttcgtttcgagatattaggaagattcaatcgcgcccgcgcagctcgcttaactcttcccccactttacttgtcaaacaccactttttatgcctgttggaactcaaggtttcgttgctgcatttggctgatattactgaggaaggagttacgtttcagtcacctgttgatgggaagcccatgctcttgacacctgaggaatctattcatattcagaacaatattggagctgatatcatcatggcacttgatgatgttgtaaagaccacaattactggcccgaggataaaagaagctatgtatcgcaccattcgttggattgacaggtgcatagctgctcacaagaaacctgatgtccagaatttatttgggattgtgcaaggaggattggatcctgttcttagagatatctgtgttaggagcttggttgagcggaatcttcctggatatgcaattggtggtcttgctggtggcgaagacaaggattcattttggcgtgttgttgcccaatgcactgctggattgcctgaaaataaaccacgatatgtcatgggtgttggctatccacttgatattgtagtatgcagtgctttaggtgcagatatgtatgactgtgtttatccaacacggactgctcgttttgggactgcacttgtgcctgagggtgtcctaaagttgaaacataattcaatggcgactgatgaacggccaattgatcatacgtgttcatgcatggtctgcaaaaaatatacgcgcgcctacttacattgcctggtcacaaaagatgctatgggttctcagctgctgtcatatcataacttatcatttatgatgcggttaagtagagacctccacatgtctattcttgaaggacgatttccagaattcgtgcgaggattcttgagggtgcagtttccaacgggagacgttccgcagtgggttcgcaacgcgatggaggtcgctggcattgacatatccgagtgctgtgcttccaccaatgtctgacaccaagcgtataggggccacctttaactgtaccggttgactgcaaatggagttgtgccgagttaagactcttcggcaagcaaaagacgacgacaggctttcacaaagaagtttttttccgtcatacatgtagggtctcacacggattcagcataggattttccaatagtatgctgaagcttggcgacaggttttgttagtgttttgtgttgtgtttggaaaccgcagaggtatgctatgctattcttctggggtctaggttatgcttcgtcttaatcactggatgtgatttttagtggtacggtcagatcaaaggaaggtgtacccaactctgacgaatattttttgttataacgaaaagaatgttatagtccttgcaatgatctgaacctgactggctgactgggtctgcagcatgcagcagctggaacagtccagtcccggcgtgctgctgctgcctctccctatgacaattgacaagcgag

SEQ ID NO: 65899 - DNA, 2883 bp, Zea Mays
gaccgtccccgcgtcggcgcgtcccgcacaccgcgctcccgctcggccgctcctgcctgcgcgctgcagcagctcggctgctcgcggtcgcttgtcccgtgcgcccggcggccggctgcttgccccgccgacctattcggctgcttcctgcttgagtgcttgtcccatccggcggcccggctgcttctgcttaactactgaaggactcagaggttctgggcaagcatgtttgttgcgttgggtgcttgtgcatttgttctgattccagtagaatatttcctattcggattagctgctgggaagcttctggagcgcgtacgatcacttgattttcaaaacgatcaaagtttaatttgttctctaagtttgatgtggataagcttgctcgactcgcggatatatatcctgatgatttttcttttaatgattgcaagactataaaagattagataagaacttttattattcatgtacgaagaattgaagagtacaaagcttattgtgatcttgctacaaattgttttaaactatgtcataattttttttaaactgtgtcataattttttttcttcgttgcgtcagcaacacttaaattttttggcgtcctccgccactgtgcacggccggcactttctaggtgcagtgttggccctccctctcccacatccgattgaagcttcaagtgcaagctggttaataggggtaaaaacggtgctgtactaaggttagactgttaaataaataacagtgagttaatctagcgagaaacatttagctattgataattaaaagtattttagctattgacaatgtaggagcatctgcaagtgactcttcatttttacctctctatttaactttctatttcttttttcataaagattacattttatatgtagcatttcactccaacatgccatatatctagtttcgctagttagagtggctagccaaatttgactagttaggggatcaatttgaaaagttagatagattgacgggttagatgattaatctgttgaaaagttgttttgctgttgagtatttaaaatttaaattaacaaatcatttagctagtctattgaagatgctataaacgagcggcaatgtaccggtcgacccaaataagcaaatttgcccagctccgggcccaactgagtccaaacgtccaagtggacgcgaaccactcttctgaaccctaaaccctcgcgctttcgcctcccataccgccgaaactgacaacccatgaccacctcgcttcccctccttcctcgtcctctttggttggactgaggtgtggattcatccatcgctggtgaggacgccgggcttgtttttgttgttttttccctttctcttttcgtttatcgattttgtgggtcttcaaattcaatgtattgtttattggattggcgcttcagtttgtggcgggtttattttcaggttcgcttagtatcaatccaggctctgatttggtggctgaagctctgtttctccatggcgcttcgtttcgagatattaggaagattcaatcgcgcccgcgcagctcgcttaactcttcccccactttacttgtcaaacaccactttttatgcctgttggaactcaaggtttcgttgctgcatttggctgatattactgaggaaggagttacgtttcagtcacctgttgatgggaagcccatgctcttgacacctgaggaatctattcatattcagaacaatattggagctgatatcatcatggcacttgatgatgttgtaaagaccacaattactggcccgaggataaaagaagctatgtatcgcaccattcgttggattgacaggtgcatagctgatatgcaattggtggtcttgctggtggcgaagacaaggattcattttggcgtgttgttgcccaatgcactgctggattgcctgaaaataaaccacgatatgtcatgggtgttggctatccacttgatattgtagtatgcagtgctttaggtgcagatatgtatgactgtgtttatccaacacggactgctcgttttgggactgcacttgtgcctgagggtgtcctaaagttgaaacataattcaatggcgactgatgaacggccaattgatcatacgtgttcatgcatggtctgcaaaaaatatacgcgcgcctacttacattgcctggtcacaaaagatgctatgggttctcagctgctgtcatatcataacttatcatttatgatgcggttaagtagagacctccacatgtctattcttgaaggacgatttccagaattcgtgcgaggattcttgagggtgcagtttccaacgggagacgttccgcagtgggttcgcaacgcgatggaggtcgctggcattgacatatccgagtgctgtgcttccaccaatgtctgacaccaagcgtataggggccacctttaactgtaccggttgactgcaaatggagttgtgccgagttaagactcttcggcaagcaaaagacgacgacaggctttcacaaagaagtttttttccgtcatacatgtagggtctcacacggattcagcataggattttccaatagtatgctgaagcttggcgacaggttttgttagtgttttgtgttgtgtttggaaaccgcagaggtatgctatgctattcttctggggtctaggttatgcttcgtcttaatcactggatgtgatttttagtggtacggtcagatcaaaggaaggtgtacccaactctgacgaatattttttgttataacgaaaagaatgttatagtccttgcaatgatctgaacctgactggctgactgggtctgcagcatgcagcagctggaacagtccagtcccggcgtgctgctgctgcctctccctatgacaattgacaagcgag

SEQ ID NO: 65900 - DNA, 1902 bp, Zea Mays
gaccgtccccgcgtcggcgcgtcccgcacaccgcgctcccgctcggccgctcctgcctgcgcgctgcagcagctcggctgctcgcggtcgcttgtcccgtgcgcccggcggccggctgcttgccccgccgacctattcggctgcttcctgcttgagtgcttgtcccatccggcggcccggctgcttctgcttgttcgcttagtatcaatccaggctctgatttggtggctgaagctctgtttctccatggcgcttcgtttcgagatattaggaagattcaatcgcgcccgcgcagctcgcttaactcttcccccactttacttgtcaaacaccactttttatgcctgttggaactcaaggtacaataaaagggttaaccactgaccagttagaggagataggttgccagattatacttggaaacacctaccatcttgaattacgtccagggtctcaacttattgatgatttgggtggcctgcacaaatttatgaattggaaaagggcattgctgactgactctggtggtttccaaatgtcacctgttgatgggaagcccatgctcttgacacctgaggaatctattcatattcagaacaatattggagctgatatcatcatggcacttgatgatgttgtaaagaccacaattactggcccgaggataaaagaagctatgtatcgcaccattcgttggattgacaggtgcatagctgatatgcaattggtggtcttgctggtggcgaagacaaggattcattttggcgtgttgttgcccaatgcactgctggattgcctgaaaataaaccacgatatgtcatgggtgttggctatccacttgatattgtagtatgcagtgctttaggtgcagatatgtatgactgtgtttatccaacacggactgctcgttttgggactgcacttgtgcctgagtttccttctgagcttcagtacgacaccaacttttcttatgtattttatccttagggtgtcctaaagttgaaacataattcaatggcgactgatgaacggccaattgatcatacgtgttcatgcatggtaaggattcaacttcactgggaacaaagtgttcaagtaatatgacaatattccttgttcgtgttatatgccacggccatcttgccaggtctgcaaaaaatatacgcgcgcctacttacattgcctggtcacaaaagatgctatgggttctcagctgctgtcatatcataacttatcatttatgatgcggttaagtagagacctccacatgtctattcttgaaggacgatttccagaattcgtgcgaggattcttgagggtgcagtttccaacgggagacgttccgcagtgggttcgcaacgcgatggaggtcgctggcattgacatatccgagtgctgtgcttccaccaatgtctgacaccaagcgtataggggccacctttaactgtaccggttgactgcaaatggagttgtgccgagttaagactcttcggcaagcaaaagacgacgacaggctttcacaaagaagtttttttccgtcatacatgtagggtctcacacggattcagcataggattttccaatagtatgctgaagcttggcgacaggttttgttagtgttttgtgttgtgtttggaaaccgcagaggtatgctatgctattcttctggggtctaggttatgcttcgtcttaatcactggatgtgatttttagtggtacggtcagatcaaaggaaggtgtacccaactctgacgaatattttttgttataacgaaaagaatgttatagtccttgcaatgatctgaacctgactggctgactgggtctgcagcatgcagcagctggaacagtccagtcccggcgtgctgctgctgcctctccctatgacaattgacaagcgag

SEQ ID NO: 65901 - DNA, 1736 bp, Zea Mays
ttctgattccagtagaatatttcctattcggattagctgctgggaagcttctggagcgcgttcgcttagtatcaatccaggctctgatttggtggctgaagctctgtttctccatggcgcttcgtttcgagatattaggaagattcaatcgcgcccgcgcagctcgcttaactcttcccccactttacttgtcaaacaccactttttatgcctgttggaactcaaggtacaataaaagggttaaccactgaccagttagaggagataggttgccagattatacttggaaacacctaccatcttgaattacgtccagggtctcaacttattgatgatttgggtggcctgcacaaatttatgaattggaaaagggcattgctgactgactctggtggtttccaaatgtcacctgttgatgggaagcccatgctcttgacacctgaggaatctattcatattcagaacaatattggagctgatatcatcatggcacttgatgatgttgtaaagaccacaattactggcccgaggataaaagaagctatgtatcgcaccattcgttggattgacaggtgcatagctgctcacaagaaacctgatgtccagaatttatttgggattgtgcaaggaggattggatcctgttcttagagatatctgtgttaggagcttggttgagcggaatcttcctggatatgcaattggtggtcttgctggtggcgaagacaaggattcattttggcgtgttgttgcccaatgcactgctggattgcctgaaaataaaccacgatatgtcatgggtgttggctatccacttgatattgtagtatgcagtgctttaggtgcagatatgtatgactgtgtttatccaacacggactgctcgttttgggactgcacttgtgcctgagggtgtcctaaagttgaaacataattcaatggcgactgatgaacggccaattgatcatacgtgttcatgcatggtctgcaaaaaatatacgcgcgcctacttacattgcctggtcacaaaagatgctatgggttctcagctgctgtcatatcataacttatcatttatgatgcggttaagtagagacctccacatgtctattcttgaaggacgatttccagaattcgtgcgaggattcttgagggtgcagtttccaacgggagacgttccgcagtgggttcgcaacgcgatggaggtcgctggcattgacatatccgagtgctgtgcttccaccaatgtctgacaccaagcgtataggggccacctttaactgtaccggttgactgcaaatggagttgtgccgagttaagactcttcggcaagcaaaagacgacgacaggctttcacaaagaagtttttttccgtcatacatgtagggtctcacacggattcagcataggattttccaatagtatgctgaagcttggcgacaggttttgttagtgttttgtgttgtgtttggaaaccgcagaggtatgctatgctattcttctggggtctaggttatgcttcgtcttaatcactggatgtgatttttagtggtacggtcagatcaaaggaaggtgtacccaactctgacgaatattttttgttataacgaaaagaatgttatagtccttgcaatgatctgaacctgactggctgactgggtctgcagcatgcagcagctggaacagtccagtcccggcgtgctgctgctgcctctccctatgacaattgacaagcgag

SEQ ID NO: 65902 - DNA, 1752 bp, Zea Mays
gctgctgggaagcttctggagcgcgttcgcttagtatcaatccaggctctgatttggtggctgaagctctgtttctccatggcgcttcgtttcgagatattaggaagattcaatcgcgcccgcgcagctcgcttaactcttcccccactttacttgtcaaacaccactttttatgcctgttggaactcaaggtacaataaaagggttaaccactgaccagttagaggagataggttgccagattatacttggaaacacctaccatcttgaattacgtccagggtctcaacttattgatgatttgggtggcctgcacaaatttatgaattggaaaagggcattgctgactgactctggtggtttccaaatggtttcgttgctgcatttggctgatattactgaggaaggagttacgtttcagtcacctgttgatgggaagcccatgctcttgacacctgaggaatctattcatattcagaacaatattggagctgatatcatcatggcacttgatgatgttgtaaagaccacaattactggcccgaggataaaagaagctatgtatcgcaccattcgttggattgacaggtgcatagctgctcacaagaaacctgatgtccagaatttatttgggattgtgcaaggaggattggatcctgttcttagagatatctgtgttaggagcttggttgagcggaatcttcctggatatgcaattggtggtcttgctggtggcgaagacaaggattcattttggcgtgttgttgcccaatgcactgctggattgcctgaaaataaaccacgatatgtcatgggtgttggctatccacttgatattgtagtatgcagtgctttaggtgcagatatgtatgactgtgtttatccaacacggactgctcgttttgggactgcacttgtgcctgagggtgtcctaaagttgaaacataattcaatggcgactgatgaacggccaattgatcatacgtgttcatgcatggtctgcaaaaaatatacgcgcgcctacttacattgcctggtcacaaaagatgctatgggttctcagctgctgtcatatcataacttatcatttatgatgcggttaagtagagacctccacatgtctattcttgaaggacgatttccagaattcgtgcgaggattcttgagggtgcagtttccaacgggagacgttccgcagtgggttcgcaacgcgatggaggtcgctggcattgacatatccgagtgctgtgcttccaccaatgtctgacaccaagcgtataggggccacctttaactgtaccggttgactgcaaatggagttgtgccgagttaagactcttcggcaagcaaaagacgacgacaggctttcacaaagaagtttttttccgtcatacatgtagggtctcacacggattcagcataggattttccaatagtatgctgaagcttggcgacaggttttgttagtgttttgtgttgtgtttggaaaccgcagaggtatgctatgctattcttctggggtctaggttatgcttcgtcttaatcactggatgtgatttttagtggtacggtcagatcaaaggaaggtgtacccaactctgacgaatattttttgttataacgaaaagaatgttatagtccttgcaatgatctgaacctgactggctgactgggtctgcagcatgcagcagctggaacagtccagtcccggcgtgctgctgctgcctctccctatgacaattgacaagcgag

SEQ ID NO: 65903 - DNA, 2092 bp, Zea Mays
ctaagtttgatgtggataagcttgctcgactcgcggatatatatcctgatgatttttcttttaatgattgcaagactataaaagattagataagaacttttattattcatgtacgaagaattgaagagtacaaagcttattgtgatcttgctacaaattgttttaaactatgtcataattttttttaaactgtgtcataattttttttcttcgttgcgtcagcaacacttaaattttttggcgtcctccgccactgtgcacggccggcactttctaggtgcagtgttggccctccctctcccacatccgattgaagcttcaagtgcaagctggttaataggggtaaaaacggtgctgtactaaggttcgcttagtatcaatccaggctctgatttggtggctgaagctctgtttctccatggcgcttcgtttcgagatattaggaagattcaatcgcgcccgcgcagctcgcttaactcttcccccactttacttgtcaaacaccactttttatgcctgttggaactcaaggtacaataaaagggttaaccactgaccagttagaggagataggttgccagattatacttggaaacacctaccatcttgaattacgtccagggtctcaacttattgatgatttgggtggcctgcacaaatttatgaattggaaaagggcattgctgactgactctggtggtttccaaatggtttcgttgctgcatttggctgatattactgaggaaggagttacgtttcagtcacctgttgatgggaagcccatgctcttgacacctgaggaatctattcatattcagaacaatattggagctgatatcatcatggcacttgatgatgttgtaaagaccacaattactggcccgaggataaaagaagctatgtatcgcaccattcgttggattgacaggtgcatagctgctcacaagaaacctgatgtccagaatttatttgggattgtgcaaggaggattggatcctgttcttagagatatctgtgttaggagcttggttgagcggaatcttcctggatatgcaattggtggtcttgctggtggcgaagacaaggattcattttggcgtgttgttgcccaatgcactgctggattgcctgaaaataaaccacgatatgtcatgggtgttggctatccacttgatattgtagtatgcagtgctttaggtgcagatatgtatgactgtgtttatccaacacggactgctcgttttgggactgcacttgtgcctgagggtgtcctaaagttgaaacataattcaatggcgactgatgaacggccaattgatcatacgtgttcatgcatggtctgcaaaaaatatacgcgcgcctacttacattgcctggtcacaaaagatgctatgggttctcagctgctgtcatatcataacttatcatttatgatgcggttaagtagagacctccacatgtctattcttgaaggacgatttccagaattcgtgcgaggattcttgagggtgcagtttccaacgggagacgttccgcagtgggttcgcaacgcgatggaggtcgctggcattgacatatccgagtgctgtgcttccaccaatgtctgacaccaagcgtataggggccacctttaactgtaccggttgactgcaaatggagttgtgccgagttaagactcttcggcaagcaaaagacgacgacaggctttcacaaagaagtttttttccgtcatacatgtagggtctcacacggattcagcataggattttccaatagtatgctgaagcttggcgacaggttttgttagtgttttgtgttgtgtttggaaaccgcagaggtatgctatgctattcttctggggtctaggttatgcttcgtcttaatcactggatgtgatttttagtggtacggtcagatcaaaggaaggtgtacccaactctgacgaatattttttgttataacgaaaagaatgttatagtccttgcaatgatctgaacctgactggctgactgggtctgcagcatgcagcagctggaacagtccagtcccggcgtgctgctgctgcctctccctatgacaattgacaagcgag

SEQ ID NO: 65904 - DNA, 2931 bp, Zea Mays
gtttgatgtggataagcttgctcgactcgcggatatatatcctgatgatttttcttttaatgattgcaagactataaaagattagataagaacttttattattcatgtacgaagaattgaagagtacaaagcttattgtgatcttgctacaaattgttttaaactatgtcataattttttttaaactgtgtcataattttttttcttcgttgcgtcagcaacacttaaattttttggcgtcctccgccactgtgcacggccggcactttctaggtgcagtgttggccctccctctcccacatccgattgaagcttcaagtgcaagctggttaataggggtaaaaacggtgctgtactaaggttagactgttaaataaataacagtgagttaatctagcgagaaacatttagctattgataattaaaagtattttagctattgacaatgtaggagcatctgcaagtgactcttcatttttacctctctatttaactttctatttcttttttcataaagattacattttatatgtagcatttcactccaacatgccatatatctagtttcgctagttagagtggctagccaaatttgactagttaggggatcaatttgaaaagttagatagattgacgggttagatgattaatctgttgaaaagttgttttgctgttgagtatttaaaatttaaattaacaaatcatttagctagtctattgaagatgctataaacgagcggcaatgtaccggtcgacccaaataagcaaatttgcccagctccgggcccaactgagtccaaacgtccaagtggacgcgaaccactcttctgaaccctaaaccctcgcgctttcgcctcccataccgccgaaactgacaacccatgaccacctcgcttcccctccttcctcgtcctctttggttggactgaggtgtggattcatccatcgctggtgaggacgccgggcttgtttttgttgttttttccctttctcttttcgtttatcgattttgtgggtcttcaaattcaatgtattgtttattggattggcgcttcagtttgtggcgggtttattttcaggttcgcttagtatcaatccaggctctgatttggtggctgaagctctgtttctccatggcgcttcgtttcgagatattaggaagattcaatcgcgcccgcgcagctcgcttaactcttcccccactttacttgtcaaacaccactttttatgcctgttggaactcaaggtacaataaaagggttaaccactgaccagttagaggagataggttgccagattatacttggaaacacctaccatcttgaattacgtccagggtctcaacttattgatgatttgggtggcctgcacaaatttatgaattggaaaagggcattgctgactgactctggtggtttccaaatggtttcgttgctgcatttggctgatattactgaggaaggatcacctgttgatgggaagcccatgctcttgacacctgaggaatctattcatattcagaacaatattggagctgatatcatcatggcacttgatgatgttgtaaagaccacaattactggcccgaggataaaagaagctatgtatcgcaccattcgttggattgacaggtgcatagctgatatgcaattggtggtcttgctggtggcgaagacaaggattcattttggcgtgttgttgcccaatgcactgctggattgcctgaaaataaaccacgatatgtcatgggtgttggctatccacttgatattgtagtatgcagtgctttaggtgcagatatgtatgactgtgtttatccaacacggactgctcgttttgggactgcacttgtgcctgagggtgtcctaaagttgaaacataattcaatggcgactgatgaacggccaattgatcatacgtgttcatgcatggtctgcaaaaaatatacgcgcgcctacttacattgcctggtcacaaaagatgctatgggttctcagctgctgtcatatcataacttatcatttatgatgcggttaagtagagacctccacatgtctattcttgaaggacgatttccagagtatgctcttatcaaacccaaatttgtctgaactgctactgaaaatttgcatgggggggaaaatgacatgatttttattttgtgccatcctgtagattcgtgcgaggattcttgagggtgcaggtctgtgctgcttcttttgtcgtatcgtacacgttctgtcagtcatgttcctagagaaacagacttgaattgaaaaattagcctggattacttcgccgaaactacagaaacttgactatgatatcttactgcttgaacgatgctatgcagtttccaacgggagacgttccgcagtgggttcgcaacgcgatggaggtcgctggcattgacatatccgagtgctgtgcttccaccaatgtctgacaccaagcgtataggggccacctttaactgtaccggttgactgcaaatggagttgtgccgagttaagactcttcggcaagcaaaagacgacgacaggctttcacaaagaagtttttttccgtcatacatgtagggtctcacacggattcagcataggattttccaatagtatgctgaagcttggcgacaggttttgttagtgttttgtgttgtgtttggaaaccgcagaggtatgctatgctattcttctggggtctaggttatgcttcgtcttaatcactggatgtgatttttagtggtacggtcagatcaaaggaaggtgtacccaactctgacgaatattttttgttataacgaaaagaatgttatagtccttgcaatgatctgaacctgactggctgactgggtctgcagcatgcagcagctggaacagtccagtcccggcgtgctgctgctgcctctccctatgacaattgacaagcgag

SEQ ID NO: 65905 - DNA, 2647 bp, Zea Mays
gtttgatgtggataagcttgctcgactcgcggatatatatcctgatgatttttcttttaatgattgcaagactataaaagattagataagaacttttattattcatgtacgaagaattgaagagtacaaagcttattgtgatcttgctacaaattgttttaaactatgtcataattttttttaaactgtgtcataattttttttcttcgttgcgtcagcaacacttaaattttttggcgtcctccgccactgtgcacggccggcactttctaggtgcagtgttggccctccctctcccacatccgattgaagcttcaagtgcaagctggttaataggggtaaaaacggtgctgtactaaggttagactgttaaataaataacagtgagttaatctagcgagaaacatttagctattgataattaaaagtattttagctattgacaatgtaggagcatctgcaagtgactcttcatttttacctctctatttaactttctatttcttttttcataaagattacattttatatgtagcatttcactccaacatgccatatatctagtttcgctagttagagtggctagccaaatttgactagttaggggatcaatttgaaaagttagatagattgacgggttagatgattaatctgttgaaaagttgttttgctgttgagtatttaaaatttaaattaacaaatcatttagctagtctattgaagatgctataaacgagcggcaatgtaccggtcgacccaaataagcaaatttgcccagctccgggcccaactgagtccaaacgtccaagtggacgcgaaccactcttctgaaccctaaaccctcgcgctttcgcctcccataccgccgaaactgacaacccatgaccacctcgcttcccctccttcctcgtcctctttggttggactgaggtgtggattcatccatcgctggtgaggacgccgggcttgtttttgttgttttttccctttctcttttcgtttatcgattttgtgggtcttcaaattcaatgtattgtttattggattggcgcttcagtttgtggcgggtttattttcaggttcgcttagtatcaatccaggctctgatttggtggctgaagctctgtttctccatggcgcttcgtttcgagatattaggaagattcaatcgcgcccgcgcagctcgcttaactcttcccccactttacttgtcaaacaccactttttatgcctgttggaactcaaggtacaataaaagggttaaccactgaccagttagaggagataggttgccagattatacttggaaacacctaccatcttgaattacgtccagggtctcaacttattgatgatttgggtggcctgcacaaatttatgaattggaaaagggcattgctgactgactctggtggtttccaaatgtcacctgttgatgggaagcccatgctcttgacacctgaggaatctattcatattcagaacaatattggagctgatatcatcatggcacttgatgatgttgtaaagaccacaattactggcccgaggataaaagaagctatgtatcgcaccattcgttggattgacaggtgcatagctgatatgcaattggtggtcttgctggtggcgaagacaaggattcattttggcgtgttgttgcccaatgcactgctggattgcctgaaaataaaccacgatatgtcatgggtgttggctatccacttgatattgtagtatgcagtgctttaggtgcagatatgtatgactgtgtttatccaacacggactgctcgttttgggactgcacttgtgcctgagggtgtcctaaagttgaaacataattcaatggcgactgatgaacggccaattgatcatacgtgttcatgcatggtctgcaaaaaatatacgcgcgcctacttacattgcctggtcacaaaagatgctatgggttctcagctgctgtcatatcataacttatcatttatgatgcggttaagtagagacctccacatgtctattcttgaaggacgatttccagaattcgtgcgaggattcttgagggtgcagtttccaacgggagacgttccgcagtgggttcgcaacgcgatggaggtcgctggcattgacatatccgagtgctgtgcttccaccaatgtctgacaccaagcgtataggggccacctttaactgtaccggttgactgcaaatggagttgtgccgagttaagactcttcggcaagcaaaagacgacgacaggctttcacaaagaagtttttttccgtcatacatgtagggtctcacacggattcagcataggattttccaatagtatgctgaagcttggcgacaggttttgttagtgttttgtgttgtgtttggaaaccgcagaggtatgctatgctattcttctggggtctaggttatgcttcgtcttaatcactggatgtgatttttagtggtacggtcagatcaaaggaaggtgtacccaactctgacgaatattttttgttataacgaaaagaatgttatagtccttgcaatgatctgaacctgactggctgactgggtctgcagcatgcagcagctggaacagtccagtcccggcgtgctgctgctgcctctccctatgacaattgacaagcgag

SEQ ID NO: 65906 - DNA, 2523 bp, Zea Mays
atttttcttttaatgattgcaagactataaaagattagataagaacttttattattcatgtacgaagaattgaagagtacaaagcttattgtgatcttgctacaaattgttttaaactatgtcataattttttttaaactgtgtcataattttttttcttcgttgcgtcagcaacacttaaattttttggcgtcctccgccactgtgcacggccggcactttctaggtgcagtgttggccctccctctcccacatccgattgaagcttcaagtgcaagctggttaataggggtaaaaacggtgctgtactaaggttagactgttaaataaataacagtgagttaatctagcgagaaacatttagctattgataattaaaagtattttagctattgacaatgtaggagcatctgcaagtgactcttcatttttacctctctatttaactttctatttcttttttcataaagattacattttatatgtagcatttcactccaacatgccatatatctagtttcgctagttagagtggctagccaaatttgactagttaggggatcaatttgaaaagttagatagattgacgggttagatgattaatctgttgaaaagttgttttgctgttgagtatttaaaatttaaattaacaaatcatttagctagtctattgaagatgctataaacgagcggcaatgtaccggtcgacccaaataagcaaatttgcccagctccgggcccaactgagtccaaacgtccaagtggacgcgaaccactcttctgaaccctaaaccctcgcgctttcgcctcccataccgccgaaactgacaacccatgaccacctcgcttcccctccttcctcgtcctctttggttggactgaggtgtggattcatccatcgctggttcgcttagtatcaatccaggctctgatttggtggctgaagctctgtttctccatggcgcttcgtttcgagatattaggaagattcaatcgcgcccgcgcagctcgcttaactcttcccccactttacttgtcaaacaccactttttatgcctgttggaactcaaggtacaataaaagggttaaccactgaccagttagaggagataggttgccagattatacttggaaacacctaccatcttgaattacgtccagggtctcaacttattgatgatttgggtggcctgcacaaatttatgaattggaaaagggcattgctgactgactctggtggtttccaaatggtttcgttgctgcatttggctgatattactgaggaaggagttacgtttcagtcacctgttgatgggaagcccatgctcttgacacctgaggaatctattcatattcagaacaatattggagctgatatcatcatggcacttgatgatgttgtaaagaccacaattactggcccgaggataaaagaagctatgtatcgcaccattcgttggattgacaggtgcatagctgatatgcaattggtggtcttgctggtggcgaagacaaggattcattttggcgtgttgttgcccaatgcactgctggattgcctgaaaataaaccacgatatgtcatgggtgttggctatccacttgatattgtagtatgcagtgctttaggtgcagatatgtatgactgtgtttatccaacacggactgctcgttttgggactgcacttgtgcctgagggtgtcctaaagttgaaacataattcaatggcgactgatgaacggccaattgatcatacgtgttcatgcatggtctgcaaaaaatatacgcgcgcctacttacattgcctggtcacaaaagatgctatgggttctcagctgctgtcatatcataacttatcatttatgatgcggttaagtagagacctccacatgtctattcttgaaggacgatttccagaattcgtgcgaggattcttgagggtgcagtttccaacgggagacgttccgcagtgggttcgcaacgcgatggaggtcgctggcattgacatatccgagtgctgtgcttccaccaatgtctgacaccaagcgtataggggccacctttaactgtaccggttgactgcaaatggagttgtgccgagttaagactcttcggcaagcaaaagacgacgacaggctttcacaaagaagtttttttccgtcatacatgtagggtctcacacggattcagcataggattttccaatagtatgctgaagcttggcgacaggttttgttagtgttttgtgttgtgtttggaaaccgcagaggtatgctatgctattcttctggggtctaggttatgcttcgtcttaatcactggatgtgatttttagtggtacggtcagatcaaaggaaggtgtacccaactctgacgaatattttttgttataacgaaaagaatgttatagtccttgcaatgatctgaacctgactggctgactgggtctgcagcatgcagcagctggaacagtccagtcccggcgtgctgctgctgcctctccctatgacaattgacaagcgag

SEQ ID NO: 65907 - DNA, 2599 bp, Zea Mays
gtacaaagcttattgtgatcttgctacaaattgttttaaactatgtcataattttttttaaactgtgtcataattttttttcttcgttgcgtcagcaacacttaaattttttggcgtcctccgccactgtgcacggccggcactttctaggtgcagtgttggccctccctctcccacatccgattgaagcttcaagtgcaagctggttaataggggtaaaaacggtgctgtactaaggttagactgttaaataaataacagtgagttaatctagcgagaaacatttagctattgataattaaaagtattttagctattgacaatgtaggagcatctgcaagtgactcttcatttttacctctctatttaactttctatttcttttttcataaagattacattttatatgtagcatttcactccaacatgccatatatctagtttcgctagttagagtggctagccaaatttgactagttaggggatcaatttgaaaagttagatagattgacgggttagatgattaatctgttgaaaagttgttttgctgttgagtatttaaaatttaaattaacaaatcatttagctagtctattgaagatgctataaacgagcggcaatgtaccggtcgacccaaataagcaaatttgcccagctccgggcccaactgagtccaaacgtccaagtggacgcgaaccactcttctgaaccctaaaccctcgcgctttcgcctcccataccgccgaaactgacaacccatgaccacctcgcttcccctccttcctcgtcctctttggttggactgaggtgtggattcatccatcgctggttcgcttagtatcaatccaggctctgatttggtggctgaagctctgtttctccatggcgcttcgtttcgagatattaggaagattcaatcgcgcccgcgcagctcgcttaactcttcccccactttacttgtcaaacaccactttttatgcctgttggaactcaaggtttcgttgctgcatttggctgatattactgaggaaggagttacgtttcagtcacctgttgatgggaagcccatgctcttgacacctgaggaatctattcatattcagaacaatattggagctgatatcatcatggcacttgatgatgttgtaaagaccacaattactggcccgaggataaaagaagctatgtatcgcaccattcgttggattgacaggtgcatagctgaatttatttgggattgtgcaaggaggattggatcctgttcttagagatatctgtgttaggagcttggttgagcggaatcttcctggatatgcaattggtggtcttgctggtggcgaagacaaggattcattttggcgtgttgttgcccaatgcactgctggattgcctgaaaataaaccacgatatgtcatgggtgttggctatccacttgatattgtagtatgcagtgctttaggtgcagatatgtatgactgtgtttatccaacacggactgctcgttttgggactgcacttgtgcctgagggtgtcctaaagttgaaacataattcaatggcgactgatgaacggccaattgatcatacgtgttcatgcatggtctgcaaaaaatatacgcgcgcctacttacattgcctggtcacaaaagatgctatgggttctcagctgctgtcatatcataacttatcatttatgatgcggttaagtagagacctccacatgtctattcttgaaggacgatttccagagtatgctcttatcaaacccaaatttgtctgaactgctactgaaaatttgcatgggggggaaaatgacatgatttttattttgtgccatcctgtagattcgtgcgaggattcttgagggtgcaggtctgtgctgcttcttttgtcgtatcgtacacgttctgtcagtcatgttcctagagaaacagacttgaattgaaaaattagcctggattacttcgccgaaactacagaaacttgactatgatatcttactgcttgaacgatgctatgcagtttccaacgggagacgttccgcagtgggttcgcaacgcgatggaggtcgctggcattgacatatccgagtgctgtgcttccaccaatgtctgacaccaagcgtataggggccacctttaactgtaccggttgactgcaaatggagttgtgccgagttaagactcttcggcaagcaaaagacgacgacaggctttcacaaagaagtttttttccgtcatacatgtagggtctcacacggattcagcataggattttccaatagtatgctgaagcttggcgacaggttttgttagtgttttgtgttgtgtttggaaaccgcagaggtatgctatgctattcttctggggtctaggttatgcttcgtcttaatcactggatgtgatttttagtggtacggtcagatcaaaggaaggtgtacccaactctgacgaatattttttgttataacgaaaagaatgttatagtccttgcaatgatctgaacctgactggctgactgggtctgcagcatgcagcagctggaacagtccagtcccggcgtgctgctgctgcctctccctatgacaattgacaagcgag

SEQ ID NO: 65908 - DNA, 2661 bp, Zea Mays
gtacaaagcttattgtgatcttgctacaaattgttttaaactatgtcataattttttttaaactgtgtcataattttttttcttcgttgcgtcagcaacacttaaattttttggcgtcctccgccactgtgcacggccggcactttctaggtgcagtgttggccctccctctcccacatccgattgaagcttcaagtgcaagctggttaataggggtaaaaacggtgctgtactaaggttagactgttaaataaataacagtgagttaatctagcgagaaacatttagctattgataattaaaagtattttagctattgacaatgtaggagcatctgcaagtgactcttcatttttacctctctatttaactttctatttcttttttcataaagattacattttatatgtagcatttcactccaacatgccatatatctagtttcgctagttagagtggctagccaaatttgactagttaggggatcaatttgaaaagttagatagattgacgggttagatgattaatctgttgaaaagttgttttgctgttgagtatttaaaatttaaattaacaaatcatttagctagtctattgaagatgctataaacgagcggcaatgtaccggtcgacccaaataagcaaatttgcccagctccgggcccaactgagtccaaacgtccaagtggacgcgaaccactcttctgaaccctaaaccctcgcgctttcgcctcccataccgccgaaactgacaacccatgaccacctcgcttcccctccttcctcgtcctctttggttggactgaggtgtggattcatccatcgctggtgaggacgccgggcttgtttttgttgttttttccctttctcttttcgtttatcgattttgtgggtcttcaaattcaatgtattgtttattggattggcgcttcagtttgtggcgggtttattttcaggttcgcttagtatcaatccaggctctgatttggtggctgaagctctgtttctccatggcgcttcgtttcgagatattaggaagattcaatcgcgcccgcgcagctcgcttaactcttcccccactttacttgtcaaacaccactttttatgcctgttggaactcaaggtacaataaaagggttaaccactgaccagttagaggagataggttgccagattatacttggaaacacctaccatcttgaattacgtccagggtctcaacttattgatgatttgggtggcctgcacaaatttatgaattggaaaagggcattgctgactgactctggtggtttccaaatggtttcgttgctgcatttggctgatattactgaggaaggagttacgtttcagtcacctgttgatgggaagcccatgctcttgacacctgaggaatctattcatattcagaacaatattggagctgatatcatcatggcacttgatgatgttgtaaagaccacaattactggcccgaggataaaagaagctatgtatcgcaccattcgttggattgacaggtgcatagctgaatttatttgggattgtgcaaggaggattggatcctgttcttagagatatctgtgttaggagcttggttgagcggaatcttcctggatatgcaattggtggtcttgctggtggcgaagacaaggattcattttggcgtgttgttgcccaatgcactgctggattgcctgaaaataaaccacgatatgtcatgggtgttggctatccacttgatattgtagtatgcagtgctttaggtgcagatatgtatgactgtgtttatccaacacggactgctcgttttgggactgcacttgtgcctgagggtgtcctaaagttgaaacataattcaatggcgactgatgaacggccaattgatcatacgtgttcatgcatggtctgcaaaaaatatacgcgcgcctacttacattgcctggtcacaaaagatgctatgggttctcagctgctgtcatatcataacttatcatttatgatgcggttaagtagagacctccacatgtctattcttgaaggacgatttccagaattcgtgcgaggattcttgagggtgcagtttccaacgggagacgttccgcagtgggttcgcaacgcgatggaggtcgctggcattgacatatccgagtgctgtgcttccaccaatgtctgacaccaagcgtataggggccacctttaactgtaccggttgactgcaaatggagttgtgccgagttaagactcttcggcaagcaaaagacgacgacaggctttcacaaagaagtttttttccgtcatacatgtagggtctcacacggattcagcataggattttccaatagtatgctgaagcttggcgacaggttttgttagtgttttgtgttgtgtttggaaaccgcagaggtatgctatgctattcttctggggtctaggttatgcttcgtcttaatcactggatgtgatttttagtggtacggtcagatcaaaggaaggtgtacccaactctgacgaatattttttgttataacgaaaagaatgttatagtccttgcaatgatctgaacctgactggctgactgggtctgcagcatgcagcagctggaacagtccagtcccggcgtgctgctgctgcctctccctatgacaattgacaagcgag

SEQ ID NO: 65909 - DNA, 2633 bp, Zea Mays
gtacaaagcttattgtgatcttgctacaaattgttttaaactatgtcataattttttttaaactgtgtcataattttttttcttcgttgcgtcagcaacacttaaattttttggcgtcctccgccactgtgcacggccggcactttctaggtgcagtgttggccctccctctcccacatccgattgaagcttcaagtgcaagctggttaataggggtaaaaacggtgctgtactaaggttagactgttaaataaataacagtgagttaatctagcgagaaacatttagctattgataattaaaagtattttagctattgacaatgtaggagcatctgcaagtgactcttcatttttacctctctatttaactttctatttcttttttcataaagattacattttatatgtagcatttcactccaacatgccatatatctagtttcgctagttagagtggctagccaaatttgactagttaggggatcaatttgaaaagttagatagattgacgggttagatgattaatctgttgaaaagttgttttgctgttgagtatttaaaatttaaattaacaaatcatttagctagtctattgaagatgctataaacgagcggcaatgtaccggtcgacccaaataagcaaatttgcccagctccgggcccaactgagtccaaacgtccaagtggacgcgaaccactcttctgaaccctaaaccctcgcgctttcgcctcccataccgccgaaactgacaacccatgaccacctcgcttcccctccttcctcgtcctctttggttggactgaggtgtggattcatccatcgctggtgaggacgccgggcttgtttttgttgttttttccctttctcttttcgtttatcgattttgtgggtcttcaaattcaatgtattgtttattggattggcgcttcagtttgtggcgggtttattttcaggttcgcttagtatcaatccaggctctgatttggtggctgaagctctgtttctccatggcgcttcgtttcgagatattaggaagattcaatcgcgcccgcgcagctcgcttaactcttcccccactttacttgtcaaacaccactttttatgcctgttggaactcaaggtacaataaaagggttaaccactgaccagttagaggagataggttgccagattatacttggaaacacctaccatcttgaattacgtccagggtctcaacttattgatgatttgggtggcctgcacaaatttatgaattggaaaagggcattgctgactgactctggtggtttccaaatgtcacctgttgatgggaagcccatgctcttgacacctgaggaatctattcatattcagaacaatattggagctgatatcatcatggcacttgatgatgttgtaaagaccacaattactggcccgaggataaaagaagctatgtatcgcaccattcgttggattgacaggtgcatagctgctcacaagaaacctgatgtccagaatttatttgggattgtgcaaggaggattggatcctgttcttagagatatctgtgttaggagcttggttgagcggaatcttcctggatatgcaattggtggtcttgctggtggcgaagacaaggattcattttggcgtgttgttgcccaatgcactgctggattgcctgaaaataaaccacgatatgtcatgggtgttggctatccacttgatattgtagtatgcagtgctttaggtgcagatatgtatgactgtgtttatccaacacggactgctcgttttgggactgcacttgtgcctgagggtgtcctaaagttgaaacataattcaatggcgactgatgaacggccaattgatcatacgtgttcatgcatggtctgcaaaaaatatacgcgcgcctacttacattgcctggtcacaaaagatgctatgggttctcagctgctgtcatatcataacttatcatttatgatgcggttaagtagagacctccacatgtctattcttgaaggacgatttccagaattcgtgcgaggattcttgagggtgcagtttccaacgggagacgttccgcagtgggttcgcaacgcgatggaggtcgctggcattgacatatccgagtgctgtgcttccaccaatgtctgacaccaagcgtataggggccacctttaactgtaccggttgactgcaaatggagttgtgccgagttaagactcttcggcaagcaaaagacgacgacaggctttcacaaagaagtttttttccgtcatacatgtagggtctcacacggattcagcataggattttccaatagtatgctgaagcttggcgacaggttttgttagtgttttgtgttgtgtttggaaaccgcagaggtatgctatgctattcttctggggtctaggttatgcttcgtcttaatcactggatgtgatttttagtggtacggtcagatcaaaggaaggtgtacccaactctgacgaatattttttgttataacgaaaagaatgttatagtccttgcaatgatctgaacctgactggctgactgggtctgcagcatgcagcagctggaacagtccagtcccggcgtgctgctgctgcctctccctatgacaattgacaagcgag

SEQ ID NO: 65910 - DNA, 1736 bp, Zea Mays
cttcctgttgggtgagttttcatttttcttctcttcttccacttgttcttggagatctcttgttcttgtgcttggatatggtgctagaaacgttaaaatccaatgtagcagcatatatttgatggttcattcattaacaggatggaccctaagtcaagttatttgctaataatcagacttactggtaatcctaaaaagcatagaaagaattttcatactttgaatgcagcaaggttgtagattccgatttatgcaatttcaaggatcttgttcaagaaattgttgatcagtacccgcatagatacaatgagataatgcatgttttttactatgatgttgcccaaaaaaaccttcccacaaattaaaacagaccaagaactcctgaaaatgtttagcaaacatgttgacagcaagatagtgctcatgaccattacatacactgagcccaccgatgttgtcgcggtcctagagtggtgctacactgaagaagatatcccacgcataccttctttggcttgtccatctctaccaccagtgagccaaataaccgaacctataacaaagcttcccacacagccttgtacaagtgaacctagcacatataacaatgacgatgatggttatttggcaaatcctgaaccccataaggaacatgttggtgttgacgaggaaggcttttacttgactgttgaaaaaattgcgagtgaagagagtgactctgagtctgattctgaatctgatgaagagtacaatgaagaagatgtaaatgaccctccaatgagtgtaggcaacatatatcccaacatgcgagaatttaagttggcattaaatcaacatgatatcaaatctgaatttgagtataatattgaaaagagtgacccagggagagtgagggcatattgttcaaggaagaaggaagaagggtgtagatggaggttgcatgcttctataatgagggacaatacaacattaaaggtaaggaagaatccacatcaacatacgtgctctagtgcaagaagtaaggtcgtcaagaatgcaaccaaattttggctggaagaagacatactcagcggttcaagagttgtacagaggctggtggcagcactacaagaaagaaggggtcacaccagtgccctatttgcaagggatatggccataggtggtataactgtaagaatggtgacccagatgacatagcggctatgctagctgagaaaggtatcctatgttgtctttgggtacaacaacaacaacaactaccacctctatgcctacaaaagacaagaagaaggctaaagggaaggcaaaggcacaagggaagacaaggaagaacaaagtttcagtggcacctgatagtccagcaatgtctacaagaagcagaactcctcaaaggcaaagccatgctgcccacacaaggagcaagagaaagcttccagacttgaatctgtagttggtccatatcactttgagatccctatcacttttgtatggcgtgcattgtgcatgtgttattttgcttgataatgtatctagtatgttctggagatctctaggttctgtgagggcacttgtagcttgggtccaccagtatgacctatatggtctgtgaacaaatgagatctatattctgtatggtgtgtggtctgtgaacaaaggggtattttggtctgtgaacaaatgtttacctgttgtttaactgcttatggatggtaatgtcattcaagggatcaaaaatt

SEQ ID NO: 65911 - DNA, 1560 bp, Zea Mays
gttttaaggcattctaaacttagctctggacctcagttttcaaaactgcggtattataaactacggtattgtcataactaaagtatagtatagtatttcaaaaactgtggttttcaaaaactttgttcccaaacagggcctaagtgtgcaagtgcaagtgcaaccgcgagcgcgaccttttcccgtgggcgcctaggaaaaacagccgtttcctgcgcccgtccctcaccttcacgtcggcgaccgaccggcagaccgacaaactcgaggcaggccccaatggcgttggctcgcctccgcctcctcgaccgctacggtctcctgtcgccggcgctctctgcgacggcgctgcggtccttgggagacctgcgcgcgctctgcacgctctccaccacgctgcggtccggcgccggcgaggacgagatcgagcgcatccgccgcgagttcgatgacgccaagcgcaactacctcagcattcccgccgccatcaaggacatgcccaagatgaatccgcaaggcatttacgtcaacaagaacgtcaagctggacgacctccaggtctacggcttcgactacgactacacgctgtcgcactactccgagcacctgcaatgccttatctacgatcttgccaaaaggcacttggtcaatgagttgaagtatccggagagttgcttgcagtacgagtatgaccgcaccttccccatcaggggtttgtactatgacagacttaaagggtgcctactcaagcttgatttcttcggctctattgaaccagatggttgcttctttgggcggcaaaggctgagtttgagtgagataaaagagctctatggcacacggcatattggcagagatcaagctcgtcatcttgttgggctgatggatgtcttctgttttagtgaggcatgtctgattgccgatattgttcaacactttatagatgcaaaactggagtttgatccatcttacatatatgaggatgttaatcaatcgattcagcatgttcacagaagtggtttaattcacaggcaaattctttccgagcctgagaaatttctgataaaaaaaagccaggtgttccgtttcttgaagatgctgaaagagaaagggaaaaagctatttcttcttactaattcgcctttctactttgtagatggagggatgcgttatttgctagaggaccaacattttgatggaaattcctggagggaactgtttgatgttgtgattgcgcaggcaaataaaccaactttctataactcagatcacccattcagggtgtatgacactcaaaaggacaccttaacttttactgcagttgacaagtttctgccagatcaagtatactatcatggctgtttgaaatcatttctacagatcacaaaatggaaaggctcagaggtgatatattttggtgaccatcttttgagtgacttgagaggaccttcaaaagctggttggcgaacagctgctgtaattcgagaacttgaggatgaaatagaaatccaaaacggtgacagctaccgattccaacagattgggactgtgagagggaac

SEQ ID NO: 65912 - DNA, 3217 bp, Zea Mays
gttttaaggcattctaaacttagctctggacctcagttttcaaaactgcggtattataaactacggtattgtcataactaaagtatagtatagtatttcaaaaactgtggttttcaaaaactttgttcccaaacagggcctaagtgtgcaagtgcaagtgcaaccgcgagcgcgaccttttcccgtgggcgcctaggaaaaacagccgtttcctgcgcccgtccctcaccttcacgtcggcgaccgaccggcagaccgacaaactcgaggcaggccccaatggcgttggctcgcctccgcctcctcgaccgctacggtctcctgtcgccggcgctctctgcgacggcgctgcggtccttgggagacctgcgcgcgctctgcacgctctccaccacgctgcggtccggcgccggcgaggacgagatcgagcgcatccgccgcgagttcgatgacgccaagcgcaactacctcagcattcccgccgccatcaaggacatgcccaagatgaatccgcaaggcatttacgtcaacaagaacgtcaagctggacgacctccaggtctacggcttcgactacgactacacgctgtcgcactactccgagcacctgcaatgccttatctacgatcttgccaaaaggcacttggtcaatgagttgaagtatccggagagttgcttgcagtacgagtatgaccgcaccttccccatcaggggtttgtactatgacagacttaaagggtgcctactcaagcttgatttcttcggctctattgaaccagatggttgcttctttgggcggcaaaggctgagtttgagtgagataaaagagctctatggcacacggcatattggcagagatcaagctcgtcatcttgttgggctgatggatgtcttctgttttagtgaggcatgtctgattgccgatattgttcaacactttatagatgcaaaactggagtttgatccatcttacatatatgaggatgttaatcaatcgattcagcatgttcacagaagtggtttaattcacaggcaaattctttccgagcctgagaaatttctgataaaaaaaagccaggtgttccgtttcttgaagatgctgaaagagaaagggaaaaagctatttcttcttactaattcgcctttctactttgtagatggagggatgcgttatttgctagaggttttgtttctaaatctaaatctgcttgtatgttttgtccatattgttgagcatccaaaggcaagatttttaaccagaaccaatttctatttggtttatgaaatacatatatgttttttgatataacctttttttcttattttctgagttctgtcttgaccttgtatatcttttctttgagcgttaccttttggtttgagaatatgaaatcatgttttaacttgacacatgccagccactccatgcattggccttgagcccttgacacatattcttgatgcttaaagtgaacatttagaatgtacataatgcttccttcctttgtttctagcattcattaaagtttgttgtatactactacaacacaggggagaggtatggagtacaaatgaaattctttatattattaattttatgtctttcttgtaaattttttggtgagttattccaaatagaatgtagcatgtcagcgtaatatgaaaaatatttttgcttactcaaatattctctgcattgactattttcacaatttggttgggcaggaccaacattttgatggaaattcctggagggaactgtttgatgttgtgattgcgcaggcaaataaaccaactttctataactcagatcacccattcagggtgtatgacactcaaaaggacaccttaacttttactgcagttgacaagtttctgccagatcaagtatactatcatggctgtttgaaatcatttctacagatcacaaaatggaaaggctcagaggtgatatattttggtgaccatcttttgagtgacttgagaggaccttcaaaagctggttggcgaacagctgctgtaattcgagaacttgaggatgaaatagaaatccaaaacggtgacagctaccgattccaacagattgggactgtgagagggaactgttcatgccgcactgttgatcggtacaatttgaaaggcacagtcggggcctgtttggcaaaattgagtataatacatgatctacttgggaaagtccatgcagctgttgttagcaccgagaaaggccaagtctataaagcattgctcaatgagttgaatgcagaaagacgtcaatgccgatctgggatgcgagatttgttcaatacctcttttggtgcaacatttcttacagacacgggaagggaatcatcattttcctatcacattcatcaatatgccgatatttacacgagcaagcttgagaacttcttatcatatgcccctgaatcttggcttcatccacctcatgacataaagatcatgccacacaatgcgaaggtcccagcgagccttttcagtacctcctagttcatcctttctctatttcggtggagaaccaagccgtagtacccccacctatggtttctgtgcgtgaccacgtgacaggattgtggactgctgctgcattcgcttgcgttatactataactgaagcaccatatgatgcatcaatccagcagaccagcaagttagcattctctagaattgccatggaattatcagtcatgtgagtagttaaccgactcatttgcctgtatgacgaagcctctgttttccgtttaaaataaaaaaaggaagcatctgagaggccgcatacttgtgttcccatgaaaccctaccaacctgtaatggccgccaataaaacagtcacacgcaacccatctcgtttccccattttattcgcattctgctacactctttgctgcactcatgttacactgaactcgcctggtggcatctgacaagttttttgggatgagcagaagataatttgggttcgggcaacggataaattataaaatgcttatttgtccttgtctggaacaggaaggctatcttcaattctattgtttatggtcctagagactggatggagttccagttcttgctttgcatgaatgtggagatctggaatgtcaagaataatggcaattagtgcactcatatgaacacagaaaacataatattctgattcttcactgacgaagattttgttaaaaactatccagtttgctt

SEQ ID NO: 65913 - DNA, 3139 bp, Zea Mays
gttttaaggcattctaaacttagctctggacctcagttttcaaaactgcggtattataaactacggtattgtcataactaaagtatagtatagtatttcaaaaactgtggttttcaaaaactttgttcccaaacagggcctaagtgtgcaagtgcaagtgcaaccgcgagcgcgaccttttcccgtgggcgcctaggaaaaacagccgtttcctgcgcccgtccctcaccttcacgtcggcgaccgaccggcagaccgacaaactcgaggcaggccccaatggcgttggctcgcctccgcctcctcgaccgctacggtctcctgtcgccggcgctctctgcgacggcgctgcggtccttgggagacctgcgcgcgctctgcacgctctccaccacgctgcggtccggcgccggcgaggacgagatcgagcgcatccgccgcgagttcgatgacgccaagcgcaactacctcagcattcccgccgccatcaaggacatgcccaagatgaatccgcaaggcatttacgtcaacaagaacgtcaagctggacgacctccaggtctacggcttcgactacgactacacgctgtcgcactactccgagcacctgcaatgccttatctacgatcttgccaaaaggcacttggtcaatgagttgaagtatccggagagttgcttgcagtacgagtatgaccgcaccttccccatcaggggtttgtactatgacagacttaaagggtgcctactcaagcttgatttcttcggctctattgaaccagatggttgcttctttgggcggcaaaggctgagtttgagtgagataaaagagctctatggcacacggcatattggcagagatcaagctcgtcatcttgttgggctgatggatgtcttctgttttagtgaggcatgtctgattgccgatattgttcaacactttatagatgcaaaactggagtttgatccatcttacatatatgaggatgttaatcaatcgattcagcatgttcacagaagtggtttaattcacaggcaaattctttccgagcctgagaaatttctgataaaaaaaagccaggtgttccgtttcttgaagatgctgaaagagaaagggaaaaagctatttcttcttactaattcgcctttctactttgtagatggagggatgcgttatttgctagaggttttgtttctaaatctaaatctgcttgtatgttttgtccatattgttgagcatccaaaggcaagatttttaaccagaaccaatttctatttggtttatgaaatacatatatgttttttgatataacctttttttcttattttctgagttctgtcttgaccttgtatatcttttctttgagcgttaccttttggtttgagaatatgaaatcatgttttaacttgacacatgccagccactccatgcattggccttgagcccttgacacatattcttgatgcttaaagtgaacatttagaatgtacataatgcttccttcctttgtttctagcattcattaaagtttgttgtatactactacaacacaggggagaggtatggagtacaaatgaaattctttatattattaattttatgtctttcttgtaaattttttggtgagttattccaaatagaatgtagcatgtcagcgtaatatgaaaaatatttttgcttactcaaatattctctgcattgactattttcacaatttggttgggcaggaccaacattttgatggaaattcctggagggaactgtttgatgttgtgattgcgcaggcaaataaaccaactttctataactcagatcacccattcagggtgtatgacactcaaaaggacaccttaacttttactgcagttgacaagtttctgccagatcaagtatactatcatggctgtttgaaatcatttctacagatcacaaaatggaaaggctcagaggtgatatattttggtgaccatcttttgagtgacttgagaggaccttcaaaagctggttggcgaacagctgctgtaattcgagaacttgaggatgaaatagaaatccaaaacggtgacagctaccgattccaacaggcaaaattgagtataatacatgatctacttgggaaagtccatgcagctgttgttagcaccgagaaaggccaagtctataaagcattgctcaatgagttgaatgcagaaagacgtcaatgccgatctgggatgcgagatttgttcaatacctcttttggtgcaacatttcttacagacacgggaagggaatcatcattttcctatcacattcatcaatatgccgatatttacacgagcaagcttgagaacttcttatcatatgcccctgaatcttggcttcatccacctcatgacataaagatcatgccacacaatgcgaaggtcccagcgagccttttcagtacctcctagttcatcctttctctatttcggtggagaaccaagccgtagtacccccacctatggtttctgtgcgtgaccacgtgacaggattgtggactgctgctgcattcgcttgcgttatactataactgaagcaccatatgatgcatcaatccagcagaccagcaagttagcattctctagaattgccatggaattatcagtcatgtgagtagttaaccgactcatttgcctgtatgacgaagcctctgttttccgtttaaaataaaaaaaggaagcatctgagaggccgcatacttgtgttcccatgaaaccctaccaacctgtaatggccgccaataaaacagtcacacgcaacccatctcgtttccccattttattcgcattctgctacactctttgctgcactcatgttacactgaactcgcctggtggcatctgacaagttttttgggatgagcagaagataatttgggttcgggcaacggataaattataaaatgcttatttgtccttgtctggaacaggaaggctatcttcaattctattgtttatggtcctagagactggatggagttccagttcttgctttgcatgaatgtggagatctggaatgtcaagaataatggcaattagtgcactcatatgaacacagaaaacataatattctgattcttcactgacgaagattttgttaaaaactatccagtttgctt

SEQ ID NO: 65914 - DNA, 2432 bp, Zea Mays
gttttaaggcattctaaacttagctctggacctcagttttcaaaactgcggtattataaactacggtattgtcataactaaagtatagtatagtatttcaaaaactgtggttttcaaaaactttgttcccaaacagggcctaagtgtgcaagtgcaagtgcaaccgcgagcgcgaccttttcccgtgggcgcctaggaaaaacagccgtttcctgcgcccgtccctcaccttcacgtcggcgaccgaccggcagaccgacaaactcgaggcaggccccaatggcgttggctcgcctccgcctcctcgaccgctacggtctcctgtcgccggcgctctctgcgacggcgctgcggtccttgggagacctgcgcgcgctctgcacgctctccaccacgctgcggtccggcgccggcgaggacgagatcgagcgcatccgccgcgagttcgatgacgccaagcgcaactacctcagcattcccgccgccatcaaggacatgcccaagatgaatccgcaaggcatttacgtcaacaagaacgtcaagctggacgacctccaggtctacggcttcgactacgactacacgctgtcgcactactccgagcacctgcaatgccttatctacgatcttgccaaaaggcacttggtcaatgagttgaagtatccggagagttgcttgcagtacgagtatgaccgcaccttccccatcaggggtttgtactatgacagacttaaagggtgcctactcaagcttgatttcttcggctctattgaaccagatggttgcttctttgggcggcaaaggctgagtttgagtgagataaaagagctctatggcacacggcatattggcagagatcaagctcgtcatcttgttgggctgatggatgtcttctgttttagtgagagccaggtgttccgtttcttgaagatgctgaaagagaaagggaaaaagctatttcttcttactaattcgcctttctactttgtagatggagggatgcgttatttgctagaggaccaacattttgatggaaattcctggagggaactgtttgatgttgtgattgcgcaggcaaataaaccaactttctataactcagatcacccattcagggtgtatgacactcaaaaggacaccttaacttttactgcagttgacaagtttctgccagatcaagtatactatcatggctgtttgaaatcatttctacagatcacaaaatggaaaggctcagaggtgatatattttggtgaccatcttttgagtgacttgagaggaccttcaaaagctggttggcgaacagctgctgtaattcgagaacttgaggatgaaatagaaatccaaaacggtgacagctaccgattccaacaggcaaaattgagtataatacatgatctacttgggaaagtccatgcagctgttgttagcaccgagaaaggccaagtctataaagcattgctcaatgagttgaatgcagaaagacgtcaatgccgatctgggatgcgagatttgttcaatacctcttttggtgcaacatttcttacagacacgggaagggaatcatcattttcctatcacattcatcaatatgccgatatttacacgagcaagcttgagaacttcttatcatatgcccctgaatcttggcttcatccacctcatgacataaagatcatgccacacaatgcgaaggtcccagcgagccttttcagtacctcctagttcatcctttctctatttcggtggagaaccaagccgtagtacccccacctatggtttctgtgcgtgaccacgtgacaggattgtggactgctgctgcattcgcttgcgttatactataactgaagcaccatatgatgcatcaatccagcagaccagcaagttagcattctctagaattgccatggaattatcagtcatgtgagtagttaaccgactcatttgcctgtatgacgaagcctctgttttccgtttaaaataaaaaaaggaagcatctgagaggccgcatacttgtgttcccatgaaaccctaccaacctgtaatggccgccaataaaacagtcacacgcaacccatctcgtttccccattttattcgcattctgctacactctttgctgcactcatgttacactgaactcgcctggtggcatctgacaagttttttgggatgagcagaagataatttgggttcgggcaacggataaattataaaatgcttatttgtccttgtctggaacaggaaggctatcttcaattctattgtttatggtcctagagactggatggagttccagttcttgctttgcatgaatgtggagatctggaatgtcaagaataatggcaattagtgcactcatatgaacacagaaaacataatattctgattcttcactgacgaagattttgttaaaaactatccagtttgctt

SEQ ID NO: 65915 - DNA, 1648 bp, Zea Mays
cacaaggctcttgcctcctgctgagtttgagtgagataaaagagctctatggcacacggcatattggcagagatcaagctcgtcatcttgttgggctgatggatgtcttctgttttagtgagagccaggtgttccgtttcttgaagatgctgaaagagaaagggaaaaagctatttcttcttactaattcgcctttctactttgtagatggagggatgcgttatttgctagaggaccaacattttgatggaaattcctggagggaactgtttgatgttgtgattgcgcaggcaaataaaccaactttctataactcagatcacccattcagggtgtatgacactcaaaaggacaccttaacttttactgcagttgacaagtttctgccagatcaagtatactatcatggctgtttgaaatcatttctacagatcacaaaatggaaaggctcagaggtgatatattttggtgaccatcttttgagtgacttgagaggaccttcaaaagctggttggcgaacagctgctgtaattcgagaacttgaggatgaaatagaaatccaaaacggtgacagctaccgattccaacaggcaaaattgagtataatacatgatctacttgggaaagtccatgcagctgttgttagcaccgagaaaggccaagtctataaagcattgctcaatgagttgaatgcagaaagacgtcaatgccgatctgggatgcgagatttgttcaatacctcttttggtgcaacatttcttacagacacgggaagggaatcatcattttcctatcacattcatcaatatgccgatatttacacgagcaagcttgagaacttcttatcatatgcccctgaatcttggcttcatccacctcatgacataaagatcatgccacacaatgcgaaggtcccagcgagccttttcagtacctcctagttcatcctttctctatttcggtggagaaccaagccgtagtacccccacctatggtttctgtgcgtgaccacgtgacaggattgtggactgctgctgcattcgcttgcgttatactataactgaagcaccatatgatgcatcaatccagcagaccagcaagttagcattctctagaattgccatggaattatcagtcatgtgagtagttaaccgactcatttgcctgtatgacgaagcctctgttttccgtttaaaataaaaaaaggaagcatctgagaggccgcatacttgtgttcccatgaaaccctaccaacctgtaatggccgccaataaaacagtcacacgcaacccatctcgtttccccattttattcgcattctgctacactctttgctgcactcatgttacactgaactcgcctggtggcatctgacaagttttttgggatgagcagaagataatttgggttcgggcaacggataaattataaaatgcttatttgtccttgtctggaacaggaaggctatcttcaattctattgtttatggtcctagagactggatggagttccagttcttgctttgcatgaatgtggagatctggaatgtcaagaataatggcaattagtgcactcatatgaacacagaaaacataatattctgattcttcactgacgaagattttgttaaaaactatccagtttgctt

SEQ ID NO: 65916 - DNA, 1707 bp, Zea Mays
ggccataaggacccaggcatgtctgattgccgatattgttcaacactttatagatgcaaaactggagtttgatccatcttacatatatgaggatgttaatcaatcgattcagcatgttcacagaagtggtttaattcacaggcaaattctttccgagcctgagaaatttctgataaaaaaaagccaggtgttccgtttcttgaagatgctgaaagagaaagggaaaaagctatttcttcttactaattcgcctttctactttgtagatggagggatgcgttatttgctagaggaccaacattttgatggaaattcctggagggaactgtttgatgttgtgattgcgcaggcaaataaaccaactttctataactcagatcacccattcagggtgtatgacactcaaaaggacaccttaacttttactgcagttgacaagtttctgccagatcaagtatactatcatggctgtttgaaatcatttctacagatcacaaaatggaaaggctcagaggtgatatattttggtgaccatcttttgagtgacttgagaggaccttcaaaagctggttggcgaacagctgctgtaattcgagaacttgaggatgaaatagaaatccaaaacggtgacagctaccgattccaacaggcaaaattgagtataatacatgatctacttgggaaagtccatgcagctgttgttagcaccgagaaaggccaagtctataaagcattgctcaatgagttgaatgcagaaagacgtcaatgccgatctgggatgcgagatttgttcaatacctcttttggtgcaacatttcttacagacacgggaagggaatcatcattttcctatcacattcatcaatatgccgatatttacacgagcaagcttgagaacttcttatcatatgcccctgaatcttggcttcatccacctcatgacataaagatcatgccacacaatgcgaaggtcccagcgagccttttcagtacctcctagttcatcctttctctatttcggtggagaaccaagccgtagtacccccacctatggtttctgtgcgtgaccacgtgacaggattgtggactgctgctgcattcgcttgcgttatactataactgaagcaccatatgatgcatcaatccagcagaccagcaagttagcattctctagaattgccatggaattatcagtcatgtgagtagttaaccgactcatttgcctgtatgacgaagcctctgttttccgtttaaaataaaaaaaggaagcatctgagaggccgcatacttgtgttcccatgaaaccctaccaacctgtaatggccgccaataaaacagtcacacgcaacccatctcgtttccccattttattcgcattctgctacactctttgctgcactcatgttacactgaactcgcctggtggcatctgacaagttttttgggatgagcagaagataatttgggttcgggcaacggataaattataaaatgcttatttgtccttgtctggaacaggaaggctatcttcaattctattgtttatggtcctagagactggatggagttccagttcttgctttgcatgaatgtggagatctggaatgtcaagaataatggcaattagtgcactcatatgaacacagaaaacataatattctgattcttcactgacgaagattttgttaaaaactatccagtttgctt

SEQ ID NO: 65917 - DNA, 1735 bp, Zea Mays
gttgccttatatgcatgtcaactagaccaccatattattgccaagcatgtctgattgccgatattgttcaacactttatagatgcaaaactggagtttgatccatcttacatatatgaggatgttaatcaatcgattcagcatgttcacagaagtggtttaattcacaggcaaattctttccgagcctgagaaatttctgataaaaaaaagccaggtgttccgtttcttgaagatgctgaaagagaaagggaaaaagctatttcttcttactaattcgcctttctactttgtagatggagggatgcgttatttgctagaggaccaacattttgatggaaattcctggagggaactgtttgatgttgtgattgcgcaggcaaataaaccaactttctataactcagatcacccattcagggtgtatgacactcaaaaggacaccttaacttttactgcagttgacaagtttctgccagatcaagtatactatcatggctgtttgaaatcatttctacagatcacaaaatggaaaggctcagaggtgatatattttggtgaccatcttttgagtgacttgagaggaccttcaaaagctggttggcgaacagctgctgtaattcgagaacttgaggatgaaatagaaatccaaaacggtgacagctaccgattccaacaggcaaaattgagtataatacatgatctacttgggaaagtccatgcagctgttgttagcaccgagaaaggccaagtctataaagcattgctcaatgagttgaatgcagaaagacgtcaatgccgatctgggatgcgagatttgttcaatacctcttttggtgcaacatttcttacagacacgggaagggaatcatcattttcctatcacattcatcaatatgccgatatttacacgagcaagcttgagaacttcttatcatatgcccctgaatcttggcttcatccacctcatgacataaagatcatgccacacaatgcgaaggtcccagcgagccttttcagtacctcctagttcatcctttctctatttcggtggagaaccaagccgtagtacccccacctatggtttctgtgcgtgaccacgtgacaggattgtggactgctgctgcattcgcttgcgttatactataactgaagcaccatatgatgcatcaatccagcagaccagcaagttagcattctctagaattgccatggaattatcagtcatgtgagtagttaaccgactcatttgcctgtatgacgaagcctctgttttccgtttaaaataaaaaaaggaagcatctgagaggccgcatacttgtgttcccatgaaaccctaccaacctgtaatggccgccaataaaacagtcacacgcaacccatctcgtttccccattttattcgcattctgctacactctttgctgcactcatgttacactgaactcgcctggtggcatctgacaagttttttgggatgagcagaagataatttgggttcgggcaacggataaattataaaatgcttatttgtccttgtctggaacaggaaggctatcttcaattctattgtttatggtcctagagactggatggagttccagttcttgctttgcatgaatgtggagatctggaatgtcaagaataatggcaattagtgcactcatatgaacacagaaaacataatattctgattcttcactgacgaagattttgttaaaaactatccagtttgctt

SEQ ID NO: 65918 - DNA, 2272 bp, Zea Mays
cttatatgcatgtcaactagaccaccatattattgccaagcatgtctgattgccgatattgttcaacactttatagatgcaaaactggagtttgatccatcttacatatatgaggatgttaatcaatcgattcagcatgttcacagaagtggtttaattcacaggcaaattctttccgagcctgagaaatttctgataaaaaaaagccaggtgttccgtttcttgaagatgctgaaagagaaagggaaaaagctatttcttcttactaattcgcctttctactttgtagatggagggatgcgttatttgctagaggttttgtttctaaatctaaatctgcttgtatgttttgtccatattgttgagcatccaaaggcaagatttttaaccagaaccaatttctatttggtttatgaaatacatatatgttttttgatataacctttttttcttattttctgagttctgtcttgaccttgtatatcttttctttgagcgttaccttttggtttgagaatatgaaatcatgttttaacttgacacatgccagccactccatgcattggccttgagcccttgacacatattcttgatgcttaaagtgaacatttagaatgtacataatgcttccttcctttgtttctagcattcattaaagtttgttgtatactactacaacacaggggagaggtatggagtacaaatgaaattctttatattattaattttatgtctttcttgtaaattttttggtgagttattccaaatagaatgtagcatgtcagcgtaatatgaaaaatatttttgcttactcaaatattctctgcattgactattttcacaatttggttgggcaggaccaacattttgatggaaattcctggagggaactgtttgatgttgtgattgcgcaggcaaataaaccaactttctataactcagatcacccattcagggtgtatgacactcaaaaggacaccttaacttttactgcagttgacaagtttctgccagatcaagtatactatcatggctgtttgaaatcatttctacagatcacaaaatggaaaggctcagaggtgatatattttggtgaccatcttttgagtgacttgagaggaccttcaaaagctggttggcgaacagctgctgtaattcgagaacttgaggatgaaatagaaatccaaaacggtgacagctaccgattccaacaggcaaaattgagtataatacatgatctacttgggaaagtccatgcagctgttgttagcaccgagaaaggccaagtctataaagcattgctcaatgagttgaatgcagaaagacgtcaatgccgatctgggatgcgagatttgttcaatacctcttttggtgcaacatttcttacagacacgggaagggaatcatcattttcctatcacattcatcaatatgccgatatttacacgagcaagcttgagaacttcttatcatatgcccctgaatcttggcttcatccacctcatgacataaagatcatgccacacaatgcgaaggtcccagcgagccttttcagtacctcctagttcatcctttctctatttcggtggagaaccaagccgtagtacccccacctatggtttctgtgcgtgaccacgtgacaggattgtggactgctgctgcattcgcttgcgttatactataactgaagcaccatatgatgcatcaatccagcagaccagcaagttagcattctctagaattgccatggaattatcagtcatgtgagtagttaaccgactcatttgcctgtatgacgaagcctctgttttccgtttaaaataaaaaaaggaagcatctgagaggccgcatacttgtgttcccatgaaaccctaccaacctgtaatggccgccaataaaacagtcacacgcaacccatctcgtttccccattttattcgcattctgctacactctttgctgcactcatgttacactgaactcgcctggtggcatctgacaagttttttgggatgagcagaagataatttgggttcgggcaacggataaattataaaatgcttatttgtccttgtctggaacaggaaggctatcttcaattctattgtttatggtcctagagactggatggagttccagttcttgctttgcatgaatgtggagatctggaatgtcaagaataatggcaattagtgcactcatatgaacacagaaaacataatattctgattcttcactgacgaagattttgttaaaaactatccagtttgctt

SEQ ID NO: 65919 - DNA, 2669 bp, Zea Mays
tgcttccttcctttgtttctagcattcattaaagtttgttgtatactactacaacacaggggagaggaccaacattttgatggaaattcctggagggaactgtttgatgttgtgattgcgcaggcaaataaaccaactttctataactcagatcacccattcagggtgtatgacactcaaaaggacaccttaacttttactgcagttgacaagtttctgccagatcaagtatactatcatggctgtttgaaatcatttctacagatcacaaaatggaaaggctcagaggtgatatattttggtgaccatcttttgagtgacttgagaggaccttcaaaagctggttggcgaacagctgctgtaattcgagaacttgaggatgaaatagaaatccaaaacggtgacagctaccgattccaacaggtgtgcactatatcatctgcttgtcgtgtttattgtatcctaatactttatttttatcctccttacacttaactggtacttctaacgaaagttcacccagattagtttgtattccagttccttatttcttgttgttttggatgagcctttagaacttttactaccaataactctgaaatgtttttgagatatgttgttgtccaaaaagacaagaattatgatctagaggtgctaacaaatatttctctcaagattgggactgtgagagggaactgttcatgccgcactgttgatcggtacaatttgaaaggcacagtcggggcctgtttggtaacaatgtttctcaaaaccatgattttacgatactatactttgcaattgtcatgacactaccatactttacgatactatgcttcaagaatactagctattgtttggatataacattgtaaaccatgatatttagacaaaagttagccatgttatgaaaactttaggttggagtagagttgccaatactctaaaaataccatggtatctaaaataccatagttttgaaaatgcagttttcaggaatgcagtcaaacagctcatggcataaaatactacggtatttctgtaaaccatggtattgtctagaaactacaaaaatactttactttcaaacaggctagcaggttttggttcaggcgactcacttatggggtgtttggtttgaggaatgagttagtccatcatcttctcactcattactatttttgtttggttcgtggaatggaatgagttgatccatttccacctcattcctcataattagttagtactaatatgaggaatggttattccactaaatttgagtaatgaacccatgatgaactacctcaatttggttggagtgattcctcgaaccaaacacccacttagtctttaggcacttcttgctgctgttattcttttgtggagtgctatgcgacacgggttggtaaatcccctggtatgcaaaatccaaaacatgacatgggcaatcagtcgcaccacaaattgatctacagatacaccgatggcatttaccttttgtatctgatagatattatttgattcctcttatcacatttgcagtttgttagttcatgaaattttcatccacatggatgctgaacaatttactcggtgtatcttgcattgcaggcaaaattgagtataatacatgatctacttgggaaagtccatgcagctgttgttagcaccgagaaaggccaagtctataaagcattgctcaatgagttgaatgcagaaagacgtcaatgccgatctgggatgcgagatttgttcaatacctcttttggtgcaacatttcttacagacacgggaagggaatcatcattttcctatcacattcatcaatatgccgatatttacacgagcaagcttgagaacttcttatcatatgcccctgaatcttggcttcatccacctcatgacataaagatcatgccacacaatgcgaaggtcccagcgagccttttcagtacctcctagttcatcctttctctatttcggtggagaaccaagccgtagtacccccacctatggtttctgtgcgtgaccacgtgacaggattgtggactgctgctgcattcgcttgcgttatactataactgaagcaccatatgatgcatcaatccagcagaccagcaagttagcattctctagaattgccatggaattatcagtcatgtgagtagttaaccgactcatttgcctgtatgacgaagcctctgttttccgtttaaaataaaaaaaggaagcatctgagaggccgcatacttgtgttcccatgaaaccctaccaacctgtaatggccgccaataaaacagtcacacgcaacccatctcgtttccccattttattcgcattctgctacactctttgctgcactcatgttacactgaactcgcctggtggcatctgacaagttttttgggatgagcagaagataatttgggttcgggcaacggataaattataaaatgcttatttgtccttgtctggaacaggaaggctatcttcaattctattgtttatggtcctagagactggatggagttccagttcttgctttgcatgaatgtggagatctggaatgtcaagaataatggcaattagtgcactcatatgaacacagaaaacataatattctgattcttcactgacgaagattttgttaaaaactatccagtttgctt

SEQ ID NO: 65920 - DNA, 1384 bp, Zea Mays
gaaaatattactttggatgcttcttgctaagatattattgttattgtttttgcactgatgcatctgtggtgtatgacactcaaaaggacaccttaacttttactgcagttgacaagtttctgccagatcaagtatactatcatggctgtttgaaatcatttctacagatcacaaaatggaaaggctcagaggtgatatattttggtgaccatcttttgagtgacttgagaggaccttcaaaagctggttggcgaacagctgctgtaattcgagaacttgaggatgaaatagaaatccaaaacggtgacagctaccgattccaacaggcaaaattgagtataatacatgatctacttgggaaagtccatgcagctgttgttagcaccgagaaaggccaagtctataaagcattgctcaatgagttgaatgcagaaagacgtcaatgccgatctgggatgcgagatttgttcaatacctcttttggtgcaacatttcttacagacacgggaagggaatcatcattttcctatcacattcatcaatatgccgatatttacacgagcaagcttgagaacttcttatcatatgcccctgaatcttggcttcatccacctcatgacataaagatcatgccacacaatgcgaaggtcccagcgagccttttcagtacctcctagttcatcctttctctatttcggtggagaaccaagccgtagtacccccacctatggtttctgtgcgtgaccacgtgacaggattgtggactgctgctgcattcgcttgcgttatactataactgaagcaccatatgatgcatcaatccagcagaccagcaagttagcattctctagaattgccatggaattatcagtcatgtgagtagttaaccgactcatttgcctgtatgacgaagcctctgttttccgtttaaaataaaaaaaggaagcatctgagaggccgcatacttgtgttcccatgaaaccctaccaacctgtaatggccgccaataaaacagtcacacgcaacccatctcgtttccccattttattcgcattctgctacactctttgctgcactcatgttacactgaactcgcctggtggcatctgacaagttttttgggatgagcagaagataatttgggttcgggcaacggataaattataaaatgcttatttgtccttgtctggaacaggaaggctatcttcaattctattgtttatggtcctagagactggatggagttccagttcttgctttgcatgaatgtggagatctggaatgtcaagaataatggcaattagtgcactcatatgaacacagaaaacataatattctgattcttcactgacgaagattttgttaaaaactatccagtttgctt

SEQ ID NO: 65921 - DNA, 1102 bp, Zea Mays
aacagctcatggcataaaatactacggtatttctgtaaaccatggcaaaattgagtataatacatgatctacttgggaaagtccatgcagctgttgttagcaccgagaaaggccaagtctataaagcattgctcaatgagttgaatgcagaaagacgtcaatgccgatctgggatgcgagatttgttcaatacctcttttggtgcaacatttcttacagacacgggaagggaatcatcattttcctatcacattcatcaatatgccgatatttacacgagcaagcttgagaacttcttatcatatgcccctgaatcttggcttcatccacctcatgacataaagatcatgccacacaatgcgaaggtcccagcgagccttttcagtacctcctagttcatcctttctctatttcggtggagaaccaagccgtagtacccccacctatggtttctgtgcgtgaccacgtgacaggattgtggactgctgctgcattcgcttgcgttatactataactgaagcaccatatgatgcatcaatccagcagaccagcaagttagcattctctagaattgccatggaattatcagtcatgtgagtagttaaccgactcatttgcctgtatgacgaagcctctgttttccgtttaaaataaaaaaaggaagcatctgagaggccgcatacttgtgttcccatgaaaccctaccaacctgtaatggccgccaataaaacagtcacacgcaacccatctcgtttccccattttattcgcattctgctacactctttgctgcactcatgttacactgaactcgcctggtggcatctgacaagttttttgggatgagcagaagataatttgggttcgggcaacggataaattataaaatgcttatttgtccttgtctggaacaggaaggctatcttcaattctattgtttatggtcctagagactggatggagttccagttcttgctttgcatgaatgtggagatctggaatgtcaagaataatggcaattagtgcactcatatgaacacagaaaacataatattctgattcttcactgacgaagattttgttaaaaactatccagtttgctt

SEQ ID NO: 65922 - DNA, 1034 bp, Zea Mays
gccgcctccattttccatcccaaccgttccaactcccccacccaaaaagcccacgaactttcgacggttccttcctccctccctcccgctccaaccaaggcctacatatacgcccgcccaccacgcccccgaaaccatcaacccaacacggcgtccccgtcccgagtcaccaccgacccaagcaaaaccgcacgcaccctgccagcggccccccaactcccaacccaacccctactccagctagctcgcggcggcggccagcggccatggccttccggctgagcaacaacctgatcggggtcctaaacttcgtcaccttcctgctctccgtcccgatcctgggcgcgggcatctggctgggccaccgcgccgacggcaccgagtgcgagcgctacctctcggcgcccgtcatcgcgctgggggccttcctcctcgccgtctccctggcgggcctcgtcggcgcctgctgccgcgtcacctggctgctctgggcctacctcctcgccatgttcgtcctcatcctcgtcctcttctgcttcaccgtcttcgccttcgtcgtcaccaacaggggcgccggcgaggccgtctccggccgcggatacaaggagtaccgcctcggggactactccaactggctgcagaagcgcgtcgagaacaccaggaactgggaccggatcaggagctgcctccaggactccaaggtctgcaagagcctgcaggacaagaacgagaccgtcgcccagttcatgagttccagcctctcccccatcgagtggttgagaattgtgatgtgacattggaagccaatccgccagtgccaaacgcaaaaaacttatctagggcgacagtgatggttacttgcacgattgtgcatacacatatagggtttatttggaatacataatagactcgattaattaaaattttattttttctaataaattttacttatcgattagtctctattttatttgctagaccatagttagctaatacttaggctttttatttggcttccaagacttgacctaaat

SEQ ID NO: 65923 - DNA, 692 bp, Zea Mays
gtctgtgaccctaaaccgacgggaactgtgagctcgcgctggcggtacctgccattacggtgtacgggtatcgtcgccatcatcatccagatccaggttttggccccagttcattgatttgcttgttggtaccgctattgaccatccaatgcagtgttctcaaggtccaaagtacgtggaccttcagttggtgtaatcagaagcaatatccaagatattcatcatgcacttctacaaaatgaaacaggaacaaggtcggaggagaagagaaactcaactccagctaatgacaagcccatgtgtgcattgtgatagacactgctctggggtctgtttatgcgcaacaacggtttatgagaggagaggtggcccccatctgtggccgcaaaggagcttggccaactgcgacaacgacatcctggctctggttgtaattgtagtatttgttggtaaataattttatcgaatattttgtatgccgttgcaaagcacgggcatataactagtttatagaataaaagtacaataaattttcaaaccaaacccttcctaaaaagatgctaaaacttatatgggccgccgagggagtaactttaatagattgtgagaacacatgggctgacgtatgatacagatgcggatgcgtaatggttgtcgtttgggatccagaagtggcgatgactatggctggt

SEQ ID NO: 65924 - DNA, 928 bp, Zea Mays
gtctgtgaccctaaaccgacgggaactgtgagctcgcgctggcggtacctgccattacggtgtacgggtatcgtcgccatcatcatccagatccaggttttggccccagttcattgatttgcttgttggtaccgctattgaccatccaatgcagtgttctcaaggtccaaagtacgtggaccttcagttggtgtaatcagaagcaatatccaagatattcatcatgcacttctacaaaatccatgtgttctgtttgacaaggagaaggaaacaggaacaaggtcggaggagaagagaaactcaactccagctaatgacaagcccatgtgtgcattgtgatagtggttgtctgtgtctgcctggcgacgacatttgctgcacgcgatctcttgcagtcgctactcgctacaacaaggcttctggggatgccattgttagctgattcttttcctcactggtgaagggcagctggttgcttcagctaaaagagtcgagcagaccaacaatgcaatttagctggagcatgatcagaattcttgtctgtactgcagacactgctctggggtctgtttatgcgcaacaacggtttatgagaggagaggtggcccccatctgtggccgcaaaggagcttggccaactgcgacaacgacatcctggctctggttgtaattgtagtatttgttggtaaataattttatcgaatattttgtatgccgttgcaaagcacgggcatataactagtttatagaataaaagtacaataaattttcaaaccaaacccttcctaaaaagatgctaaaacttatatgggccgccgagggagtaactttaatagattgtgagaacacatgggctgacgtatgatacagatgcggatgcgtaatggttgtcgtttgggatccagaagtggcgatgactatggctggt

SEQ ID NO: 65925 - DNA, 876 bp, Zea Mays
gtctgtgaccctaaaccgacgggaactgtgagctcgcgctggcggtacctgccattacggtgtacgggtatcgtcgccatcatcatccagatccaggttttggccccagttcattgatttgcttgttggtaccgctattgaccatccaatgcagtgttctcaaggtccaaagtacgtggaccttcagttggtgtaatcagaagcaatatccaagatattcatcatgcacttctacaaaatatatttaccatgtgccatattctttttttatatatggcccttggttcacactaatcctctcacataccagttagccatgtgttctgtttgacaaggagaaggaaacaggaacaaggtcggaggagaagagaaactcaactccagctaatgacaagcccatgtgtgcattgtgatagctggttgcttcagctaaaagagtcgagcagaccaacaatgcaatttagctggagcatgatcagaattcttgtctgtactgcagacactgctctggggtctgtttatgcgcaacaacggtttatgagaggagaggtggcccccatctgtggccgcaaaggagcttggccaactgcgacaacgacatcctggctctggttgtaattgtagtatttgttggtaaataattttatcgaatattttgtatgccgttgcaaagcacgggcatataactagtttatagaataaaagtacaataaattttcaaaccaaacccttcctaaaaagatgctaaaacttatatgggccgccgagggagtaactttaatagattgtgagaacacatgggctgacgtatgatacagatgcggatgcgtaatggttgtcgtttgggatccagaagtggcgatgactatggctggt

SEQ ID NO: 65926 - DNA, 780 bp, Zea Mays
tctgtgaccctaaaccgacgggaactgtgagctcgcgctggcggtacctgccattacggtgtacgggtatcgtcgccatcatcatccagatccaggttttggccccagttcattgatttgcttgttggtaccgctattgaccatccaatgcagtgttctcaaggtccaaagtacgtggaccttcagttggtgtaatcagaagcaatatccaagatattcatcatgcacttctacaaaatgagaaggaaacaggaacaaggtcggaggagaagagaaactcaactccagctaatgacaagcccatgtgtgcattgtgatagctggttgcttcagctaaaagagtcgagcagaccaacaatgcaatttagctggagcatgatcagaattcttgtctgtactgcagacactgctctggggtctgtttatgcgcaacaacggtttatgagaggagaggtggcccccatctgtggccgcaaaggagcttggccaactgcgacaacgacatcctggctctggttgtaattgtagtatttgttggtaaataattttatcgaatattttgtatgccgttgcaaagcacgggcatataactagtttatagaataaaagtacaataaattttcaaaccaaacccttcctaaaaagatgctaaaacttatatgggccgccgagggagtaactttaatagattgtgagaacacatgggctgacgtatgatacagatgcggatgcgtaatggttgtcgtttgggatccagaagtggcgatgactatggctggt

SEQ ID NO: 65927 - DNA, 810 bp, Zea Mays
tctgtgaccctaaaccgacgggaactgtgagctcgcgctggcggtacctgccattacggtgtacgggtatcgtcgccatcatcatccagatccaggttttggccccagttcattgatttgcttgttggtaccgctattgaccatccaatgcagtgttctcaaggtccaaagtacgtggaccttcagttggtgtaatcagaagcaatatccaagatattcatcatgcacttctacaaaatttagccatgtgttctgtttgacaaggagaaggaaacaggaacaaggtcggaggagaagagaaactcaactccagctaatgacaagcccatgtgtgcattgtgatagggcagctggttgcttcagctaaaagagtcgagcagaccaacaatgcaatttagctggagcatgatcagaattcttgtctgtactgcagacactgctctggggtctgtttatgcgcaacaacggtttatgagaggagaggtggcccccatctgtggccgcaaaggagcttggccaactgcgacaacgacatcctggctctggttgtaattgtagtatttgttggtaaataattttatcgaatattttgtatgccgttgcaaagcacgggcatataactagtttatagaataaaagtacaataaattttcaaaccaaacccttcctaaaaagatgctaaaacttatatgggccgccgagggagtaactttaatagattgtgagaacacatgggctgacgtatgatacagatgcggatgcgtaatggttgtcgtttgggatccagaagtggcgatgactatggctggt

SEQ ID NO: 65928 - DNA, 543 bp, Zea Mays
tctgtgaccctaaaccgacgggaactgtgagctcgcgctggcggtacctgccattacggtgtacgggtatcgtcgccatcatcatccagatccaggttttggccccagttcattgatttgcttgttggtaccgctattgaccatccaatgcagtgttctcaaggtccaaagtacgtggaccttcagttggtgtaatcagaagcaatatccaagatattcatcatgcacttctacaaaatttagccatgtgttctgtttgacaaggagaaggaaacaggaacaaggtcggaggagaagagaaactcaactccagctaatgacaagcccatgtgtgcattgtgatagaaaatgaagtcagagagccagctttacatattgttcgatgggacatttcactaggtgatagtgatgctccgacctcagttcgaaggcaaccttgactacaaaagtaactcttctttttatgcaacatactctgaaccacacattgctaacgtgtaaaatctgttttttttttcaatacccaaatatcatagaagtcta

SEQ ID NO: 65929 - DNA, 930 bp, Zea Mays
ctgtgaccctaaaccgacgggaactgtgagctcgcgctggcggtacctgccattacggtgtacgggtatcgtcgccatcatcatccagatccaggttttggccccagttcattgatttgcttgttggtaccgctattgaccatccaatgcagtgttctcaaggtccaaagtacgtggaccttcagttggtgtaatcagaagcaatatccaagatattcatcatgcacttctacaaaatttagccatgtgttctgtttgacaaggagaaggaaacaggaacaaggtcggaggagaagagaaactcaactccagctaatgacaagcccatgtgtgcattgtgatagtggttgtctgtgtctgcctggcgacgacatttgctgcacgcgatctcttgcagtcgctactcgctacaacaaggcttctggggatgccattgttagctgattcttttcctcactggtgaagggcagctggttgcttcagctaaaagagtcgagcagaccaacaatgcaatttagctggagcatgatcagaattcttgtctgtactgcagacactgctctggggtctgtttatgcgcaacaacggtttatgagaggagaggtggcccccatctgtggccgcaaaggagcttggccaactgcgacaacgacatcctggctctggttgtaattgtagtatttgttggtaaataattttatcgaatattttgtatgccgttgcaaagcacgggcatataactagtttatagaataaaagtacaataaattttcaaaccaaacccttcctaaaaagatgctaaaacttatatgggccgccgagggagtaactttaatagattgtgagaacacatgggctgacgtatgatacagatgcggatgcgtaatggttgtcgtttgggatccagaagtggcgatgactatggctggt

SEQ ID NO: 65930 - DNA, 1808 bp, Zea Mays
cctaaaccgacgggaactgtgagctcgcgctggcggtacctgccattacggtgtacgggtatcgtcgccatcatcatccagatccaggattcgtgagtagagctccctcggcaggccatcgctgggcctctacctcctcagtggctgctcgttcgggctgtcgtaccagatgccagcgctcgtgacggaaatggagcaccccttgatagttgacatggcggcgtgtgccatggacgagctcatctggctcgcccaagccggcaagcaaatctgggtcaagggaatgcggatgacgcgagggatttctcagctcagacgcctaccgatctgtttatttcctacaaacgctccccaaaagttccaaatgattcttccgcctctgccaagttccccagaatccccaggttgatgctgcccctgcccatcgattggatcttgttcgatttctctgttctgcagatcctgtgtgcatccgctccaggtagtggccctttgctcggctcccttcctccttcgtccatgctttgatggttcaatccacgctaattttgagttctcgcccctgtctagcgtcaaagactagctagaacttgaatttcctgttgcatggttcatttttatctactgttaatacatcacattcttatgaagccgtacaactcttttttcctacaatggtaacctaatgattatctgagcacagtacttattactacaatggtatatatgtgctataggtatcacaagtaataccaatggtcacatcaattagaaatccttacacatatcgaactcaataacctggtgtgccctcgcccaatgtatacgagcaatgcaaaggacgagagcctaattgataagcaactaacaattatttctggagtgggatgtacgcactacatccgtagtggaaataagattaggtcatgtgattccaagtatacaataaaaagaaaaggtatggagaatatcgtaggaaactgtattaaaaacatcatcgtgaacataacagtccaatgcaaagaaagaagaaccaactaaaactcaacttaatcatgcatatatatatatagttattagcacatatgtacttcactaggagttaaggagaggctcatgcatgatcaccgcctactcgtgcttagcttttgatcattaagttatgtaattaaatatttataggaatagtaatttgtctaaatgttcaaggaaaaaaataagagcagctagctcctatctcacgtgtcgtcaaacaataaggacaagttcagaagccaaggagaagtcaaaaagaagaatatagaaaactcaagtgacctgacctacagttggttgcttctaagatagatatcagaattcagaagcaagttcttcttacctttttcctggcctcagcctcgtccttctctgcttccaaagctttatgtttctcatctaattttgtgtagaactgggtaataacaacactgtcactaccagaccctttttggaacagaagtgcttgctaggagatacctgggtaataacaacactgggtatgaagctacgtatatccttcaaaaccacagttacacaatggcgccacatgtttttttcagaaagaatggagggggtattcctgtgtgccatcagtacacaaacacattcagataataaactctatcctgcacaatggacatatgtttgcctttttctgaaatttcagaagcagtgtgagctttgagttgttccataaaattcttcaaatttcttgactgtttctgttcagcttgagactggataataatgcaagattgttcttctaaatg

SEQ ID NO: 65931 - DNA, 1849 bp, Zea Mays
cctaaaccgacgggaactgtgagctcgcgctggcggtacctgccattacggtgtacgggtatcgtcgccatcatcatccagatccaggattcgtgagtagagctccctcggcaggccatcgctgggcctctacctcctcagtggctgctcgttcgggctgtcgtaccagatgccagcgctcgtgacggaaatggagcaccccttgatagttgacatggcggcgtgtgccatggacgagctcatctggctcgcccaagccggcaagcaaatctgggtcaagggaatgcggatgacgcgagggatttctcagctcagacgcctaccgatctgtttatttcctacaaacgctccccaaaagttccaaatgattcttccgcctctgccaagttccccagaatccccaggttgatgctgcccctgcccatcgattggatcttgttcgatttctctgttctgcagatcctgtgtgcatccgctccagaaccaatttccttttcaatttcttgacaatgatgttgcatattcagtttagcagtatcaacaaatgagtaggactcatgaaattttcccagtacaacagtaagaaatatcaaagcttcccaactctccactgtttgtagctcaagggacctataactacccagtaactcattctgcagttgcccgataagaatatctttggattctaaatctgacaggtaaattttgtaaccatccaaagaaaatagttatatggaatgtctggggtttgaattctccatccaagcaacaatctgtacgaactttcgttgattccgttggagcagacattgtatgcctgcaagaaaccaacatacagaatatttctagaggaactgtctttgctattcttggagtgacttttgaagaattcctctttttaccttcctctggggctagcggtggtattcttttagcctggaaaaggcatgtgcaagcaacagggcataacagagtgggctcttattctgtccaattccagcagtcaaatggccaaccttggtggttatccggtgtctatgggcttcgggacattgatgacaagattccattcctccaaaagcaattgctatggtaaaaaaggtttcattttgagtatttttggccaaaattggagggattccaggaagcgtgggcatcgggtggtggtagctcctaccccttcctgactcttgagatgaagttgaaagccactgcacgtgcccttcagaggtggagtgataaaagatgccgaggttttggccccagttcattgatttgcttgttggtaccgctattgaccatccaatgcagtgttctcaaggtccaaagtacgtggaccttcagttggtgtaatcagaagcaatatccaagatattcatcatgcacttctacaaaatgaaacaggaacaaggtcggaggagaagagaaactcaactccagctaatgacaagcccatgtgtgcattgtgatagacactgctctggggtctgtttatgcgcaacaacggtttatgagaggagaggtggcccccatctgtggccgcaaaggagcttggccaactgcgacaacgacatcctggctctggttgtaattgtagtatttgttggtaaataattttatcgaatattttgtatgccgttgcaaagcacgggcatataactagtttatagaataaaagtacaataaattttcaaaccaaacccttcctaaaaagatgctaaaacttatatgggccgccgagggagtaactttaatagattgtgagaacacatgggctgacgtatgatacagatgcggatgcgtaatggttgtcgtttgggatccagaagtggcgatgactatggctggt

SEQ ID NO: 65932 - DNA, 622 bp, Zea Mays
aaaccgacgggaactgtgagctcgcgctggcggtacctgccattacggtgtacgggtatcgtcgccatcatcatccagatccagtgttctcaaggtccaaagtacgtggaccttcagttggtgtaatcagaagcaatatccaagatattcatcatgcacttctacaaaatgaaacaggaacaaggtcggaggagaagagaaactcaactccagctaatgacaagcccatgtgtgcattgtgatagacactgctctggggtctgtttatgcgcaacaacggtttatgagaggagaggtggcccccatctgtggccgcaaaggagcttggccaactgcgacaacgacatcctggctctggttgtaattgtagtatttgttggtaaataattttatcgaatattttgtatgccgttgcaaagcacgggcatataactagtttatagaataaaagtacaataaattttcaaaccaaacccttcctaaaaagatgctaaaacttatatgggccgccgagggagtaactttaatagattgtgagaacacatgggctgacgtatgatacagatgcggatgcgtaatggttgtcgtttgggatccagaagtggcgatgactatggctggt

SEQ ID NO: 65933 - DNA, 1309 bp, Zea Mays
gtgagctcgcgctggcggtacctgccattacggtgtacgggtatcgtcgccatcatcatccagatccaggattcgtgagtagagctccctcggcaggccatcgctgggcctctacctcctcagtggctgctcgttcgggctgtcgtaccagatgccagcgctcgtgacggaaatggagcaccccttgatagttgacatggcggcgtgtgccatggacgagctcatctggctcgcccaagccggcaagcaaatctgggtcaagggaatgcggatgacgcgagggatttctcagctcagacgcctaccgatctgtttatttcctacaaacgctccccaaaagttccaaatgattcttccgcctctgccaagttccccagaatccccaggttgatgctgcccctgcccatcgattggatcttgttcgatttctctgttctgcagatcctgtgtgcatccgctccagtcaaatggccaaccttggtggttatccggtgtctatgggcttcgggacattgatgacaagattccattcctccaaaagcaattgctatggtaaaaaaggtttcattttgagtatttttggccaaaattggagggattccaggaagcgtgggcatcgggtggtggtagctcctaccccttcctgactcttgagatgaagttgaaagccactgcacgtgcccttcagaggtggagtgataaaagatgccgaggttttggccccagttcattgatttgcttgttggtaccgctattgaccatccaatgcagtgttctcaaggtccaaagtacgtggaccttcagttggtgtaatcagaagcaatatccaagatattcatcatgcacttctacaaaatgaaacaggaacaaggtcggaggagaagagaaactcaactccagctaatgacaagcccatgtgtgcattgtgatagacactgctctggggtctgtttatgcgcaacaacggtttatgagaggagaggtggcccccatctgtggccgcaaaggagcttggccaactgcgacaacgacatcctggctctggttgtaattgtagtatttgttggtaaataattttatcgaatattttgtatgccgttgcaaagcacgggcatataactagtttatagaataaaagtacaataaattttcaaaccaaacccttcctaaaaagatgctaaaacttatatgggccgccgagggagtaactttaatagattgtgagaacacatgggctgacgtatgatacagatgcggatgcgtaatggttgtcgtttgggatccagaagtggcgatgactatggctggt

SEQ ID NO: 65934 - DNA, 1423 bp, Zea Mays
gtgagctcgcgctggcggtacctgccattacggtgtacgggtatcgtcgccatcatcatccagatccaggattcgtgagtagagctccctcggcaggccatcgctgggcctctacctcctcagtggctgctcgttcgggctgtcgtaccagatgccagcgctcgtgacggaaatggagcaccccttgatagttgacatggcggcgtgtgccatggacgagctcatctggctcgcccaagccggcaagcaaatctgggtcaagggaatgcggatgacgcgagggatttctcagctcagacgcctaccgatctgtttatttcctacaaacgctccccaaaagttccaaatgattcttccgcctctgccaagttccccagaatccccaggttgatgctgcccctgcccatcgattggatcttgttcgatttctctgttctgcagatcctgtgtgcatccgctccagtcaaatggccaaccttggtggttatccggtgtctatgggcttcgggacattgatgacaagattccattcctccaaaagcaattgctatggtaaaaaaggtttcattttgagtatttttggccaaaattggagggattccaggaagcgtgggcatcgggtggtggtagctcctaccccttcctgactcttgagatgaagttgaaagccactgcacgtgcccttcagaggtggagtgataaaagatgccgaggttttggccccagttcattgatttgcttgttggtaccgctattgaccatccaatgcagtgttctcaaggtccaaagtacgtggaccttcagttggtgtaatcagaagcaatatccaagatattcatcatgcacttctacaaaatttagccatgtgttctgtttgacaaggagaaggaaacaggaacaaggtcggaggagaagagaaactcaactccagctaatgacaagcccatgtgtgcattgtgatagctggttgcttcagctaaaagagtcgagcagaccaacaatgcaatttagctggagcatgatcagaattcttgtctgtactgcagacactgctctggggtctgtttatgcgcaacaacggtttatgagaggagaggtggcccccatctgtggccgcaaaggagcttggccaactgcgacaacgacatcctggctctggttgtaattgtagtatttgttggtaaataattttatcgaatattttgtatgccgttgcaaagcacgggcatataactagtttatagaataaaagtacaataaattttcaaaccaaacccttcctaaaaagatgctaaaacttatatgggccgccgagggagtaactttaatagattgtgagaacacatgggctgacgtatgatacagatgcggatgcgtaatggttgtcgtttgggatccagaagtggcgatgactatggctggt

SEQ ID NO: 65935 - DNA, 914 bp, Zea Mays
tgagctcgcgctggcggtacctgccattacggtgtacgggtatcgtcgccatcatcatccagatccagtcaaatggccaaccttggtggttatccggtgtctatgggcttcgggacattgatgacaagattccattcctccaaaagcaattgctatggtaaaaaaggtttcattttgagtatttttggccaaaattggagggattccaggaagcgtgggcatcgggtggtggtagctcctaccccttcctgactcttgagatgaagttgaaagccactgcacgtgcccttcagaggtggagtgataaaagatgccgaggttttggccccagttcattgatttgcttgttggtaccgctattgaccatccaatgcagtgttctcaaggtccaaagtacgtggaccttcagttggtgtaatcagaagcaatatccaagatattcatcatgcacttctacaaaatgaaacaggaacaaggtcggaggagaagagaaactcaactccagctaatgacaagcccatgtgtgcattgtgatagacactgctctggggtctgtttatgcgcaacaacggtttatgagaggagaggtggcccccatctgtggccgcaaaggagcttggccaactgcgacaacgacatcctggctctggttgtaattgtagtatttgttggtaaataattttatcgaatattttgtatgccgttgcaaagcacgggcatataactagtttatagaataaaagtacaataaattttcaaaccaaacccttcctaaaaagatgctaaaacttatatgggccgccgagggagtaactttaatagattgtgagaacacatgggctgacgtatgatacagatgcggatgcgtaatggttgtcgtttgggatccagaagtggcgatgactatggctggt

SEQ ID NO: 65936 - DNA, 698 bp, Zea Mays
gccattacggtgtacgggtatcgtcgccatcatcatccagatccagtgttctcaaggtccaaagtacgtggaccttcagttggtgtaatcagaagcaatatccaagatattcatcatgcacttctacaaaatttagccatgtgttctgtttgacaaggagaaggaaacaggaacaaggtcggaggagaagagaaactcaactccagctaatgacaagcccatgtgtgcattgtgatagctggttgcttcagctaaaagagtcgagcagaccaacaatgcaatttagctggagcatgatcagaattcttgtctgtactgcagacactgctctggggtctgtttatgcgcaacaacggtttatgagaggagaggtggcccccatctgtggccgcaaaggagcttggccaactgcgacaacgacatcctggctctggttgtaattgtagtatttgttggtaaataattttatcgaatattttgtatgccgttgcaaagcacgggcatataactagtttatagaataaaagtacaataaattttcaaaccaaacccttcctaaaaagatgctaaaacttatatgggccgccgagggagtaactttaatagattgtgagaacacatgggctgacgtatgatacagatgcggatgcgtaatggttgtcgtttgggatccagaagtggcgatgactatggctggt

SEQ ID NO: 65937 - DNA, 878 bp, Zea Mays
gtatcgtcgccatcatcatccagatccagcagtcaaatggccaaccttggtggttatccggtgtctatgggcttcgggacattgatgacaagattccattcctccaaaagcaattgctatggtaaaaaaggtttcattttgagtatttttggccaaaattggagggattccaggaagcgtgggcatcgggtggtggtagctcctaccccttcctgactcttgagatgaagttgaaagccactgcacgtgcccttcagaggtggagtgataaaagatgccgaggttttggccccagttcattgatttgcttgttggtaccgctattgaccatccaatgcagtgttctcaaggtccaaagtacgtggaccttcagttggtgtaatcagaagcaatatccaagatattcatcatgcacttctacaaaatgaaacaggaacaaggtcggaggagaagagaaactcaactccagctaatgacaagcccatgtgtgcattgtgatagacactgctctggggtctgtttatgcgcaacaacggtttatgagaggagaggtggcccccatctgtggccgcaaaggagcttggccaactgcgacaacgacatcctggctctggttgtaattgtagtatttgttggtaaataattttatcgaatattttgtatgccgttgcaaagcacgggcatataactagtttatagaataaaagtacaataaattttcaaaccaaacccttcctaaaaagatgctaaaacttatatgggccgccgagggagtaactttaatagattgtgagaacacatgggctgacgtatgatacagatgcggatgcgtaatggttgtcgtttgggatccagaagtggcgatgactatggctggt

SEQ ID NO: 65938 - DNA, 927 bp, Zea Mays
cgtcgccatcatcatccagatccagtcaaatggccaaccttggtggttatccggtgtctatgggcttcgggacattgatgacaagattccattcctccaaaagcaattgctatggtaaaaaaggtttcattttgagtatttttggccaaaattggagggattccaggaagcgtgggcatcgggtggtggtagctcctaccccttcctgactcttgagatgaagttgaaagccactgcacgtgcccttcagaggtggagtgataaaagatgccgagtgttctcaaggtccaaagtacgtggaccttcagttggtgtaatcagaagcaatatccaagatattcatcatgcacttctacaaaatttagccatgtgttctgtttgacaaggagaaggaaacaggaacaaggtcggaggagaagagaaactcaactccagctaatgacaagcccatgtgtgcattgtgatagctggttgcttcagctaaaagagtcgagcagaccaacaatgcaatttagctggagcatgatcagaattcttgtctgtactgcagacactgctctggggtctgtttatgcgcaacaacggtttatgagaggagaggtggcccccatctgtggccgcaaaggagcttggccaactgcgacaacgacatcctggctctggttgtaattgtagtatttgttggtaaataattttatcgaatattttgtatgccgttgcaaagcacgggcatataactagtttatagaataaaagtacaataaattttcaaaccaaacccttcctaaaaagatgctaaaacttatatgggccgccgagggagtaactttaatagattgtgagaacacatgggctgacgtatgatacagatgcggatgcgtaatggttgtcgtttgggatccagaagtggcgatgactatggctggt

SEQ ID NO: 65939 - DNA, 1126 bp, Zea Mays
gttcgatttctctgttctgcagatcctgtgtgcatccgctccagtcaaatggccaaccttggtggttatccggtgtctatgggcttcgggacattgatgacaagattccattcctccaaaagcaattgctatggtaaaaaaggtttcattttgagtatttttggccaaaattggagggattccaggaagcgtgggcatcgggtggtggtagctcctaccccttcctgactcttgagatgaagttgaaagccactgcacgtgcccttcagaggtggagtgataaaagatgccgaggttttggccccagttcattgatttgcttgttggtaccgctattgaccatccaatgcagtgttctcaaggtccaaagtacgtggaccttcagttggtgtaatcagaagcaatatccaagatattcatcatgcacttctacaaaatccatgtgttctgtttgacaaggagaaggaaacaggaacaaggtcggaggagaagagaaactcaactccagctaatgacaagcccatgtgtgcattgtgatagtggttgtctgtgtctgcctggcgacgacatttgctgcacgcgatctcttgcagtcgctactcgctacaacaaggcttctggggatgccattgttagctgattcttttcctcactggtgaagggcagctggttgcttcagctaaaagagtcgagcagaccaacaatgcaatttagctggagcatgatcagaattcttgtctgtactgcagacactgctctggggtctgtttatgcgcaacaacggtttatgagaggagaggtggcccccatctgtggccgcaaaggagcttggccaactgcgacaacgacatcctggctctggttgtaattgtagtatttgttggtaaataattttatcgaatattttgtatgccgttgcaaagcacgggcatataactagtttatagaataaaagtacaataaattttcaaaccaaacccttcctaaaaagatgctaaaacttatatgggccgccgagggagtaactttaatagattgtgagaacacatgggctgacgtatgatacagatgcggatgcgtaatggttgtcgtttgggatccagaagtggcgatgactatggctggt

SEQ ID NO: 65940 - DNA, 1604 bp, Zea Mays
cttcccaactctccactgtttgtagctcaagggacctataactacccagtaactcattctgcagttgcccgataagaatatctttggattctaaatctgacaggtaaattttgtaaccatccaaagaaaatagttatatggaatgtctggggtttgaattctccatccaagcaacaatctgtacgaactttcgttgattccgttggagcagacattgtatgcctgcaagaaaccaacatacagaatatttctagaggaactgtctttgctattcttggagtgacttttgaagaattcctctttttaccttcctctggggctagcggtggtattcttttagcctggaaaaggcatgtgcaagcaacagggcataacagagtgggctcttattctgtccaattccagcagtcaaatggccaaccttggtggttatccggtgtctatgggcttcgggacattgatgacaagattccattcctccaaaagcaattgctatggtaaaaaaggtttcattttgagtatttttggccaaaattggagggattccaggaagcgtgggcatcgggtggtggtagctcctaccccttcctgactcttgagatgaagttgaaagccactgcacgtgcccttcagaggtggagtgataaaagatgccgaggtaagggttgtaatttgtgtgatcgttttaatcactctttttatcgaattgttacatccagagtcatcactgtactctaagtcccgtttggttcctttagtccagggactaaagtttagttaggagactaaagtttagtcctaccatgtttggttctagggactaaaactattcaaaacacattaaatgaatcataaggggactaaaataccccttagcattctcccaccataagtgcagctaaaataaaagaggggcaaaagtggaatttatatggtttagtcccttttagtcaccccttgagggactagagactaaaacagtttagtcccagttttagtcccacactttggcaatttagggactaaatgagactaaaatagaaggactaatctttagtccctcaaaccaaacggggcctaaaacagtctgaacaatagagtgttttcgcttacacaattacaagtgtactacgagtcatagatagttgtgaaagtgcctgaatgtacttccgaattagtataatggacgtttagcatattatatatgtttttgacttaaaagtcattgcaagctgaaataacgaacaaagtgtgtccacccttgcacattgtctgttttttagcacacatcaagcaacttccatcctcaatctctctgctaagtcatgacgcattaaaagcttgttttttgacaatagccacaaaaccacatgcgaatcgtatattgcctcttagtttatacatgtgaatatatgaaatatatgatgcatgtgttactagaattttcttattgtttttagtagcatatagtggtgggtttcgaagaacaatatggttttatggatccagctcaatagaataaggatcagttggattgcggtacgaaatcggagttcatacttcatataactatttcttattcgtgctgatattttttggtgttc

SEQ ID NO: 65941 - DNA, 1489 bp, Zea Mays
ttcccaactctccactgtttgtagctcaagggacctataactacccagtaactcattctgcagttgcccgataagaatatctttggattctaaatctgacaggtaaattttgtaaccatccaaagaaaatagttatatggaatgtctggggtttgaattctccatccaagcaacaatctgtacgaactttcgttgattccgttggagcagacattgtatgcctgcaagaaaccaacatacagaatatttctagaggaactgtctttgctattcttggagtgacttttgaagaattcctctttttaccttcctctggggctagcggtggtattcttttagcctggaaaaggcatgtgcaagcaacagggcataacagagtgggctcttattctgtccaattccagcagtcaaatggccaaccttggtggttatccggtgtctatgggcttcgggacattgatgacaagattccattcctccaaaagcaattgctatggtaaaaaaggtttcattttgagtatttttggccaaaattggagggattccaggaagcgtgggcatcgggtggtggtagctcctaccccttcctgactcttgagatgaagttgaaagccactgcacgtgcccttcagaggtggagtgataaaagatgccgaggttttggccccagttcattgatttgcttgttggtaccgctattgaccatccaatgcagtgttctcaaggtccaaagtacgtggaccttcagttggtgtaatcagaagcaatatccaagatattcatcatgcacttctacaaaatccatgtgttctgtttgacaaggagaaggaaacaggaacaaggtcggaggagaagagaaactcaactccagctaatgacaagcccatgtgtgcattgtgatagtggttgtctgtgtctgcctggcgacgacatttgctgcacgcgatctcttgcagtcgctactcgctacaacaaggcttctggggatgccattgttagctgattcttttcctcactggtgaagggcagctggttgcttcagctaaaagagtcgagcagaccaacaatgcaatttagctggagcatgatcagaattcttgtctgtactgcagacactgctctggggtctgtttatgcgcaacaacggtttatgagaggagaggtggcccccatctgtggccgcaaaggagcttggccaactgcgacaacgacatcctggctctggttgtaattgtagtatttgttggtaaataattttatcgaatattttgtatgccgttgcaaagcacgggcatataactagtttatagaataaaagtacaataaattttcaaaccaaacccttcctaaaaagatgctaaaacttatatgggccgccgagggagtaactttaatagattgtgagaacacatgggctgacgtatgatacagatgcggatgcgtaatggttgtcgtttgggatccagaagtggcgatgactatggctggt

SEQ ID NO: 65942 - DNA, 1250 bp, Zea Mays
ctataactacccagtaactcattctgcagttgcccgataagaatatctttggattctaaatctgacaggtaaattttgtaaccatccaaagaaaatagttatatggaatgtctggggtttgaattctccatccaagcaacaatctgtacgaactttcgttgattccgttggagcagacattgtatgcctgcaagaaaccaacatacagaatatttctagaggaactgtctttgctattcttggagtgacttttgaagaattcctctttttaccttcctctggggctagcggtggtattcttttagcctggaaaaggcatgtgcaagcaacagggcataacagagtgggctcttattctgtccaattccagcagtcaaatggccaaccttggtggttatccggtgtctatgggcttcgggacattgatgacaagattccattcctccaaaagcaattgctatggtaaaaaaggtttcattttgagtatttttggccaaaattggagggattccaggaagcgtgggcatcgggtggtggtagctcctaccccttcctgactcttgagatgaagttgaaagccactgcacgtgcccttcagaggtggagtgataaaagatgccgagtgttctcaaggtccaaagtacgtggaccttcagttggtgtaatcagaagcaatatccaagatattcatcatgcacttctacaaaatgagaaggaaacaggaacaaggtcggaggagaagagaaactcaactccagctaatgacaagcccatgtgtgcattgtgatagctggttgcttcagctaaaagagtcgagcagaccaacaatgcaatttagctggagcatgatcagaattcttgtctgtactgcagacactgctctggggtctgtttatgcgcaacaacggtttatgagaggagaggtggcccccatctgtggccgcaaaggagcttggccaactgcgacaacgacatcctggctctggttgtaattgtagtatttgttggtaaataattttatcgaatattttgtatgccgttgcaaagcacgggcatataactagtttatagaataaaagtacaataaattttcaaaccaaacccttcctaaaaagatgctaaaacttatatgggccgccgagggagtaactttaatagattgtgagaacacatgggctgacgtatgatacagatgcggatgcgtaatggttgtcgtttgggatccagaagtggcgatgactatggctggt

SEQ ID NO: 65943 - DNA, 1275 bp, Zea Mays
ctataactacccagtaactcattctgcagttgcccgataagaatatctttggattctaaatctgacaggtaaattttgtaaccatccaaagaaaatagttatatggaatgtctggggtttgaattctccatccaagcaacaatctgtacgaactttcgttgattccgttggagcagacattgtatgcctgcaagaaaccaacatacagaatatttctagaggaactgtctttgctattcttggagtgacttttgaagaattcctctttttaccttcctctggggctagcggtggtattcttttagcctggaaaaggcatgtgcaagcaacagggcataacagagtgggctcttattctgtccaattccagcagtcaaatggccaaccttggtggttatccggtgtctatgggcttcgggacattgatgacaagattccattcctccaaaagcaattgctatggtaaaaaaggtttcattttgagtatttttggccaaaattggagggattccaggaagcgtgggcatcgggtggtggtagctcctaccccttcctgactcttgagatgaagttgaaagccactgcacgtgcccttcagaggtggagtgataaaagatgccgagtgttctcaaggtccaaagtacgtggaccttcagttggtgtaatcagaagcaatatccaagatattcatcatgcacttctacaaaatttagccatgtgttctgtttgacaaggagaaggaaacaggaacaaggtcggaggagaagagaaactcaactccagctaatgacaagcccatgtgtgcattgtgatagctggttgcttcagctaaaagagtcgagcagaccaacaatgcaatttagctggagcatgatcagaattcttgtctgtactgcagacactgctctggggtctgtttatgcgcaacaacggtttatgagaggagaggtggcccccatctgtggccgcaaaggagcttggccaactgcgacaacgacatcctggctctggttgtaattgtagtatttgttggtaaataattttatcgaatattttgtatgccgttgcaaagcacgggcatataactagtttatagaataaaagtacaataaattttcaaaccaaacccttcctaaaaagatgctaaaacttatatgggccgccgagggagtaactttaatagattgtgagaacacatgggctgacgtatgatacagatgcggatgcgtaatggttgtcgtttgggatccagaagtggcgatgactatggctggt

SEQ ID NO: 65944 - DNA, 1315 bp, Zea Mays
caaagaaaatagttatatggaatgtctggggtttgaattctccatccaagcaacaatctgtacgaactttcgttgattccgttggagcagacattgtatgcctgcaagaaaccaacatacagaatatttctagaggaactgtctttgctattcttggagtgacttttgaagaattcctctttttaccttcctctggggctagcggtggtattcttttagcctggaaaaggcatgtgcaagcaacagggcataacagagtgggctcttattctgtccaattccagcagtcaaatggccaaccttggtggttatccggtgtctatgggcttcgggacattgatgacaagattccattcctccaaaagcaattgctatggtaaaaaaggtttcattttgagtatttttggccaaaattggagggattccaggaagcgtgggcatcgggtggtggtagctcctaccccttcctgactcttgagatgaagttgaaagccactgcacgtgcccttcagaggtggagtgataaaagatgccgagtgttctcaaggtccaaagtacgtggaccttcagttggtgtaatcagaagcaatatccaagatattcatcatgcacttctacaaaatttagccatgtgttctgtttgacaaggagaaggaaacaggaacaaggtcggaggagaagagaaactcaactccagctaatgacaagcccatgtgtgcattgtgatagtggttgtctgtgtctgcctggcgacgacatttgctgcacgcgatctcttgcagtcgctactcgctacaacaaggcttctggggatgccattgttagctgattcttttcctcactggtgaagggcagctggttgcttcagctaaaagagtcgagcagaccaacaatgcaatttagctggagcatgatcagaattcttgtctgtactgcagacactgctctggggtctgtttatgcgcaacaacggtttatgagaggagaggtggcccccatctgtggccgcaaaggagcttggccaactgcgacaacgacatcctggctctggttgtaattgtagtatttgttggtaaataattttatcgaatattttgtatgccgttgcaaagcacgggcatataactagtttatagaataaaagtacaataaattttcaaaccaaacccttcctaaaaagatgctaaaacttatatgggccgccgagggagtaactttaatagattgtgagaacacatgggctgacgtatgatacagatgcggatgcgtaatggttgtcgtttgggatccagaagtggcgatgactatggctggt

SEQ ID NO: 65945 - DNA, 528 bp, Zea Mays
atcagaagcaatatccaagatattcatcatgcacttctacaaaatttagccatgtgttctgtttgacaaggagaaggaaacaggaacaaggtcggaggagaagagaaactcaactccagctaatgacaagcccatgtgtgcattgtgatagacactgctctggggtctgtttatgcgcaacaacggtttatgagaggagaggtggcccccatctgtggccgcaaaggagcttggccaactgcgacaacgacatcctggctctggttgtaattgtagtatttgttggtaaataattttatcgaatattttgtatgccgttgcaaagcacgggcatataactagtttatagaataaaagtacaataaattttcaaaccaaacccttcctaaaaagatgctaaaacttatatgggccgccgagggagtaactttaatagattgtgagaacacatgggctgacgtatgatacagatgcggatgcgtaatggttgtcgtttgggatccagaagtggcgatgactatggctggt

SEQ ID NO: 65946 - DNA, 500 bp, Zea Mays
agaagcaatatccaagatattcatcatgcacttctacaaaatgagaaggaaacaggaacaaggtcggaggagaagagaaactcaactccagctaatgacaagcccatgtgtgcattgtgatagacactgctctggggtctgtttatgcgcaacaacggtttatgagaggagaggtggcccccatctgtggccgcaaaggagcttggccaactgcgacaacgacatcctggctctggttgtaattgtagtatttgttggtaaataattttatcgaatattttgtatgccgttgcaaagcacgggcatataactagtttatagaataaaagtacaataaattttcaaaccaaacccttcctaaaaagatgctaaaacttatatgggccgccgagggagtaactttaatagattgtgagaacacatgggctgacgtatgatacagatgcggatgcgtaatggttgtcgtttgggatccagaagtggcgatgactatggctggt

SEQ ID NO: 65947 - DNA, 431 bp, Zea Mays
aaacactatgtagtaattatcatgtgaaagtttaacttatgcataaatttgaaatctagaatttaaaacttggcttggtttgaattggaaataggaaagagagaaagaaatattatacaaaacaaaacaaagttataaattcatcacactcttaggtatgtccaaattttactattaatctgaaagtgaatttgccacaagtttgaatttaaacttgaactcaaattgggtttgaaaataaagaaaaaaagaagaaaagaaaacagaaaataaaaagaataaaacgaaatcagcctcatgggccgccatacctcccattcggcccactaaccctatcccgccgcgcggcccaacttcgctccccgccgcgccgcgcttactcgctgacatgtggggccccctgcccagtctcttacccgcgctcgctcctc

SEQ ID NO: 65948 - DNA, 2490 bp, Zea Mays
agaacacacaactgtcctggcctgtccacggtccacacacgccttccttatatcggcgctcacggttctataaaaaaaacacagtacgagcagagcaaggcggccgtgagctgagctgagggaaggacgacgtacggcacagttgctagcccggccgccggagctctccgtgatctgggccgccagcaacagcatgggtgccgcgctcttggcttcttggccatgggacaacctcggcttctacaagtacgtcctgtacgggccgctggtgggcaaggcggtggcgtcacgggcgtgggaggcggcgagccccgaccgctggatcctcctcctgctcctcctcttcggcctccgcgcgctcacctaccagctctggagctccttcagcaacatgctcttcgccacacgccggcgccgcgtcgtccgcgacggcgtcgacttcgaccagatcgacaaggagtgggactgggacaacttcctgatcctgcacgccctgatggcggccgcggcgctgtgcgcgttcccgtcgctgcggcatctcccggcgtgggacggccgggggttcgccgtcgcgctcgtcgcccacgcggcggccaccgagcccctctcctacctggcgcacagggcgctccacggcagcagcggccgcctctacgcgcgctaccactcgctgcaccactccagcagggtgccgcagccgttcacggcggggctggccacgccgctggagcacgtggcgctgggcgcgctcatgtcgctgcccctcgcggccgcgcgcgccgccgggtgcgcctccgtcgcgctcgccttcgcctacgtgctcgccttcgactccctccgcgccatgggccactgcaacgtcgaggtcgtcccggcctcgctcttccgggccatcccggccctcagatacgttctctacaccccgacgtacgtaccacgcgattcaccacaccaagaaggaggccaacttctgtctcttcatgccgctgttcgatctgctgggtggcacaatcgaccgacgctcgtgggacatgcagaggaagatgagcgcaggtgtggacgaggtgccggacttcgtgttcctggcgcacgtggtggacgtgatgcagtcgctgcacgtgcccttcgtcatgcggaccttcgcctccacgcccttctccgtgcagctcttcctgctgcccatgtggcccttcgccttcctcgtcatgctcgccatgtgggtctggtccaagaccttcgtcatctcctgctacaacctccgcggacggctgcaccagatctgggccgtccccagatacggcttccagtacttcttgccgtttgccaaggacggcatcaacagacagatcgaactggccatcctcagggccgacaagatgggcgtcaaggtcctcagccttgcagccctgaacaagaacgaggcgctcaacggcggcggcacgttgttcgtgaacaagcaccctgacctgcgcgtgcgcgtcgtccacggcaacacgctgacggcggcggtgatcctgaacgagatccccaagggcacggcggaggtgttcctgacgggcgccacgtccaagctcggcagggccatcgcgctgtacctgtgcaagaagagggtccgcgtcatgatgatgacgctgtcgacggagcggttccagaagatccagaaggaggcgccggcggagttccagcagtacctggtgcaggtgaccaagtaccggtccgcgcagcactgcaggacgtggatcgtcggcaagtggctgtcgccgcgggagcagcggtgggcgccgccgggcacgcacttccaccagttcgtcgtgccgcccatcatcggcttccgccgggactgcacctacggcaagctcgccgccatgcggctgcccaaggacgtgcggggcctcggcgcctgcgagtactcgctggagcgcggggtggtgcacgcgtgccacgccggcggggtcgtccacttcctcgagggctacacgcaccacgaggtgggcgccatcgacgtcgaccgcatcgacgtcgtctgggaggccgcgctcaagcacggcctccgccccgcgtgatccgattgctggccccccgccggctcgaacgcctctgttgtaccaaccaggccgaaacgaacgggcctggctttgttactttccctttgttttccaagttcgtcgagtgtgaattggtggttcctggagattcaattttcttttcctgcttcctccacaatatgtatactgtaaactatataatctgtatactatatacaagagacaaaaggatgtaatgagagaaaatacaaggacaaaaaatatcaatatctataacatcaaagcaaattctttcatcatttctatattctctccgtcatagggctgcttattggcatcgagtttttttaggcacaagaataatgttggacgtgttcaacaagttaaaatattggtcactcgtgctgtacatgtaattggtcatttagatgaacgaagaagagac

SEQ ID NO: 65949 - DNA, 1606 bp, Zea Mays
aaccccaaaacgcagcccacttccatcgaagctacgaaacccatgtcttagcgcggccttggtgccgtcgactcgacgcgctccaccatggcgccgccgcgaagcctcgccggcgccgccatagctgccacagccgcagccatcatcctctcatgtaacctctcactcttccctcacctcatcgtttctagctccaagttcccagcatcaacctctcctccctcaccaacgtgcctatccggctatcccacaggcttgttctacaggcgcaaatgcgctcgtctggccgcgcgggtccgcgagttggaggcgtcactggcggtcactgcagagaaggccgccgccgagcgccgcggcagagtgcgggcccagcagtcactgagggctctgagtcagctggagcctggttccgacgaagcgaggccgaccaaggccgccgcctcagcatcttacccgctggtgccgattggtactgtcgagtcctgcttctccactaggaacggtacaccaaggcagcctttggtagttacattagccagggcaactttggtgcttgatccagcccgagtcccagcagcagcgctggaggggctagctagttactcacattgctggatcctttatgtttttcatctgaacactgatcttgataaactgtggaaagatcctgctaggtctaagctaaaagcaaaggtaagggtaccgagattgaaagggggcaagatgggggttttggcaactagatcgccacatcggcccaatccaatcggactcagcgtagcaaaggtggaggcggtgaatggacatactcttttgctttctggagtagatttggttgatggcacggtaccaatttgagcattttccttgatattaaaccatacctgccatattctgacagtgttaaaggtgcagctgttcccagttggttagaggttgacggtgcgttagcggtggagtcagtccatttttccgaacacttcatttctgcgctctccacctgctggatgcatgtacagatgtcgctgtatgcttcagcagacgagttccaggatctgatcaagcaggccctttcctgggacatcaggtcgatatcacagcggaaccgtccccatcaagtgagcgtggaagctgatgccaacggccactgtggcgaagacactgatgatgaccaccaccacagggacacaggtcgctacggtgtggtttaccacttacatcttgaaggcatcgatgtgtcgtataggatcgatcagggctccaacattttcgtcgaggacgccacccttcttccagacgccgtccagaaacggcatggttatttggcgtggagggacaaacttggcagcagcgttttgtagcatggccatggcgcagcgttttgttatcgttttcaggagtgctgcagtgtggtgtaggatgtcagtagtgatgccaatgaatttgaatgtggtggcgtctagtatctgaattggatttggaacgtataccccctgttttgcgttgagtctctgatttcttgatgttacacacaagcagaggatctggcagatcataagtacattgaaaaaaagatgagaaaaaggtgacatccgttgagagaact

SEQ ID NO: 65950 - DNA, 1502 bp, Zea Mays
aaccccaaaacgcagcccacttccatcgaagctacgaaacccatgtcttagcgcggccttggtgccgtcgactcgacgcgctccaccatggcgccgccgcgaagcctcgccggcgccgccatagctgccacagccgcagccatcatcctctcatgtaacctctcactcttccctcacctcatcgtttctagctccaagttcccagcatcaacctctcctccctcaccaacgtgcctatccggctatcccacaggcttgttctacaggcgcaaatgcgctcgtctggccgcgcgggtccgcgagttggaggcgtcactggcggtcactgcagagaaggccgccgccgagcgccgcggcagagtgcgggcccagcagtcactgagggctctgagtcagctggagcctggttccgacgaagcgaggccgaccaaggccgccgcctcagcatcttacccgctggtgccgattggtactgtcgagtcctgcttctccactaggaacggtacaccaaggcagcctttggtagttacattagccagggcaactttggtgcttgatccagcccgagtcccagcagcagcgctggaggggctagctagttactcacattgctggatcctttatgtttttcatctgaacactgatcttgataaactgtggaaagatcctgctaggtctaagctaaaagcaaaggtggaggcggtgaatggacatactcttttgctttctggagtagatttggttgatggcacgccagtccttgatattaaaccatacctgccatattctgacagtgttaaaggtgcagctgttcccagttggttagaggttgacggtgcgttagcggtggagtcagtccatttttccgaacacttcatttctgcgctctccacctgctggatgcatgtacagcagatgtcgctgtatgcttcagcagacgagttccaggatctgatcaagcaggccctttcctgggacatcaggtcgatatcacagcggaaccgtccccatcaagtgagcgtggaagctgatgccaacggccactgtggcgaagacactgatgatgaccaccaccacagggacacaggtcgctacggtgtggtttaccacttacatcttgaaggcatcgatgtgtcgtataggatcgatcagggctccaacattttcgtcgaggacgccacccttcttccagacgccgtccagaaacggcatggttatttggcgtggagggacaaacttggcagcagcgttttgtagcatggccatggcgcagcgttttgttatcgttttcaggagtgctgcagtgtggtgtaggatgtcagtagtgatgccaatgaatttgaatgtggtggcgtctagtatctgaattggatttggaacgtataccccctgttttgcgttgagtctctgatttcttgatgttacacacaagcagaggatctggcagatcataagtacattgaaaaaaagatgagaaaaaggtgacatccgttgagagaact

SEQ ID NO: 65951 - DNA, 2535 bp, Zea Mays
cctgacgtgagaaaaaaatatcgtgcccactgcggtggtcggctcgagccaagccagaaaggacccaatagccaatgtggtctgtcagtcgtgggctcgccgttgactaaagcagacaccagctcagcccaacgacggcccagagagttctagcccatagcaacatgccaacatcccgccccggagctctcagttctcacttttcggacggcagccgacgacacttccggcgggcggcggcgaaagattctccttctcccgcgccgccgggaccctatcgactcgctcctgctctccttgtcgtttcatttctctcggcatttagtctcagaatccctggatctgctgcaggtttcaaactaattttgcatgctcaggtgttgatttactgaaaaatgtccatgtgcaagcaatcgtcgggccacagacatctactcaagctaaatttcttacagagcttgggaacaagacatcagttccaatcatttccttttctgcaaacagcccgtcccggtcatccagccagaccccatatttcatcaggacagcatggaacgactcctgccaagctgaagctattgcctcacttgtccagaaatacaattggagggaagtcattcctatcatcgaggacgatgattccaacactagatttatccctgatctcgttgatgccctgggacatgtcgatactcgtgttccgtacaggtgcaagatccatccttctgctggagaagatgagataaagcatgctatatcaagcttaaaagaatattggacaagtgtctttgttgtgcgcatgtcatatcagttagcccttaagtttttccagcttgctaaggatgagggaatgatgggccagggctttgtctggattacagcatatggtttgacagatatcttcaatgtagttggttatcctgcacttgatgtgatggaaggtgttgttgggattgagccttatgttcaagaaactgcgaaactaaacaaatttaggcaaagatggtgtgagaaatataggtcagaaaatcctggtacatcaattaatgagtctataacgtctggtctgtatgcgtatgatacagtatgggcaatagcattggctgcagagaaggccggatatgttaattctgattttgtgctatctgaaacaaacaatggttccactgatttcaacaaaataagtacttctagggctgctaaaaaatttcatgctgcattcttggaggttaatttcacaggcattactggccaatttgtcattcaagatatgcagttccagttagtatcaacaacttacaaaataatcaatgtagttggtcatgagaggagagcagttggtttttggactccaggattgaacatatccagaattctagaaaagaaagatgatatcagtactattgtatggccaggaggcagtgagaagacacctagaggatggcttttgccagtgaataaagtactcaaaataggagtacctgggaaatctgggtttagcagttttataagatctgaagatggtatccccaagggtttctgcattgacatatttgaggaagttattagtaaactgccctacaaagttcccaagcactatgtggagtttggaaatggaaaaggagaaagtaatggaacttatgacgaactcgtctacaaagtttatcttaaggaatttgatgcggtagtaggtgacataacaattttagccaaccgttctctatatgtggactacactctcccttatactgagtccggggtacgcatgctggttccagtttgggaccggagacagaagactgcatggacattcctagaacctttaacagctgatctatggttacgaactggagccttcattgtcttcaccggctttgtagtttggtttatcgagcacagaacaaatcaggaattcagaggaccgccagccactcaaattggatcactcttctacttctccttctcaacatttgtatttgctcatagggagaggattgtgaacaacttgtcaagaattacagtagtagtttggctttttgtggtgctaatattgcagcagagttatactgcaagcttaagctcaattctcactgtagaacagcttcaaccaacagtcaccaatttagatgaagttatcaggcgaggggattatgttggctacctcagtgattctttcatgcctgagcttttgaaaaggttgaaaattaatgaaacaaaaatgatcgctttcagctctcctgaggagtacaatgacgccctatcaactagaaaagttgccgtcattgttgatgaaataccatatctcaaagtgtttctctcaaagtattgccacaactacactatggttgggccaacttacaaattcgatggatttggttatgtaagtaacatttctttgacttctctacagttgtctgttttcagtagagctaggtgatgaatcaagtagcatctactttgttgcagaactctgctattgtactagatcatactttctaaaatctgatgctgtgagagtagtttttggcctttgag

SEQ ID NO: 65952 - DNA, 2501 bp, Zea Mays
cctgacgtgagaaaaaaatatcgtgcccactgcggtggtcggctcgagccaagccagaaaggacccaatagccaatgtggtctgtcagtcgtgggctcgccgttgactaaagcagacaccagctcagcccaacgacggcccagagagttctagcccatagcaacatgccaacatcccgccccggagctctcagttctcacttttcggacggcagccgacgacacttccggcgggcggcggcgaaagattctccttctcccgcgccgccgggaccctatcgactcgctcctgctctccttgtcgtttcatttctctcggcatttagaatccctggatctgctgcaggtttcaaactaattttgcatgctcaggtgttgatttactgaaaaatgtccatgtgcaagcaatcgtcgggccacagacatctactcaagctaaatttcttacagagcttgggaacaagacatcagttccaatcatttccttttctgcaaacagcccgtcccggtcatccagccagaccccatatttcatcaggacagcatggaacgactcctgccaagctgaagctattgcctcacttgtccagaaatacaattggagggaagtcattcctatcatcgaggacgatgattccaacactagatttatccctgatctcgttgatgccctgggacatgtcgatactcgtgttccgtacaggtgcaagatccatccttctgctggagaagatgagataaagcatgctatatcaagcttaaaagaatattggacaagtgtctttgttgtgcgcatgtcatatcagttagcccttaagtttttccagcttgctaaggatgagggaatgatgggccagggctttgtctggattacagcatatggtttgacagatatcttcaatgtagttggttatcctgcacttgatgtgatggaaggtgttgttgggattgagccttatgttcaagaaactgcgaaactaaacaaatttaggcaaagatggtgtgagaaatataggtcagaaaatcctggtacatcaattaatgagtctataacgtctggtctgtatgcgtatgatacagtatgggcaatagcattggctgcagagaaggccggatatgttaattctgattttgtgctatctgaaacaaacaatggttccactgatttcaacaaaataagtacttctagggctgctaaaaaatttcatgctgcattcttggaggttaatttcacaggcattactggccaatttgtcattcaagatatgcagttccagttagtatcaacaacttacaaaataatcaatgtagttggtcatgagaggagagcagttggtttttggactccaggattgaacatatccagaattctagaaaagaaagatgatatcagtactattgtatggccaggaggcagtgagaagacacctagaggatggcttttgccagtgaataaagtactcaaaataggagtacctgggaaatctgggtttagcagttttataagatctgaagatggtatccccaagggtttctgcattgacatatttgaggaagttattagtaaactgccctacaaagttcccaagcactatgtggagtttggaaatggaaaaggagaaagtaatggaacttatgacgaactcgtctacaaagtttatcttaaggaatttgatgcggtagtaggtgacataacaattttagccaaccgttctctatatgtggactacactctcccttatactgagtccggggtacgcatgctggttccagtttgggaccggagacagaagactgcatggacattcctagaacctttaacagctgatctatggttacgaactggagccttcattgtcttcaccggctttgtagtttggtttatcgagcacagaacaaatcaggaattcagaggaccgccagccactcaaattggatcactcttctacttctccttctcaacatttgtatttgctcatagggagaggattgtgaacaacttgtcaagaattacagtagtagtttggctttttgtggtgctaatattgcagcagagttatactgcaagcttaagctcaattctcactgtagaacagcttcaaccaacagtcaccaatttagatgaagttatcaggcgaggggattatgttggctacctcagtgattctttcatgcctgagcttttgaaaaggttgaaaattaatgaaacaaaaatgatcgctttcagctctcctgaggagtacaatgacgccctatcaactagaaaagttgccgtcattgttgatgaaataccatatctcaaagtgtttctctcaaagtattgccacaactacactatggttgggccaacttacaaattcgatggatttggttatgcattccctcgaggctctccacttacgtctgaaatttcaaggggaatacttgaattagcatcaaatggcagaatggatgaactggagaaacagttgtatggcgatacatcgtgcccggacaaagatg

SEQ ID NO: 65953 - DNA, 2526 bp, Zea Mays
cctgacgtgagaaaaaaatatcgtgcccactgcggtggtcggctcgagccaagccagaaaggacccaatagccaatgtggtctgtcagtcgtgggctcgccgttgactaaagcagacaccagctcagcccaacgacggcccagagagttctagcccatagcaacatgccaacatcccgccccggagctctcagttctcacttttcggacggcagccgacgacacttccggcgggcggcggcgaaagattctccttctcccgcgccgccgggaccctatcgactcgctcctgctctccttgtcgtttcatttctctcggcatttagtttcccttttgcatcctagtctcagaatccctggatctgctgcaggtttcaaactaattttgcatgctcaggtgttgatttactgaaaaatgtccatgtgcaagcaatcgtcgggccacagacatctactcaagctaaatttcttacagagcttgggaacaagacatcagttccaatcatttccttttctgcaaacagcccgtcccggtcatccagccagaccccatatttcatcaggacagcatggaacgactcctgccaagctgaagctattgcctcacttgtccagaaatacaattggagggaagtcattcctatcatcgaggacgatgattccaacactagatttatccctgatctcgttgatgccctgggacatgtcgatactcgtgttccgtacaggtgcaagatccatccttctgctggagaagatgagataaagcatgctatatcaagcttaaaagaatattggacaagtgtctttgttgtgcgcatgtcatatcagttagcccttaagtttttccagcttgctaaggatgagggaatgatgggccagggctttgtctggattacagcatatggtttgacagatatcttcaatgtagttggttatcctgcacttgatgtgatggaaggtgttgttgggattgagccttatgttcaagaaactgcgaaactaaacaaatttaggcaaagatggtgtgagaaatataggtcagaaaatcctggtacatcaattaatgagtctataacgtctggtctgtatgcgtatgatacagtatgggcaatagcattggctgcagagaaggccggatatgttaattctgattttgtgctatctgaaacaaacaatggttccactgatttcaacaaaataagtacttctagggctgctaaaaaatttcatgctgcattcttggaggttaatttcacaggcattactggccaatttgtcattcaagatatgcagttccagttagtatcaacaacttacaaaataatcaatgtagttggtcatgagaggagagcagttggtttttggactccaggattgaacatatccagaattctagaaaagaaagatgatatcagtactattgtatggccaggaggcagtgagaagacacctagaggatggcttttgccagtgaataaagtactcaaaataggagtacctgggaaatctgggtttagcagttttataagatctgaagatggtatccccaagggtttctgcattgacatatttgaggaagttattagtaaactgccctacaaagttcccaagcactatgtggagtttggaaatggaaaaggagaaagtaatggaacttatgacgaactcgtctacaaagtttatcttaaggaatttgatgcggtagtaggtgacataacaattttagccaaccgttctctatatgtggactacactctcccttatactgagtccggggtacgcatgctggttccagtttgggaccggagacagaagactgcatggacattcctagaacctttaacagctgatctatggttacgaactggagccttcattgtcttcaccggctttgtagtttggtttatcgagcacagaacaaatcaggaattcagaggaccgccagccactcaaattggatcactcttctacttctccttctcaacatttgtatttgctcatagggagaggattgtgaacaacttgtcaagaattacagtagtagtttggctttttgtggtgctaatattgcagcagagttatactgcaagcttaagctcaattctcactgtagaacagcttcaaccaacagtcaccaatttagatgaagttatcaggcgaggggattatgttggctacctcagtgattctttcatgcctgagcttttgaaaaggttgaaaattaatgaaacaaaaatgatcgctttcagctctcctgaggagtacaatgacgccctatcaactagaaaagttgccgtcattgttgatgaaataccatatctcaaagtgtttctctcaaagtattgccacaactacactatggttgggccaacttacaaattcgatggatttggttatgcattccctcgaggctctccacttacgtctgaaatttcaaggggaatacttgaattagcatcaaatggcagaatggatgaactggagaaacagttgtatggcgatacatcgtgcccggacaaagatg

SEQ ID NO: 65954 - DNA, 485 bp, Zea Mays
cttaatatgttgcagccttctcagtagaatacaacctactgagaagcaacttccattttgctctagtaccaaattctctactgggaaatgaatgttttctttgattgcatttgtgtcatccggcatcccacaattataattgttcaatatatatatgcattatacttctcagttctatcaacttattgaactttgtggcggaagtatttttccttcatgtattacagtgcagaaaacaaaaatatctttacctttggatggtgaagtctcatggagggtcaatggcaaccaaattgaaactactgcaaggccatatgcttttatcaagtttgggaaccaaggcctggttatttgctggagcaatactcctatgactcttctacacgtggtaccatcgtagatttcagatatttgatgtctttgctagaacaatacaggtaccccttttgttttaattatctttattgttctgtttagatggtgag

SEQ ID NO: 65955 - DNA, 1680 bp, Zea Mays
aatttttttttgttgaaatttccatcgggctttatcgccaaaaaccagggaactctctgttcgatagatcgatcgattaatctgctgtataagtagataaattggttaaaaaccgagccaatttaaaatttattttggatttaaattctaccggtttctattagtttacgtcgatttatcgtgatttgctatgcgttcgacggcacacggcactacggcagtggcagtgcccagcggttagcggcgagagaagagatgccgctggccgccgctgtttctctcccctcgcccacgccagggccgcgcgagccccgcctccgtcggactctcgatgccgtccaccgaccttcgccgcctcactgcccgcatcgtcgacctcccgccgggctcgcccagatcatggaggacgtggaagcaactgcgcgggggcgggtttcgcaacaccatcggcatgaacgtggttctagaggcctgcgtgcgctgcggcgacgtcgaccgcgcgctccggctcttcgaggaaatccgtgggcccagggggtgtggtgtcgacggtgtcctacggcatcctgctcaaggtatgcgattgtggtatctgttcatgcacgcaaccttgacacatgcaattgccaaaactcatttggtcaattgtttgttctaactgtttgagtaacgatggaattgtggagatgaactgaagaaacattgtgagtccaacaacagatctatcctgaacatgcatgataaggatgcatatccaggcctgggtatagcaagaaggattgatgcagcattcaaaatactggaatggattgggaaagattcttccattgggagccctaggctctcctcatctcatttgtggttttctaaatttccttattgaagcagccaaagttgaaagcttatatggatacaccaactctcttctaaggccctgcatatttccacagggaaggctgtgatatgattcttgaaagatgacgactcagttcctgttgtcgatgattggggaggttgtgttggtattgttcaccgtgatgattgtaccttgattgtaccaagctggatgcacctcttcttgtgcctacttcaaccaccgtggagcacgtcattgacctactcctcagggagaaatccgagatggtggtggtgaagagcggtaacatgtacgaaggcagctcaagacccttgggtattttctccctcgccatgctgtggagtttcaccagcgactactcgtcggaatcagatgtcctcgacccaggcgtctcctgggcaaccaaaccaaaacaagatgtcgacacctacaatcacggctgattcagcagctagtttggtgtcctttaccagcttatagcaattgtagtttagatggttagctggtctgagtatgttcgagttgtcttatctgtatgtcagagtttttttctttttcttttttcttatagcaagtccgcatcgtgatgccgcgcaaaccagtaatgtaatggtcctccaattcgacaaggagggggcgaaatggttttttgtcaaaggaagccgctaggctgatcatgacctgcccgtggatctgtatgatgttttctgatgcacagagcaaaagtgacagtggagcggagattccggattcccgcccagccaccgcgcgcgcagggatatggtcctgagtcctgaccggtc

SEQ ID NO: 65956 - DNA, 1682 bp, Zea Mays
aatttttttttgttgaaatttccatcgggctttatcgccaaaaaccagggaactctctgttcgatagatcgatcgattaatctgctgtataagtagataaattggttaaaaaccgagccaatttaaaatttattttggatttaaattctaccggtttctattagtttacgtcgatttatcgtgatttgctatgcgttcgacggcacacggcactacggcagtggcagtgcccagcggttagcggcgagagaagagatgccgctggccgccgctgtttctctcccctcgcccacgccagggccgcgcgagccccgcctccgtcggactctcgatgccgtccaccgaccttcgccgcctcactgcccgcatcgtcgacctcccgccgggctcgcccagatcatggaggacgtggaagcaactgcgcgggggcgggtttcgcaacaccatcggcatgaacgtggttctagaggcctgcgtgcgctgcggcgacgtcgaccgcgcgctccggctcttcgaggaaatccgtgggcccagggggtgtggtgtcgacggtgtcctacggcatcctgctcaaggtatgcgattgtggtatctgttcatgcacgcaaccttgacacatgcaattgccaaaactcatttggtcaattgtttgttctaactgtttgagtaacgatggaattgtggagatgaactgaagaaacattgtgagtccaacaacagatctatcctgaacatgcatgataaggatgcatatccaggcctgggtatagcaagaaggattgatgcagcattcaaaatactggaatggattgggaaagattcttccattgggagccctaggctctcctcatctcatttgtggttttctaaatttccttattgaagcagttcgcagccaaagttgaaagcttatatggatacaccaactctcttctaaggccctgcatatttccacaggctgtgatatgattcttgaaagatgacgactcagttcctgttgtcgatgattggggaggttgtgttggtattgttcaccgtgatgattgtaccttgattgtaccaagctggatgcacctcttcttgtgcctacttcaaccaccgtggagcacgtcattgacctactcctcagggagaaatccgagatggtggtggtgaagagcggtaacatgtacgaaggcagctcaagacccttgggtattttctccctcgccatgctgtggagtttcaccagcgactactcgtcggaatcagatgtcctcgacccaggcgtctcctgggcaaccaaaccaaaacaagatgtcgacacctacaatcacggctgattcagcagctagtttggtgtcctttaccagcttatagcaattgtagtttagatggttagctggtctgagtatgttcgagttgtcttatctgtatgtcagagtttttttctttttcttttttcttatagcaagtccgcatcgtgatgccgcgcaaaccagtaatgtaatggtcctccaattcgacaaggagggggcgaaatggttttttgtcaaaggaagccgctaggctgatcatgacctgcccgtggatctgtatgatgttttctgatgcacagagcaaaagtgacagtggagcggagattccggattcccgcccagccaccgcgcgcgcagggatatggtcctgagtcctgaccggtc

SEQ ID NO: 65957 - DNA, 1498 bp, Zea Mays
aatttttttttgttgaaatttccatcgggctttatcgccaaaaaccagggaactctctgttcgatagatcgatcgattaatctgctgtataagtagataaattggttaaaaaccgagccaatttaaaatttattttggatttaaattctaccggtttctattagtttacgtcgatttatcgtgatttgctatgcgttcgacggcacacggcactacggcagtggcagtgcccagcggttagcggcgagagaagagatgccgctggccgccgctgtttctctcccctcgcccacgccagggccgcgcgagccccgcctccgtcggactctcgatgccgtccaccgaccttcgccgcctcactgcccgcatcgtcgacctcccgccgggctcgcccagatcatggaggacgtggaagcaactgcgcgggggcgggtttcgcaacaccatcggcatgaacgtggttctagaggcctgcgtgcgctgcggcgacgtcgaccgcgcgctccggctcttcgaggaaatccgtgggcccagggggtgtggtgtcgacggtgtcctacggcatcctgctcaagggcctgggtatagcaagaaggattgatgcagcattcaaaatactggaatggattgggaaagattcttccattgggagccctaggctctcctcatctcatttgtggttttctaaatttccttattgaagcagccaaagttgaaagcttatatggatacaccaactctcttctaaggccctgcatatttccacagggaaggctgtgatatgattcttgaaagatgacgactcagttcctgttgtcgatgattggggaggttgtgttggtattgttcaccgtgatgattgtaccttgattgtaccaagctggatgcacctcttcttgtgcctacttcaaccaccgtggagcacgtcattgacctactcctcagggagaaatccgagatggtggtggtgaagagcggtaacatgtacgaaggcagctcaagacccttgggtattttctccctcgccatgctgtggagtttcaccagcgactactcgtcggaatcagatgtcctcgacccaggcgtctcctgggcaaccaaaccaaaacaagatgtcgacacctacaatcacggctgattcagcagctagtttggtgtcctttaccagcttatagcaattgtagtttagatggttagctggtctgagtatgttcgagttgtcttatctgtatgtcagagtttttttctttttcttttttcttatagcaagtccgcatcgtgatgccgcgcaaaccagtaatgtaatggtcctccaattcgacaaggagggggcgaaatggttttttgtcaaaggaagccgctaggctgatcatgacctgcccgtggatctgtatgatgttttctgatgcacagagcaaaagtgacagtggagcggagattccggattcccgcccagccaccgcgcgcgcagggatatggtcctgagtcctgaccggtc

SEQ ID NO: 65958 - DNA, 1505 bp, Zea Mays
aatttttttttgttgaaatttccatcgggctttatcgccaaaaaccagggaactctctgttcgatagatcgatcgattaatctgctgtataagtagataaattggttaaaaaccgagccaatttaaaatttattttggatttaaattctaccggtttctattagtttacgtcgatttatcgtgatttgctatgcgttcgacggcacacggcactacggcagtggcagtgcccagcggttagcggcgagagaagagatgccgctggccgccgctgtttctctcccctcgcccacgccagggccgcgcgagccccgcctccgtcggactctcgatgccgtccaccgaccttcgccgcctcactgcccgcatcgtcgacctcccgccgggctcgcccagatcatggaggacgtggaagcaactgcgcgggggcgggtttcgcaacaccatcggcatgaacgtggttctagaggcctgcgtgcgctgcggcgacgtcgaccgcgcgctccggctcttcgaggaaatccgtgggcccagggggtgtggtgtcgacggtgtcctacggcatcctgctcaagggcctgggtatagcaagaaggattgatgcagcattcaaaatactggaatggattgggaaagattcttccattgggagccctaggctctcctcatctcatttgtggttttctaaatttccttattgaagcagttcgcagccaaagttgaaagcttatatggatacaccaactctcttctaaggccctgcatatttccacagggaaggctgtgatatgattcttgaaagatgacgactcagttcctgttgtcgatgattggggaggttgtgttggtattgttcaccgtgatgattgtaccttgattgtaccaagctggatgcacctcttcttgtgcctacttcaaccaccgtggagcacgtcattgacctactcctcagggagaaatccgagatggtggtggtgaagagcggtaacatgtacgaaggcagctcaagacccttgggtattttctccctcgccatgctgtggagtttcaccagcgactactcgtcggaatcagatgtcctcgacccaggcgtctcctgggcaaccaaaccaaaacaagatgtcgacacctacaatcacggctgattcagcagctagtttggtgtcctttaccagcttatagcaattgtagtttagatggttagctggtctgagtatgttcgagttgtcttatctgtatgtcagagtttttttctttttcttttttcttatagcaagtccgcatcgtgatgccgcgcaaaccagtaatgtaatggtcctccaattcgacaaggagggggcgaaatggttttttgtcaaaggaagccgctaggctgatcatgacctgcccgtggatctgtatgatgttttctgatgcacagagcaaaagtgacagtggagcggagattccggattcccgcccagccaccgcgcgcgcagggatatggtcctgagtcctgaccggtc

SEQ ID NO: 65959 - DNA, 1576 bp, Zea Mays
aatttttttttgttgaaatttccatcgggctttatcgccaaaaaccagggaactctctgttcgatagatcgatcgattaatctgctgtataagtagataaattggttaaaaaccgagccaatttaaaatttattttggatttaaattctaccggtttctattagtttacgtcgatttatcgtgatttgctatgcgttcgacggcacacggcactacggcagtggcagtgcccagcggttagcggcgagagaagagatgccgctggccgccgctgtttctctcccctcgcccacgccagggccgcgcgagccccgcctccgtcggactctcgatgccgtccaccgaccttcgccgcctcactgcccgcatcgtcgacctcccgccgggctcgcccagatcatggaggacgtggaagcaactgcgcgggggcgggtttcgcaacaccatcggcatgaacgtggttctagaggcctgcgtgcgctgcggcgacgtcgaccgcgcgctccggctcttcgaggaaatccgtgggcccagggggtgtggtgtcgacggtgtcctacggcatcctgctcaagatgaactgaagaaacattgtgagtccaacaacagatctatcctgaacatgcatgataaggatgcatatccaggcctgggtatagcaagaaggattgatgcagcattcaaaatactggaatggattgggaaagattcttccattgggagccctaggctctcctcatctcatttgtggttttctaaatttccttattgaagcagttcgcagccaaagttgaaagcttatatggatacaccaactctcttctaaggccctgcatatttccacagggaaggctgtgatatgattcttgaaagatgacgactcagttcctgttgtcgatgattggggaggttgtgttggtattgttcaccgtgatgattgtaccttgattgtaccaagctggatgcacctcttcttgtgcctacttcaaccaccgtggagcacgtcattgacctactcctcagggagaaatccgagatggtggtggtgaagagcggtaacatgtacgaaggcagctcaagacccttgggtattttctccctcgccatgctgtggagtttcaccagcgactactcgtcggaatcagatgtcctcgacccaggcgtctcctgggcaaccaaaccaaaacaagatgtcgacacctacaatcacggctgattcagcagctagtttggtgtcctttaccagcttatagcaattgtagtttagatggttagctggtctgagtatgttcgagttgtcttatctgtatgtcagagtttttttctttttcttttttcttatagcaagtccgcatcgtgatgccgcgcaaaccagtaatgtaatggtcctccaattcgacaaggagggggcgaaatggttttttgtcaaaggaagccgctaggctgatcatgacctgcccgtggatctgtatgatgttttctgatgcacagagcaaaagtgacagtggagcggagattccggattcccgcccagccaccgcgcgcgcagggatatggtcctgagtcctgaccggtc

SEQ ID NO: 65960 - DNA, 1551 bp, Zea Mays
aatttttttttgttgaaatttccatcgggctttatcgccaaaaaccagggaactctctgttcgatagatcgatcgattaatctgctgtataagtagataaattggttaaaaaccgagccaatttaaaatttattttggatttaaattctaccggtttctattagtttacgtcgatttatcgtgatttgctatgcgttcgacggcacacggcactacggcagtggcagtgcccagcggttagcggcgagagaagagatgccgctggccgccgctgtttctctcccctcgcccacgccagggccgcgcgagccccgcctccgtcggactctcgatgccgtccaccgaccttcgccgcctcactgcccgcatcgtcgacctcccgccgggctcgcccagatcatggaggacgtggaagcaactgcgcgggggcgggtttcgcaacaccatcggcatgaacgtggttctagaggcctgcgtgcgctgcggcgacgtcgaccgcgcgctccggctcttcgaggaaatccgtgggcccagggggtgtggtgtcgacggtgtcctacggcatcctgctcaaggtatgcgattgtggtatctgttcatgcacgcaaccttgacacatgcaattgccaaaactcatttggtcaattgtttgttctaactgtttgagtaacgatggaattgtggagatgaactgaagaaacattgtgagtccaacaacagatctatcctgaacatgcatgataaggatgcatatccattcgcagccaaagttgaaagcttatatggatacaccaactctcttctaaggccctgcatatttccacaggctgtgatatgattcttgaaagatgacgactcagttcctgttgtcgatgattggggaggttgtgttggtattgttcaccgtgatgattgtaccttgattgtaccaagctggatgcacctcttcttgtgcctacttcaaccaccgtggagcacgtcattgacctactcctcagggagaaatccgagatggtggtggtgaagagcggtaacatgtacgaaggcagctcaagacccttgggtattttctccctcgccatgctgtggagtttcaccagcgactactcgtcggaatcagatgtcctcgacccaggcgtctcctgggcaaccaaaccaaaacaagatgtcgacacctacaatcacggctgattcagcagctagtttggtgtcctttaccagcttatagcaattgtagtttagatggttagctggtctgagtatgttcgagttgtcttatctgtatgtcagagtttttttctttttcttttttcttatagcaagtccgcatcgtgatgccgcgcaaaccagtaatgtaatggtcctccaattcgacaaggagggggcgaaatggttttttgtcaaaggaagccgctaggctgatcatgacctgcccgtggatctgtatgatgttttctgatgcacagagcaaaagtgacagtggagcggagattccggattcccgcccagccaccgcgcgcgcagggatatggtcctgagtcctgaccggtc

SEQ ID NO: 65961 - DNA, 1595 bp, Zea Mays
aatttttttttgttgaaatttccatcgggctttatcgccaaaaaccagggaactctctgttcgatagatcgatcgattaatctgctgtataagtagataaattggttaaaaaccgagccaatttaaaatttattttggatttaaattctaccggtttctattagtttacgtcgatttatcgtgatttgctatgcgttcgacggcacacggcactacggcagtggcagtgcccagcggttagcggcgagagaagagatgccgctggccgccgctgtttctctcccctcgcccacgccagggccgcgcgagccccgcctccgtcggactctcgatgccgtccaccgaccttcgccgcctcactgcccgcatcgtcgacctcccgccgggctcgcccagatcatggaggacgtggaagcaactgcgcgggggcgggtttcgcaacaccatcggcatgaacgtggttctagaggcctgcgtgcgctgcggcgacgtcgaccgcgcgctccggctcttcgaggaaatccgtgggcccagggggtgtggtgtcgacggtgtcctacggcatcctgctcaagtaacgatggaattgtggagatgaactgaagaaacattgtgagtccaacaacagatctatcctgaacatgcatgataaggatgcatatccaggcctgggtatagcaagaaggattgatgcagcattcaaaatactggaatggattgggaaagattcttccattgggagccctaggctctcctcatctcatttgtggttttctaaatttccttattgaagcagttcgcagccaaagttgaaagcttatatggatacaccaactctcttctaaggccctgcatatttccacagggaaggctgtgatatgattcttgaaagatgacgactcagttcctgttgtcgatgattggggaggttgtgttggtattgttcaccgtgatgattgtaccttgattgtaccaagctggatgcacctcttcttgtgcctacttcaaccaccgtggagcacgtcattgacctactcctcagggagaaatccgagatggtggtggtgaagagcggtaacatgtacgaaggcagctcaagacccttgggtattttctccctcgccatgctgtggagtttcaccagcgactactcgtcggaatcagatgtcctcgacccaggcgtctcctgggcaaccaaaccaaaacaagatgtcgacacctacaatcacggctgattcagcagctagtttggtgtcctttaccagcttatagcaattgtagtttagatggttagctggtctgagtatgttcgagttgtcttatctgtatgtcagagtttttttctttttcttttttcttatagcaagtccgcatcgtgatgccgcgcaaaccagtaatgtaatggtcctccaattcgacaaggagggggcgaaatggttttttgtcaaaggaagccgctaggctgatcatgacctgcccgtggatctgtatgatgttttctgatgcacagagcaaaagtgacagtggagcggagattccggattcccgcccagccaccgcgcgcgcagggatatggtcctgagtcctgaccggtc

SEQ ID NO: 65962 - DNA, 1374 bp, Zea Mays
aatttttttttgttgaaatttccatcgggctttatcgccaaaaaccagggaactctctgttcgatagatcgatcgattaatctgctgtataagtagataaattggttaaaaaccgagccaatttaaaatttattttggatttaaattctaccggtttctattagtttacgtcgatttatcgtgatttgctatgcgttcgacggcacacggcactacggcagtggcagtgcccagcggttagcggcgagagaagagatgccgctggccgccgctgtttctctcccctcgcccacgccagggccgcgcgagccccgcctccgtcggactctcgatgccgtccaccgaccttcgccgcctcactgcccgcatcgtcgacctcccgccgggctcgcccagatcatggaggacgtggaagcaactgcgcgggggcgggtttcgcaacaccatcggcatgaacgtggttctagaggcctgcgtgcgctgcggcgacgtcgaccgcgcgctccggctcttcgaggaaatccgtgggcccagggggtgtggtgtcgacggtgtcctacggcatcctgctcaagttcgcagccaaagttgaaagcttatatggatacaccaactctcttctaaggccctgcatatttccacagggaaggctgtgatatgattcttgaaagatgacgactcagttcctgttgtcgatgattggggaggttgtgttggtattgttcaccgtgatgattgtaccttgattgtaccaagctggatgcacctcttcttgtgcctacttcaaccaccgtggagcacgtcattgacctactcctcagggagaaatccgagatggtggtggtgaagagcggtaacatgtacgaaggcagctcaagacccttgggtattttctccctcgccatgctgtggagtttcaccagcgactactcgtcggaatcagatgtcctcgacccaggcgtctcctgggcaaccaaaccaaaacaagatgtcgacacctacaatcacggctgattcagcagctagtttggtgtcctttaccagcttatagcaattgtagtttagatggttagctggtctgagtatgttcgagttgtcttatctgtatgtcagagtttttttctttttcttttttcttatagcaagtccgcatcgtgatgccgcgcaaaccagtaatgtaatggtcctccaattcgacaaggagggggcgaaatggttttttgtcaaaggaagccgctaggctgatcatgacctgcccgtggatctgtatgatgttttctgatgcacagagcaaaagtgacagtggagcggagattccggattcccgcccagccaccgcgcgcgcagggatatggtcctgagtcctgaccggtc

SEQ ID NO: 65963 - DNA, 993 bp, Zea Mays
caaaaagatgttttctgaaacactttcctcagctcatatagaagcactagcaacacttttcagggcctgggtatagcaagaaggattgatgcagcattcaaaatactggaatggattgggaaagattcttccattgggagccctaggctctcctcatctcatttgtggttttctaaatttccttattgaagcagttcgcagccaaagttgaaagcttatatggatacaccaactctcttctaaggccctgcatatttccacagggaaggctgtgatatgattcttgaaagatgacgactcagttcctgttgtcgatgattggggaggttgtgttggtattgttcaccgtgatgattgtaccttgattgtaccaagctggatgcacctcttcttgtgcctacttcaaccaccgtggagcacgtcattgacctactcctcagggagaaatccgagatggtggtggtgaagagcggtaacatgtacgaaggcagctcaagacccttgggtattttctccctcgccatgctgtggagtttcaccagcgactactcgtcggaatcagatgtcctcgacccaggcgtctcctgggcaaccaaaccaaaacaagatgtcgacacctacaatcacggctgattcagcagctagtttggtgtcctttaccagcttatagcaattgtagtttagatggttagctggtctgagtatgttcgagttgtcttatctgtatgtcagagtttttttctttttcttttttcttatagcaagtccgcatcgtgatgccgcgcaaaccagtaatgtaatggtcctccaattcgacaaggagggggcgaaatggttttttgtcaaaggaagccgctaggctgatcatgacctgcccgtggatctgtatgatgttttctgatgcacagagcaaaagtgacagtggagcggagattccggattcccgcccagccaccgcgcgcgcagggatatggtcctgagtcctgaccggtc

SEQ ID NO: 65964 - DNA, 1678 bp, Zea Mays
attaagcagggccagcgcttaattgcccgcttagtaggtaagcgatgcgttgaccctctgctcagcgcttaatcacgcctaatcgcacgcctaatcgcgctttcttgaaccttgggtttccttgtaaggaactaaatgcttaagcataaggtatgtagaattccatctcagccatgtcaatgccaaacttacgaggacacatattcatagcaacacagcaacccttaaatgcagcaatatgttgattagaagcatccaagaaaactattgcagttctaaatgaatcaaggtaaggttgtagccttttcaagccacacttcacaatcaggtttataatatgacaagcacaacgttgatgcaagaataaagtaccaacataaccatacaataatggactaagcttctccattgcttagaattggaagatgcattgtccaaggtgatagaaaaaaacttcattaactactccataatcctcaagcacagtcataaccctctcagcaatgttctcaccagcgtgagatgtttcaattagtctaagcccaattactctcttttctaatagccagtccttagaaacataatgagcaaccacactaagatagtcttccttaacattaccactccaaatatcaaatgtaattgcaatagaagtaacaaattgcaagcattcaacaactatcttacgccgatcactatcagtaaagaacttaacaaagtctctagaggtggtttgtctagatacttttttaaagacaggattatgagacagcctaatatactcttcaaaagcaggtgactcagcaaaattaagaggaagatcaagtctagcaattaatctacatatctgagttctagcacgattaggacagtatcccattcgcagccaaagttgaaagcttatatggatacaccaactctcttctaaggccctgcatatttccacagggaaggctgtgatatgattcttgaaagatgacgactcagttcctgttgtcgatgattggggaggttgtgttggtattgttcaccgtgatgattgtaccttgattgtaccaagctggatgcacctcttcttgtgcctacttcaaccaccgtggagcacgtcattgacctactcctcagggagaaatccgagatggtggtggtgaagagcggtaacatgtacgaaggcagctcaagacccttgggtattttctccctcgccatgctgtggagtttcaccagcgactactcgtcggaatcagatgtcctcgacccaggcgtctcctgggcaaccaaaccaaaacaagatgtcgacacctacaatcacggctgattcagcagctagtttggtgtcctttaccagcttatagcaattgtagtttagatggttagctggtctgagtatgttcgagttgtcttatctgtatgtcagagtttttttctttttcttttttcttatagcaagtccgcatcgtgatgccgcgcaaaccagtaatgtaatggtcctccaattcgacaaggagggggcgaaatggttttttgtcaaaggaagccgctaggctgatcatgacctgcccgtggatctgtatgatgttttctgatgcacagagcaaaagtgacagtggagcggagattccggattcccgcccagccaccgcgcgcgcagggatatggtcctgagtcctgaccggtc

SEQ ID NO: 65965 - DNA, 1193 bp, Zea Mays
gaaaaaaacttcattaactactccataatcctcaagcacagtcataaccctctcagcaatgttctcaccagcgtgagatgtttcaattagtctaagcccaattactctcttttctaatagccagtccttagaaacataatgagcaaccacactaagatagtcttccttaacattaccactccaaatatcaaatgtaattgcaatagaagtaacaaattgcaagcattcaacaactatcttacgccgatcactatcagtaaagaacttaacaaagtctctagaggtggtttgtctagatacttttttaaagacaggattatgagacagcctaatatactcttcaaaagcaggtgactcagcaaaattaagaggaagatcaagtctagcaattaatctacatatctgagttctagcacgattaggacagtatcccattcgcagccaaagttgaaagcttatatggatacaccaactctcttctaaggccctgcatatttccacagggaaggctgtgatatgattcttgaaagatgacgactcagttcctgttgtcgatgattggggaggttgtgttgctggatgcacctcttcttgtgcctacttcaaccaccgtggagcacgtcattgacctactcctcagggagaaatccgagatggtggtggtgaagagcggtaacatgtacgaaggcagctcaagacccttgggtattttctccctcgccatgctgtggagtttcaccagcgactactcgtcggaatcagatgtcctcgacccaggcgtctcctgggcaaccaaaccaaaacaagatgtcgacacctacaatcacggctgattcagcagctagtttggtgtcctttaccagcttatagcaattgtagtttagatggttagctggtctgagtatgttcgagttgtcttatctgtatgtcagagtttttttctttttcttttttcttatagcaagtccgcatcgtgatgccgcgcaaaccagtaatgtaatggtcctccaattcgacaaggagggggcgaaatggttttttgtcaaaggaagccgctaggctgatcatgacctgcccgtggatctgtatgatgttttctgatgcacagagcaaaagtgacagtggagcggagattccggattcccgcccagccaccgcgcgcgcagggatatggtcctgagtcctgaccggtc

SEQ ID NO: 65966 - DNA, 867 bp, Zea Mays
aaattaagaggaagatcaagtctagcaattaatctacatatctgagttctagcacgattaggacagtatcccattcgcagccaaagttgaaagcttatatggatacaccaactctcttctaaggccctgcatatttccacaggctgtgatatgattcttgaaagatgacgactcagttcctgttgtcgatgattggggaggttgtgttggtattgttcaccgtgatgattgtaccttgattgtaccaagctggatgcacctcttcttgtgcctacttcaaccaccgtggagcacgtcattgacctactcctcagggagaaatccgagatggtggtggtgaagagcggtaacatgtacgaaggcagctcaagacccttgggtattttctccctcgccatgctgtggagtttcaccagcgactactcgtcggaatcagatgtcctcgacccaggcgtctcctgggcaaccaaaccaaaacaagatgtcgacacctacaatcacggctgattcagcagctagtttggtgtcctttaccagcttatagcaattgtagtttagatggttagctggtctgagtatgttcgagttgtcttatctgtatgtcagagtttttttctttttcttttttcttatagcaagtccgcatcgtgatgccgcgcaaaccagtaatgtaatggtcctccaattcgacaaggagggggcgaaatggttttttgtcaaaggaagccgctaggctgatcatgacctgcccgtggatctgtatgatgttttctgatgcacagagcaaaagtgacagtggagcggagattccggattcccgcccagccaccgcgcgcgcagggatatggtcctgagtcctgaccggtc

SEQ ID NO: 65967 - DNA, 660 bp, Zea Mays
atgtcggggcgcggcaagggcggcaagggtctgggcaagggtggaccggcgatccggaggctggctcggaggggcggcgtgaagcgcatctcggggctcatctacgaggagacccgcggcgtgctcaagatcttcctcgagaacaccgtcaccgccatggacgtcgtctacgcgctcaagcgccagggccgcaccctctacggattcggaggctaggcgcctcttcgtagctggggaatgcttagggggatacacgtctctgtcgctgtgggccatagtgttgctgcgttcctggatgtaatccatttatttttctgcaatgaagagatgctggcaagcatgctacctgcatatgtcagaaatggtagtaacagtgaatctttgttcacgaaccaacatgttttcgtgcttttggttgttcctatttcggtttactgcccagtgcgtcagtttacaggcggtgacaatttggcacccaattagcaaacctttcaaggtgtttcggtgccgttcatcgatcatggacgggagacccatttcccaagggctagaagccatgaggttcacatcgatgctgcgccaggaggcagtcggacatcttaaggtggtgtggtcgcataccgccctccaaaaaaagctttccggctagattatttttat

SEQ ID NO: 65968 - DNA, 795 bp, Zea Mays
caacggttcacgccactcctctcacttctgacgcggatcgctccccatccgacgcctccaacttcctctcccacctctatatattgtcttccaccgccagccgatacattcaccaaagtccaagcaccttcccaaaaaatcccccattttcttcgaggcgaggagagcgtgaaagacagggcaccggcagcgacgatgtcggggcgcggcaagggcggcaaaggtctgggcaagggcggacccgccatccggaggctggctcggaggggcggcgtgaagcgcatttcggggcttatctacgaggagacccgcggcgtcctcaagatcttcctcgagaacactgttaccgccatggacgtcgtctacgcgctcaagcgccagggccgaaccctctacggcttcggaggctaggctggatgcctcttctccttgctgtcgtggatgcctgtttgttgttagggttacttcgtttagttccttgtctgtgacgtgttggactattgttagtagtattcttgaagttgtgtttcgaatgtaatccaatcttatcgttcgagaattgaaatgattcctgggcaacattttgcaggcaatctcgttcgagagttaggtccattatatctgttaagattttttttccatacagcattgactaagtatgaagcccattccatcctgaagatcgtgtatttcagagttgcaattcagttgtcaaagttctagcgtgtatgctaaaattttaagagggatacatcgtctccttgctgaatgaatttgtctcatgatctgaagcta

SEQ ID NO: 65969 - DNA, 1968 bp, Zea Mays
cgacgcggggggcaggacgtggcagagcgccgcccaggcggacgccaagtgccgagctaccagggcaccttctttattccgtccttgctcagtcacacctcgctctcgctcactctcgccgtccgcacagccgctcatcgtctcccactgcctgccctctccctgcgccggccggtgccccgacgcgccatgtcgtacaacaaggccccgtccatcaccgccgagaccataaatcccagggtcaagatcatcagatacgcgccttgcggggagatcgtcaagcacgcagcgcggctggagcaggagatagaggagaaccctgcttctatccctttccaagagataatatactgcaacctcgggaacccccaggttctctccctgtgcgacaacccagccctcatggacagagatgaagctcgtgccttattcagcccttgtagcataagaagggccaggaggatcctaaactcgatccccagcaaagacactggtggatatactgattgccggggaatcaaatgcctgcgtcaagtagtagcagatgggattaccgcaagagacggttttccatcgacagcggacgatatctttctgacagatggagccacctcagcgatcaacttgatgatgcagatactcatcaggtctcacgaagacggcatcttgagccctctacccgaataccccttgtactcggcctccatcatactgcacggtggaacgatggtgccgtacaatctcactgaagataacggttggggcctagagatctttgaagtcaagaggtgcttggaagaggctcgttcggctggcctcactgttagagctatggtggtaataaatcccggcaaccctactggacaggtgctatccgtcacaaaccaggaggagatagtagagttttgtcggaaggaaggtctggttatacttgctgatgaggtataccaggaaaatatctacgcagagaacaagaagttccattccttcaagaaagtggccagatcacttgcttacgacgaaaatgacctcaccctagtatcacttcattccgtttcaatgagctatggggagagtggcagaagaggaggctacatggaggtgtctggtgttgcagctaatgtgaaggatcagatttacaaggtggcttctttaacactctgccccaacattgctggccagattctcgtcagccttgcaatggatccaccgaagctaggagatgaatctttcgagtcatttgataaggagaaggaacagatccgttcatccttctgcaagcgagccaagaccctggagaaagctttcagcggcctggagggcgtgacttgcaacaagttagagggtgcgctgtacttgttcccacggctccacctcccctccgctgcgatcagggccgccgatttcgagggagtttcacctgacatattctacgctcaccgcctgcttgatgccaccgggattgccgttgtgccgggctctgggttccaccaggcctctgggacgatccatatccgatgcacgatccttcctgacgaaagaaaaatcgaggcgatggtcgcacgcttgagggcgttccataaggcgttcatgaacgagttccggggctctcagcaggtcatgaacgatctccgtcgctgatggtgtcgatgcatggcacggttaggcctgtgcgtgtgcccatgggcaatcaagacaacttctgagctctggagttgttgtttgttgttctgtgttcttgcttcctcgttgagctgtgccccgtttgtcctcacttatgcagtcagtggtctgtctgtagtctgtactgcttaaagataagctgtgctttcaggaataaaaagtctgcagcttgtgcatatatatactgactccgttctcaaatattatatttatggtaggctagtttatttttaaactaaaacgtgataaataaaaaataaaaagaaagatgagtacataataaac

SEQ ID NO: 65970 - DNA, 2010 bp, Zea Mays
cgacgcggggggcaggacgtggcagagcgccgcccaggcggacgccaagtgccgagctaccagggcaccttctttattccgtccttgctcagtcacacctcgctctcgctcactctcgccgtccgcacagccgctcatcgtctcccactgcctgccctctccctgcgccggccggtgccccgacgcgccatgtcgtacaacaaggccccgtccatcaccgccgagaccataaatcccagggtcaagatcatcagatacgcgccttgcggggagatcgtcaagcacgcagcgcggctggagcaggagatagaggagaaccctgcttctatccctttccaagagataatatactgcaacctcgggaacccccaggtccttggtcagccgccactaactttctttcgtgaggttctctccctgtgcgacaacccagccctcatggacagagatgaagctcgtgccttattcagcccttgtagcataagaagggccaggaggatcctaaactcgatccccagcaaagacactggtggatatactgattgccggggaatcaaatgcctgcgtcaagtagtagcagatgggattaccgcaagagacggttttccatcgacagcggacgatatctttctgacagatggagccacctcagcgatcaacttgatgatgcagatactcatcaggtctcacgaagacggcatcttgagccctctacccgaataccccttgtactcggcctccatcatactgcacggtggaacgatggtgccgtacaatctcactgaagataacggttggggcctagagatctttgaagtcaagaggtgcttggaagaggctcgttcggctggcctcactgttagagctatggtggtaataaatcccggcaaccctactggacagttataggtgctatccgtcacaaaccaggaggagatagtagagttttgtcggaaggaaggtctggttatacttgctgatgaggtataccaggaaaatatctacgcagagaacaagaagttccattccttcaagaaagtggccagatcacttgcttacgacgaaaatgacctcaccctagtatcacttcattccgtttcaatgagctatggggagagtggcagaagaggaggctacatggaggtgtctggtgttgcagctaatgtgaaggatcagatttacaaggtggcttctttaacactctgccccaacattgctggccagattctcgtcagccttgcaatggatccaccgaagctaggagatgaatctttcgagtcatttgataaggagaaggaacagatccgttcatccttctgcaagcgagccaagaccctggagaaagctttcagcggcctggagggcgtgacttgcaacaagttagagggtgcgctgtacttgttcccacggctccacctcccctccgctgcgatcagggccgccgatttcgagggagtttcacctgacatattctacgctcaccgcctgcttgatgccaccgggattgccgttgtgccgggctctgggttccaccaggcctctgggacgatccatatccgatgcacgatccttcctgacgaaagaaaaatcgaggcgatggtcgcacgcttgagggcgttccataaggcgttcatgaacgagttccggggctctcagcaggtcatgaacgatctccgtcgctgatggtgtcgatgcatggcacggttaggcctgtgcgtgtgcccatgggcaatcaagacaacttctgagctctggagttgttgtttgttgttctgtgttcttgcttcctcgttgagctgtgccccgtttgtcctcacttatgcagtcagtggtctgtctgtagtctgtactgcttaaagataagctgtgctttcaggaataaaaagtctgcagcttgtgcatatatatactgactccgttctcaaatattatatttatggtaggctagtttatttttaaactaaaacgtgataaataaaaaataaaaagaaagatgagtacataataaac

SEQ ID NO: 65971 - DNA, 1992 bp, Zea Mays
cgacgcggggggcaggacgtggcagagcgccgcccaggcggacgccaagtgccgagctaccagggcaccttctttattccgtccttgctcagtcacacctcgctctcgctcactctcgccgtccgcacagccgctcatcgtctcccactgcctgccctctccctgcgccggccggtgccccgacgcgccatgtcgtacaacaaggccccgtccatcaccgccgagaccataaatcccagggtcaagatcatcagatacgcgccttgcggggagatcgtcaagcacgcagcggagatagaggagaaccctgcttctatccctttccaagagataatatactgcaacctcgggaacccccaggtccttggtcagccgccactaactttctttcgtgaggttctctccctgtgcgacaacccagccctcatggacagagatgaagctcgtgccttattcagcccttgtagcataagaagggccaggaggatcctaaactcgatccccagcaaagacactggtggatatactgattgccggggaatcaaatgcctgcgtcaagtagtagcagatgggattaccgcaagagacggttttccatcgacagcggacgatatctttctgacagatggagccacctcagcgatcaacttgatgatgcagatactcatcaggtctcacgaagacggcatcttgagccctctacccgaataccccttgtactcggcctccatcatactgcacggtggaacgatggtgccgtacaatctcactgaagataacggttggggcctagagatctttgaagtcaagaggtgcttggaagaggctcgttcggctggcctcactgttagagctatggtggtaataaatcccggcaaccctactggacaggtgctatccgtcacaaaccaggaggagatagtagagttttgtcggaaggaaggtctggttatacttgctgatgaggtataccaggaaaatatctacgcagagaacaagaagttccattccttcaagaaagtggccagatcacttgcttacgacgaaaatgacctcaccctagtatcacttcattccgtttcaatgagctatggggagagtggcagaagaggaggctacatggaggtgtctggtgttgcagctaatgtgaaggatcagatttacaaggtggcttctttaacactctgccccaacattgctggccagattctcgtcagccttgcaatggatccaccgaagctaggagatgaatctttcgagtcatttgataaggagaaggaacagatccgttcatccttctgcaagcgagccaagaccctggagaaagctttcagcggcctggagggcgtgacttgcaacaagttagagggtgcgctgtacttgttcccacggctccacctcccctccgctgcgatcagggccgccgatttcgagggagtttcacctgacatattctacgctcaccgcctgcttgatgccaccgggattgccgttgtgccgggctctgggttccaccaggcctctgggacgatccatatccgatgcacgatccttcctgacgaaagaaaaatcgaggcgatggtcgcacgcttgagggcgttccataaggcgttcatgaacgagttccggggctctcagcaggtcatgaacgatctccgtcgctgatggtgtcgatgcatggcacggttaggcctgtgcgtgtgcccatgggcaatcaagacaacttctgagctctggagttgttgtttgttgttctgtgttcttgcttcctcgttgagctgtgccccgtttgtcctcacttatgcagtcagtggtctgtctgtagtctgtactgcttaaagataagctgtgctttcaggaataaaaagtctgcagcttgtgcatatatatactgactccgttctcaaatattatatttatggtaggctagtttatttttaaactaaaacgtgataaataaaaaataaaaagaaagatgagtacataataaac

SEQ ID NO: 65972 - DNA, 1929 bp, Zea Mays
cgacgcggggggcaggacgtggcagagcgccgcccaggcggacgccaagtgccgagctaccagggcaccttctttattccgtccttgctcagtcacacctcgctctcgctcactctcgccgtccgcacagccgctcatcgtctcccactgcctgccctctccctgcgccggccggtgccccgacgcgccatgtcgtacaacaaggccccgtccatcaccgccgagaccataaatcccagggtcaagatcatcagatacgcgccttgcggggagatcgtcaagcacgcagcgcggctggagcaggagatagaggagaaccctgcttctatccctttccaagagataatatactgcaacctcgggaacccccaggtccttggtcagccgccactaactttctttcgtgaggttctctccctgtgcgacaacccagccctcatggacagagatgaagctcgtgccttattcagcccttgtagcataagaagggccaggaggatcctaaactcgatccccagcaaagacactggtggatatactgattgccggggaatcaaatgcctgcgtcaagtagtagcagatgggattaccgcaagagacggttttccatcgacagcggacgatatctttctgacagatggagccacctcagcgatcaacttgatgatgcagatactcatcaggtctcacgaagacggcatcttgagccctctacccgaataccccttgtactcggcctccatcatactgcacggtggaacgatggtgccgtacaatctcactgaagataacggttggggcctagagatctttgaagtcaagaggtgcttggaagaggctcgttcggctggcctcactgttagagctatggtggtaataaatcccggcaaccctactggacaggtataccaggaaaatatctacgcagagaacaagaagttccattccttcaagaaagtggccagatcacttgcttacgacgaaaatgacctcaccctagtatcacttcattccgtttcaatgagctatggggagagtggcagaagaggaggctacatggaggtgtctggtgttgcagctaatgtgaaggatcagatttacaaggtggcttctttaacactctgccccaacattgctggccagattctcgtcagccttgcaatggatccaccgaagctaggagatgaatctttcgagtcatttgataaggagaaggaacagatccgttcatccttctgcaagcgagccaagaccctggagaaagctttcagcggcctggagggcgtgacttgcaacaagttagagggtgcgctgtacttgttcccacggctccacctcccctccgctgcgatcagggccgccgatttcgagggagtttcacctgacatattctacgctcaccgcctgcttgatgccaccgggattgccgttgtgccgggctctgggttccaccaggcctctgggacgatccatatccgatgcacgatccttcctgacgaaagaaaaatcgaggcgatggtcgcacgcttgagggcgttccataaggcgttcatgaacgagttccggggctctcagcaggtcatgaacgatctccgtcgctgatggtgtcgatgcatggcacggttaggcctgtgcgtgtgcccatgggcaatcaagacaacttctgagctctggagttgttgtttgttgttctgtgttcttgcttcctcgttgagctgtgccccgtttgtcctcacttatgcagtcagtggtctgtctgtagtctgtactgcttaaagataagctgtgctttcaggaataaaaagtctgcagcttgtgcatatatatactgactccgttctcaaatattatatttatggtaggctagtttatttttaaactaaaacgtgataaataaaaaataaaaagaaagatgagtacataataaac

SEQ ID NO: 65973 - DNA, 2059 bp, Zea Mays
cgacgcggggggcaggacgtggcagagcgccgcccaggcggacgccaagtgccgagctaccagggcaccttctttattccgtccttgctcagtcacacctcgctctcgctcactctcgccgtccgcacagccgctcatcgtctcccactgcctgccctctccctgcgccggccggtgccccgacgcgccatgtcgtacaacaaggccccgtccatcaccgccgagaccataaatcccagggtcaagatcatcagatacgcgccttgcggggagatcgtcaagcacgcagcgcggctggagcaggagatagaggagaaccctgcttctatccctttccaagagataatatactgcaacctcgggaacccccaggtccttggtcagccgccactaactttctttcgtgaggttctctccctgtgcgacaacccagccctcatggacagagatgaagctcgtgccttattcagcccttgtagcataagaagggccaggaggatcctaaactcgatccccagcaaagacactggtggatatactgattgccggggaatcaaatgcctgcgtcaagtagtagcagatgggattaccgcaagagacggttttccatcgacagcggacgatatctttctgacagatggagccacctcagcgatcaacttgatgatgcagatactcatcaggtctcacgaagacggcatcttgagccctctacccgaataccccttgtactcggcctccatcatactgcacggtggaacgatggtgccgtacaatctcactgaagataacggttggggcctagagatctttgaagtcaagaggtgcttggaagaggctcgttcggctggcctcactgttagagctatggtggtaataaatcccggcaaccctactggacagctcaggttgtaccagagtttctcttcgtcaacacatctcattcctttagttataggtgctatccgtcacaaaccaggaggagatagtagagttttgtcggaaggaaggtctggttatacttgctgatgaggtataccaggaaaatatctacgcagagaacaagaagttccattccttcaagaaagtggccagatcacttgcttacgacgaaaatgacctcaccctagtatcacttcattccgtttcaatgagctatggggagagtggcagaagaggaggctacatggaggtgtctggtgttgcagctaatgtgaaggatcagatttacaaggtggcttctttaacactctgccccaacattgctggccagattctcgtcagccttgcaatggatccaccgaagctaggagatgaatctttcgagtcatttgataaggagaaggaacagatccgttcatccttctgcaagcgagccaagaccctggagaaagctttcagcggcctggagggcgtgacttgcaacaagttagagggtgcgctgtacttgttcccacggctccacctcccctccgctgcgatcagggccgccgatttcgagggagtttcacctgacatattctacgctcaccgcctgcttgatgccaccgggattgccgttgtgccgggctctgggttccaccaggcctctgggacgatccatatccgatgcacgatccttcctgacgaaagaaaaatcgaggcgatggtcgcacgcttgagggcgttccataaggcgttcatgaacgagttccggggctctcagcaggtcatgaacgatctccgtcgctgatggtgtcgatgcatggcacggttaggcctgtgcgtgtgcccatgggcaatcaagacaacttctgagctctggagttgttgtttgttgttctgtgttcttgcttcctcgttgagctgtgccccgtttgtcctcacttatgcagtcagtggtctgtctgtagtctgtactgcttaaagataagctgtgctttcaggaataaaaagtctgcagcttgtgcatatatatactgactccgttctcaaatattatatttatggtaggctagtttatttttaaactaaaacgtgataaataaaaaataaaaagaaagatgagtacataataaac

SEQ ID NO: 65974 - DNA, 1687 bp, Zea Mays
aactcctcccctgtgcagcaagcaaataatatactgcaacctcgggaacccccaggtccttggtcagccgccactaactttctttcgtgaggttctctccctgtgcgacaacccagccctcatggacagagatgaagctcgtgccttattcagcccttgtagcataagaagggccaggaggatcctaaactcgatccccagcaaagacactggtggatatactgattgccggggaatcaaatgcctgcgtcaagtagtagcagatgggattaccgcaagagacggttttccatcgacagcggacgatatctttctgacagatggagccacctcagcgatcaacttgatgatgcagatactcatcaggtctcacgaagacggcatcttgagccctctacccgaataccccttgtactcggcctccatcatactgcacggtggaacgatggtgccgtacaatctcactgaagataacggttggggcctagagatctttgaagtcaagaggtgcttggaagaggctcgttcggctggcctcactgttagagctatggtggtaataaatcccggcaaccctactggacaggtgctatccgtcacaaaccaggaggagatagtagagttttgtcggaaggaaggtctggttatacttgctgatgaggtataccaggaaaatatctacgcagagaacaagaagttccattccttcaagaaagtggccagatcacttgcttacgacgaaaatgacctcaccctagtatcacttcattccgtttcaatgagctatggggagagtggcagaagaggaggctacatggaggtgtctggtgttgcagctaatgtgaaggatcagatttacaaggtggcttctttaacactctgccccaacattgctggccagattctcgtcagccttgcaatggatccaccgaagctaggagatgaatctttcgagtcatttgataaggagaaggaacagatccgttcatccttctgcaagcgagccaagaccctggagaaagctttcagcggcctggagggcgtgacttgcaacaagttagagggtgcgctgtacttgttcccacggctccacctcccctccgctgcgatcagggccgccgatttcgagggagtttcacctgacatattctacgctcaccgcctgcttgatgccaccgggattgccgttgtgccgggctctgggttccaccaggcctctgggacgatccatatccgatgcacgatccttcctgacgaaagaaaaatcgaggcgatggtcgcacgcttgagggcgttccataaggcgttcatgaacgagttccggggctctcagcaggtcatgaacgatctccgtcgctgatggtgtcgatgcatggcacggttaggcctgtgcgtgtgcccatgggcaatcaagacaacttctgagctctggagttgttgtttgttgttctgtgttcttgcttcctcgttgagctgtgccccgtttgtcctcacttatgcagtcagtggtctgtctgtagtctgtactgcttaaagataagctgtgctttcaggaataaaaagtctgcagcttgtgcatatatatactgactccgttctcaaatattatatttatggtaggctagtttatttttaaactaaaacgtgataaataaaaaataaaaagaaagatgagtacataataaac

SEQ ID NO: 65975 - DNA, 5663 bp, Zea Mays
ataaataaaggcatggttcctttgaggactactcgccaaaggggccttccctttctccttgttgagaacgggaatcctttggcttgttaagttcttggtttcctttcgaaaaccaagtccatctttaattgaggggtgtctaccaatagtgtaggcatccctagcaaattttaatttatcaaaatcaattttgcaagtcttaagttgagcattaagacttgccacctcatcatttaatttagtaatagaaataagatgttcatcacagacatcaacatcaaagtccttacatctattacaaatactaacatgctctacacatgaacttgttttactaacttcctctagcttagcatttaattcatcatttacattctttagactagagatagattcatggcaagcagataactcaaaagatagcatttcatttctcttagtttctaaagcaagagatttttgtacactaacaaatttgtcatgttcctcatacaaaatgtcctcttgcttttctagcagtctatctttttcatttagagcatcaattaattcattaagtttctctactttggctttatctagacctttaaattaaactagagtaatctacttcatcatcggaggattcctcatcactagaagaagagtacttaggggaatatcgaatacgtaccttcttctccttggccatgaggcaagtgtggcgttcgttggggaagagcgaatacttgtcgaaggccgaggcagccaatccttcatcgtcggagtcagatgaggagcagtcagaatcccactcatttccaaaatgtgcctcgccctttgtcttcctatagttcttcttcctttccttcttcccgctcttttcttgtccctgctcattatcattatcgggacattgtgcaatgaaatgaccagtcttaccacatttgaagtaggagcgttttcctcttgttttgttcttgttggagtactccttgcgtcctttaagcgcggtcttgaagtgcttgatgataagcgccatttcatcttcattgagcccggcagcctccacttgtgtcaccttgcttggtagcgccttcctgctgctggttgctttgagagaaacgggttgtggctcgtagacgggtagtgggccgtttagtgcatcgtccatgtatcgagcctccttcaccatcatgcgcccgctctcgaaatttctgaggatctcctcggatgtcattttggtgtacctggggttttcacgaataagattcacaagataggggtcaattatagtaaatgaccttagcatgagtcggatgacatcatgatccgtccatcttgtgcttctgtagcttcggatcttgttgaccagggtcttgagcctgttgtaggtctgagttggctcctctcccttgatcatcgtgaacttccccagctcgccttccactagttccatctttgtgatcatagtggcatcatttccctcatgtgatatcttgagggtatcccagatttgtttggcattgtccaagccactcactttattatactcgtccctgcaaagagatgctaacaacacagtagtagcttgggcatttttatggatttgctcattaataatcacaggattatcagtgctatcaaaatgcatcccattttctacaatttcacatatgctaggatgaagagagaataaatgactacacattttatgactccaaaacgaatagtcctctccatcaaagtgtggaggttttccaagggggattgaatgtagaagcacatttgaattatagggaatgcgagagtaatcaaaagaataattttgattaaccatctttttctttgatgaagagtcgtcgtcgtcgttgtcgtcccttggtgaagaagatgatgcatcactgtcgtagtagatgatcttattgatgcgtctcttcttcttcccatccctcttcttgtgactcgagcctgagtcagtgggcttgtcgtctcttggctcattgaagagggattccttctccttatcgttgaccaccatcccttacccttaggatccatctcttcaggaggtagtcccttagatgaagagtatggctttgataccaattgagagcacctagagcggggtgaataggtgatcctgtaaaatcaaacactaaatagccacaagacttagtttattagagagttagtgcgactaagtagctttgaagcgagttcttgtgaacacaacaatcacagagaaagcaacacaagagacacactatttttatcctgtggttcggccaagtaacacttgcctacttccacgttgtggcgtcccaatggacaagggttgcactcaacccctttcaaatgatccgatgatcaacttgaataccactggcttttcctttagagtcttttcccatgtgcgaggaatctccacagtttggagtctctcgcccttacaatggagatcacaaagaaagcacagagtaaggttggggagagcaacacacgcaagactcaaatccgcagcacacccacgcacacaagtcacgacttgagctcgaaacacaacacacggagttcgcaaatcaaatggagctcaaatcactaacacagagaatcaaatgcgtggagtcggagtctgggagtcttagaatgtttcttgaaagcttggtgtaatgctccatgcgcctaggggtcccttttatagccccaaggcagctaggagccgttggagatcaatttggaaggccaatcttgccttctgtcgagtggtgcactggacaattcggtgcaccaccggacaggacctatagctgtccggtgcacgatctccttccatatcgagcacatccgaccgttgctcctccgggcccgttggcgcaccggacactgtctggtgcacactggacagtctggtgcaccaactgaccgttggaggagtccatgtgtcgcctgcagattgcgtggctgaccgttggcgctggcgaccgttggctcaccggacagtctcgtgcaccaccggacagtctggtgaattttagccacgtcgccttttccatttcctgagagcggcgagttcatcgtggttgactcaccggacagtccagtgcaccaccggacagtccggtgatttatagccgtacaactccgtcgattcccgagagtagctggttcaccgtcggccagcctggggcaccgaacactgtctggtgcaccactggacagtccggtgtgccaggctgagctggagttagctgcacacagccaactctttcccatttcttttctccttttgtcactatttctagcacttagacaaacacattagtattaaaaaacaatgtactaagcctagaaacataccttgtaatatgatttgcatttatctttatttatcacataagaacttaatcaatcgtgttgggcatttaaacaccaaaacattatagaaatggcccaagggtgcatttccctttcaatggcgacattagccacctcttcttcttcctttgagcttgaactctcttcgtcgaagttccactcttcacctatgtgagcttggccatacttcttcttcttgaagtatcccttgttcttgcccccctttttgaacttatcctttttgtattccttcttggcttcttgttcctttttgtttggacgatccgctatgaaatgaccggtttggccacattcataacatgccctcttctttccttttctttgatacttgtcaatttttcctcacaaacttcttgaaggttttgatgaacatagttgtgtcttcatcacttgaactatcttcatcacttgatgtttcgaccactttctttgtcttgtgatctttgttcttcttggaggaatcttgttcatttgagatcaaggcatgagtgtctcttgtcttgattggggcttcttcagactcatgttgttgaatctttgcaaatagttggcgaggtgtcatttcctcatagtcatcagggtcccttatcattcttgctagactcttatccttttctttgtatgctctcataaatagtctagtgaccttggagtcactccaatcttcacttccaagcactcttattttgttgaccaacaccattagccggtcaaagagtgattgaagtgactcacccttagtccaatcatatcgtgcaagctcactctccaaagcttcaattctatatctcttagctttggggtctccttcatgtgacattttgagaatgttccaaatgtcacgagcaacctctcttccttggactttccggtactcttccggacaaaggcttccttttattatgctcaccgcttgagcattgcggtgaacttcttgcatcattttcggagtcatctcttctccttgggcgggcttatacatacctatattgacaatcttccaaagactaggatgtacaccgattagatgcgacttcatcttatcggcccactcgtcatagttcaactcactaagagttggtaactttccaagtggggcggaagagaagttgggaataaaatttctagaataatcaaattgaactttattaaacttgttacctttacttttggtggatgatccttcgggggtgagacttaccttgctcatcacccttgacaccaaaagttctaccaaatcatcattgtatttgatttttccctttcctttgtcttcttcaacctttcttcttgattcttcttcttcggcccttttcttagcatcttcctctttcattttgagaaacatcttctcggctatcttcatggcaaggtcgaggaccttggggtctatttcctcaccggaagatgtgacggggatttcctcgagaagaggatccacatggtccctttgagtagacatgatcgtttcctcacgcggttaagcgtaaaacgaggtacgaagctttgataccaattgaaagtagcctagaggggtgaataggctacacctgaattttttcactaaaaacttcgagataatgttaaattcaagttgcattggtgcaaactggttcagctgattttgtttacagctgaacaagtttgaacctactcaacttagattagataaacagttaaacaagtgtgacaaagtaatgagaaattttgcttaagacttgccctagagaaaatccactcgaataggtgacaaatcggtgtgaattggtttcacacgatttgcacacaatataatcgaatatgaactaaccaacaatttaaagcacttatcaagaacacacaagaacacacaatttaacctgaggttcggcaaccaccacaaaggtgtcctactcctcattgaggagcccacaaagggtcgagtcttttccaaccctaatcctccacaagccgaccaccaaggtcaaggcaatctcttctcaaattagctcaacgagcaggtgatacaaacttcttgggggtcatccacaaatttggagactcccaagcaacctctatccgtcaaggaacacaaggttccaagagtaacaaatccgcacaagattcaagtttgcaatgagctcaagagatgaagagaatgggagaatcgagatgaaatcaacagcgagttagatcgacttcaccacacaccaagggtccttcaaacaattgaaggagatgtgatttcgggtgtgagaggtgaattgaatgttcttgtttgaaggttggtcagccaataattcgtg

SEQ ID NO: 65976 - DNA, 1279 bp, Zea Mays
ataagtaaccctcatatgtatttgcactcatgcatcacaaaacatccttctatcagtaccatcaatcatcattcatcttagtagtataggcaccaaatcaaatctgcaacatcaattatctaactccaaaaaccatgaagctggtgcttgtggttcttgctttcattgctttagtatcaagtgtttcttgtacacagacaggcggctgcagctgtggtcaacaacaaagccatgagcagcaacatcaaccaccaccacaacatcaccagcagcagcaacaccaacaacaacaagttcacatgcaaccacaaaaacatcagcaacaacaagaagttcatgttcaacaacaacaacaacaaccgcagcaccaacaacaacaacaacaacaacagcaccaacaacaacatcaatgtgaaggccaacaacaacatcaccaacaatcacaaggccatgtgcaacaacacgaacagagccatgagcaacaccaaggacagagccatgagcaacaacatcaacaacaattccagggtcatgacaagcagcaacaaccacaacagcctcagcaatatcagcagggccaggaaaaatcacaacagcaacaatgtcattgccaggagcagcaacagactacaaggtgcagctataactactatagcagtagctcaaatctaaaaaattgtcatgaattcctaaggcagcagtgcagccctttggtaatgccttttctccaatcacgtttgatacaaccaagtagctgccaggtattgcagcaacaatgttgtcatgatcttaggcagattgagccacaatacattcaccaagcaatctacaacatggttcaatccataatccaggaggagcaacaacaacaaccatgtgagttatgtggatctcaacaagctactcaaagtgcggtggcaatcttgacagcagcacaatacctaccatcaatgtgcggcttgtaccactcatactaccaaaataatccatgcagcagcaatgacattagtggtgtttgcaattgaagaattgtgtctacctagccgttatactcatataacggtgttaagcaataaagtaccatacattatgatgtttgtactatgatatttgaataagaatactaattgtaattataatgctactaaacccttgtgtgaactaaaactagcatgtcttgttcatcctacccacattttggttagggatgaggaggggattgttattatcccatggttaatcacaattacacaaacatatggctacactcaaaacttag

SEQ ID NO: 65977 - DNA, 1019 bp, Zea Mays
caaagccatgagcagcaacaccaacaacaacaagttcacatgcaaccacaaaaacatcagcaacaacaagaagttcatgttcaacaacaacaacaacaaccgcagcaccaacaacaacaacaacaacaacagcaccaacaacaacatcaatgtgaaggccaacaacaacatcaccaacaatcacaaggccatgtgcaacaacacgaacagagccatgagcaacaccaaggacagagccatgagcaacaacatcaacaacaattccagggtcatgacaagcagcaacaaccacaacagcctcagcaatatcagcagggccaggaaaaatcacaacagcaacaatgtcattgccaggagcagcaacagactacaaggtgcagctataactactatagcagtagctcaaatctaaaaaattgtcatgaattcctaaggcagcagtgcagccctttggtaatgccttttctccaatcacgtttgatacaaccaagtagctgccaggtattgcagcaacaatgttgtcatgatcttaggcagattgagccacaatacattcaccaagcaatctacaacatggttcaatccataatccaggaggagcaacaacaacaaccatgtgagttatgtggatctcaacaagctactcaaagtgcggtggcaatcttgacagcagcacaatacctaccatcaatgtgcggcttgtaccactcatactaccaaaataatccatgcagcagcaatgacattagtggtgtttgcaattgaagaattgtgtctacctagccgttatactcatataacggtgttaagcaataaagtaccatacattatgatgtttgtactatgatatttgaataagaatactaattgtaattataatgctactaaacccttgtgtgaactaaaactagcatgtcttgttcatcctacccacattttggttagggatgaggaggggattgttattatcccatggttaatcacaattacacaaacatatggctacactcaaaacttag

SEQ ID NO: 65978 - DNA, 1011 bp, Zea Mays
gagccacgcagaagtacagaatgattccagatgaaccatcgacgtgctacgtaaagagagtgacgagtcatatacatttggcaagaaaccatgaagctgcctacagccgtctcggtggcataagaacacaagaaattgtgttaattaatcaaagctataaataacgctcgcatgcctgtgcacttctccatcaccaccactgggtcttcagaccattagctttatctactccagagcgcagaagaacccgatcgacaccatgagggtgttgctcgttgccctcgctctcctggctctcgctgcgagcgccacctccacgcatacaagcggcggctgcggctgccagccaccgccgccggttcatctaccgccgccggtgcatctgccacctccggttcacctgccacctccggtgcatctcccaccgccggtccacctgccgccgccggtccacctgccaccgccggtccatgtgccgccgccggttcatctgccgccgccaccatgccactaccctactcaaccgccccggcctcagcctcatccccagccacacccatgccccggccaggtcgcggggctgttggcggcgcagatagcgcagcaactgacggcgatgtgcggcctgcagcagccgactccatgcccctacgctgctgccggcggtgtcccccactgaagaaactatgtgctgtagtatagccgctggctagctagctagttgagtcatttagcggcgatgattgagtaataatgtgtcacgcatcaccatgggtggcagtgtcagtgtgagcaatgacctgaatgaacaattgaaatgaaaagaaaaaaagtactccatctgttccaaattaaaattggttttaaccttttaataggtttatacaataattgatatatgttttctgtatatgtctaatttgttatcatccatttagatatagacaaaaaaaatctaagaactaaaacaaatgctaatttgaaatgaagggagtatatattgggataatg

SEQ ID NO: 65979 - DNA, 634 bp, Zea Mays
caaatgtttgattgatccagacaagggaaactaaaaacacaattgagattaatataaacaagaagcttacaccagcatctaaccaactactgtaggagcttgtctgtgttatcagttgttacatgttatataagcctcataataaccactaaattaacgagatgatacattcgaatactactacatacctggaaggccttgcccatctttccatcagcctattatctactctaatgattcttcccataaacatgggaccaaaggaaaagaaaaaaaaaacaagaaaattaagcatttcgtggtacagatgctgtatttgaaaaaccgttagctgcttttggtggtggtggcttcttcttgtagtttgctaagctacagtgggggcagatgtattccaaaccatctgtcttagcgtaatcctgcaagtaaagcacatgatggcatcaagtaactgatttccggcaagggtgagatcaacacaacccatcttcttgtttaccttgaaagtgcctagtccttgtcgtctgtcgcaaccaaagtgagcccattcaccacataaaccgcagttcacccaatctccaggtgcgctactgaaattacataaaaggagctgttagatattaacatgatatta

SEQ ID NO: 65980 - DNA, 338 bp, Zea Mays
ggacatacaagtcctaatacatagcatagtttgcaaaataacatagttgacagttcataagaactaacaagttcacaatgcatagttcataacttcataaactaacaaatagacctgctaatctgaaaaattatgaagggccaacaaccaggttacgatagcccatgacctccactcggcacacaggcctaatccaccacgccaacatatccccgttcaggcatccacctcgggtaaccatagaacctaagctgctgattttcttccacatccccagtcaagcacctcggcacagcgggcagggcgagcggatggcgcggcgggcaggcaaagcgccg

SEQ ID NO: 65981 - DNA, 412 bp, Zea Mays
ctccagcgccttagcgcttaacaaccacgaattcgtgtgagtgcatattatatgcaaacaatgtcagaaacagacctgtgctgcccacttaggaagggacatccaaacttcaaaggtagaagccccacaagccgtggacatggaagttaaaggctcgcttgatggtaacttgtcctcactatttgatagagcacggactaactggctcttctcaataatttcattcttgatgtggctctctagaagctgcacagacaggtgaacaccatgtgactttacacagcaagaccaaaaaagtatccaaggtcaaaggaatatatacctggtcatcaaaacaagtttgtgcgctaccagaaacgaggagtgacacatgggaagaactgcaagtactgatatcacagcgcatagtaac

SEQ ID NO: 65982 - DNA, 1404 bp, Zea Mays
agttgacctccaatcgcccagccgagctgagctccgggaacgggtaagccggccgcggccgcttcgcctccagcccagacctcgctgctggtgtgcggttctcagcatacttcccacacagcaccgcgaggagcgcacagttgttcctcgagaagctttggatttgagacatgactggccggccggagccttcccgacggcagccaagcaggagaaaaacctcccctcgaaatcaaccccacttcttcatgcaccaaaccctgcgacacaaaaactggatcaggaatcccccaaaatccgaccaaatccgcagcgaaacccacgaatatgagcgggcggccttaccaagacgcgattttgcggcgtaatcggcggcggcacggcctcaatcgacggccggacgcgaccgggaagggggtggattcggtgcgggtgaatggggaaaacagagggtaaagtgcgcgagaacacacggagccctagaagacgattcgcggaaatagctactgcaacaacgcgaaagcaaatcccagtgcggaggcaataaaaaagaggagtcgtgcttgtggtggtggcgaatcggcccacgcccccatcacgatccagacaaacacacacggcgcaatccacagggggggagaggcggaaaaaaatctctctccaagaaccggtacaagaactgaagcgggattaaccggagacggcgaccacggggatcgggcgggcgggcctcattagcagcggcaaccaaccaactggcaacaatcccgcacgcatcacagaggcagaaactttggaacagtctcggctcgaccagggaggcgtcaagattggatttttgacgatgtgtggggaggccagtccggagattctcgcggacttttcctcctcggattttcgccctgcccgcctgcctgctcacatgctcgcaatcacacgcatcgctcagcttgatgagttgatgtgtgcctgctctctgcgggtgctggtgtgttgttttccctgcgctttttcgttttctccttttcctcctccgcttcattactgctgcaagccgggggacggacggaggaaaaacgcggattaaaagattaggaatttcgggagcaggattggtgagggggcgaaataatctctttctgggagaattgtttttgccgggatcggaatatcggatgctgcgactgcttttggtgtgcatgtatgtgttcggttggtgttggtgcagatcgattcggtgtggcctgtggacttgtggtgtggtgtaggggttgtgatcggggatccggcttggcgctggcgcggttcgagactgcagggtgccagagttgttgtgcgtcggaattcggatgcgtgcatcgggtaccgcagctcgcggtcgcggcggctacatggataatggat

SEQ ID NO: 65983 - DNA, 1933 bp, Zea Mays
agagtggcgcgggccccaccgcagctatctcctttggcgtctctgtccagtagtgcgtcagcgtcgcttccgattatttaagtagcacggccacggctagctaccatctccccaactccgcctcccaagtcccacccccactccctcgctcaccagaggaactagcggaccaggcaaagccgagccgcaccgcaaccgcgaagatcttgcgtggcctccttttcccagctcgtcactgtgccgctcgtgccctacactcccggtccgcccaaccaataatccatccatccatccatccaccaccaccccgctgcggcgatgtgcggcggcgccatcctctcgggtttcatcccgccgtccggggtggcggcggcggcggcggcggccaagaagcagcagcagcagcagcagcggtgccgtgtgactgcggacctgctatggccggggcccggcagtaagggagctccccaggacaaggaggaggacttcgaggccgacttccgcgagttcgagcgcggcctcggcgaggatgacgtggacagcgccggcgaaggcggcgaccccgaggtccaggagcttcctccgccggagccgacgaggtttgccttcgccaccgcggccaaggcggcagttgtctttttattatagatggcgtgatgactcctcctccaaaggatgtccaaggagatagagcagtaaaaaagcgcggccggaagaaccagtacaggggaatcaggcagcggccttggggcaaatgggcagctgagatcagggaccctaacaagggcgtccgcgtctggctcggaacctacaacaccgccgaggaggcagctagggcatacgacgccgaagctcgcaagatccgcggcaagaaagcgaaggtgaattttcccgatgacgcgacaggcactcgtcacaggccaacgaccgatgagatctttaacaacctgaagaacgacgacaacaacaacaacgatgatctgtttgcgatgtttgcgttcggtgacaataagaagaaggttcctgcagcgaagccagccgccgccgagggtggcagtggcagtggcagcttcctcgtccctgcgcctgcggtggcggtggtgcccggtaataagaggaggtcgtccgcgaccaacactatgctctccgtctccgacgaccagcgcagcaactcctacggctccggctcctccgacttggtggggtcgtggtcgtgggacgacgacgcggcggccgccgccatgacctcggactacacctcctcggtcttcgctcccgataacgccgtgctgccggcggcgtcttacacgcaaggcggagcgccgaagagaatgaggagcagctacggcggcgcgccgcccagcctcgcacatgacgcggccatgcctggctttggccttgataaagtgagctaccaccactaccaggcgttgcctccttattacgtcgggagcagcaacgcgtcggtgggcaacctcggtcttctgcagcaggctgatgatgctccagctccacaggatggggcgagcgccggggatatctggagcctcgacgagctgctcatgctggcagcagctggtgcttattgagaaccgcaagaaaaaaaaaatgtgttggcgctgctagctggagacgagacgagagggcgagaggcagttgcatccgccatccgctatcgttttgtctctcctatatctagtatatatatgcttctggcagtcgaactctatggcaatgcgtgtgtatagtgtgttgctgccgtctatgattggaagcgagctcgagactggttcaataattcacctttgcctaccgtcgtaccgccggcctgctggactgtagtgtgcgtactgcatatatatgccatagttatgtatgcactcctcctatatatactatatattattatgatgtgcttatactagtactgtgc

SEQ ID NO: 65984 - DNA, 7809 bp, Zea Mays
atgccacacagccacagcaacgaactgcgggagctttacgctcgaaaagccgcgagccttcgttcgtccccgtcaacgtcgcgtttcctctttttcccggttccccgatcccctccgcgttttcctccaccacaccaccacttccctcgccgccactcgcgttcccgcccccaaggattacaccgtggcatctcgctacagccgccgctgatgcatctctccttccatccccctgctccgtcgcatctccctcgccggggcggcgtcgcaccaaccacaaccccatccttcgtcctccggaggaaccagcggaggcggcgccaccaccaccgcccgtaccgcctagccccccgcgcctctctctcagacctcatcgccaacctcccctcctccctcgcgctcgtaggtcccgcggcgctcgcggctgcggccgcggtcgccacctctttctcctcctggtcctcctcgtcccagaccagcctcccgccgccgccccaggaatccgaggactacaacgcgtgcggggatgtcgcgggcgagtgggttctcttcaccagcccggcgccattcaaccgctgcgtgctgctgcgttgcccgtccgtgtctttcgaggacgggctcgacggcgtcaacgagcgcctcctcaccgaggagcggcactacgtgaatctgagcaggggctgcatccccgtggtgcgcggcggggacggtgcctatgatatctcttaccagaggatttgcatcgccctggaggacggtggggtgatcgcgctcgattggcctgataatttgtacttggacaaagagcatggactggattccacggtgcttatggtgcctggtacgcacgaggggagcatggagaggaacattaaggtgttcgtgttagatgcactgaacaacgggtactttcctattgtaatgaaccccagagggtgcggcggctccccggtcactaccccaaggttatttacagcagctgacagtgatgatatctgcacagtggtacagtttataaacagcaagagaccttggacaacactaatgggtgttggatggggctatggggcaaatatgcttacaaagtacctcgtggaagttggagagtcgactcctcttactgctgctgtttgtattgacaacccttttgatatagaagaagcaacgagatcatttcctcatcatataactcttgatgaaaagctcacagctggcctggttgatattttgcgttctaataaggaactctttcaaggtaaagctaaaggtttcaatgttcaaaaggctttatcagccagttgtttgcgtgacttcgatgttgctatatccatggtttcacatgggttcgatactcttcatgacttctatgctgaaattagtacaaggctgtcagttgcccatgttagaatacctctactttttatacagagtgatgatgggactgtgccgcttcttgcagtgccccgcagttcaatatcagaaaatcctttcacaagccttctcttttgttcttgtgtacactccactatgtccatgtttcagagatacagtgtgttatggtgccagaaccttgccttagagtggttatcagcagttgagtttgctcttctgaagggtcgccatccacttatcaaagatgtggacatcacaattaacccgtccaaaggtctagcatttgttgaacctcaagtgaatcaaaggaaatctccaaaaggaaatagttttcgtcaacattctgagcttattttgtataataatgttgcacatggaataaatggactgctagttgattctgcaaataagtactctggtgctcaaaacaaagaaaatgggcagttgaataataatggtgacataggaactgtagacaaagatctggaagaagagttagaagagagttctgaagatgttgagaaaggtcaggcactacaatcagcaagtcttgtgatgaatatgctagatgctacaatgcctggcactctcaatgatgatcagaagaagaaggttctggtagctgtggagcaaggggagactcttgtgaaggctctagaagaagctgtacctgaagacgtgcgcggaaaacttacagcttctgtaactgaaattttacattccaaacgagaaactttcagtttaggtgcattgaatcgacttggctggaacaatgtaagaccaaccactaccaagacattggcccaggaaaagctcaaagattcagatcatgaaagcgggcttaaggataccaaaatggttgatcagaacaggatttctgcaaccgcttttgagggggatctgaaagacattaatatgacaaatgatgataaacctggagaaagcatcgaatcgtcacagggaaagccttctcaaacttctgaacctgttggaacagcgacagaaattggaactgaacagccttataaatcagataaagctaattatggaaccaatgatagcagtgaagggcagcatataacagaacaggacaatgaaatgactccaaagcaagtttctgatgatcagtcagtggccaactgtaatgggccttctaaagaaagggagcaatcagcagatgctacaacagaccagaatctacaatctaacacaacaacagaaaaggaaggtgacacaagtcgcacaggtgaagataagactgctcataatgtgaatgatcaaagcacacaagtctctaaaacagaagaatcaaaaccttcccccattactgtgacccaggcattagatgcattaactgggtttgatgactcgactcaaatggctgtcaacagtgtttttggagttcttgaaaatatgattgatcagtttgagaaacaacaggactctgagaatggtgaaagtgctgatggaaatgatggtatcacttccgtggatgagacagaatctcatgtgaaagagaatacagagaatgtgtcaagtggagaagatataaaccactcatctaaacaaccagaaggtagcagtcctggaaaaactgattcaatcatgtccaaatatgattgtgcttttggtgaggaaaatcccaatttaagcattgtttcatatggtagaggaaaaatgagatattaccgaggaaacaaagttggtgatcatgtgggtgctgatggtatcgagcgagtcagtggcttgcctgactatttattagatatagctgtcaactcttacttgaaggcgcaatatgcaatgtatcttcgtgaatttctttacacagaattgcaactcaaatcaccagagtctaattcagcaactgatcttttccttgatccacaagagggtaaatggaaaattgaagaacagatgggcaatgtgcaaaatgacaattttgaatcctcacaagagtcatctaagatggacaatgctattgagccaccctactttataccaggaaaaaatccagacatcgcatacaagtccaataaatggaataatacagtagcaaccaggtcaaaacctggtaatgatttgaacgaggcacttacacactttgttagagatgaactatcaagtgcccttaaaattgaagttggtcgcaaaatagggataacagatactaagcaacttgaaaggagtcttgcaaatgatgtagaacagattgctgctgaagtttctaaaactgttgtccttgactgtgagttgtattcagccatacatgtgcaaagaagtccaacaactatcaagtttggttcaacacatggaaaaaatgttgttgaagctgtgtcgactgcagttcagcaatctcagcatctgaggaatattcttcctgtcggtgtcatagttggtgtaactttggcatgtttgagaaattacttccatgttggtgtctctaagcatggtgaccatatgatagccactatgaagtcagatatttttggtgaggaagttattgttcaggacagcagcaaagagaatgttcaggatagtggaaaagcaaatacaaacgataataatattgaaaaaaccagtggggagaaccagcaggatatgacgaagtcacagggtcaagatatgatggtcggggctgtgacggctgccctaggtggcagcagcgcgacattgagcaggagaggtgagcaaatggggcgcaggtgctcatggtcatggtggtcctcaatttagttgatttttcccctttttctggacattcttttataaaacatttaactttcatatttcagcaaaataaggatgaaaattgcaaggattttgttgagatagaaggtgccaaacatgaggaaactgcacaggaaaagagccagaacagtttgatgagcagttttgctgagaaagccatgtctgtggcaggacctgtagttcccacaaagggtgatggtgaggttgatcatgaaaggcttgttgcagttctagctgaactcggacaaaagggtgggtttttgaggttcattggaaaaattgctctactctggggcggaattcgtggtgctatgagcttaactgataggcttatctcattcttacgtatcagtgagcggcccttatttcagaggattatgggattttctttaatggttctcatcctatggtcccctgttgtgattcctctactgccaacgcttgttcaaagttggacaataagtgcttcaacggggattatcggatatgcttgcattgttggattgtacatttctataatgatacttgtcatgctgtggggcaaaaggatacgtggctatgaggatccagttgagcaatatgggatgaatatttggtcggcgtctaggctgcgagagttttttcaaggtttggttggaggcgtaacggtcgtagggttggtgcactcgataagcattctactcggttttgcagcgtttcggacagggttctcttcatctttagctagaccccttgatcttctcaagtcttctagtaatgtgtttctgctagctcttcgagggcttgccacagcaactagcattgctgttgtggaagaaatggttttcagatcatggcttccagaggaaattgcagttgatcttggttactacaatgccattctgatatctggacttgtgttttctctaattcatcggtcactaccctcagtaccaggtttcttgctactttctctggtactttttgggcttaggcagaggacacaaggaaagcttgctgcacccattggcctacgttctggaatcatgactgccagttatttaatacaaagcagtggtgttttaacatccaaacctgaaacaccgttttggatgattagcacttaccatctgcatccttttgatggtgttatcggcttaagtatctgctccttgcttgctatctttttcttccctcaaaagcctgttcagaaggatacatctgtgtgatgaggctcagaagagtaaaacataatgctggagtgagcttccaacaaggactaatcaccatgcgtatgctgcgagcaatgaagggtttttcctaccatacatgttaaaatgcaatgccctgcaacttgctggcagcaaagagtatgtgctcggttagcttcttgctcatctgactgagggtactgctgattggaatggcttttggatctataactagagtatccaggtcatttgtacttaggcaagtgtgtatactactctatactggattatcgaaatgggggatggtttcttccctacgttgtaaggtggcggaggaacagatgatatgcctaggaagaggaactagtagatgataagagtttgcccctgatattaggcttcctctgaaatgcaggaattctagaggaatatacaggaatttcacaggaatcagtccattctcacagaaaaaatgcaggaaactgaaaaaaaatccccgcattccaaagggggcatcatctaggatttcttcataccgaattatcgattgacttcgaccacataccgtgcttttgttcatgtctttgaacacaggcacacccaaatttcgaggtttacaaggaaaatcgccaggcagtaaaccttcaatgcttttggctaggttttcattctgaaagtcatgtcttccgcgtcagcataatcctgtattcctgtataacctctgttcggacttcgtagtgctcatctgagttctgattcggccgggcaactgtaaattctgtagtgttcgagaaaaaactgtaaattctgtaatattgccaagaattatgaatttacatgaactttacaggtataagttgcccgcctcacttcaccggctcaccgtgcttcacctgctatcttccatggcggcggctcacctcttctgctccgcaccggccgcctatcgcgccgcgaacccacggccccttgctacccgtggccgcgccaaccccgccacgggaacgtatctggtgctcaaaggggtatggtgctcatgtgcacatttcccccgggccacaccatcgagaagattcttcccctgccgcgcgtcgctcagccccgatggatcgctggccatgctcggggctcccagtcccaggatggcgccaccgatgaggaagccgtacatgcgggagcactcttgcctcatcttcccgcccccgcgcggtcgacgcccgctggcggtcatcaagttcctcggcggcgccttcatcggcgccgtccccgaggtcacctacggctacctgctggagctcctggcgctggagggctttgtggtcgtgtgcgtaccatacaacgtcaccttcgaccacgaggccgccgcgcgggaggtattccagagtttccatgcctgctacgacgcgctgctcgcgtcggggctcccggaggccggcctcagcgccctggacatcgcggagctcccgctctactctgttggccacagcaacggggcactgcttcagctgctagtgggaagctacttctcagaaaggataccagaggctaatgccattgtctcattcaacaataggccggcatcggaggctgtgccttactttgaacaggttgtgggatattctgcaaggggtgcatctctcccctgaagtagatgatcaacatatttggaccccctcggcttctggtgtttattctgctaaatctgcttatgacagattgttagtgggtgctaccagttttgatccgacaaaacgtatatggaaatgttgggcgcctcctaggtgcaattattttcctctggttggcttctttaagccgatgttggacagcggaccgtcttgcaaggcatggtttggatcatccggagtactgccccctatgtgaccaggaaaaggaaacagtgcaacatctcctagtggcttgtgttgttgcttgacaagtgtgttttttccatcctgggtttgagtggcctccaactcctcactcctgggattgctgatgaagtattccaagattggtggaaagcagctgaagcaagagtttgtaaggagaagaaaaaaggctttaactcgctggtggcgctttcttcttggaggatttggaaacatcgaaatgcttgtgtctttgatggggtgcccccaagtgtatctaaagtcattcaggacattaaggaggaggccagaatatggtgcttggcgggtgctgctggcatggttcttaggcgataaggcaagataaggcgttggaccaccgcctagacgcctatcttttccaatacagacatctatcagtccagattaaagtggcagtggcaccaatactcaagccaacatctaatcgataagagggccactatcagccaaaaagggaaaacagaataatacttcttttctaagcatccaacaaacaatttgtgtttaaagctgattttggtctaattgtgctttcctactggcctttggaagttacactgtct

SEQ ID NO: 65985 - DNA, 8577 bp, Zea Mays
atgccacacagccacagcaacgaactgcgggagctttacgctcgaaaagccgcgagccttcgttcgtccccgtcaacgtcgcgtttcctctttttcccggttccccgatcccctccgcgttttcctccaccacaccaccacttccctcgccgccactcgcgttcccgcccccaaggattacaccgtggcatctcgctacagccgccgctgatgcatctctccttccatccccctgctccgtcgcatctccctcgccggggcggcgtcgcaccaaccacaaccccatccttcgtcctccggaggaaccagcggaggcggcgccaccaccaccgcccgtaccgcctagccccccgcgcctctctctcagacctcatcgccaacctcccctcctccctcgcgctcgtaggtcccgcggcgctcgcggctgcggccgcggtcgccacctctttctcctcctggtcctcctcgtcccagaccagcctcccgccgccgccccaggaatccgaggactacaacgcgtgcggggatgtcgcgggcgagtgggttctcttcaccagcccggcgccattcaaccgctgcgtgctgctgcgttgcccgtccgtgtctttcgaggacgggctcgacggcgtcaacgagcgcctcctcaccgaggagcggcactacgtgaatctgagcaggggctgcatccccgtggtgcgcggcggggacggtgcctatgatatctcttaccagaggatttgcatcgccctggaggacggtggggtgatcgcgctcgattggcctgataatttgtacttggacaaagagcatggactggattccacggtgcttatggtgcctggtacgcacgaggggagcatggagaggaacattaaggtgttcgtgttagatgcactgaacaacgggtactttcctattgtaatgaaccccagagggtgcggcggctccccggtcactaccccaaggttatttacagcagctgacagtgatgatatctgcacagtggtacagtttataaacagcaagagaccttggacaacactaatgggtgttggatggggctatggggcaaatatgcttacaaagtacctcgtggaagttggagagtcgactcctcttactgctgctgtttgtattgacaacccttttgatatagaagaagcaacgagatcatttcctcatcatataactcttgatgaaaagctcacagctggcctggttgatattttgcgttctaataaggaactctttcaaggtaaagctaaaggtttcaatgttcaaaaggctttatcagccagttgtttgcgtgacttcgatgttgctatatccatggtttcacatgggttcgatactcttcatgacttctatgctgaaattagtacaaggctgtcagttgcccatgttagaatacctctactttttatacagagtgatgatgggactgtgccgcttcttgcagtgccccgcagttcaatatcagaaaatcctttcacaagccttctcttttgttcttgtgtacactccactatgtccatgtttcagagatacagtgtgttatggtgccagaaccttgccttagagtggttatcagcagttgagtttgctcttctgaagggtcgccatccacttatcaaagatgtggacatcacaattaacccgtccaaaggtctagcatttgttgaacctcaagtgaatcaaaggaaatctccaaaaggaaatagttttcgtcaacattctgagcttattttgtataataatgttgcacatggaataaatggactgctagttgattctgcaaataagtactctggtgctcaaaacaaagaaaatgggcagttgaataataatggtgacataggaactgtagacaaagatctggaagaagagttagaagagagttctgaagatgttgagaaaggtcaggcactacaatcagcaagtcttgtgatgaatatgctagatgctacaatgcctggcactctcaatgatgatcagaagaagaaggttctggtagctgtggagcaaggggagactcttgtgaaggctctagaagaagctgtacctgaagacgtgcgcggaaaacttacagcttctgtaactgaaattttacattccaaacgagaaactttcagtttaggtgcattgaatcgacttggctggaacaatgtaagaccaaccactaccaagacattggcccaggaaaagctcaaagattcagatcatgaaagcgggcttaaggataccaaaatggttgatcagaacaggatttctgcaaccgcttttgagggggatctgaaagacattaatatgacaaatgatgataaacctggagaaagcatcgaatcgtcacagggaaagccttctcaaacttctgaacctgttggaacagcgacagaaattggaactgaacagccttataaatcagataaagctaattatggaaccaatgatagcagtgaagggcagcatataacagaacaggacaatgaaatgactccaaagcaagtttctgatgatcagtcagtggccaactgtaatgggccttctaaagaaagggagcaatcagcagatgctacaacagaccagaatctacaatctaacacaacaacagaaaaggaaggtgacacaagtcgcacaggtgaagataagactgctcataatgtgaatgatcaaagcacacaagtctctaaaacagaagaatcaaaaccttcccccattactgtgacccaggcattagatgcattaactgggtttgatgactcgactcaaatggctgtcaacagtgtttttggagttcttgaaaatatgattgatcagtttgagaaacaacaggactctgagaatggtgaaagtgctgatggaaatgatggtatcacttccgtggatgagacagaatctcatgtgaaagagaatacagagaatgtgtcaagtggagaagatataaaccactcatctaaacaaccagaaggtagcagtcctggaaaaactgattcaatcatgtccaaatatgattgtgcttttggtgaggaaaatcccaatttaagcattgtttcatatggtagaggaaaaatgagatattaccgaggaaacaaagttggtgatcatgtgggtgctgatggtatcgagcgagtcagtggcttgcctgactatttattagatatagctgtcaactcttacttgaaggcgcaatatgcaatgtatcttcgtgaatttctttacacagaattgcaactcaaatcaccagagtctaattcagcaactgatcttttccttgatccacaagagggtaaatggaaaattgaagaacagatgggcaatgtgcaaaatgacaattttgaatcctcacaagagtcatctaagatggacaatgctattgagccaccctactttataccaggaaaaaatccagacatcgcatacaagtccaataaatggaataatacagtagcaaccaggtcaaaacctggtaatgatttgaacgaggcacttacacactttgttagagatgaactatcaagtgcccttaaaattgaagttggtcgcaaaatagggataacagatactaagcaacttgaaaggagtcttgcaaatgatgtagaacagattgctgctgaagtttctaaaactgttgtccttgactgtgagttgtattcagccatacatgtgcaaagaagtccaacaactatcaagtttggttcaacacatggaaaaaatgttgttgaagctgtgtcgactgcagttcagcaatctcagcatctgaggaatattcttcctgtcggtgtcatagttggtgtaactttggcatgtttgagaaattacttccatgttggtgtctctaagcatggtgaccatatgatagccactatgaagtcagatatttttggtgaggaagttattgttcaggacagcagcaaagagaatgttcaggatagtggaaaagcaaatacaaacgataataatattgaaaaaaccagtggggagaaccagcaggatatgacgaagtcacagggtcaagatatgatggtcggggctgtgacggctgccctaggtgcttctgctttggtagcacatcaacaaaataaggatgaaaattgcaaggattttgttgagatagaaggtgccaaacatgaggaaactgcacaggaaaagagccagaacagtttgatgagcagttttgctgagaaagccatgtctgtggcaggacctgtagttcccacaaagggtgatggtgaggttgatcatgaaaggcttgttgcagttctagctgaactcggacaaaagggtgggtttttgaggttcattggaaaaattgctctactctggggcggaattcgtggtgctatgagcttaactgataggcttatctcattcttacgtatcagtgagcggcccttatttcagaggattatgggattttctttaatggttctcatcctatggtcccctgttgtgattcctctactgccaacgcttgttcaaagttggacaataagtgcttcaacggggattatcggatatgcttgcattgttggattgtacatttctataatgatacttgtcatgctgtggggcaaaaggatacgtggctatgaggatccagttgagcaatatgggatgaatatttggtcggcgtctaggctgcgagagttttttcaaggtttggttggaggcgtaacggtcgtagggttggtgcactcgataagcattctactcggttttgcagcgtttcggacagggttctcttcatctttagctagaccccttgatcttctcaagtcttctagtaatgtgtttctgctagctcttcgagggcttgccacagcaactagcattgctgttgtggaagaaatggttttcagatcatggcttccagaggaaattgcagttgatcttggttactacaatgccattctgatatctggacttgtgttttctctaattcatcggtcactaccctcagtaccaggtttcttgctactttctctggtactttttgggcttaggcagaggacacaaggaaagcttgctgcacccattggcctacgttctggaatcatgactgccagttatttaatacaaagcagtggtgttttaacatccaaacctgaaacaccgttttggatgattagcacttaccatctgcatccttttgatggtgttatcggcttaagtatctgctccttgcttgctatctttttcttccctcaaaagcctgttcagaaggatacatctgtgtgatgaggctcagaagagtaaaacataatgctggagtgagcttccaacaaggactaatcaccatgcgtatgctgcgagcaatgaagggtttttcctaccatacatgttaaaatgcaatgccctgcaacttgctggcagcaaagagtatgtgctcggttagcttcttgctcatctgactgagggtactgctgattggaatggcttttggatctataactagagtatccaggtcatttgtacttaggcaagtgtgtatactactctatactggattatcgaaatgggggatggtttcttccctacgttgtaaggtggcggaggaacagatgatatgcctaggaagaggaactagtagatgataagagtttgcccctgatattaggcttcctctgaaatgcaggaattctagaggaatatacaggaatttcacaggaatcagtccattctcacagaaaaaatgcaggaaactgaaaaaaaatccccgcattccaaagggggcatcatctaggatttcttcataccgaattatcgattgacttcgaccacataccgtgcttttgttcatgtctttgaacacaggcacacccaaatttcgaggtagcaaattttgcccacatacactgtatataaagtagttacagtgcaagaacaatgctaactgatcaggtgatgtctcgtcctccccccggttctattattgttactgtatagctgtaattagtccaagtgtacagctgaatctactaaggtttacaaggaaaatcgccaggcagtaaaccttcaatgcttttggctaggttttcattctgaaagtcatgtcttccgcgtcagcataatcctgtattcctgtataacctctgttcggacttcgtagtgctcatctgagttctgattcggccgggcaactgtaaattctgtagtgttcgagaaaaaactgtaaattctgtaatattgccaagaattatgaatttacatgaactttacaggtataagttgcccgcctcacttcaccggctcaccgtgcttcacctgctatcttccatggcggcggctcacctcttctgctccgcaccggccgcctatcgcgccgcgaacccacggccccttgctacccgtggccgcgccaaccccgccacgggaacgtatctggtgctcaaaggggtatggtgctcatgtgcacatttcccccgggccacaccatcgagaagattcttcccctgccgcgcgtcgctcagccccgatggatcgctggccatgctcggggctcccagtcccaggatggcgccaccgatgaggaagccgtacatgcgggagcactcttgcctcatcttcccgcccccgcgcggtcgacgcccgctggcggtcatcaagttcctcggcggcgccttcatcggcgccgtccccgaggtcacctacggctacctgctggagctcctggcgctggagggctttgtggtcgtgtgcgtaccatacaacgtcaccttcgaccacgaggccgccgcgcgggaggtattccagagtttccatgcctgctacgacgcgctgctcgcgtcggggctcccggaggccggcctcagcgccctggacatcgcggagctcccgctctactctgttggccacagcaacggggcactgcttcagctgctagtgggaagctacttctcagaaaggataccagaggctaatgccattgtctcattcaacaataggccggcatcggaggctgtgccttactttgaacagatagggcccctttttaggcaactgatgcctatgatggaggcctcgcctgtttactcgatggccagaaatgcatcaggtgattgttgggttacaacttaggttctcatgttatctgtcatttatctatttaataaatttgtttaggcttaaagatccataacaaactaatgctttatcacaagctttcctttatggatccattgagaaaacaacctgatcaccctgtctagtgttgatagtttgctcttagttatagatcttagcttttgtagttcagtgcttcatgatatcatgctgctgctgccacacgtaaaagtgtgcactgttgtctgatgacatttgtaaaatgaaagaacgaatcaagggtatgaacttttgcttgacatgcttcatgtactgttttaaaaagatatgattccatgactttaggatatgcatggaaagctctatttgatttagctggaggtcttttacgtgagtatgatcaagaagctacggtatctctgagcaaatttattgatcagttaccatcagtaatgaaccaggtttcagaaggtgtgtctgaatttaaaccaacaccacctgaaaaccgtgaattctgcaagaattcctacagtgtacccaatacattattggtcaaattcactgtagatgctattgatgatacagacatagttgaagatgtcctgagaccccgcgttgattcaatcggtggacaaataaagaaggtcatactgtcaggaacacatctaactccatgtatacaggatgtcaaatggcaagttggttcagaatacactccagcagatgccattgcacaaggattgaaatcattggctcttagtgaaacaagagtcctctcaagaacaattgctgattggtttacatccctttaaattttgagttattcaatacatctgttgaagtttggagttcttcttacaaaggaatgccttcatcaggtctcaacttcccattttgttgaagcagtccactattgtaatgagatgtaaggatacaatgtattatgtatggcacataagagcagtgcatttttgggctgtgctgagctggtcatgctcacccgcaggccctagccgtactacaaatatctgatcaagattggtggtttggggccttacttggatcgtagttgcaagctataaaaagcatcgaacccaaaagtccaagcagctcgatcctgtttgaggtacggtgccagcaaggttaagttggccaaatctgttgcacgcagacagcccaatgggggtttctgcaggctggcgaaagtaaaggcgtgcgataggaaatctgggaatgttttatattgccacattgtaattccacgttataggcgtatagctcaaatacatttggacggtttggaggtatttcgttggtgtgctggcagttgtttctgtatcgtgcatgtctgttgcaagaaggcctggatgctgctgacctgagaactgattgatttcgctgacgcttacagttcttgcaagggcgtgcaagtagaacaacccgtatgcttcaggaattagtattacacgaggttaacaaatgtaataggcttgggactttctttcaacagcatca

SEQ ID NO: 65986 - DNA, 8186 bp, Zea Mays
atgccacacagccacagcaacgaactgcgggagctttacgctcgaaaagccgcgagccttcgttcgtccccgtcaacgtcgcgtttcctctttttcccggttccccgatcccctccgcgttttcctccaccacaccaccacttccctcgccgccactcgcgttcccgcccccaaggattacaccgtggcatctcgctacagccgccgctgatgcatctctccttccatccccctgctccgtcgcatctccctcgccggggcggcgtcgcaccaaccacaaccccatccttcgtcctccggaggaaccagcggaggcggcgccaccaccaccgcccgtaccgcctagccccccgcgcctctctctcagacctcatcgccaacctcccctcctccctcgcgctcgtaggtcccgcggcgctcgcggctgcggccgcggtcgccacctctttctcctcctggtcctcctcgtcccagaccagcctcccgccgccgccccaggaatccgaggactacaacgcgtgcggggatgtcgcgggcgagtgggttctcttcaccagcccggcgccattcaaccgctgcgtgctgctgcgttgcccgtccgtgtctttcgaggacgggctcgacggcgtcaacgagcgcctcctcaccgaggagcggcactacgtgaatctgagcaggggctgcatccccgtggtgcgcggcggggacggtgcctatgatatctcttaccagaggatttgcatcgccctggaggacggtggggtgatcgcgctcgattggcctgataatttgtacttggacaaagagcatggactggattccacggtgcttatggtgcctggtacgcacgaggggagcatggagaggaacattaaggtgttcgtgttagatgcactgaacaacgggtactttcctattgtaatgaaccccagagggtgcggcggctccccggtcactaccccaagtggtacagtttataaacagcaagagaccttggacaacactaatgggtgttggatggggctatggggcaaatatgcttacaaagtacctcgtggaagttggagagtcgactcctcttactgctgctgtttgtattgacaacccttttgatatagaagaagcaacgagatcatttcctcatcatataactcttgatgaaaagctcacagctggcctggttgatattttgcgttctaataaggaactctttcaaggtaaagctaaaggtttcaatgttcaaaaggctttatcagccagttgtttgcgtgacttcgatgttgctatatccatggtttcacatgggttcgatactcttcatgacttctatgctgaaattagtacaaggctgtcagttgcccatgttagaatacctctactttttatacagagtgatgatgggactgtgccgcttcttgcagtgccccgcagttcaatatcagaaaatcctttcacaagccttctcttttgttcttgtgtacactccactatgtccatgtttcagagatacagtgtgttatggtgccagaaccttgccttagagtggttatcagcagttgagtttgctcttctgaagggtcgccatccacttatcaaagatgtggacatcacaattaacccgtccaaaggtctagcatttgttgaacctcaagtgaatcaaaggaaatctccaaaaggaaatagttttcgtcaacattctgagcttattttgtataataatgttgcacatggaataaatggactgctagttgattctgcaaataagtactctggtgctcaaaacaaagaaaatgggcagttgaataataatggtgacataggaactgtagacaaagatctggaagaagagttagaagagagttctgaagatgttgagaaaggtcaggcactacaatcagcaagtcttgtgatgaatatgctagatgctacaatgcctggcactctcaatgatgatcagaagaagaaggttctggtagctgtggagcaaggggagactcttgtgaaggctctagaagaagctgtacctgaagacgtgcgcggaaaacttacagcttctgtaactgaaattttacattccaaacgagaaactttcagtttaggtgcattgaatcgacttggctggaacaatgtaagaccaaccactaccaagacattggcccaggaaaagctcaaagattcagatcatgaaagcgggcttaaggataccaaaatggttgatcagaacaggatttctgcaaccgcttttgagggggatctgaaagacattaatatgacaaatgatgataaacctggagaaagcatcgaatcgtcacagggaaagccttctcaaacttctgaacctgttggaacagcgacagaaattggaactgaacagccttataaatcagataaagctaattatggaaccaatgatagcagtgaagggcagcatataacagaacaggacaatgaaatgactccaaagcaagtttctgatgatcagtcagtggccaactgtaatgggccttctaaagaaagggagcaatcagcagatgctacaacagaccagaatctacaatctaacacaacaacagaaaaggaaggtgacacaagtcgcacaggtgaagataagactgctcataatgtgaatgatcaaagcacacaagtctctaaaacagaagaatcaaaaccttcccccattactgtgacccaggcattagatgcattaactgggtttgatgactcgactcaaatggctgtcaacagtgtttttggagttcttgaaaatatgattgatcagtttgagaaacaacaggactctgagaatggtgaaagtgctgatggaaatgatggtatcacttccgtggatgagacagaatctcatgtgaaagagaatacagagaatgtgtcaagtggagaagatataaaccactcatctaaacaaccagaaggtagcagtcctggaaaaactgattcaatcatgtccaaatatgattgtgcttttggtgaggaaaatcccaatttaagcattgtttcatatggtagaggaaaaatgagatattaccgaggaaacaaagttggtgatcatgtgggtgctgatggtatcgagcgagtcagtggcttgcctgactatttattagatatagctgtcaactcttacttgaaggcgcaatatgcaatgtatcttcgtgaatttctttacacagaattgcaactcaaatcaccagagtctaattcagcaactgatcttttccttgatccacaagagggtaaatggaaaattgaagaacagatgggcaatgtgcaaaatgacaattttgaatcctcacaagagtcatctaagatggacaatgctattgagccaccctactttataccaggaaaaaatccagacatcgcatacaagtccaataaatggaataatacagtagcaaccaggtcaaaacctggtaatgatttgaacgaggcacttacacactttgttagagatgaactatcaagtgcccttaaaattgaagttggtcgcaaaatagggataacagatactaagcaacttgaaaggagtcttgcaaatgatgtagaacagattgctgctgaagtttctaaaactgttgtccttgactgtgagttgtattcagccatacatgtgcaaagaagtccaacaactatcaagtttggttcaacacatggaaaaaatgttgttgaagctgtgtcgactgcagttcagcaatctcagcatctgaggaatattcttcctgtcggtgtcatagttggtgtaactttggcatgtttgagaaattacttccatgttggtgtctctaagcatggtgaccatatgatagccactatgaagtcagatatttttggtgaggaagttattgttcaggacagcagcaaagagaatgttcaggatagtggaaaagcaaatacaaacgataataatattgaaaaaaccagtggggagaaccagcaggatatgacgaagtcacagggtcaagatatgatggtcggggctgtgacggctgccctaggtgcttctgctttggtagcacatcaacaaaataaggatgaaaattgcaaggattttgttgagatagaaggtgccaaacatgaggaaactgcacaggaaaagagccagaacagtttgatgagcagttttgctgagaaagccatgtctgtggcaggacctgtagttcccacaaagggtgatggtgaggttgatcatgaaaggcttgttgcagttctagctgaactcggacaaaagggtgggtttttgaggttcattggaaaaattgctctactctggggcggaattcgtggtgctatgagcttaactgataggcttatctcattcttacgtatcagtgagcggcccttatttcagaggattatgggattttctttaatggttctcatcctatggtcccctgttgtgattcctctactgccaacgcttgttcaaagttggacaataagtgcttcaacggggattatcggatatgcttgcattgttggattgtacatttctataatgatacttgtcatgctgtggggcaaaaggatacgtggctatgaggatccagttgagcaatatgggatgaatatttggtcggcgtctaggctgcgagagttttttcaaggtttggttggaggcgtaacggtcgtagggttggtgcactcgataagcattctactcggttttgcagcgtttcggacagggttctcttcatctttagctagaccccttgatcttctcaagtcttctagtaatgtgtttctgctagctcttcgagggcttgccacagcaactagcattgctgttgtggaagaaatggttttcagatcatggcttccagaggaaattgcagttgatcttggttactacaatgccattctgatatctggacttgtgttttctctaattcatcggtcactaccctcagtaccaggtttcttgctactttctctggtactttttgggcttaggcagaggacacaaggaaagcttgctgcacccattggcctacgttctggaatcatgactgccagttatttaatacaaagcagtggtgttttaacatccaaacctgaaacaccgttttggatgattagcacttaccatctgcatccttttgatggtgttatcggcttaagtatctgctccttgcttgctatctttttcttccctcaaaagcctgttcagaaggatacatctgtgtgatgaggctcagaagagtaaaacataatgctggagtgagcttccaacaaggactaatcaccatgcgtatgctgcgagcaatgaagggtttttcctaccatacatgttaaaatgcaatgccctgcaacttgctggcagcaaagagtatgtgctcggttagcttcttgctcatctgactgagggtactgctgattggaatggcttttggatctataactagagtatccaggtcatttgtacttaggcaagtgtgtatactactctatactggattatcgaaatgggggatggtttcttccctacgttgtaaggtggcggaggaacagatgatatgcctaggaagaggaactagtagatgataagagtttgcccctgatattaggcttcctctgaaatgcaggaattctagaggaatatacaggaatttcacaggaatcagtccattctcacagaaaaaatgcaggaaactgaaaaaaaatccccgcattccaaagggggcatcatctaggatttcttcataccgaattatcgattgacttcgaccacataccgtgcttttgttcatgtctttgaacacaggcacacccaaatttcgaggtagcaaattttgcccacatacactgtatataaagtagttacagtgcaagaacaatgctaactgatcaggtgatgtctcgtcctccccccggttctattattgttactgtatagctgtaattagtccaagtgtacagctgaatctactaaggtttacaaggaaaatcgccaggcagtaaaccttcaatgcttttggctaggttttcattctgaaagtcatgtcttccgcgtcagcataatcctgtattcctgtataacctctgttcggacttcgtagtgctcatctgagttctgattcggccgggcaactgtaaattctgtagtgttcgagaaaaaactgtaaattctgtaatattgccaagaattatgaatttacatgaactttacaggtataagttgcccgcctcacttcaccggctcaccgtgcttcacctgctatcttccatggcggcggctcacctcttctgctccgcaccggccgcctatcgcgccgcgaacccacggccccttgctacccgtggccgcgccaaccccgccacgggaacgtatctggtgctcaaaggggtatggtgctcatgtgcacatttcccccgggccacaccatcgagaagattcttcccctgccgcgcgtcgctcagccccgatggatcgctggccatgctcggggctcccagtcccaggatggcgccaccgatgaggaagccgtacatgcgggagcactcttgcctcatcttcccgcccccgcgcggtcgacgcccgctggcggtcatcaagttcctcggcggcgccttcatcggcgccgtccccgaggtcacctacggctacctgctggagctcctggcgctggagggctttgtggtcgtgtgcgtaccatacaacgtcaccttcgaccacgaggccgccgcgcgggaggtattccagagtttccatgcctgctacgacgcgctgctcgcgtcggggctcccggaggccggcctcagcgccctggacatcgcggagctcccgctctactctgttggccacagcaacggggcactgcttcagctgctagtgggaagctacttctcagaaaggataccagaggctaatgccattgtctcattcaacaataggccggcatcggaggctgtgccttactttgaacagatagggcccctttttaggcaactgatgcctatgatggaggcctcgcctgtttactcgatggccagaaatgcatcaggatatgcatggaaagctctatttgatttagctggaggtcttttacgtgagtatgatcaagaagctacggtatctctgagcaaatttattgatcagttaccatcagtaatgaaccaggtttcagaaggtgtgtctgaatttaaaccaacaccacctgaaaaccgtgaattctgcaagaattcctacagtgtacccaatacattattggtcaaattcactgtagatgctattgatgatacagacatagttgaagatgtcctgagaccccgcgttgattcaatcggtggacaaataaagaaggtcatactgtcaggaacacatctaactccatgtatacaggatgtcaaatggcaagttggttcagaatacactccagcagatgccattgcacaaggattgaaatcattggctcttagtgaaacaagagtcctctcaagaacaattgctgattggtttacatccctttaaattttgagttattcaatacatctgttgaagtttggagttcttcttacaaaggaatgccttcatcaggtctcaacttcccattttgttgaagcagtccactattgtaatgagatgtaaggatacaatgtattatgtatggcacataagagcagtgcatttttgggctgtgctgagctggtcatgctcacccgcaggccctagccgtactacaaatatctgatcaagattggtggtttggggccttacttggatcgtagttgcaagctataaaaagcatcgaacccaaaagtccaagcagctcgatcctgtttgaggtacggtgccagcaaggttaagttggccaaatctgttgcacgcagacagcccaatgggggtttctgcaggctggcgaaagtaaaggcgtgcgataggaaatctgggaatgttttatattgccacattgtaattccacgttataggcgtatagctcaaatacatttggacggtttggaggtatttcgttggtgtgctggcagttgtttctgtatcgtgcatgtctgttgcaagaaggcctggatgctgctgacctgagaactgattgatttcgctgacgcttacagttcttgcaagggcgtgcaagtagaacaacccgtatgcttcaggaattagtattacacgaggttaacaaatgtaataggcttgggactttctttcaacagcatca

SEQ ID NO: 65987 - DNA, 8812 bp, Zea Mays
atgccacacagccacagcaacgaactgcgggagctttacgctcgaaaagccgcgagccttcgttcgtccccgtcaacgtcgcgtttcctctttttcccggttccccgatcccctccgcgttttcctccaccacaccaccacttccctcgccgccactcgcgttcccgcccccaaggattacaccgtggcatctcgctacagccgccgctgatgcatctctccttccatccccctgctccgtcgcatctccctcgccggggcggcgtcgcaccaaccacaaccccatccttcgtcctccggaggaaccagcggaggcggcgccaccaccaccgcccgtaccgcctagccccccgcgcctctctctcagacctcatcgccaacctcccctcctccctcgcgctcgtaggtcccgcggcgctcgcggctgcggccgcggtcgccacctctttctcctcctggtcctcctcgtcccagaccagcctcccgccgccgccccaggaatccgaggactacaacgcgtgcggggatgtcgcgggcgagtgggttctcttcaccagcccggcgccattcaaccgctgcgtgctgctgcgttgcccgtccgtgtctttcgaggacgggctcgacggcgtcaacgagcgcctcctcaccgaggagcggcactacgtgaatctgagcaggggctgcatccccgtggtgcgcggcggggacggtgcctatgatatctcttaccagaggatttgcatcgccctggaggacggtggggtgatcgcgctcgattggcctgataatttgtacttggacaaagagcatggactggattccacggtgcttatggtgcctggtacgcacgaggggagcatggagaggaacattaaggtgttcgtgttagatgcactgaacaacgggtactttcctattgtaatgaaccccagagggtgcggcggctccccggtcactaccccaaggttatttacagcagctgacagtgatgatatctgcacagtggtacagtttataaacagcaagagaccttggacaacactaatgggtgttggatggggctatggggcaaatatgcttacaaagtacctcgtggaagttggagagtcgactcctcttactgctgctgtttgtattgacaacccttttgatatagaagaagcaacgagatcatttcctcatcatataactcttgatgaaaagctcacagctggcctggttgatattttgcgttctaataaggaactctttcaaggtaaagctaaaggtttcaatgttcaaaaggctttatcagccagttgtttgcgtgacttcgatgttgctatatccatggtttcacatgggttcgatactcttcatgacttctatgctgaaattagtacaaggctgtcagttgcccatgttagaatacctctactttttatacagagtgatgatgggactgtgccgcttcttgcagtgccccgcagttcaatatcagaaaatcctttcacaagccttctcttttgttcttgtgtacactccactatgtccatgtttcagagatacagtgtgttatggtgccagaaccttgccttagagactcttcaaaagctggttggatcagttcatcagtttgtgtgtttctttatgaagtcagcaaactaagccatgattcaaatttatagcagatagaactttggtcagaaaaatggaatccatgcattgtctgcaactgaaaatttatgatactatagcatggaattggccatacacaagttatgtaatcagcaattgttgaatggagaagaatgaaatccatatagcttcagccaaaaccaggaaaaatatgatacaatagcagtctggagtctggactgcagcataaacacataaatccgcttttttactggccccttcaaacgttggctgccgttactctccattggggtaatttctgactggttactccaatggtgcagatagggagggcgctaaatccactcccccccctttttttgctctgttagatgttatatcatacatgaccatttggttatcagcagttgagtttgctcttctgaagggtcgccatccacttatcaaagatgtggacatcacaattaacccgtccaaaggtctagcatttgttgaacctcaagtgaatcaaaggaaatctccaaaaggaaatagttttcgtcaacattctgagcttattttgtataataatgttgcacatggaataaatggactgctagttgattctgcaaataagtactctggtgctcaaaacaaagaaaatgggcagttgaataataatggtgacataggaactgtagacaaagatctggaagaagagttagaagagagttctgaagatgttgagaaaggtcaggcactacaatcagcaagtcttgtgatgaatatgctagatgctacaatgcctggcactctcaatgatgatcagaagaagaaggttctggtagctgtggagcaaggggagactcttgtgaaggctctagaagaagctgtacctgaagacgtgcgcggaaaacttacagcttctgtaactgaaattttacattccaaacgagaaactttcagtttaggtgcattgaatcgacttggctggaacaatgtaagaccaaccactaccaagacattggcccaggaaaagctcaaagattcagatcatgaaagcgggcttaaggataccaaaatggttgatcagaacaggatttctgcaaccgcttttgagggggatctgaaagacattaatatgacaaatgatgataaacctggagaaagcatcgaatcgtcacagggaaagccttctcaaacttctgaacctgttggaacagcgacagaaattggaactgaacagccttataaatcagataaagctaattatggaaccaatgatagcagtgaagggcagcatataacagaacaggacaatgaaatgactccaaagcaagtttctgatgatcagtcagtggccaactgtaatgggccttctaaagaaagggagcaatcagcagatgctacaacagaccagaatctacaatctaacacaacaacagaaaaggaaggtgacacaagtcgcacaggtgaagataagactgctcataatgtgaatgatcaaagcacacaagtctctaaaacagaagaatcaaaaccttcccccattactgtgacccaggcattagatgcattaactgggtttgatgactcgactcaaatggctgtcaacagtgtttttggagttcttgaaaatatgattgatcagtttgagaaacaacaggactctgagaatggtgaaagtgctgatggaaatgatggtatcacttccgtggatgagacagaatctcatgtgaaagagaatacagagaatgtgtcaagtggagaagatataaaccactcatctaaacaaccagaaggtagcagtcctggaaaaactgattcaatcatgtccaaatatgattgtgcttttggtgaggaaaatcccaatttaagcattgtttcatatggtagaggaaaaatgagatattaccgaggaaacaaagttggtgatcatgtgggtgctgatggtatcgagcgagtcagtggcttgcctgactatttattagatatagctgtcaactcttacttgaaggcgcaatatgcaatgtatcttcgtgaatttctttacacagaattgcaactcaaatcaccagagtctaattcagcaactgatcttttccttgatccacaagagggtaaatggaaaattgaagaacagatgggcaatgtgcaaaatgacaattttgaatcctcacaagagtcatctaagatggacaatgctattgagccaccctactttataccaggaaaaaatccagacatcgcatacaagtccaataaatggaataatacagtagcaaccaggtcaaaacctggtaatgatttgaacgaggcacttacacactttgttagagatgaactatcaagtgcccttaaaattgaagttggtcgcaaaatagggataacagatactaagcaacttgaaaggagtcttgcaaatgatgtagaacagattgctgctgaagtttctaaaactgttgtccttgactgtgagttgtattcagccatacatgtgcaaagaagtccaacaactatcaagtttggttcaacacatggaaaaaatgttgttgaagctgtgtcgactgcagttcagcaatctcagcatctgaggaatattcttcctgtcggtgtcatagttggtgtaactttggcatgtttgagaaattacttccatgttggtgtctctaagcatggtgaccatatgatagccactatgaagtcagatatttttggtgaggaagttattgttcaggacagcagcaaagagaatgttcaggatagtggaaaagcaaatacaaacgataataatattgaaaaaaccagtggggagaaccagcaggatatgacgaagtcacagggtcaagatatgatggtcggggctgtgacggctgccctaggtggcagcagcgcgacattgagcaggagaggtgagcaaatggggcgcaggtgctcatggtcatggtggtcctcaatttagttgatttttcccctttttctggacattcttttataaaacatttaactttcatatttcagcaaaataaggatgaaaattgcaaggattttgttgagatagaaggtgccaaacatgaggaaactgcacaggaaaagagccagaacagtttgatgagcagttttgctgagaaagccatgtctgtggcaggacctgtagttcccacaaagggtgatggtgaggttgatcatgaaaggcttgttgcagttctagctgaactcggacaaaagggtgggtttttgaggttcattggaaaaattgctctactctggggcggaattcgtggtgctatgagcttaactgataggcttatctcattcttacgtatcagtgagcggcccttatttcagaggattatgggattttctttaatggttctcatcctatggtcccctgttgtgattcctctactgccaacgcttgttcaaagttggacaataagtgcttcaacggggattatcggatatgcttgcattgttggattgtacatttctataatgatacttgtcatgctgtggggcaaaaggatacgtggctatgaggatccagttgagcaatatgggatgaatatttggtcggcgtctaggctgcgagagttttttcaaggtttggttggaggcgtaacggtcgtagggttggtgcactcgataagcattctactcggttttgcagcgtttcggacagggttctcttcatctttagctagaccccttgatcttctcaagtcttctagtaatgtgtttctgctagctcttcgagggcttgccacagcaactagcattgctgttgtggaagaaatggttttcagatcatggcttccagaggaaattgcagttgatcttggttactacaatgccattctgatatctggacttgtgttttctctaattcatcggtcactaccctcagtaccaggtttcttgctactttctctggtactttttgggcttaggcagaggacacaaggaaagcttgctgcacccattggcctacgttctggaatcatgactgccagttatttaatacaaagcagtggtgttttaacatccaaacctgaaacaccgttttggatgattagcacttaccatctgcatccttttgatggtgttatcggcttaagtatctgctccttgcttgctatctttttcttccctcaaaagcctgttcagaaggatacatctgtgtgatgaggctcagaagagtaaaacataatgctggagtgagcttccaacaaggactaatcaccatgcgtatgctgcgagcaatgaagggtttttcctaccatacatgttaaaatgcaatgccctgcaacttgctggcagcaaagagtatgtgctcggttagcttcttgctcatctgactgagggtactgctgattggaatggcttttggatctataactagagtatccaggtcatttgtacttaggcaagtgtgtatactactctatactggattatcgaaatgggggatggtttcttccctacgttgtaaggtggcggaggaacagatgatatgcctaggaagaggaactagtagatgataagagtttgcccctgatattaggcttcctctgaaatgcaggaattctagaggaatatacaggaatttcacaggaatcagtccattctcacagaaaaaatgcaggaaactgaaaaaaaatccccgcattccaaagggggcatcatctaggatttcttcataccgaattatcgattgacttcgaccacataccgtgcttttgttcatgtctttgaacacaggcacacccaaatttcgaggtagcaaattttgcccacatacactgtatataaagtagttacagtgcaagaacaatgctaactgatcaggtgatgtctcgtcctccccccggttctattattgttactgtatagctgtaattagtccaagtgtacagctgaatctactaaggtttacaaggaaaatcgccaggcagtaaaccttcaatgcttttggctaggttttcattctgaaagtcatgtcttccgcgtcagcataatcctgtattcctgtataacctctgttcggacttcgtagtgctcatctgagttctgattcggccgggcaactgtaaattctgtagtgttcgagaaaaaactgtaaattctgtaatattgccaagaattatgaatttacatgaactttacaggtataagttgcccgcctcacttcaccggctcaccgtgcttcacctgctatcttccatggcggcggctcacctcttctgctccgcaccggccgcctatcgcgccgcgaacccacggccccttgctacccgtggccgcgccaaccccgccacgggaacgtatctggtgctcaaaggggtatggtgctcatgtgcacatttcccccgggccacaccatcgagaagattcttcccctgccgcgcgtcgctcagccccgatggatcgctggccatgctcggggctcccagtcccaggatggcgccaccgatgaggaagccgtacatgcgggagcactcttgcctcatcttcccgcccccgcgcggtcgacgcccgctggcggtcatcaagttcctcggcggcgccttcatcggcgccgtccccgaggtcacctacggctacctgctggagctcctggcgctggagggctttgtggtcgtgtgcgtaccatacaacgtcaccttcgaccacgaggccgccgcgcgggaggtattccagagtttccatgcctgctacgacgcgctgctcgcgtcggggctcccggaggccggcctcagcgccctggacatcgcggagctcccgctctactctgttggccacagcaacggggcactgcttcagctgctagtgggaagctacttctcagaaaggataccagaggctaatgccattgtctcattcaacaataggccggcatcggaggctgtgccttactttgaacagatagggcccctttttaggcaactgatgcctatgatggaggcctcgcctgtttactcgatggccagaaatgcatcaggatatgcatggaaagctctatttgatttagctggaggtcttttacgtgagtatgatcaagaagctacggtatctctgagcaaatttattgatcagttaccatcagtaatgaaccaggtttcagaaggtgtgtctgaatttaaaccaacaccacctgaaaaccgtgaattctgcaagaattcctacagtgtacccaatacattattggtcaaattcactgtagatgctattgatgatacagacatagttgaagatgtcctgagaccccgcgttgattcaatcggtggacaaataaagaaggtcatactgtcaggaacacatctaactccatgtatacaggcactcagctttgttgtattgcaggatgtcaaatggcaagttggttcagaatacactccagcagatgccattgcacaaggattgaaatcattggctcttagtgaaacaagagtcctctcaagaacaattgctgattggtttacatccctttaaattttgagttattcaatacatctgttgaagtttggagttcttcttacaaaggaatgccttcatcaggtctcaacttcccattttgttgaagcagtccactattgtaatgagatgtaaggatacaatgtattatgtatggcacataagagcagtgcatttttgggctgtgctgagctggtcatgctcacccgcaggccctagccgtactacaaatatctgatcaagattggtggtttggggccttacttggatcgtagttgcaagctataaaaagcatcgaacccaaaagtccaagcagctcgatcctgtttgaggtacggtgccagcaaggttaagttggccaaatctgttgcacgcagacagcccaatgggggtttctgcaggctggcgaaagtaaaggcgtgcgataggaaatctgggaatgttttatattgccacattgtaattccacgttataggcgtatagctcaaatacatttggacggtttggaggtatttcgttggtgtgctggcagttgtttctgtatcgtgcatgtctgttgcaagaaggcctggatgctgctgacctgagaactgattgatttcgctgacgcttacagttcttgcaagggcgtgcaagtagaacaacccgtatgcttcaggaattagtattacacgaggttaacaaatgtaataggcttgggactttctttcaacagcatca

SEQ ID NO: 65988 - DNA, 8319 bp, Zea Mays
atgccacacagccacagcaacgaactgcgggagctttacgctcgaaaagccgcgagccttcgttcgtccccgtcaacgtcgcgtttcctctttttcccggttccccgatcccctccgcgttttcctccaccacaccaccacttccctcgccgccactcgcgttcccgcccccaaggattacaccgtggcatctcgctacagccgccgctgatgcatctctccttccatccccctgctccgtcgcatctccctcgccggggcggcgtcgcaccaaccacaaccccatccttcgtcctccggaggaaccagcggaggcggcgccaccaccaccgcccgtaccgcctagccccccgcgcctctctctcagacctcatcgccaacctcccctcctccctcgcgctcgtaggtcccgcggcgctcgcggctgcggccgcggtcgccacctctttctcctcctggtcctcctcgtcccagaccagcctcccgccgccgccccaggaatccgaggactacaacgcgtgcggggatgtcgcgggcgagtgggttctcttcaccagcccggcgccattcaaccgctgcgtgctgctgcgttgcccgtccgtgtctttcgaggacgggctcgacggcgtcaacgagcgcctcctcaccgaggagcggcactacgtgaatctgagcaggggctgcatccccgtggtgcgcggcggggacggtgcctatgatatctcttaccagaggatttgcatcgccctggaggacggtggggtgatcgcgctcgattggcctgataatttgtacttggacaaagagcatggactggattccacggtgcttatggtgcctggtacgcacgaggggagcatggagaggaacattaaggtgttcgtgttagatgcactgaacaacgggtactttcctattgtaatgaaccccagagggtgcggcggctccccggtcactaccccaagcagctgacagtgatgatatctgcacagtggtacagtttataaacagcaagagaccttggacaacactaatgggtgttggatggggctatggggcaaatatgcttacaaagtacctcgtggaagttggagagtcgactcctcttactgctgctgtttgtattgacaacccttttgatatagaagaagcaacgagatcatttcctcatcatataactcttgatgaaaagctcacagctggcctggttgatattttgcgttctaataaggaactctttcaaggtaaagctaaaggtttcaatgttcaaaaggctttatcagccagttgtttgcgtgacttcgatgttgctatatccatggtttcacatgggttcgatactcttcatgacttctatgctgaaattagtacaaggctgtcagttgcccatgttagaatacctctactttttatacagagtgatgatgggactgtgccgcttcttgcagtgccccgcagttcaatatcagaaaatcctttcacaagccttctcttttgttcttgtgtacactccactatgtccatgtttcagagatacagtgtgttatggtgccagaaccttgccttagagtggttatcagcagttgagtttgctcttctgaagggtcgccatccacttatcaaagatgtggacatcacaattaacccgtccaaaggtctagcatttgttgaacctcaagtgaatcaaaggaaatctccaaaaggaaatagttttcgtcaacattctgagcttattttgtataataatgttgcacatggaataaatggactgctagttgattctgcaaataagtactctggtgctcaaaacaaagaaaatgggcagttgaataataatggtgacataggaactgtagacaaagatctggaagaagagttagaagagagttctgaagatgttgagaaaggtcaggcactacaatcagcaagtcttgtgatgaatatgctagatgctacaatgcctggcactctcaatgatgatcagaagaagaaggttctggtagctgtggagcaaggggagactcttgtgaaggctctagaagaagctgtacctgaagacgtgcgcggaaaacttacagcttctgtaactgaaattttacattccaaacgagaaactttcagtttaggtgcattgaatcgacttggctggaacaatgtaagaccaaccactaccaagacattggcccaggaaaagctcaaagattcagatcatgaaagcgggcttaaggataccaaaatggttgatcagaacaggatttctgcaaccgcttttgagggggatctgaaagacattaatatgacaaatgatgataaacctggagaaagcatcgaatcgtcacagggaaagccttctcaaacttctgaacctgttggaacagcgacagaaattggaactgaacagccttataaatcagataaagctaattatggaaccaatgatagcagtgaagggcagcatataacagaacaggacaatgaaatgactccaaagcaagtttctgatgatcagtcagtggccaactgtaatgggccttctaaagaaagggagcaatcagcagatgctacaacagaccagaatctacaatctaacacaacaacagaaaaggaaggtgacacaagtcgcacaggtgaagataagactgctcataatgtgaatgatcaaagcacacaagtctctaaaacagaagaatcaaaaccttcccccattactgtgacccaggcattagatgcattaactgggtttgatgactcgactcaaatggctgtcaacagtgtttttggagttcttgaaaatatgattgatcagtttgagaaacaacaggactctgagaatggtgaaagtgctgatggaaatgatggtatcacttccgtggatgagacagaatctcatgtgaaagagaatacagagaatgtgtcaagtggagaagatataaaccactcatctaaacaaccagaaggtagcagtcctggaaaaactgattcaatcatgtccaaatatgattgtgcttttggtgaggaaaatcccaatttaagcattgtttcatatggtagaggaaaaatgagatattaccgaggaaacaaagttggtgatcatgtgggtgctgatggtatcgagcgagtcagtggcttgcctgactatttattagatatagctgtcaactcttacttgaaggcgcaatatgcaatgtatcttcgtgaatttctttacacagaattgcaactcaaatcaccagagtctaattcagcaactgatcttttccttgatccacaagagggtaaatggaaaattgaagaacagatgggcaatgtgcaaaatgacaattttgaatcctcacaagagtcatctaagatggacaatgctattgagccaccctactttataccaggaaaaaatccagacatcgcatacaagtccaataaatggaataatacagtagcaaccaggtcaaaacctggtaatgatttgaacgaggcacttacacactttgttagagatgaactatcaagtgcccttaaaattgaagttggtcgcaaaatagggataacagatactaagcaacttgaaaggagtcttgcaaatgatgtagaacagattgctgctgaagtttctaaaactgttgtccttgactgtgagttgtattcagccatacatgtgcaaagaagtccaacaactatcaagtttggttcaacacatggaaaaaatgttgttgaagctgtgtcgactgcagttcagcaatctcagcatctgaggaatattcttcctgtcggtgtcatagttggtgtaactttggcatgtttgagaaattacttccatgttggtgtctctaagcatggtgaccatatgatagccactatgaagtcagatatttttggtgaggaagttattgttcaggacagcagcaaagagaatgttcaggatagtggaaaagcaaatacaaacgataataatattgaaaaaaccagtggggagaaccagcaggatatgacgaagtcacagggtcaagatatgatggtcggggctgtgacggctgccctaggtgcttctgctttggtagcacatcaacaaaataaggatgaaaattgcaaggattttgttgagatagaaggtgccaaacatgaggaaactgcacaggaaaagagccagaacagtttgatgagcagttttgctgagaaagccatgtctgtggcaggacctgtagttcccacaaagggtgatggtgaggttgatcatgaaaggtctgttaatattgctattgttgtgttcctttgtctttacttctttttctttttttttccttttttgtgtgaaaatgtttatcatgttctgactttctgcaagcaggcttgttgcagttctagctgaactcggacaaaagggtgggtttttgaggttcattggaaaaattgctctactctggggcggaattcgtggtgctatgagcttaactgataggcttatctcattcttacgtatcagtgagcggcccttatttcagaggattatgggattttctttaatggttctcatcctatggtcccctgttgtgattcctctactgccaacgcttgttcaaagttggacaataagtgcttcaacggggattatcggatatgcttgcattgttggattgtacatttctataatgatacttgtcatgctgtggggcaaaaggatacgtggctatgaggatccagttgagcaatatgggatgaatatttggtcggcgtctaggctgcgagagttttttcaaggtttggttggaggcgtaacggtcgtagggttggtgcactcgataagcattctactcggttttgcagcgtttcggacagggttctcttcatctttagctagaccccttgatcttctcaagtcttctagtaatgtgtttctgctagctcttcgagggcttgccacagcaactagcattgctgttgtggaagaaatggttttcagatcatggcttccagaggaaattgcagttgatcttggttactacaatgccattctgatatctggacttgtgttttctctaattcatcggtcactaccctcagtaccaggtttcttgctactttctctggtactttttgggcttaggcagaggacacaaggaaagcttgctgcacccattggcctacgttctggaatcatgactgccagttatttaatacaaagcagtggtgttttaacatccaaacctgaaacaccgttttggatgattagcacttaccatctgcatccttttgatggtgttatcggcttaagtatctgctccttgcttgctatctttttcttccctcaaaagcctgttcagaaggatacatctgtgtgatgaggctcagaagagtaaaacataatgctggagtgagcttccaacaaggactaatcaccatgcgtatgctgcgagcaatgaagggtttttcctaccatacatgttaaaatgcaatgccctgcaacttgctggcagcaaagagtatgtgctcggttagcttcttgctcatctgactgagggtactgctgattggaatggcttttggatctataactagagtatccaggtcatttgtacttaggcaagtgtgtatactactctatactggattatcgaaatgggggatggtttcttccctacgttgtaaggtggcggaggaacagatgatatgcctaggaagaggaactagtagatgataagagtttgcccctgatattaggcttcctctgaaatgcaggaattctagaggaatatacaggaatttcacaggaatcagtccattctcacagaaaaaatgcaggaaactgaaaaaaaatccccgcattccaaagggggcatcatctaggatttcttcataccgaattatcgattgacttcgaccacataccgtgcttttgttcatgtctttgaacacaggcacacccaaatttcgaggtagcaaattttgcccacatacactgtatataaagtagttacagtgcaagaacaatgctaactgatcaggtgatgtctcgtcctccccccggttctattattgttactgtatagctgtaattagtccaagtgtacagctgaatctactaaggtttacaaggaaaatcgccaggcagtaaaccttcaatgcttttggctaggttttcattctgaaagtcatgtcttccgcgtcagcataatcctgtattcctgtataacctctgttcggacttcgtagtgctcatctgagttctgattcggccgggcaactgtaaattctgtagtgttcgagaaaaaactgtaaattctgtaatattgccaagaattatgaatttacatgaactttacaggtataagttgcccgcctcacttcaccggctcaccgtgcttcacctgctatcttccatggcggcggctcacctcttctgctccgcaccggccgcctatcgcgccgcgaacccacggccccttgctacccgtggccgcgccaaccccgccacgggaacgtatctggtgctcaaaggggtatggtgctcatgtgcacatttcccccgggccacaccatcgagaagattcttcccctgccgcgcgtcgctcagccccgatggatcgctggccatgctcggggctcccagtcccaggatggcgccaccgatgaggaagccgtacatgcgggagcactcttgcctcatcttcccgcccccgcgcggtcgacgcccgctggcggtcatcaagttcctcggcggcgccttcatcggcgccgtccccgaggtcacctacggctacctgctggagctcctggcgctggagggctttgtggtcgtgtgcgtaccatacaacgtcaccttcgaccacgaggccgccgcgcgggaggtattccagagtttccatgcctgctacgacgcgctgctcgcgtcggggctcccggaggccggcctcagcgccctggacatcgcggagctcccgctctactctgttggccacagcaacggggcactgcttcagctgctagtgggaagctacttctcagaaaggataccagaggctaatgccattgtctcattcaacaataggccggcatcggaggctgtgccttactttgaacagatagggcccctttttaggcaactgatgcctatgatggaggcctcgcctgtttactcgatggccagaaatgcatcaggatatgcatggaaagctctatttgatttagctggaggtcttttacgtgagtatgatcaagaagctacggtatctctgagcaaatttattgatcagttaccatcagtaatgaaccaggtttcagaaggtgtgtctgaatttaaaccaacaccacctgaaaaccgtgaattctgcaagaattcctacagtgtacccaatacattattggtcaaattcactgtagatgctattgatgatacagacatagttgaagatgtcctgagaccccgcgttgattcaatcggtggacaaataaagaaggtcatactgtcaggaacacatctaactccatgtatacaggatgtcaaatggcaagttggttcagaatacactccagcagatgccattgcacaaggattgaaatcattggctcttagtgaaacaagagtcctctcaagaacaattgctgattggtttacatccctttaaattttgagttattcaatacatctgttgaagtttggagttcttcttacaaaggaatgccttcatcaggtctcaacttcccattttgttgaagcagtccactattgtaatgagatgtaaggatacaatgtattatgtatggcacataagagcagtgcatttttgggctgtgctgagctggtcatgctcacccgcaggccctagccgtactacaaatatctgatcaagattggtggtttggggccttacttggatcgtagttgcaagctataaaaagcatcgaacccaaaagtccaagcagctcgatcctgtttgaggtacggtgccagcaaggttaagttggccaaatctgttgcacgcagacagcccaatgggggtttctgcaggctggcgaaagtaaaggcgtgcgataggaaatctgggaatgttttatattgccacattgtaattccacgttataggcgtatagctcaaatacatttggacggtttggaggtatttcgttggtgtgctggcagttgtttctgtatcgtgcatgtctgttgcaagaaggcctggatgctgctgacctgagaactgattgatttcgctgacgcttacagttcttgcaagggcgtgcaagtagaacaacccgtatgcttcaggaattagtattacacgaggttaacaaatgtaataggcttgggactttctttcaacagcatca

SEQ ID NO: 65989 - DNA, 8990 bp, Zea Mays
atgccacacagccacagcaacgaactgcgggagctttacgctcgaaaagccgcgagccttcgttcgtccccgtcaacgtcgcgtttcctctttttcccggttccccgatcccctccgcgttttcctccaccacaccaccacttccctcgccgccactcgcgttcccgcccccaaggattacaccgtggcatctcgctacagccgccgctgatgcatctctccttccatccccctgctccgtcgcatctccctcgccggggcggcgtcgcaccaaccacaaccccatccttcgtcctccggaggaaccagcggaggcggcgccaccaccaccgcccgtaccgcctagccccccgcgcctctctctcagacctcatcgccaacctcccctcctccctcgcgctcgtaggtcccgcggcgctcgcggctgcggccgcggtcgccacctctttctcctcctggtcctcctcgtcccagaccagcctcccgccgccgccccaggaatccgaggactacaacgcgtgcggggatgtcgcgggcgagtgggttctcttcaccagcccggcgccattcaaccgctgcgtgctgctgcgttgcccgtccgtgtctttcgaggacgggctcgacggcgtcaacgagcgcctcctcaccgaggagcggcactacgtgaatctgagcaggggctgcatccccgtggtgcgcggcggggacggtgcctatgatatctcttaccagaggatttgcatcgccctggaggacggtggggtgatcgcgctcgattggcctgataatttgtacttggacaaagagcatggactggattccacggtgcttatggtgcctggtacgcacgaggggagcatggagaggaacattaaggtgttcgtgttagatgcactgaacaacgggtactttcctattgtaatgaaccccagagggtgcggcggctccccggtcactaccccaaggttatttacagcagctgacagtgatgatatctgcacagtggtacagtttataaacagcaagagaccttggacaacactaatgggtgttggatggggctatggggcaaatatgcttacaaagtacctcgtggaagttggagagtcgactcctcttactgctgctgtttgtattgacaacccttttgatatagaagaagcaacgagatcatttcctcatcatataactcttgatgaaaagctcacagctggcctggttgatattttgcgttctaataaggaactctttcaaggtaaagctaaaggtttcaatgttcaaaaggctttatcagccagttgtttgcgtgacttcgatgttgctatatccatggtttcacatgggttcgatactcttcatgacttctatgctgaaattagtacaaggctgtcagttgcccatgttagaatacctctactttttatacagagtgatgatgggactgtgccgcttcttgcagtgccccgcagttcaatatcagaaaatcctttcacaagccttctcttttgttcttgtgtacactccactatgtccatgtttcagagatacagtgtgttatggtgccagaaccttgccttagagtggttatcagcagttgagtttgctcttctgaagggtcgccatccacttatcaaagatgtggacatcacaattaacccgtccaaaggtctagcatttgttgaacctcaagtgaatcaaaggaaatctccaaaaggaaatagttttcgtcaacattctgagcttattttgtataataatgttgcacatggaataaatggactgctagttgattctgcaaataagtactctggtgctcaaaacaaagaaaatgggcagttgaataataatggtgacataggaactgtagacaaagatctggaagaagagttagaagagagttctgaagatgttgagaaaggtcaggcactacaatcagcaagtcttgtgatgaatatgctagatgctacaatgcctggcactctcaatgatgatcagaagaagaaggttctggtagctgtggagcaaggggagactcttgtgaaggctctagaagaagctgtacctgaagacgtgcgcggaaaacttacagcttctgtaactgaaattttacattccaaacgagaaactttcagtttaggtgcattgaatcgacttggctggaacaatgtaagaccaaccactaccaagacattggcccaggaaaagctcaaagattcagatcatgaaagcgggcttaaggataccaaaatggttgatcagaacaggatttctgcaaccgcttttgagggggatctgaaagacattaatatgacaaatgatgataaacctggagaaagcatcgaatcgtcacagggaaagccttctcaaacttctgaacctgttggaacagcgacagaaattggaactgaacagccttataaatcagataaagctaattatggaaccaatgatagcagtgaagggcagcatataacagaacaggacaatgaaatgactccaaagcaagtttctgatgatcagtcagtggccaactgtaatgggccttctaaagaaagggagcaatcagcagatgctacaacagaccagaatctacaatctaacacaacaacagaaaaggaaggtgacacaagtcgcacaggtgaagataagactgctcataatgtgaatgatcaaagcacacaagtctctaaaacagaagaatcaaaaccttcccccattactgtgacccaggcattagatgcattaactgggtttgatgactcgactcaaatggctgtcaacagtgtttttggagttcttgaaaatatgattgatcagtttgagaaacaacaggactctgagaatggtgaaagtgctgatggaaatgatggtatcacttccgtggatgagacagaatctcatgtgaaagagaatacagagaatgtgtcaagtggagaagatataaaccactcatctaaacaaccagaaggtagcagtcctggaaaaactgattcaatcatgtccaaatatgattgtgcttttggtgaggaaaatcccaatttaagcattgtttcatatggtagaggaaaaatgagatattaccgaggaaacaaagttggtgatcatgtgggtgctgatggtatcgagcgagtcagtggcttgcctgactatttattagatatagctgtcaactcttacttgaaggcgcaatatgcaatgtatcttcgtgaatttctttacacagaattgcaactcaaatcaccagagtctaattcagcaactgatcttttccttgatccacaagagggtaaatggaaaattgaagaacagatgggcaatgtgcaaaatgacaattttgaatcctcacaagagtcatctaagatggacaatgctattgagccaccctactttataccaggaaaaaatccagacatcgcatacaagtccaataaatggaataatacagtagcaaccaggtcaaaacctggtaatgatttgaacgaggcacttacacactttgttagagatgaactatcaagtgcccttaaaattgaagttggtcgcaaaatagggataacagatactaagcaacttgaaaggagtcttgcaaatgatgtagaacagattgctgctgaagtttctaaaactgttgtccttgactgtgagttgtattcagccatacatgtgcaaagaagtccaacaactatcaagtttggttcaacacatggaaaaaatgttgttgaagctgtgtcgactgcagttcagcaatctcagcatctgaggaatattcttcctgtcggtgtcatagttggtgtaactttggcatgtttgagaaattacttccatgttggtgtctctaagcatggtgaccatatgatagccactatgaagtcagatatttttggtgaggaagttattgttcaggacagcagcaaagagaatgttcaggatagtggaaaagcaaatacaaacgataataatattgaaaaaaccagtggggagaaccagcaggatatgacgaagtcacagggtcaagatatgatggtcggggctgtgacggctgccctaggtgcttctgctttggtagcacatcaacaaaataaggatgaaaattgcaaggattttgttgagatagaaggtgccaaacatgaggaaactgcacaggaaaagagccagaacagtttgatgagcagttttgctgagaaagccatgtctgtggcaggacctgtagttcccacaaagggtgatggtgaggttgatcatgaaaggcttgttgcagttctagctgaactcggacaaaagggtgggtttttgaggttcattggaaaaattgctctactctggggcggaattcgtggtgctatgagcttaactgataggcttatctcattcttacgtatcagtgagcggcccttatttcagaggattatgggattttctttaatggttctcatcctatggtcccctgttgtgattcctctactgccaacgcttgttcaaagttggacaataagtgcttcaacggggattatcggatatgcttgcattgttggattgtacatttctataatgatacttgtcatgctgtggggcaaaaggatacgtggctatgaggatccagttgagcaatatgggatgaatatttggtcggcgtctaggctgcgagagttttttcaaggtttggttggaggcgtaacggtcgtagggttggtgcactcgataagcattctactcggttttgcagcgtttcggacagggttctcttcatctttagctagaccccttgatcttctcaagtcttctagtaatgtgtttctgctagctcttcgagggcttgccacagcaactagcattgctgttgtggaagaaatggttttcagatcatggcttccagaggaaattgcagttgatcttggttactacaatgccattctgatatctggacttgtgttttctctaattcatcggtcactaccctcagtaccaggtttcttgctactttctctggtactttttgggcttaggcagaggacacaaggaaagcttgctgcacccattggcctacgttctggaatcatgactgccagttatttaatacaaagcagtggtgttttaacatccaaacctgaaacaccgttttggatgattagcacttaccatctgcatccttttgatggtgttatcggcttaagtatctgctccttgcttgctatctttttcttccctcaaaagcctgttcagaaggatacatctgtgtgatgaggctcagaagagtaaaacataatgctggagtgagcttccaacaaggactaatcaccatgcgtatgctgcgagcaatgaagggtttttcctaccatacatgttaaaatgcaatgccctgcaacttgctggcagcaaagagtatgtgctcggttagcttcttgctcatctgactgagggtactgctgattggaatggcttttggatctataactagagtatccaggtcatttgtacttaggcaagtgtgtatactactctatactggattatcgaaatgggggatggtttcttccctacgttgtaaggtggcggaggaacagatgatatgcctaggaagaggaactagtagatgataagagtttgcccctgatattaggcttcctctgaaatgcaggaattctagaggaatatacaggaatttcacaggaatcagtccattctcacagaaaaaatgcaggaaactgaaaaaaaatccccgcattccaaagggggcatcatctaggatttcttcataccgaattatcgattgacttcgaccacataccgtgcttttgttcatgtctttgaacacaggcacacccaaatttcgaggtttacaaggaaaatcgccaggcagtaaaccttcaatgcttttggctaggttttcattctgaaagtcatgtcttccgcgtcagcataatcctgtattcctgtataacctctgttcggacttcgtagtgctcatctgagttctgattcggccgggcaactgtaaattctgtagtgttcgagaaaaaactgtaaattctgtaatattgccaagaattatgaatttacatgaactttacaggtataagttgcccgcctcacttcaccggctcaccgtgcttcacctgctatcttccatggcggcggctcacctcttctgctccgcaccggccgcctatcgcgccgcgaacccacggccccttgctacccgtggccgcgccaaccccgccacgggaacgtatctggtgctcaaaggggtatggtgctcatgtgcacatttcccccgggccacaccatcgagaagattcttcccctgccgcgcgtcgctcagccccgatggatcgctggccatgctcggggctcccagtcccaggatggcgccaccgatgaggaagccgtacatgcgggagcactcttgcctcatcttcccgcccccgcgcggtcgacgcccgctggcggtcatcaagttcctcggcggcgccttcatcggcgccgtccccgaggtcacctacggctacctgctggagctcctggcgctggagggctttgtggtcgtgtgcgtaccatacaacgtcaccttcgaccacgaggccgccgcgcgggaggtattccagagtttccatgcctgctacgacgcgctgctcgcgtcggggctcccggaggccggcctcagcgccctggacatcgcggagctcccgctctactctgttggccacagcaacggggcactgcttcagctgctagtgggaagctacttctcagaaaggataccagaggctaatgccattgtctcattcaacaataggccggcatcggaggctgtgccttactttgaacaggttgtgggatattctgcaaggggtgcatctctcccctgaagtagatgatcaacatatttggaccccctcggcttctggtgtttattctgctaaatctgcttatgacagattgttagtgggtgctaccagttttgatccgacaaaacgtatatggaaatgttgggcgcctcctaggtgcaattattttcctctggttggcttctttaagccgatgttggacagcggaccgtcttgcaaggcatggtttggatcatccggagtactgccccctatgtgaccaggaaaaggaaacagtgcaacatctcctagtggcttgtgttgttgcttgacaagtgtgttttttccatcctgggtttgagtggcctccaactcctcactcctgggattgctgatgaagtattccaagattggtggaaagcagctgaagcaagagtttgtaaggagaagaaaaaaggctttaactcgctggtggcgctttcttcttggaggatttggaaacatcgaaatgcttgtgtctttgatggggtgcccccaagtgtatctaaagtcattcaggacattaaggaggaggccagaatatggtgcttggcgggtgctgctggcatggttcttaggcgataaggcaagataaggcgttggaccaccgcctagacgcctatcttttccaatacagacatctatcagtccagattaaagtggcagtggcaccaatactcaagccaacatctaatcgataagagggccactatcagccaaaaagggaaaacagaataatacttcttttctaagcatccaacaaacaatttgtgtttaaagctgattttggtctaattgtgctttcctactggcctttggaagttacactgtcttaatagtatatttgttttatgcagatagggcccctttttaggcaactgatgcctatgatggaggcctcgcctgtttactcgatggccagaaatgcatcaggatatgcatggaaagctctatttgatttagctggaggtcttttacgtgagtatgatcaagaagctacggtatctctgagcaaatttattgatcagttaccatcagtaatgaaccaggtttcagaaggtgtgtctgaatttaaaccaacaccacctgaaaaccgtgaattctgcaagaattcctacagtgtacccaatacattattggtcaaattcactgtagatgctattgatgatacagacatagttgaagatgtcctgagaccccgcgttgattcaatcggtggacaaataaagaaggtcatactgtcaggaacacatctaactccatgtatacaggcactcagctttgttgtattgcaggatgtcaaatggcaagttggttcagaatacactccagcagatgccattgcacaaggattgaaatcattggctcttagtgaaacaagagtcctctcaagaacaattgctgattggtttacatccctttaaattttgagttattcaatacatctgttgaagtttggagttcttcttacaaaggaatgccttcatcaggtctcaacttcccattttgttgaagcagtccactattgtaatgagatgtaaggatacaatgtattatgtatggcacataagagcagtgcatttttgggctgtgctgagctggtcatgctcacccgcaggccctagccgtactacaaatatctgatcaagattggtggtttggggccttacttggatcgtagttgcaagctataaaaagcatcgaacccaaaagtccaagcagctcgatcctgtttgaggtacggtgccagcaaggttaagttggccaaatctgttgcacgcagacagcccaatgggggtttctgcaggctggcgaaagtaaaggcgtgcgataggaaatctgggaatgttttatattgccacattgtaattccacgttataggcgtatagctcaaatacatttggacggtttggaggtatttcgttggtgtgctggcagttgtttctgtatcgtgcatgtctgttgcaagaaggcctggatgctgctgacctgagaactgattgatttcgctgacgcttacagttcttgcaagggcgtgcaagtagaacaacccgtatgcttcaggaattagtattacacgaggttaacaaatgtaataggcttgggactttctttcaacagcatca

SEQ ID NO: 65990 - DNA, 7113 bp, Zea Mays
tccttaccagaactagaaatctgcagtcacttttaggttatttacagcagctgacagtgatgatatctgcacagtggtacagtttataaacagcaagagaccttggacaacactaatgggtgttggatggggctatggggcaaatatgcttacaaagtacctcgtggaagttggagagtcgactcctcttactgctgctgtttgtattgacaacccttttgatatagaagaagcaacgagatcatttcctcatcatataactcttgatgaaaagctcacagctggcctggttgatattttgcgttctaataaggaactctttcaaggtaaagctaaaggtttcaatgttcaaaaggctttatcagccagttgtttgcgtgacttcgatgttgctatatccatggtttcacatgggttcgatactcttcatgacttctatgctgaaattagtacaaggctgtcagttgcccatgttagaatacctctactttttatacagtgccccgcagttcaatatcagaaaatcctttcacaagccttctcttttgttcttgtgtacactccactatgtccatgtttcagagatacagtgtgttatggtgccagaaccttgccttagagtggttatcagcagttgagtttgctcttctgaagggtcgccatccacttatcaaagatgtggacatcacaattaacccgtccaaaggtctagcatttgttgaacctcaagtgaatcaaaggaaatctccaaaaggaaatagttttcgtcaacattctgagcttattttgtataataatgttgcacatggaataaatggactgctagttgattctgcaaataagtactctggtgctcaaaacaaagaaaatgggcagttgaataataatggtgacataggaactgtagacaaagatctggaagaagagttagaagagagttctgaagatgttgagaaaggtcaggcactacaatcagcaagtcttgtgatgaatatgctagatgctacaatgcctggcactctcaatgatgatcagaagaagaaggttctggtagctgtggagcaaggggagactcttgtgaaggctctagaagaagctgtacctgaagacgtgcgcggaaaacttacagcttctgtaactgaaattttacattccaaacgagaaactttcagtttaggtgcattgaatcgacttggctggaacaatgtaagaccaaccactaccaagacattggcccaggaaaagctcaaagattcagatcatgaaagcgggcttaaggataccaaaatggttgatcagaacaggatttctgcaaccgcttttgagggggatctgaaagacattaatatgacaaatgatgataaacctggagaaagcatcgaatcgtcacagggaaagccttctcaaacttctgaacctgttggaacagcgacagaaattggaactgaacagccttataaatcagataaagctaattatggaaccaatgatagcagtgaagggcagcatataacagaacaggacaatgaaatgactccaaagcaagtttctgatgatcagtcagtggccaactgtaatgggccttctaaagaaagggagcaatcagcagatgctacaacagaccagaatctacaatctaacacaacaacagaaaaggaaggtgacacaagtcgcacaggtgaagataagactgctcataatgtgaatgatcaaagcacacaagtctctaaaacagaagaatcaaaaccttcccccattactgtgacccaggcattagatgcattaactgggtttgatgactcgactcaaatggctgtcaacagtgtttttggagttcttgaaaatatgattgatcagtttgagaaacaacaggactctgagaatggtgaaagtgctgatggaaatgatggtatcacttccgtggatgagacagaatctcatgtgaaagagaatacagagaatgtgtcaagtggagaagatataaaccactcatctaaacaaccagaaggtagcagtcctggaaaaactgattcaatcatgtccaaatatgattgtgcttttggtgaggaaaatcccaatttaagcattgtttcatatggtagaggaaaaatgagatattaccgaggaaacaaagttggtgatcatgtgggtgctgatggtatcgagcgagtcagtggcttgcctgactatttattagatatagctgtcaactcttacttgaaggcgcaatatgcaatgtatcttcgtgaatttctttacacagaattgcaactcaaatcaccagagtctaattcagcaactgatcttttccttgatccacaagagggtaaatggaaaattgaagaacagatgggcaatgtgcaaaatgacaattttgaatcctcacaagagtcatctaagatggacaatgctattgagccaccctactttataccaggaaaaaatccagacatcgcatacaagtccaataaatggaataatacagtagcaaccaggtcaaaacctggtaatgatttgaacgaggcacttacacactttgttagagatgaactatcaagtgcccttaaaattgaagttggtcgcaaaatagggataacagatactaagcaacttgaaaggagtcttgcaaatgatgtagaacagattgctgctgaagtttctaaaactgttgtccttgactgtgagttgtattcagccatacatgtgcaaagaagtccaacaactatcaagtttggttcaacacatggaaaaaatgttgttgaagctgtgtcgactgcagttcagcaatctcagcatctgaggaatattcttcctgtcggtgtcatagttggtgtaactttggcatgtttgagaaattacttccatgttggtgtctctaagcatggtgaccatatgatagccactatgaagtcagatatttttggtgaggaagttattgttcaggacagcagcaaagagaatgttcaggatagtggaaaagcaaatacaaacgataataatattgaaaaaaccagtggggagaaccagcaggatatgacgaagtcacagggtcaagatatgatggtcggggctgtgacggctgccctaggtgcttctgctttggtagcacatcaacaaaataaggatgaaaattgcaaggattttgttgagatagaaggtgccaaacatgaggaaactgcacaggaaaagagccagaacagtttgatgagcagttttgctgagaaagccatgtctgtggcaggacctgtagttcccacaaagggtgatggtgaggttgatcatgaaaggcttgttgcagttctagctgaactcggacaaaagggtgggtttttgaggttcattggaaaaattgctctactctggggcggaattcgtggtgctatgagcttaactgataggcttatctcattcttacgtatcagtgagcggcccttatttcagaggattatgggattttctttaatggttctcatcctatggtcccctgttgtgattcctctactgccaacgcttgttcaaagttggacaataagtgcttcaacggggattatcggatatgcttgcattgttggattgtacatttctataatgatacttgtcatgctgtggggcaaaaggatacgtggctatgaggatccagttgagcaatatgggatgaatatttggtcggcgtctaggctgcgagagttttttcaaggtttggttggaggcgtaacggtcgtagggttggtgcactcgataagcattctactcggttttgcagcgtttcggacagggttctcttcatctttagctagaccccttgatcttctcaagtcttctagtaatgtgtttctgctagctcttcgagggcttgccacagcaactagcattgctgttgtggaagaaatggttttcagatcatggcttccagaggaaattgcagttgatcttggttactacaatgccattctgatatctggacttgtgttttctctaattcatcggtcactaccctcagtaccaggtttcttgctactttctctggtactttttgggcttaggcagaggacacaaggaaagcttgctgcacccattggcctacgttctggaatcatgactgccagttatttaatacaaagcagtggtgttttaacatccaaacctgaaacaccgttttggatgattagcacttaccatctgcatccttttgatggtgttatcggcttaagtatctgctccttgcttgctatctttttcttccctcaaaagcctgttcagaaggatacatctgtgtgatgaggctcagaagagtaaaacataatgctggagtgagcttccaacaaggactaatcaccatgcgtatgctgcgagcaatgaagggtttttcctaccatacatgttaaaatgcaatgccctgcaacttgctggcagcaaagagtatgtgctcggttagcttcttgctcatctgactgagggtactgctgattggaatggcttttggatctataactagagtatccaggtcatttgtacttaggcaagtgtgtatactactctatactggattatcgaaatgggggatggtttcttccctacgttgtaaggtggcggaggaacagatgatatgcctaggaagaggaactagtagatgataagagtttgcccctgatattaggcttcctctgaaatgcaggaattctagaggaatatacaggaatttcacaggaatcagtccattctcacagaaaaaatgcaggaaactgaaaaaaaatccccgcattccaaagggggcatcatctaggatttcttcataccgaattatcgattgacttcgaccacataccgtgcttttgttcatgtctttgaacacaggcacacccaaatttcgaggtttacaaggaaaatcgccaggcagtaaaccttcaatgcttttggctaggttttcattctgaaagtcatgtcttccgcgtcagcataatcctgtattcctgtataacctctgttcggacttcgtagtgctcatctgagttctgattcggccgggcaactgtaaattctgtagtgttcgagaaaaaactgtaaattctgtaatattgccaagaattatgaatttacatgaactttacaggtataagttgcccgcctcacttcaccggctcaccgtgcttcacctgctatcttccatggcggcggctcacctcttctgctccgcaccggccgcctatcgcgccgcgaacccacggccccttgctacccgtggccgcgccaaccccgccacgggaacgtatctggtgctcaaaggggtatggtgctcatgtgcacatttcccccgggccacaccatcgagaagattcttcccctgccgcgcgtcgctcagccccgatggatcgctggccatgctcggggctcccagtcccaggatggcgccaccgatgaggaagccgtacatgcgggagcactcttgcctcatcttcccgcccccgcgcggtcgacgcccgctggcggtcatcaagttcctcggcggcgccttcatcggcgccgtccccgaggtcacctacggctacctgctggagctcctggcgctggagggctttgtggtcgtgtgcgtaccatacaacgtcaccttcgaccacgaggccgccgcgcgggaggtattccagagtttccatgcctgctacgacgcgctgctcgcgtcggggctcccggaggccggcctcagcgccctggacatcgcggagctcccgctctactctgttggccacagcaacggggcactgcttcagctgctagtgggaagctacttctcagaaaggataccagaggctaatgccattgtctcattcaacaataggccggcatcggaggctgtgccttactttgaacagatagggcccctttttaggcaactgatgcctatgatggaggcctcgcctgtttactcgatggccagaaatgcatcaggatatgcatggaaagctctatttgatttagctggaggtcttttacgtgagtatgatcaagaagctacggtatctctgagcaaatttattgatcagttaccatcagtaatgaaccaggtttcagaaggtgtgtctgaatttaaaccaacaccacctgaaaaccgtgaattctgcaagaattcctacagtgtacccaatacattattggtcaaattcactgtagatgctattgatgatacagacatagttgaagatgtcctgagaccccgcgttgattcaatcggtggacaaataaagaaggtcatactgtcaggaacacatctaactccatgtatacaggatgtcaaatggcaagttggttcagaatacactccagcagatgccattgcacaaggattgaaatcattggctcttagtgaaacaagagtcctctcaagaacaattgctgattggtttacatccctttaaattttgagttattcaatacatctgttgaagtttggagttcttcttacaaaggaatgccttcatcaggtctcaacttcccattttgttgaagcagtccactattgtaatgagatgtaaggatacaatgtattatgtatggcacataagagcagtgcatttttgggctgtgctgagctggtcatgctcacccgcaggccctagccgtactacaaatatctgatcaagattggtggtttggggccttacttggatcgtagttgcaagctataaaaagcatcgaacccaaaagtccaagcagctcgatcctgtttgaggtacggtgccagcaaggttaagttggccaaatctgttgcacgcagacagcccaatgggggtttctgcaggctggcgaaagtaaaggcgtgcgataggaaatctgggaatgttttatattgccacattgtaattccacgttataggcgtatagctcaaatacatttggacggtttggaggtatttcgttggtgtgctggcagttgtttctgtatcgtgcatgtctgttgcaagaaggcctggatgctgctgacctgagaactgattgatttcgctgacgcttacagttcttgcaagggcgtgcaagtagaacaacccgtatgcttcaggaattagtattacacgaggttaacaaatgtaataggcttgggactttctttcaacagcatca

SEQ ID NO: 65991 - DNA, 1473 bp, Zea Mays
aaatccaagaagaaaggagcatagaacataagaggagagaccgcactacacacctcacgcctgaagttcagatctaagccttctcgtcctcgcccaaggacaacgataaacatctaagaaccaaacaaaaacagagcacgaccatcggtctctaagcaaaacgcgcagcacgccgggcgctccacgcacgtaggctagcagagcgcgcatggggcttctggaccagctgtgggacgacacggtggccgggccgcgcccggactccggcctcggcaagctccgcaagcacgcgtccttctccccctcgtcggccgcgccgtcgccgaccgcggagggcgcggcgccgcccgccgtgacgcggagcatcaccatgctgcggccggcggcgctgtccgtcgccacgtcgccgcgcagcgagtccagctccgcgccgtcgtcgccgtcgcccgcaagcggcgctccggactcgcccttcggcgcaggtgaccaccagctctcgccgtcaccttctcttcttttttttcccccagttctcgtcgtcgctgcgcggtgtttgactgtttcgttggagctcgcggaagggatctttgggtcagtcagcgttgtaaaaagcaaaaagaaaaaaagaaaagaaatatacggtatctggttaataatttcgcagctgcacgcttcgttttagcggaattctgtagcgaatttgaagctacttttgtatagtcgaatgttggagatctgaagcatacacacgcacacccccggctgatgttgtggtctctttttctgtacgtacgttgccaccgtgatgctgcagcgacgacgcccaggggagagggctggaagaagctgcgccggaaaggcaggatggccgacggcgccgacgcccccggcacgccgaggagccccactgtggtggtgatcagttcgctggaccgctgaagcagccggccgggccaagacgaggacacagcacaaggatggaggaagccagccaccatcagcagcagctagcggactgaaggaggatcggaacagagaggcccccccggccatgcgacctgcttaacagagcttctggtcacggttctgttatactacgcgttaacggtgtatgtatatacgtcatcttcctgtaaatctccgtggtgtgaggtgctgctgattttgaagagagtgatgctcctgttatgtgctactagctagctagtgctgttgctgtatgagtacagtgtagtctactattaagggttgtcgtttggactgttagtctatagagacagaaaaatgtagaagtacgtattaaagccaatcgaatagacatgtttgtcgccatgtaaaaaaagtataatcctacgtatactcgtacgcaacgatagtaatgcgtgcttgagtgttgtggacactttcgccaacaccttggcttgcgttgccttgcctgccacagaaatatcttaccatgggcgtggattgttt

SEQ ID NO: 65992 - DNA, 3845 bp, Zea Mays
cttgcctccaaaaagcgctgctcgcttcggcactcgttgataaagcggctagccgagcgccgtggcagaaccgcggaacgcaatagccaataggtagcggagcaccgcaccgcgaagcaaacgagaggggaaaaaaaagcacgaggaggccgcgcccgcgaaggaatcacttgcccgggcgtgggccgcccaccggccaccgcccagccgctgccgcagtgccgcccgcctgcctgcctgcctggtgcggtggtgcctgcccacgggaacgggatagctggctgacggacgcattgcggagcggactgggagactacgggtaagataataaaagggccaggcgtggcggggcgcaaccaccgctgtgcctcggagaggaggacagctctcgcgccgcggctgccgccatgtggacgccgtcgcgcgggagcaacgcccggcgcagcggccaccgccgcatcgcggactacctggcggacgaccagaccaccaccacagccaccgacgcctccgacaacgagtcctacactaccgcctatggggaggagttcttcgccgccgccgccgccgggagcggcggcgccggcggcatgctgccggcattcctggcggaccagggggacctggtggaggtcatgctggagctggacgaggagtccatggtggtgcgcagcgtcacgcccaccagcgcggcgctctacggcgccgcctccctcccggcgccgccgtccgcgggggtcctcggggtgtcgccgtcgccgcgccgcgcgccttcggagggcggcggccgcctgagccggtgctcgtcgacgtcgtcgcggatacggaagaagttcgcgtggctccggtcgccgtcgccctccccgtccccgtaccgccccacgcccgccgagcttcagcgggaggccgccatggcggcgcgcgagcggcggcgggagcaggcgcagctcaaccggtcccgcgccggcgccaggcgcgcgctcaagggcctccgcttcatcagccgcaccacgggctccgtcgaggccgccgagctctggcgccgcgtcgaggagcgcttcaacgacctcgcccgcgaagggctgctctcccgcgacgacttcggcgaatgcatcggaatggtggactccaaggagttcgcggtgggcatcttcgacgcgctggcgcggcggcggcggcagaacctggagcggatcaccaaggaggagctctacgacttctggctccagatctccgatcagagcttcgacgcgcggctccagatcttcttcgacatggtggacaccaacgtggacgggaggataacgagggaggaagtacaggagctgatcgtgctcagcgcgtcggccaacaagctggcaaagctcaaggagcaggcggaggagtacgcgtcgctcatcatggaggagctcgacccggagaagcttggctacattgagctgtggcagctcgaagcgctgctgctccagcgcgacacctacatgaactacagccgcccgctgagcacggccagcggggcccagtggagccagaacctcggcgtcggcggcgcgctgacgataacagggggaggaggagacggcggctgcggcgtggacggcgaccacccggggcctccgcgcgagcgtcgccggagctggggcgtgcggaaggcggcggcgcgggtgcgcgtggcggcggaggagaactggcgccgcgcctgggtgctggcgttgtggttcgcggccatggcggcgctgttcgtgtggaagttcgtccagtaccggcgcatggcggcgttccaggtgatggggtactgcctccccacggccaagggcgccgcggagacgctcaagctcaacatggcgctcgtgctgctccccgtctgccgcaacacgctcacgtggctccgctcctcctgggcccgcttcttcgtccccttcgacgacaacatcaccttccacaagatgatcgcgacggcgatcgtggtggggatcacgctgcacgcggggaaccacctggcgtgcgacttcccgcgggtgatcgcggcgagcccggaggagtacgcgctcgtcgcgggcgcgttcggcgcggacaagccgacgtacgcggggctcctgtcgggcacggagggcgtgacgggcgtggccatggtggtgctgatgaccgtctccttcacgctggccacgcacccgttccgcaagggggagcccaagggcgcgggcgcggccgccggcacgtcgcggctcccggcgccactgaaccggctcaccggcttcaacgccttctggtactcgcaccacctcctcggcatcgtgtacgcgctcctgctcgcgcacggctacttcctcttcctcgtccggaggtggtacgagaagacgacatggatgtacatttcggtcccgctgctgctctacgtcggtgaaaggatgcttagagccttgaggtcaaatgcttataccgtgaaaattctcaaggtgtgtcttctacctggaaatgtgttgaccataacgatgtcaaagccctatggatttcgttacagaagtggacagtacatatttcttcaatgtccaataatttctccatttgaatggcatcctttctccatcacttcagcacctggagatgactacctcagtgtccacatccggacaaacggtgactggacacaggagctcaagcgcatatttgtggagaactacttctcgccgcatctcaacagaagagcttcgtttagcgagctaggtgcggcagaaccaagaagcttgccaaaattactcgtagatggtccctatggtgcccctgcgcaggattttagaaactacgacgttctacttctcgtcggcctcggaatcggggcaacaccgttcataagcattctacgggatctgcttaataacattaagatagctgacgagctgatggacttggcaatggagaccagcaggtctgaagacagcgccaacagctttagcgtctcaacggcgagtagcaaccggaagagagcatacagaacaagccgtgcacatttctactgggtcacccgagaagccggatcctttgaatggttcaaaggggtgatgaatgaggttgcagaaatggacaagaagggtatcatagagctgcacaattacctcactagcgtttacgaggaacgcgacgcacggacaactctgctgtccatggtccaggctctgaaccacgccaagcacggcgtcgatatcgtatcggggaccagggtgaggacgcatttcgccagacccaactggaaggaagtcttcaccaggatcgcctccaagcatccgaattcaacagttggtgtgttctactgcggcgcaccgacgcttgccaaggagctgaaggctctggcgcacgagatgagccacaggacgggcactcgcttccatttccacaaggagtacttctgagtttcgacggatagaatgggcagtcgatgctcgttctaacgtgatctggtcttttctgatctgatctcgatagcgttaggtaccggtaaagaagacagaattttgcacagatgcaagacaaaccaagctgacctctcctcctgatctggaactgtacatagcataaaagaagcaccacagggttagcttagtatacgtagcacaattcaaataaatatattgacaaagaaaagagagacagagaaagggcaggatagaggctgttgttgttaactcgaagatattgatgataggcatggcggtatacgtgtatacattatagttaggtgctaggtggtagttatatatatactgtatatgatatgggtcgatgaatatacgaggagccacatgctgctgccattctcaaatgtggacgtgcattcttcaggcgtgttc

SEQ ID NO: 65993 - DNA, 2306 bp, Zea Mays
caatagccaataggtagcggagcaccgcaccgcgaagcaaacgagaggggaaaaaaaagcacgaggaggccgcgcccgcgaaggaatcacttgcccgggcgtgggccgcccaccggccaccgcccagccgctgccgcagtgccgcccgcctgcctgcctgcctggtgcggtggtgcctgcccacgggaacgggatagctggctgacggacgcattgcggagcggactgggagactacgggtaagataataaaagggccaggcgtggcggggcgcaaccaccgctgtgcctcggagaggaggacagctctcgcgccgcggctgccgccatgtggacgccgtcgcgcgggagcaacgcccggcgcagcggccaccgccgcatcgcggactacctggcggacgaccagaccaccaccacagccaccgacgcctccgacaacgagtcctacactaccgcctatggggaggagttcttcgccgccgccgccgccgggagcggcggcgccggcggcatgctgccggcattcctggcggaccagggggacctggtggaggtcatgctggagctggacgaggagtccatggtggtgcgcagcgtcacgcccaccagcgcggcgctctacggcgccgcctccctcccggcgccgccgtccgcgggggtcctcggggtgtcgccgtcgccgcgccgcgcgccttcggagggcggcggccgcctgagccggtgctcgtcgacgtcgtcgcggatacggaagaagttcgcgtggctccggtcgccgtcgccctccccgtccccgtaccgccccacgcccgccgagcttcagcgggaggccgccatggcggcgcgcgagcggcggcgggagcaggcgcagctcaaccggtcccgcgccggcgccaggcgcgcgctcaagggcctccgcttcatcagccgcaccacgggctccgtcgaggccgccgagctctggcgccgcgtcgaggagcgcttcaacgacctcgcccgcgaagggctgctctcccgcgacgacttcggcgaatgcatcggaatggtggactccaaggagttcgcggtgggcatcttcgacgcgctggcgcggcggcggcggcagaacctggagcggatcaccaaggaggagctctacgacttctggctccagatctccgatcagagcttcgacgcgcggctccagatcttcttcgacatctgatcgtgctcagcgcgtcggccaacaagctggcaaagctcaaggagcaggcggaggagtacgcgtcgctcatcatggaggagctcgacccggagaagcttggctacattgagctgtggcagctcgaagcgctgctgctccagcgcgacacctacatgaactacagccgcccgctgagcacggccagcggggcccagtggagccagaacctcggcgtcggcggcgcgctgacgataacagggggaggaggagacggcggctgcggcgtggacggcgaccacccggggcctccgcgcgagcgtcgccggagctggggcgtgcggaaggcggcggcgcgggtgcgcgtggcggcggaggagaactggcgccgcgcctgggtgctggcgttgtggttcgcggccatggcggcgctgttcgtgtggaagttcgtccagtaccggcgcatggcggcgttccaggtgatggggtactgcctccccacggccaagggcgccgcggagacgctcaagctcaacatggcgctcgtgctgctccccgtctgccgcaacacgctcacgtggctccgctcctcctgggcccgcttcttcgtccccttcgacgacaacatcaccttccacaagatgatcgcgacggcgatcgtggtggggatcacgctgcacgcggggaaccacctggcgtgcgacttcccgcgggtgatcgcggcgagcccggaggagtacgcgctcgtcgcgggcgcgttcggcgcggacaagccgacgtacgcggggctcctgtcgggcacggagggcgtgacgggcgtggccatggtggtgctgatgaccgtctccttcacgctggccacgcacccgttccgcaagggggagcccaagggcgcgggcgcggccgccggcacgtcgcggctcccggcgccactgaaccggctcaccggcttcaacgccttctggtactcgcaccacctcctcggcatcgtgtacgcgctcctgctcgcgcacggctacttcctcttcctcgtccggaggtggtacgagaagacgtctgaacagcttcggagaattactgttgccatgacgatgccactcgagattgtagcagcgcgccagcgtgcgtga

SEQ ID NO: 65994 - DNA, 3746 bp, Zea Mays
caatagccaataggtagcggagcaccgcaccgcgaagcaaacgagaggggaaaaaaaagcacgaggaggccgcgcccgcgaaggaatcacttgcccgggcgtgggccgcccaccggccaccgcccagccgctgccgcagtgccgcccgcctgcctgcctgcctggtgcggtggtgcctgcccacgggaacgggatagctggctgacggacgcattgcggagcggactgggagactacgggtaagataataaaagggccaggcgtggcggggcgcaaccaccgctgtgcctcggagaggaggacagctctcgcgccgcggctgccgccatgtggacgccgtcgcgcgggagcaacgcccggcgcagcggccaccgccgcatcgcggactacctggcggacgaccagaccaccaccacagccaccgacgcctccgacaacgagtcctacactaccgcctatggggaggagttcttcgccgccgccgccgccgggagcggcggcgccggcggcatgctgccggcattcctggcggaccagggggacctggtggaggtcatgctggagctggacgaggagtccatggtggtgcgcagcgtcacgcccaccagcgcggcgctctacggcgccgcctccctcccggcgccgccgtccgcgggggtcctcggggtgtcgccgtcgccgcgccgcgcgccttcggagggcggcggccgcctgagccggtgctcgtcgacgtcgtcgcggatacggaagaagttcgcgtggctccggtcgccgtcgccctccccgtccccgtaccgccccacgcccgccgagcttcagcgggaggccgccatggcggcgcgcgagcggcggcgggagcaggcgcagctcaaccggtcccgcgccggcgccaggcgcgcgctcaagggcctccgcttcatcagccgcaccacgggctccgtcgaggccgccgagctctggcgccgcgtcgaggagcgcttcaacgacctcgcccgcgaagggctgctctcccgcgacgacttcggcgaatgcatcggaatggtggactccaaggagttcgcggtgggcatcttcgacgcgctggcgcggcggcggcggcagaacctggagcggatcaccaaggaggagctctacgacttctggctccagatctccgatcagagcttcgacgcgcggctccagatcttcttcgacatggtggacaccaacgtggacgggaggataacgagggaggaagtacaggagctgatcgtgctcagcgcgtcggccaacaagctggcaaagctcaaggagcaggcggaggagtacgcgtcgctcatcatggaggagctcgacccggagaagcttggctacattgagctgtggcagctcgaagcgctgctgctccagcgcgacacctacatgaactacagccgcccgctgagcacggccagcggggcccagtggagccagaacctcggcgtcggcggcgcgctgacgataacagggggaggaggagacggcggctgcggcgtggacggcgaccacccggggcctccgcgcgagcgtcgccggagctggggcgtgcggaaggcggcggcgcgggtgcgcgtggcggcggaggagaactggcgccgcgcctgggtgctggcgttgtggttcgcggccatggcggcgctgttcgtgtggaagttcgtccagtaccggcgcatggcggcgttccaggtgatggggtactgcctccccacggccaagggcgccgcggagacgctcaagctcaacatggcgctcgtgctgctccccgtctgccgcaacacgctcacgtggctccgctcctcctgggcccgcttcttcgtccccttcgacgacaacatcaccttccacaagatgatcgcgacggcgatcgtggtggggatcacgctgcacgcggggaaccacctggcgtgcgacttcccgcgggtgatcgcggcgagcccggaggagtacgcgctcgtcgcgggcgcgttcggcgcggacaagccgacgtacgcggggctcctgtcgggcacggagggcgtgacgggcgtggccatggtggtgctgatgaccgtctccttcacgctggccacgcacccgttccgcaagggggagcccaagggcgcgggcgcggccgccggcacgtcgcggctcccggcgccactgaaccggctcaccggcttcaacgccttctggtactcgcaccacctcctcggcatcgtgtacgcgctcctgctcgcgcacggctacttcctcttcctcgtccggaggtggtacgagaagacgacatggatgtacatttcggtcccgctgctgctctacgtcggtgaaaggatgcttagagccttgaggtcaaatgcttataccgtgaaaattctcaaggtgtgtcttctacctggaaatgtgttgaccataacgatgtcaaagccctatggatttcgttacagaagtggacagtacatatttcttcaatgtccaataatttctccatttgaatggcatcctttctccatcacttcagcacctggagatgactacctcagtgtccacatccggacaaacggtgactggacacaggagctcaagcgcatatttgtggagaactacttctcgccgcatctcaacagaagagcttcgtttagcgagctagcttgccaaaattactcgtagatggtccctatggtgcccctgcgcaggattttagaaactacgacgttctacttctcgtcggcctcggaatcggggcaacaccgttcataagcattctacgggatctgcttaataacattaagatagctgacgagctgatggacttggcaatggagaccagcaggtctgaagacagcgccaacagctttagcgtctcaacggcgagtagcaaccggaagagagcatacagaacaagccgtgcacatttctactgggtcacccgagaagccggatcctttgaatggttcaaaggggtgatgaatgaggttgcagaaatggacaagaagggtatcatagagctgcacaattacctcactagcgtttacgaggaacgcgacgcacggacaactctgctgtccatggtccaggctctgaaccacgccaagcacggcgtcgatatcgtatcggggaccagggtgaggacgcatttcgccagacccaactggaaggaagtcttcaccaggatcgcctccaagcatccgaattcaacagttggtgtgttctactgcggcgcaccgacgcttgccaaggagctgaaggctctggcgcacgagatgagccacaggacgggcactcgcttccatttccacaaggagtacttctgagtttcgacggatagaatgggcagtcgatgctcgttctaacgtgatctggtcttttctgatctgatctcgatagcgttaggtaccggtaaagaagacagaattttgcacagatgcaagacaaaccaagctgacctctcctcctgatctggaactgtacatagcataaaagaagcaccacagggttagcttagtatacgtagcacaattcaaataaatatattgacaaagaaaagagagacagagaaagggcaggatagaggctgttgttgttaactcgaagatattgatgataggcatggcggtatacgtgtatacattatagttaggtgctaggtggtagttatatatatactgtatatgatatgggtcgatgaatatacgaggagccacatgctgctgccattctcaaatgtggacgtgcattcttcaggcgtgttc

SEQ ID NO: 65995 - DNA, 3769 bp, Zea Mays
caatagccaataggtagcggagcaccgcaccgcgaagcaaacgagaggggaaaaaaaagcacgaggaggccgcgcccgcgaaggaatcacttgcccgggcgtgggccgcccaccggccaccgcccagccgctgccgcagtgccgcccgcctgcctgcctgcctggtgcggtggtgcctgcccacgggaacgggatagctggctgacggacgcattgcggagcggactgggagactacgggtaagataataaaagggccaggcgtggcggggcgcaaccaccgctgtgcctcggagaggaggacagctctcgcgccgcggctgccgccatgtggacgccgtcgcgcgggagcaacgcccggcgcagcggccaccgccgcatcgcggactacctggcggacgaccagaccaccaccacagccaccgacgcctccgacaacgagtcctacactaccgcctatggggaggagttcttcgccgccgccgccgccgggagcggcggcgccggcggcatgctgccggcattcctggcggaccagggggacctggtggaggtcatgctggagctggacgaggagtccatggtggtgcgcagcgtcacgcccaccagcgcggcgctctacggcgccgcctccctcccggcgccgccgtccgcgggggtcctcggggtgtcgccgtcgccgcgccgcgcgccttcggagggcggcggccgcctgagccggtgctcgtcgacgtcgtcgcggatacggaagaagttcgcgtggctccggtcgccgtcgccctccccgtccccgtaccgccccacgcccgccgagcttcagcgggaggccgccatggcggcgcgcgagcggcggcgggagcaggcgcagctcaaccggtcccgcgccggcgccaggcgcgcgctcaagggcctccgcttcatcagccgcaccacgggctccgtcgaggccgccgagctctggcgccgcgtcgaggagcgcttcaacgacctcgcccgcgaagggctgctctcccgcgacgacttcggcgaatgcatcggaatggtggactccaaggagttcgcggtgggcatcttcgacgcgctggcgcggcggcggcggcagaacctggagcggatcaccaaggaggagctctacgacttctggctccagatctccgatcagagcttcgacgcgcggctccagatcttcttcgacatggtggacaccaacgtggacgggaggataacgagggaggaagtacaggagctgatcgtgctcagcgcgtcggccaacaagctggcaaagctcaaggagcaggcggaggagtacgcgtcgctcatcatggaggagctcgacccggagaagcttggctacattgagctgtggcagctcgaagcgctgctgctccagcgcgacacctacatgaactacagccgcccgctgagcacggccagcggggcccagtggagccagaacctcggcgtcggcggcgcgctgacgataacagggggaggaggagacggcggctgcggcgtggacggcgaccacccggggcctccgcgcgagcgtcgccggagctggggcgtgcggaaggcggcggcgcgggtgcgcgtggcggcggaggagaactggcgccgcgcctgggtgctggcgttgtggttcgcggccatggcggcgctgttcgtgtggaagttcgtccagtaccggcgcatggcggcgttccaggtgatggggtactgcctccccacggccaagggcgccgcggagacgctcaagctcaacatggcgctcgtgctgctccccgtctgccgcaacacgctcacgtggctccgctcctcctgggcccgcttcttcgtccccttcgacgacaacatcaccttccacaagatgatcgcgacggcgatcgtggtggggatcacgctgcacgcggggaaccacctggcgtgcgacttcccgcgggtgatcgcggcgagcccggaggagtacgcgctcgtcgcgggcgcgttcggcgcggacaagccgacgtacgcggggctcctgtcgggcacggagggcgtgacgggcgtggccatggtggtgctgatgaccgtctccttcacgctggccacgcacccgttccgcaagggggagcccaagggcgcgggcgcggccgccggcacgtcgcggctcccggcgccactgaaccggctcaccggcttcaacgccttctggtactcgcaccacctcctcggcatcgtgtacgcgctcctgctcgcgcacggctacttcctcttcctcgtccggaggtggtacgagaagacggtacacatggatgtacatttcggtcccgctgctgctctacgtcggtgaaaggatgcttagagccttgaggtcaaatgcttataccgtgaaaattctcaaggtgtgtcttctacctggaaatgtgttgaccataacgatgtcaaagccctatggatttcgttacagaagtggacagtacatatttcttcaatgtccaataatttctccatttgaatggcatcctttctccatcacttcagcacctggagatgactacctcagtgtccacatccggacaaacggtgactggacacaggagctcaagcgcatatttgtggagaactacttctcgccgcatctcaacagaagagcttcgtttagcgagctaggtgcggcagaaccaagaagcttgccaaaattactcgtagatggtccctatggtgcccctgcgcaggattttagaaactacgacgttctacttctcgtcggcctcggaatcggggcaacaccgttcataagcattctacgggatctgcttaataacattaagatagctgacgagctgatggacttggcaatggagaccagcaggtctgaagacagcgccaacagctttagcgtctcaacggcgagtagcaaccggaagagagcatacagaacaagccgtgcacatttctactgggtcacccgagaagccggatcctttgaatggttcaaaggggtgatgaatgaggttgcagaaatggacaagaagggtatcatagagctgcacaattacctcactagcgtttacgaggaacgcgacgcacggacaactctgctgtccatggtccaggctctgaaccacgccaagcacggcgtcgatatcgtatcggggaccagggtgaggacgcatttcgccagacccaactggaaggaagtcttcaccaggatcgcctccaagcatccgaattcaacagttggtgtgttctactgcggcgcaccgacgcttgccaaggagctgaaggctctggcgcacgagatgagccacaggacgggcactcgcttccatttccacaaggagtacttctgagtttcgacggatagaatgggcagtcgatgctcgttctaacgtgatctggtcttttctgatctgatctcgatagcgttaggtaccggtaaagaagacagaattttgcacagatgcaagacaaaccaagctgacctctcctcctgatctggaactgtacatagcataaaagaagcaccacagggttagcttagtatacgtagcacaattcaaataaatatattgacaaagaaaagagagacagagaaagggcaggatagaggctgttgttgttaactcgaagatattgatgataggcatggcggtatacgtgtatacattatagttaggtgctaggtggtagttatatatatactgtatatgatatgggtcgatgaatatacgaggagccacatgctgctgccattctcaaatgtggacgtgcattcttcaggcgtgttc

SEQ ID NO: 65996 - DNA, 1591 bp, Zea Mays
cttgtgacttctcgtgcaattcggattcgtgcgtggcgcgggcctcacgcgctgctcgccggttaccttttttttttctccttggcgtggtgctgcagtgggagccttgtggcggcgggcgagagacatggatgtacatttcggtcccgctgctgctctacgtcggtgaaaggatgcttagagccttgaggtcaaatgcttataccgtgaaaattctcaaggtgtgtcttctacctggaaatgtgttgaccataacgatgtcaaagccctatggatttcgttacagaagtggacagtacatatttcttcaatgtccaataatttctccatttgaatggcatcctttctccatcacttcagcacctggagatgactacctcagtgtccacatccggacaaacggtgactggacacaggagctcaagcgcatatttgtggagaactacttctcgccgcatctcaacagaagagcttcgtttagcgagctagcttgccaaaattactcgtagatggtccctatggtgcccctgcgcaggattttagaaactacgacgttctacttctcgtcggcctcggaatcggggcaacaccgttcataagcattctacgggatctgcttaataacattaagatagctgacgagctgatggacttggcaatggagaccagcaggtctgaagacagcgccaacagctttagcgtctcaacggcgagtagcaaccggaagagagcatacagaacaagccgtgcacatttctactgggtcacccgagaagccggatcctttgaatggttcaaaggggtgatgaatgaggttgcagaaatggacaagaagggtatcatagagctgcacaattacctcactagcgtttacgaggaacgcgacgcacggacaactctgctgtccatggtccaggctctgaaccacgccaagcacggcgtcgatatcgtatcggggaccagggtgaggacgcatttcgccagacccaactggaaggaagtcttcaccaggatcgcctccaagcatccgaattcaacagttggtgtgttctactgcggcgcaccgacgcttgccaaggagctgaaggctctggcgcacgagatgagccacaggacgggcactcgcttccatttccacaaggagtacttctgagtttcgacggatagaatgggcagtcgatgctcgttctaacgtgatctggtcttttctgatctgatctcgatagcgttaggtaccggtaaagaagacagaattttgcacagatgcaagacaaaccaagctgacctctcctcctgatctggaactgtacatagcataaaagaagcaccacagggttagcttagtatacgtagcacaattcaaataaatatattgacaaagaaaagagagacagagaaagggcaggatagaggctgttgttgttaactcgaagatattgatgataggcatggcggtatacgtgtatacattatagttaggtgctaggtggtagttatatatatactgtatatgatatgggtcgatgaatatacgaggagccacatgctgctgccattctcaaatgtggacgtgcattcttcaggcgtgttc

SEQ ID NO: 65997 - DNA, 1791 bp, Zea Mays
gccagccacgcggcctcaggcgagtgggctgggctcgttgttcggactctcacttcctgtgtgctctcgtcgcctccgatcgaatcgtgtcgggcgggctcgtgcccgatcttgtctggtcctgtcttggctccccgccaggaatagcgcaccgagatcccttgcgcgcacggaccagcagatcgcgcgcgggagtgagagggcgacagggcgtggccgcgaggtgggcatgggatcggagggacgggtctggaatggcgcgggcgtggccgccggcagcggctatggcggcagcgtcgaggcgaaagcgaccaccgcggcgcccgcggacgttcccacgtcggcggcctccgtcgacatctcgctgccgctcccggagatgtcgcctcacatcataggtctctgcaaggagttggtcaaagggtggtcgtcgattgacagctcgcgcttctccatcgagaccgtgtctgggggcatcaccaatctattgctcaaggtttctgtcaaaggaaacaatggcaatgattcttctgttactgttcggttgtatggaccaaatacagacttggtgattgatcggaaaagggaattgcagctgcagggttcggggctcggctgcttggaatgtttgaaaatggagtagttcagtcattcatctatgctcgaacactgtcacctgcagacatgaaagaacctaaaatagcagctgaaattgccaaggagctacgcaaatttcatcaagtagatataccagggtctaaagaaccacaattgtggaatgatatattcaagtttttgaagaaagctgcagcattgaagtttgaggataacgagcagcaaaagagatatgtaaagatctcatttacagaaatacaagatgaagttaaagaacttaaggatctcttggacattctgcatgcacctgtggtttatgcacacaatgacttgctttcaggaaatctgatgctcaatgatttggaagggaagctatattttattgattttgagtatgggtcatacagctaccgtgggtatgacattgcaaatcatttcaatgagtatgcaggatttgactgtgactttaatttgtacccagataaagatgcccagtatcacttcttcaggaattatctgcatcctgatagacctagtgaggcacaagatatggaagtgctttatgtggaaacaaacactttcagactagcatcgcacatttactgggcattatgggctcttattcaggcaaaggtatccccaattgactttgactatcttggatacttcttcttacggtatggtgagtacaagaaacaaagggactcctgcttcgccttggcacaaagtttcctctccgggctaagaaatggctagagcctgagaatctggtcaagggtttgcactgttgtacgcatactcggggcgggtacgcgttgtgatcatcgtctgctactcagaaactctattatagtggtggtagcagcctcattttgttgtatctgatggtagtttcgtcatcgcctgataggaaagtctcatgatcgccctcgggaacgcagggtggcgagatctgtacttatatttgtaataaacacaatccggatgggttctgtcctgtgcaatttgttgtgcgcataagcattccgtgtttttatacattattgtgaggaattgcataagtttttttgtttttcgattaaatcatatattgtttttcatgactgggtagtccttcggattgtgcgtacatacaacggatacaacggataaggatcacgatcaactagtatctct

SEQ ID NO: 65998 - DNA, 1676 bp, Zea Mays
ctgggctcgttgttcggactctcacttcctgtgtgctctcgtcgcctccgatcgaatcgtgtcgggcgggctcgtgcccgatcttgtctggtcctgtcttggctccccgccaggaatagcgcaccgagatcccttgcgcgcacggaccagcagatcgcgcgcgggagtgagagggcgacagggcgtggccgcgaggtgggcatgggatcggagggacgggtctggaatggcgcgggcgtggccgccggcagcggctatggcggcagcgtcgaggcgaaagcgaccaccgcggcgcccgcggacgttcccacgtcggcggcctccgtcgacatctcgctgccgctcccggagatgtcgcctcacatcataggtctctgcaaggagttggtcaaagggtggtcgtcgattgacagctcgcgcttctccatcgagaccgtgtctgggggcatcaccaatctattgctcaaggtttctgtcaaaggaaacaatggcaatgattcttctgttactgttcggttgtatggaccaaatacagacttggtgattgatcggaaaagggaattgcagacatgaaagaacctaaaatagcagctgaaattgccaaggagctacgcaaatttcatcaagtagatataccagggtctaaagaaccacaattgtggaatgatatattcaagtttttgaagaaagctgcagcattgaagtttgaggataacgagcagcaaaagagatatgtaaagatctcatttacagaaatacaagatgaagttaaagaacttaaggatctcttggacattctgcatgcacctgtggtttatgcacacaatgacttgctttcaggaaatctgatgctcaatgatttggaagggaagctatattttattgattttgagtatgggtcatacagctaccgtgggtatgacattgcaaatcatttcaatgagtatgcaggatttgactgtgactttaatttgtacccagataaagatgcccagtatcacttcttcaggaattatctgcatcctgatagacctagtgaggcacaagatatggaagtgctttatgtggaaacaaacactttcagactagcatcgcacatttactgggcattatgggctcttattcaggcaaaggtatccccaattgactttgactatcttggatacttcttcttacggtatggtgagtacaagaaacaaagggactcctgcttcgccttggcacaaagtttcctctccgggctaagaaatggctagagcctgagaatctggtcaagggtttgcactgttgtacgcatactcggggcgggtacgcgttgtgatcatcgtctgctactcagaaactctattatagtggtggtagcagcctcattttgttgtatctgatggtagtttcgtcatcgcctgataggaaagtctcatgatcgccctcgggaacgcagggtggcgagatctgtacttatatttgtaataaacacaatccggatgggttctgtcctgtgcaatttgttgtgcgcataagcattccgtgtttttatacattattgtgaggaattgcataagtttttttgtttttcgattaaatcatatattgtttttcatgactgggtagtccttcggattgtgcgtacatacaacggatacaacggataaggatcacgatcaactagtatctct

SEQ ID NO: 65999 - DNA, 1756 bp, Zea Mays
cgttgttcggactctcacttcctgtgtgctctcgtcgcctccgatcgaatcgtgtcgggcgggctcgtgcccgatcttgtctggtcctgtcttggctccccgccaggaatagcgcaccgagatcccttgcgcgcacggaccagcagatcgcgcgcgggagtgagagggcgacagggcgtggccgcgaggtgggcatgggatcggagggacgggtctggaatggcgcgggcgtggccgccggcagcggctatggcggcagcgtcgaggcgaaagcgaccaccgcggcgcccgcggacgttcccacgtcggcggcctccgtcgacatctcgctgccgctcccggagatgtcgcctcacatcataggtctctgcaaggagttggtcaaagggtggtcgtcgattgacagctcgcgcttctccatcgagaccgtgtctgggggcatcaccaatctattgctcaaggtttctgtcaaaggaaacaatggcaatgattcttctgttactgttcggttgtatggaccaaatacagacttggtgattgatcggaaaagggaattgcagggttcggggctcggctgcttggaatgtttgaaaatggagtagttcagtcattcatctatgctcgaacactgtcacctgcagacatgaaagaacctaaaatagcagctgaaattgccaaggagctacgcaaatttcatcaagtagatataccagggtctaaagaaccacaattgtggaatgatatattcaagtttttgaagaaagctgcagcattgaagtttgaggataacgagcagcaaaagagatatgtaaagatctcatttacagaaatacaagatgaagttaaagaacttaaggatctcttggacattctgcatgcacctgtggtttatgcacacaatgacttgctttcaggaaatctgatgctcaatgatttggaagggaagctatattttattgattttgagtatgggtcatacagctaccgtgggtatgacattgcaaatcatttcaatgagtatgcaggatttgactgtgactttaatttgtacccagataaagatgcccagtatcacttcttcaggaattatctgcatcctgatagacctagtgaggtgcaggcacaagatatggaagtgctttatgtggaaacaaacactttcagactagcatcgcacatttactgggcattatgggctcttattcaggcaaaggtatccccaattgactttgactatcttggatacttcttcttacggtatggtgagtacaagaaacaaagggactcctgcttcgccttggcacaaagtttcctctccgggctaagaaatggctagagcctgagaatctggtcaagggtttgcactgttgtacgcatactcggggcgggtacgcgttgtgatcatcgtctgctactcagaaactctattatagtggtggtagcagcctcattttgttgtatctgatggtagtttcgtcatcgcctgataggaaagtctcatgatcgccctcgggaacgcagggtggcgagatctgtacttatatttgtaataaacacaatccggatgggttctgtcctgtgcaatttgttgtgcgcataagcattccgtgtttttatacattattgtgaggaattgcataagtttttttgtttttcgattaaatcatatattgtttttcatgactgggtagtccttcggattgtgcgtacatacaacggatacaacggataaggatcacgatcaactagtatctct

SEQ ID NO: 66000 - DNA, 1768 bp, Zea Mays
cggactctcacttcctgtgtgctctcgtcgcctccgatcgaatcgtgtcgggcgggctcgtgcccgatcttgtctggtcctgtcttggctccccgccaggaatagcgcaccgagatcccttgcgcgcacggaccagcagatcgcgcgcgggagtgagagggcgacagggcgtggccgcgaggtgggcatgggatcggagggacgggtctggaatggcgcgggcgtggccgccggcagcggctatggcggcagcgtcgaggcgaaagcgaccaccgcggcgcccgcggacgttcccacgtcggcggcctccgtcgacatctcgctgccgctcccggagatgtcgcctcacatcataggtctctgcaaggagttggtcaaagggtggtcgtcgattgacagctcgcgcttctccatcgagaccgtgtctgggggcatcaccaatctattgctcaaggtttctgtcaaaggaaacaatggcaatgattcttctgttactgttcggttgtatggaccaaatacagacttggtgattgatcggaaaagggaattgcaggcgataccgtatctctcagctgcagggttcggggctcggctgcttggaatgtttgaaaatggagtagttcagtcattcatctatgctcgaacactgtcacctgcagacatgaaagaacctaaaatagcagctgaaattgccaaggagctacgcaaatttcatcaagtagatataccagggtctaaagaaccacaattgtggaatgatatattcaagtttttgaagaaagctgcagcattgaagtttgaggataacgagcagcaaaagagatatgtaaagatctcatttacagaaatacaagatgaagttaaagaacttaaggatctcttggacattctgcatgcacctgtggtttatgcacacaatgacttgctttcaggaaatctgatgctcaatgatttggaagggaagctatattttattgattttgagtatgggtcatacagctaccgtgggtatgacattgcaaatcatttcaatgagtatgcaggatttgactgtgactttaatttgtacccagataaagatgcccagtatcacttcttcaggaattatctgcatcctgatagacctagtgaggcacaagatatggaagtgctttatgtggaaacaaacactttcagactagcatcgcacatttactgggcattatgggctcttattcaggcaaaggtatccccaattgactttgactatcttggatacttcttcttacggtatggtgagtacaagaaacaaagggactcctgcttcgccttggcacaaagtttcctctccgggctaagaaatggctagagcctgagaatctggtcaagggtttgcactgttgtacgcatactcggggcgggtacgcgttgtgatcatcgtctgctactcagaaactctattatagtggtggtagcagcctcattttgttgtatctgatggtagtttcgtcatcgcctgataggaaagtctcatgatcgccctcgggaacgcagggtggcgagatctgtacttatatttgtaataaacacaatccggatgggttctgtcctgtgcaatttgttgtgcgcataagcattccgtgtttttatacattattgtgaggaattgcataagtttttttgtttttcgattaaatcatatattgtttttcatgactgggtagtccttcggattgtgcgtacatacaacggatacaacggataaggatcacgatcaactagtatctct

SEQ ID NO: 66001 - DNA, 1679 bp, Zea Mays
gactctcacttcctgtgtgctctcgtcgcctccgatcgaatcgtgtcgggcgggctcgtgcccgatcttgtctggtcctgtcttggctccccgccaggaatagcgcaccgagatcccttgcgcgcacggaccagcagatcgcgcgcgggagtgagagggcgacagggcgtggccgcgaggtgggcatgggatcggagggacgggtctggaatggcgcgggcgtggccgccggcagcggctatggcggcagcgtcgaggcgaaagcgaccaccgcggcgcccgcggacgttcccacgtcggcggcctccgtcgacatctcgctgccgctcccggagatgtcgcctcacatcataggtctctgcaaggagttggtcaaagggtggtcgtcgattgacagctcgcgcttctccatcgagaccgtgtctgggggcatcaccaatctattgctcaaggtttctgtcaaaggaaacaatggcaatgattcttctgttactgttcggttgtatggaccaaatacagacttggtgattgatcggaaaagggaattgcagacatgaaagaacctaaaatagcagctgaaattgccaaggagctacgcaaatttcatcaagtagatataccagggtctaaagaaccacaattgtggaatgatatattcaagtttttgaagaaagctgcagcattgaagtttgaggataacgagcagcaaaagagatatgtaaagatctcatttacagaaatacaagatgaagttaaagaacttaaggatctcttggacattctgcatgcacctgtggtttatgcacacaatgacttgctttcaggaaatctgatgctcaatgatttggaagggaagctatattttattgattttgagtatgggtcatacagctaccgtgggtatgacattgcaaatcatttcaatgagtatgcaggatttgactgtgactttaatttgtacccagataaagatgcccagtatcacttcttcaggaattatctgcatcctgatagacctagtgaggtgcaggcacaagatatggaagtgctttatgtggaaacaaacactttcagactagcatcgcacatttactgggcattatgggctcttattcagcacttgaatgcaggcaaaggtatccccaattgactttgactatcttggatacttcttcttacggtatggtgagtacaagaaacaaagggactcctgcttcgccttggcacaaagtttcctctccgggctaagaaatggctagagcctgagaatctggtcaagggtttgcactgttgtacgcatactcggggcgggtacgcgttgtgatcatcgtctgctactcagaaactctattatagtggtggtagcagcctcattttgttgtatctgatggtagtttcgtcatcgcctgataggaaagtctcatgatcgccctcgggaacgcagggtggcgagatctgtacttatatttgtaataaacacaatccggatgggttctgtcctgtgcaatttgttgtgcgcataagcattccgtgtttttatacattattgtgaggaattgcataagtttttttgtttttcgattaaatcatatattgtttttcatgactgggtagtccttcggattgtgcgtacatacaacggatacaacggataaggatcacgatcaactagtatctct

SEQ ID NO: 66002 - DNA, 1764 bp, Zea Mays
gactctcacttcctgtgtgctctcgtcgcctccgatcgaatcgtgtcgggcgggctcgtgcccgatcttgtctggtcctgtcttggctccccgccaggaatagcgcaccgagatcccttgcgcgcacggaccagcagatcgcgcgcgggagtgagagggcgacagggcgtggccgcgaggtgggcatgggatcggagggacgggtctggaatggcgcgggcgtggccgccggcagcggctatggcggcagcgtcgaggcgaaagcgaccaccgcggcgcccgcggacgttcccacgtcggcggcctccgtcgacatctcgctgccgctcccggagatgtcgcctcacatcataggtctctgcaaggagttggtcaaagggtggtcgtcgattgacagctcgcgcttctccatcgagaccgtgtctgggggcatcaccaatctattgctcaaggtttctgtcaaaggaaacaatggcaatgattcttctgttactgttcggttgtatggaccaaatacagacttggtgattgatcggaaaagggaattgcaggcgataccgtatctctcagctgcagggttcggggctcggctgcttggaatgtttgaaaatggagtagttcagtcattcatctatgctcgaacactgtcacctgcagacatgaaagaacctaaaatagcagctgaaattgccaaggagctacgcaaatttcatcaagtagatataccagggtctaaagaaccacaattgtggaatgatatattcaagtttttgaagaaagctgcagcattgaagtttgaggataacgagcagcaaaagagatatgtaaagatctcatttacagaaatacaagatgaagttaaagaacttaaggatctcttggacattctgcatgcacctgtggtttatgcacacaatgacttgctttcaggaaatctgatgctcaatgatttggaagggaagctatattttattgattttgagtatgggtcatacagctaccgtgggtatgacattgcaaatcatttcaatgagtatgcaggatttgactgtgactttaatttataaagatgcccagtatcacttcttcaggaattatctgcatcctgatagacctagtgaggtgcaggcacaagatatggaagtgctttatgtggaaacaaacactttcagactagcatcgcacatttactgggcattatgggctcttattcaggcaaaggtatccccaattgactttgactatcttggatacttcttcttacggtatggtgagtacaagaaacaaagggactcctgcttcgccttggcacaaagtttcctctccgggctaagaaatggctagagcctgagaatctggtcaagggtttgcactgttgtacgcatactcggggcgggtacgcgttgtgatcatcgtctgctactcagaaactctattatagtggtggtagcagcctcattttgttgtatctgatggtagtttcgtcatcgcctgataggaaagtctcatgatcgccctcgggaacgcagggtggcgagatctgtacttatatttgtaataaacacaatccggatgggttctgtcctgtgcaatttgttgtgcgcataagcattccgtgtttttatacattattgtgaggaattgcataagtttttttgtttttcgattaaatcatatattgtttttcatgactgggtagtccttcggattgtgcgtacatacaacggatacaacggataaggatcacgatcaactagtatctct

SEQ ID NO: 66003 - DNA, 1760 bp, Zea Mays
gactctcacttcctgtgtgctctcgtcgcctccgatcgaatcgtgtcgggcgggctcgtgcccgatcttgtctggtcctgtcttggctccccgccaggaatagcgcaccgagatcccttgcgcgcacggaccagcagatcgcgcgcgggagtgagagggcgacagggcgtggccgcgaggtgggcatgggatcggagggacgggtctggaatggcgcgggcgtggccgccggcagcggctatggcggcagcgtcgaggcgaaagcgaccaccgcggcgcccgcggacgttcccacgtcggcggcctccgtcgacatctcgctgccgctcccggagatgtcgcctcacatcataggtctctgcaaggagttggtcaaagggtggtcgtcgattgacagctcgcgcttctccatcgagaccgtgtctgggggcatcaccaatctattgctcaaggtttctgtcaaaggaaacaatggcaatgattcttctgttactgttcggttgtatggaccaaatacagacttggtgattgatcggaaaagggaattgcaggcgataccgtatctctcagctgcagggttcggggctcggctgcttggaatgtttgaaaatggagtagttcagtcattcatctatgctcgaacactgtcacctgcagacatgaaagaacctaaaatagcagctgaaattgccaaggagctacgcaaatttcatcaagtagatataccagggtctaaagaaccacaattgtggaatgatatattcaagtttttgaagaaagcattgaagtttgaggataacgagcagcaaaagagatatgtaaagatctcatttacagaaatacaagatgaagttaaagaacttaaggatctcttggacattctgcatgcacctgtggtttatgcacacaatgacttgctttcaggaaatctgatgctcaatgatttggaagggaagctatattttattgattttgagtatgggtcatacagctaccgtgggtatgacattgcaaatcatttcaatgagtatgcaggatttgactgtgactttaatttgtacccagataaagatgcccagtatcacttcttcaggaattatctgcatcctgatagacctagtgaggcacaagatatggaagtgctttatgtggaaacaaacactttcagactagcatcgcacatttactgggcattatgggctcttattcaggcaaaggtatccccaattgactttgactatcttggatacttcttcttacggtatggtgagtacaagaaacaaagggactcctgcttcgccttggcacaaagtttcctctccgggctaagaaatggctagagcctgagaatctggtcaagggtttgcactgttgtacgcatactcggggcgggtacgcgttgtgatcatcgtctgctactcagaaactctattatagtggtggtagcagcctcattttgttgtatctgatggtagtttcgtcatcgcctgataggaaagtctcatgatcgccctcgggaacgcagggtggcgagatctgtacttatatttgtaataaacacaatccggatgggttctgtcctgtgcaatttgttgtgcgcataagcattccgtgtttttatacattattgtgaggaattgcataagtttttttgtttttcgattaaatcatatattgtttttcatgactgggtagtccttcggattgtgcgtacatacaacggatacaacggataaggatcacgatcaactagtatctct

SEQ ID NO: 66004 - DNA, 1781 bp, Zea Mays
gactctcacttcctgtgtgctctcgtcgcctccgatcgaatcgtgtcgggcgggctcgtgcccgatcttgtctggtcctgtcttggctccccgccaggaatagcgcaccgagatcccttgcgcgcacggaccagcagatcgcgcgcgggagtgagagggcgacagggcgtggccgcgaggtgggcatgggatcggagggacgggtctggaatggcgcgggcgtggccgccggcagcggctatggcggcagcgtcgaggcgaaagcgaccaccgcggcgcccgcggacgttcccacgtcggcggcctccgtcgacatctcgctgccgctcccggagatgtcgcctcacatcataggtctctgcaaggagttggtcaaagggtggtcgtcgattgacagctcgcgcttctccatcgagaccgtgtctgggggcatcaccaatctattgctcaaggtttctgtcaaaggaaacaatggcaatgattcttctgttactgttcggttgtatggaccaaatacagacttggtgattgatcggaaaagggaattgcaggcgataccgtatctctcagctgcagggttcggggctcggctgcttggaatgtttgaaaatggagtagttcagtcattcatctatgctcgaacactgtcacctgcagacatgaaagaacctaaaatagcagctgaaattgccaaggagctacgcaaatttcatcaagtagatataccagggtctaaagaaccacaattgtggaatgatatattcaagtttttgaagaaagctgcagcattgaagtttgaggataacgagcagcaaaagagatatgtaaagatctcatttacagaaatacaagatgaagttaaagaacttaaggatctcttggacattctgcatgcacctgtggtttatgcacacaatgacttgctttcaggaaatctgatgctcaatgatttggaagggaagctatattttattgattttgagtatgggtcatacagctaccgtgggtatgacattgcaaatcatttcaatgagtatgcaggatttgactgtgactttaatttgtacccagataaagatgcccagtatcacttcttcaggaattatctgcatcctgatagacctagtgaggtgcaggcacaagatatggaagtgctttatgtggaaacaaacactttcagactagcatcgcacatttactgggcattatgggctcttattcaggtgagcaaggcaaaggtatccccaattgactttgactatcttggatacttcttcttacggtatggtgagtacaagaaacaaagggactcctgcttcgccttggcacaaagtttcctctccgggctaagaaatggctagagcctgagaatctggtcaagggtttgcactgttgtacgcatactcggggcgggtacgcgttgtgatcatcgtctgctactcagaaactctattatagtggtggtagcagcctcattttgttgtatctgatggtagtttcgtcatcgcctgataggaaagtctcatgatcgccctcgggaacgcagggtggcgagatctgtacttatatttgtaataaacacaatccggatgggttctgtcctgtgcaatttgttgtgcgcataagcattccgtgtttttatacattattgtgaggaattgcataagtttttttgtttttcgattaaatcatatattgtttttcatgactgggtagtccttcggattgtgcgtacatacaacggatacaacggataaggatcacgatcaactagtatctct

SEQ ID NO: 66005 - DNA, 1673 bp, Zea Mays
gactctcacttcctgtgtgctctcgtcgcctccgatcgaatcgtgtcgggcgggctcgtgcccgatcttgtctggtcctgtcttggctccccgccaggaatagcgcaccgagatcccttgcgcgcacggaccagcagatcgcgcgcgggagtgagagggcgacagggcgtggccgcgaggtgggcatgggatcggagggacgggtctggaatggcgcgggcgtggccgccggcagcggctatggcggcagcgtcgaggcgaaagcgaccaccgcggcgcccgcggacgttcccacgtcggcggcctccgtcgacatctcgctgccgctcccggagatgtcgcctcacatcataggtctctgcaaggagttggtcaaagggtggtcgtcgattgacagctcgcgcttctccatcgagaccgtgtctgggggcatcaccaatctattgctcaaggtttctgtcaaaggaaacaatggcaatgattcttctgttactgttcggttgtatggaccaaatacagacttggtgattgatcggaaaagggaattgcagacatgaaagaacctaaaatagcagctgaaattgccaaggagctacgcaaatttcatcaagtagatataccagggtctaaagaaccacaattgtggaatgatatattcaagtttttgaagaaagctgcagcattgaagtttgaggataacgagcagcaaaagagatatgtaaagatctcatttacagaaatacaagatgaagttaaagaacttaaggatctcttggacattctgcatgcacctgtggtttatgcacacaatgacttgctttcaggaaatctgatgctcaatgatttggaagggaagctatattttattgattttgagtatgggtcatacagctaccgtgggtatgacattgcaaatcatttcaatgagtatgcaggatttgactgtgactttaatttgtacccagataaagatgcccagtatcacttcttcaggaattatctgcatcctgatagacctagtgaggcacaagatatggaagtgctttatgtggaaacaaacactttcagactagcatcgcacatttactgggcattatgggctcttattcagcacttgaatgcaggcaaaggtatccccaattgactttgactatcttggatacttcttcttacggtatggtgagtacaagaaacaaagggactcctgcttcgccttggcacaaagtttcctctccgggctaagaaatggctagagcctgagaatctggtcaagggtttgcactgttgtacgcatactcggggcgggtacgcgttgtgatcatcgtctgctactcagaaactctattatagtggtggtagcagcctcattttgttgtatctgatggtagtttcgtcatcgcctgataggaaagtctcatgatcgccctcgggaacgcagggtggcgagatctgtacttatatttgtaataaacacaatccggatgggttctgtcctgtgcaatttgttgtgcgcataagcattccgtgtttttatacattattgtgaggaattgcataagtttttttgtttttcgattaaatcatatattgtttttcatgactgggtagtccttcggattgtgcgtacatacaacggatacaacggataaggatcacgatcaactagtatctct

SEQ ID NO: 66006 - DNA, 2393 bp, Zea Mays
cacagtcaccgagcgccaagaagaacgctctgcccggcccgccgtggcgagtccatccaacggccccgagaagctgaactgaccggccaccgcccagggtcagctcggtcattccgccgccgctgtcgtggtcgtggttccgcgccaactcaactccacggccgcggcgctagcatccactcaccatcgtcactcgccgccgctggcaccaccctccacgccccgtccgcactttttaaaactacgacccagctgccgaatcaaccgcctcccccggcgagcgcctccttcctctctcccatgggcccccgcgcccgagccgggaccgcttcgcccaccggccggtgcgcgcgccatagatagattccacaagcttcgcgaccagatccgatgctggaggccaccgccgccgcctcctccccccgcgccgcggccgcggcagtcgccgccggggcggccgccgccgcggtcgtttcctccccgcggcggggtggaggctccgcgcacaaccaccggcggtgggccccggccccgttcagggcttgcctgctcgcgctctggttgctgggcttcgcgctcgtcttcctgtggcagagcacctccgtgggccgcgtgcggctctacacgcgcccgccgatgccgaagcgcgccgtggcgtcgttggggcactgggcggcctccccgcccgtctacgatctgagggagttcggggcggtcggggacgggcggacggttaacacggccgcgttcgagtctgccatcgcggcgatcgccgagaggggcgggggcaggctcaccgtgccagccgggcggtggctcaccgcgccgttcaacctcaccagccacatgactctcttcctcgctgctggcgctgagatcctagggattcaggatgaaagatattggcccttgatgtctccattaccatcatacggctatggaagagagcacaagggacctcgatatgggagccttatacacggccaagacctgaagcatgtgactataacagtgggctcctctgcaaaataggtcataatggtactataaatggacaaggtcaaagttggtgggtaaaatttcggagaaagctccttaatcacacaaggggtcctctggtgcagctcatgcggtcaagtaacattatcatttctaatatcactcttcgtgattctcccttctggactcttcacacgtacgactgcaagaatgttactatctcagaaaccaccatcttggctccaattgctggagctccaaatactgatgggatagatccagattcttgtgaaaatgtggtgataaaaaactgctacatttctgttggtgatgatgggatagccataaagagtggttgggaccaatatggaattgcttatggccgtccatcagctaatattactatccagaatgtcgtaatccgctctatggtcagtgctggagtatcgattggaagcgagatgtctggtggtgtctcggatgttttggtagagaatgttcatgtctgggattcacggcgaggcgtgaggataaagactgcacctggaagaggggcctatgtaaccaatgtcatttaccagaacataacctttgaaaacgtacgtgtcggtatagtgataaagacagactacaacgagcacccagacgaaggcttcgacccaaaggccgtccccaccatcgggaatatctcttacacctcaatccatgggcatcgtgtgcgagtaccggtcaggatacagggaagcgcgcagatccctgtgaagaatgttaccttccatgacatgtcaatcggtatagtagacaagaagcaccatgttttccagtgctccttcgtccaggggcaggtcattggctacgttttccctgtgccttgcaagaacctggacctgtacgacgagcggcgtgggctggttaaacaatcaacgttacagaatatctctgatatcgactacagtttctgacaatggcatttgataccactgtactattgctgtaggtgtattcagtattcacagccgtcacagtcctttccacacatttagaagcaaaattttgggtagcttttacactcttcacctcacagtcaggcatgtatctaaggaagatcgacttgaccatactgtctcgtagagggacgccaggaatgttgccttttcacttttttgatcactgtatgattacacttacttggttacacagtcgacagtacacttttgatagtgcttactgttcatggcagactacatttaccttgccctttttaaaacagatgtggatgtatatgtatttggtagtttgaacctggaatggttggttcttcttccaagttgtcttcatatgaagctgggtttgtcgagacaacttcaaaagaagtgggtattcatgatgtgaag

SEQ ID NO: 66007 - DNA, 2357 bp, Zea Mays
ccgagcgccaagaagaacgctctgcccggcccgccgtggcgagtccatccaacggccccgagaagctgaactgaccggccaccgcccagggtcagctcggtcattccgccgccgctgtcgtggtcgtggttccgcgccaactcaactccacggccgcggcgctagcatccactcaccatcgtcactcgccgccgctggcaccaccctccacgccccgtccgcactttttaaaactacgacccagctgccgaatcaaccgcctcccccggcgagcgcctccttcctctctcccatgggcccccgcgcccgagccgggaccgcttcgcccaccggccggtgcgcgcgccatagatagattccacaagcttcgcgaccagatccgatgctggaggccaccgccgccgcctcctccccccgcgccgcggccgcggcagtcgccgccggggcggccgccgccgcggtcgtttcctccccgcggcggggtggaggctccgcgcacaaccaccggcggtgggccccggccccgttcagggcttgcctgctcgcgctctggttgctgggcttcgcgctcgtcttcctgtggcagagcacctccgtgggccgcgtgcggctctacacgcgcccgccgatgccgaagcgcgccgtggcgtcgttggggcactgggcggcctccccgcccgtctacgatctgagggagttcggggcggtcggggacgggcggacggttaacacggccgcgttcgagtctgccatcgcggcgatcgccgagaggggcgggggcaggctcaccgtgccagccgggcggtggctcaccgcgccgttcaacctcaccagccacatgactctcttcctcgctgctggcgctgagatcctagggattcagatattggcccttgatgtctccattaccatcatacggctatggaagagagcacaagggacctcgatatgggagccttatacacggccaagacctgaagcatgtgactataacaggtcataatggtactataaatggacaaggtcaaagttggtgggtaaaatttcggagaaagctccttaatcacacaaggggtcctctggtgcagctcatgcggtcaagtaacattatcatttctaatatcactcttcgtgattctcccttctggactcttcacacgtacgactgcaagaatgttactatctcagaaaccaccatcttggctccaattgctggagctccaaatactgatgggatagatccagattcttgtgaaaatgtggtgataaaaaactgctacatttctgttggtgatgatgggatagccataaagagtggttgggaccaatatggaattgcttatggccgtccatcagctaatattactatccagaatgtcgtaatccgctctatggtcagtgctggagtatcgattggaagcgagatgtctggtggtgtctcggatgttttggtagagaatgttcatgtctgggattcacggcgaggcgtgaggataaagactgcacctggaagaggggcctatgtaaccaatgtcatttaccagaacataacctttgaaaacgtacgtgtcggtatagtgataaagacagactacaacgagcacccagacgaaggcttcgacccaaaggccgtccccaccatcgggaatatctcttacacctcaatccatgggcatcgtgtgcgagtaccggtcaggatacagggaagcgcgcagatccctgtgaagaatgttaccttccatgacatgtcaatcggtatagtagacaagaagcaccatgttttccagtgctccttcgtccaggggcaggtcattggctacgttttccctgtgccttgcaagaacctggacctgtacgacgagcggcgtgggctggttaaacaatcaacgttacagaatatctctgatatcgactacagtttctgacaatggcatttgataccactgtactattgctgtaggtgtattcagtattcacagccgtcacagtcctttccacacatttagaagcaaaattttgggtagcttttacactcttcacctcacagtcaggcatgtatctaaggaagatcgacttgaccatactgtctcgtagagggacgccaggaatgttgccttttcacttttttgatcactgtatgattacacttacttggttacacagtcgacagtacacttttgatagtgcttactgttcatggcagactacatttaccttgccctttttaaaacagatgtggatgtatatgtatttggtagtttgaacctggaatggttggttcttcttccaagttgtcttcatatgaagctgggtttgtcgagacaacttcaaaagaagtgggtattcatgatgtgaag

SEQ ID NO: 66008 - DNA, 2249 bp, Zea Mays
cgtcactcgccgccgctggcaccaccctccacgccccgtccgcactttttaaaactacgacccagctgccgaatcaaccgcctcccccggcgagcgcctccttcctctctcccatgggcccccgcgcccgagccgggaccgcttcgcccaccggccggtgcgcgcgccatagatagattccacaagcttcgcgaccagatccgatgctggaggccaccgccgccgcctcctccccccgcgccgcggccgcggcagtcgccgccggggcggccgccgccgcggtcgtttcctccccgcggcggggtggaggctccgcgcacaaccaccggcggtgggccccggccccgttcagggcttgcctgctcgcgctctggttgctgggcttcgcgctcgtcttcctgtggcagagcacctccgtgggccgcgtgcggctctacacgcgcccgccgatgccgaagcgcgccgtggcgtcgttggggcactgggcggcctccccgcccgtctacgatctgagggagttcggggcggtcggggacgggcggacggttaacacggccgcgttcgagtctgccatcgcggcgatcgccgagaggggcgggggcaggctcaccgtgccagccgggcggtggctcaccgcgccgttcaacctcaccagccacatgactctcttcctcgctgctggcgctgagatcctagggattcagttcggtgtacttatttacaattgagttaacattggcgacttctttatgttacttatattcaaggatgaaagatattggcccttgatgtctccattaccatcatacggctatggaagagagcacaagggacctcgatatgggagccttatacacggccaagacctgaagcatgtgactataacaggtcataatggtactataaatggacaaggtcaaagttggtgggtaaaatttcggagaaagctccttaatcacacaaggggtcctctggtgcagctcatgcggtcaagtaacattatcatttctaatatcactcttcgtgattctcccttctggactcttcacacgtacgactgcaagaatgttactatctcagaaaccaccatcttggctccaattgctggagctccaaatactgatgggatagatccagattcttgtgaaaatgtggtgataaaaaactgctacatttctgttggtgatgatgggatagccataaagagtggttgggaccaatatggaattgcttatggccgtccatcagctaatattactatccagaatgtcgtaatccgctctatggtcagtgctggagtatcgattggaagcgagatgtctggtggtgtctcggatgttttggtagagaatgttcatgtctgggattcacggcgaggcgtgaggataaagactgcacctggaagaggggcctatgtaaccaatgtcatttaccagaacataacctttgaaaacgtacgtgtcggtatagtgataaagacagactacaacgagcacccagacgaaggcttcgacccaaaggccgtccccaccatcgggaatatctcttacacctcaatccatgggcatcgtgtgcgagtaccggtcaggatacagggaagcgcgcagatccctgtgaagaatgttaccttccatgacatgtcaatcggtatagtagacaagaagcaccatgttttccagtgctccttcgtccaggggcaggtcattggctacgttttccctgtgccttgcaagaacctggacctgtacgacgagcggcgtgggctggttaaacaatcaacgttacagaatatctctgatatcgactacagtttctgacaatggcatttgataccactgtactattgctgtaggtgtattcagtattcacagccgtcacagtcctttccacacatttagaagcaaaattttgggtagcttttacactcttcacctcacagtcaggcatgtatctaaggaagatcgacttgaccatactgtctcgtagagggacgccaggaatgttgccttttcacttttttgatcactgtatgattacacttacttggttacacagtcgacagtacacttttgatagtgcttactgttcatggcagactacatttaccttgccctttttaaaacagatgtggatgtatatgtatttggtagtttgaacctggaatggttggttcttcttccaagttgtcttcatatgaagctgggtttgtcgagacaacttcaaaagaagtgggtattcatgatgtgaag

SEQ ID NO: 66009 - DNA, 4158 bp, Zea Mays
atgctcctgccgcccttctcgcaacacccgcccaccaccaccgcatcttctcctacgctctcgcgctccgccacgaccttggtctgccactgccaccgctgtctcgccggcttcacgagccttctaaaacctggcgacgtcgcactcactgctcctgtgagcgcacgtcactgtgcccgcccgccccgcatgccgtggttctgctcgcgttgggcgaatcgggggacgaggaacctacgccgcattattatctccaacaatggtgtcacagacgccaggaaacgtcgtgctggcgcaaactagagtgccatcctcccccaccccgctcatttgcaaggctgtcgcggtgccgacgtgtccaaccgcacgtcgtggcacttaggctcttccaattccaaatcgcaaatgaggtctctccctcgcaaaggtactgatttcgtttgccaccaagtcctacatagggtttcttttgtacaaaaatgtgaacacgttctttgatctaaaagttcatgcatttaaggactttttcttagtttggccttgcaacagttacgtgtatttgtttattggtattaatgtctttatataggaattaacctactttctaatcgattctgcatgttggcccttgcacttaataaaacaacatctctaaatttttaacaacttggatttgaattacaagaggtatgtttgcataatacatctgcacttcacccattttaattttggtccattaattctttttatttgccattgggaaaaagtgaaatcttcggttctgattttcacaactcatggttatttaagtgcaggatatgaaaagaactgttgtcaaatacataaaacattgtctcacggttacatagatacgaaagcttggtctcaaagggaaaaggtctgtacagattacacctcaaggggaaaaggtttatacacctctaagatcaaatatataacatcaattaatattgtatccattaaagaaggatccataatcgcaattccgtatggacatggactatagatattgttgatgttacactgatgtttggagaggatcaaatgtgtccagaattgtcttgagagaattgtttcggaagtctctgtgttattatgaaaatattattacataggtatagttatatctaaaaagacctacttctgtagaaaaagttcatacataataaggtttcgattttcataaagcctgatgccattctagattgttgaggggaaaaccatttagatatttatcctcgactgacctgcaaaatgaaatttaagagatttaagaacaaaaaaaatgtaaataggttattatcgggataattcagtgcatgttggataaaatatgcagtgacaaatatacatctatttgtttgtctgtcacatgcaaagtattatacaggtcgaggtacgacatagattactaaatacatattattcatatgaacagaaataaagatgtgcacattgaagatatccttgcgtacataaggataacatatttgatctatgagtttgttttgaaatagtttgtaaaaaagtatatctggatttattttgttaaaatccaaagttgatatgagtaatgaacttagcatactgaatatttcctatgtatcatgataaagagctacctcgaaacgagctatccagaatctgcgatgttgatgttgaagttgcattgagaactagctcctcaaagctgctaaagtcgaagggctcaacccaaaactcaaagaactgtcaaaacaaaacatccacagctgcactatgaatctagtgctcaaacactattacagagtgaaaatgatatcccacacctcaagtggtatggtgtcgatgaggagtaccatgttatggtgattgatcttcttggcccaatcttagaaaaattgtttacttcctgtaataggaaattttctatgaaaacaatacttatgcttactgatcaaccatcgagttcatccattccatattccatagtcaactttctgaaatttgataccagcttatagtcagaaagctaatcaagtttgatcaacccctgtattttgcttatgttgttttcagtataaacagaacatagtagttacttctctaatattaacaatgtctagtaataaatcccaagattctcgttcgtcaataagcaatggtaataacatatctcatttttattctatagatctatatcatcgattatggacttgctaagaaatacaaggacctttagactcataaacacatctcatacaggtgaatcatagtaaggaagttttcatttagaacccagactggactaatttccggtaataaaccccaaaattcttattcatcaataaacaatagtaaaaacatatatcctttttattctacgggtctttataattgattatggtctttctaagaaaaacaagaccttcatactcaaacacaccacatacaggtgaagcatattaatgaagttttgacttagaactgggagacttcattgtgccacacaattattctattaaatagcaagttcgtaagcagaaactggtatgcgagaattcacacaacctctatactgcacctgtctatgtcacagcttcttacattatctctagagacactggctaatggtacattattggggtaatccaaaaggttatgtggattcaatatagtaccaaatcgtggtacatagaggcaacctgaatggattgtttgactgtatgtcatttacatgtaaatatcagaaataaaacgaatgctctttgacgacttatgctcgtgcctaggagatcactgccaagtgccaagtgccaaatgcgagcactgcctcatcatcaaggtcccctccgttcatattcaattgaactaaattaacatgaagcaaaggcagctcaagggtcagctgggagcgttgtgtggccaagaaagaccaaacattttttggttatatcgtaccgacccgaagtgtaaaaacagtggcccagtccggccctaaactacgtcgtaccttcgttgggccgtgccggctcaagcccggcccgtatatttgaccatataaaatcaaaatattataaccatataaagttcataacttactaaattgaagatattaaataattatagtatcatttaaccacataaactccaaatataacaacaatataaagtcgatatcttactaaattaaagaaattaaacatattgtgcttaattgggtcgtgccggcccaagcccgacccatctatgcgggccgttccgggaacccgataggtcggaatttgaggtccggctcaggctcgccttcaggtcatgctagcctggctcatattatttcatgtcggactgtactttaggctcttattttcgggtcgtgcttgtgctggcccgaaaagcccggtctagattcccagcactagcggtgatggggtgggcggactacatgaggcccgggaccgtctgtggttcgactgggccaactgagcccgtcatgtaattctgaggcaaagtatggtcaactggattcttctcttagataatcactccccatgtatttctatttattcatattgtttctgtttactgggcagttggcactgaatttctgtttactgggcagtttagtaagtttcagttcatgtaattctgaggcaaagtatggtcaaaagttggttcttttccttctgtttatcttctttcttctcttctcaagttgtttatgtttatgagaaatcactgttgattgtgtcctttgcgtgtatccaagttgtttctgttttcctttgcgtgtatccaagttgtttctgtttctgtttccccaatcaagttgtttctgtttatgagaaatcactgtttacaaaggatctgctgtaatttatttcaatttatgtttatgtaagttgctcctactgtacagagacctgatggctattattcaaaatctgttgtaatctatttctacgtgttgtttctgtttacaaaggatctgttgtaatttatttctacatgttggtcataatcaaatgtttagggtgtaaatcatatttagatgattgtaattagttcaatttatgggtcaaaatcatatttttagttaaatctgttgtaattagtttaaaattggtggtaacccaattgggccaagctataaaaaat

SEQ ID NO: 66010 - DNA, 1991 bp, Zea Mays
ctgaacattcgtctccaccgctgttctttcatccgtctgatctactgctccgccctgcagtagcgaaaacacaaacaccaatacaaaaaaggaaaagaaaaggcaaccaagcgaaccagaccctcccaacggtcacctcacctcgcccgccgcgccgtgtagccagatcgccttcaggttccacgacctgaccacaacccctcggcgctcatcgtcatccaccgccgcccgcgaggtccccctccagccttcactgggcgaaggagaaggagaaggtgaagggaaactccgcgcgattgccgccattaactccctccccccacccttctcgcaagcgccaccggatccggtccctccccacccgccctttctccccacctcacggaaccccgcccgcccttttaatagtttcgccccacatgcgtggcgcgagtgccgccgccttccgacgcagcagccgcggccgggatgtcgcgtatccgtagcggggtggaggtggtcgccagtagggggtgcgcgcggatggtgatccccgggatgcatcacaacccctcatccgccgcatccgtctcctcctccgcggcatcgcgcgcggcccccgccgccggttccgggccggcggcgcatgccgatgggcccttcgcaggcctcgtcatctgcgtcactgggctgtccaaagaggcgagagttcaggtgaaggaggcgacggagcggctcgggggcgagtacagcgggagcttgcaccccaagtgcacgcacctcgtggttcagagctttgccggacgcaagttcgagcatgcactgaagcatggtccgaggaatgggctattcctcgttacgctgggttggtttgtggactgcgtgaggaggaacatgaggttggatgaatccttgtatgccatcaagagcattggggagaatggtgtgccgcccggggagttcagccgccttgttggagttcctgttaacgagaagtcttgccttccaccgttgatatttcaggacaaggcatgctcagatatgacccagaagcattcgctccagactcctgggaacggtggtggtcatgatgggttggtttttatgaatgacacaatctacattgaccctgggatatctgatgagatgaggaaaaagatttctgacgctgttactagagaaggtggaaagttgctggagcactggtttattggttgccctacaacttatattgtctgtgaggatgtttgcgttaagagatatgtaggccactcagaaaacattgttactccgctttggatcttgaaaacagtgaaggaaaaaaacttgcagcgtcttgtccatttgtcttccgacctagctaggcatgttgccatggttctggaaaatgttcagacatctgaagagaataggaaacttggaagtgtaccttctataaacacaagctcatgtggtcgtccatcaaccaaagaggagatcaatgaagtccatcaagcgaagcaaaagtttgttgaaggagcaaagaaagaagtccgagaccgccgtgcccgtcgtatgcagtcatgtgaagtaaccattcatccaatcacaccggccacacttctggattcaatctgctggacaatctctgagccaacttcatctgcgtcaatttatatggactcttcgtggtccgatgatgccaatgagcagcaaagcaccacttactttgatgcaaatggggacgtgagggatccagatcaacctaatgacaatttttcccgtccactgaaagaaagtgagcgaagtgagctgatcttcaagaatcacttccttaccatactcttccctgttgatcgttttggagaacttggaccttcctcaaagacgttctataacaatggtggctttacgtgtatacaagtactgaatcacatttacaacttctaccaggtatataactactgcacactcatcgctcaagtttggactctttttgtcttgtaaaacattgatggcagtaaaactattct

SEQ ID NO: 66011 - DNA, 1986 bp, Zea Mays
cgtctccaccgctgttctttcatccgtctgatctactgctccgccctgcagtagcgaaaacacaaacaccaatacaaaaaaggaaaagaaaaggcaaccaagcgaaccagaccctcccaacggtcacctcacctcgcccgccgcgccgtgtagccagatcgccttcaggttccacgacctgaccacaacccctcggcgctcatcgtcatccaccgccgcccgcgaggtccccctccagccttcactgggcgaaggagaaggagaaggtgaagggaaactccgcgcgattgccgccattaactccctccccccacccttctcgcaagcgccaccggatccggtccctccccacccgccctttctccccacctcacggaaccccgcccgcccttttaatagtttcgccccacatgcgtggcgcgagtgccgccgccttccgacgcagcagccgcggccgggatgtcgcgtatccgtagcggggtggaggtggtcgccagtagggggtgcgcgcggatggtgatccccgggatgcatcacaacccctcatccgccgcatccgtctcctcctccgcggcatcgcgcgcggcccccgccgccggttccgggccggcggcgcatgccgatgggcccttcgcaggcctcgtcatctgcgtcactgggctgtccaaagaggcgagagttcaggtgaaggaggcgacggagcggctcgggggcgagtacagcgggagcttgcaccccaagtgcacgcacctcgtggttcagagctttgccggacgcaagttcgagcatgcactgaagcatggtccgaggaatgggctattcctcgttacgctgggttggtttgtggactgcgtgaggaggaacatgaggttggatgaatccttgtatgccatcaagagcattggggagaatggtgtgccgcccggggagttcagccgccttgttggagttcctgttaacgagaagtcttgccttccaccgttgatatttcaggacaaggcatgctcagatatgacccagaagcattcgctccagactcctgggaacggtggtggtcatgatgggttggtttttatgaatgacacaatctacattgaccctgggatatctgatgagatgaggaaaaagatttctgacgctgttactagagaaggtggaaagttgctggagcactggtttattggttgccctacaacttatattgtctgtgaggatgtttgcgttaagagatatgtaggccactcagaaaacattgttactccgctttggatcttgaaaacagtgaaggaaaaaaacttgcagcgtcttgtccatttgtcttccgacctagctaggcatgttgccatggttctggaaaatgttcagacatctgaagagaataggaaacttggaagtgtaccttctataaacacaagctcatgtggtcgtccatcaaccaaagaggagatcaatgaagtccatcaagcgaagcaaaagtttgttgaaggagcaaagaaagaagtccgagaccgccgtgcccgtcgtatgcagccagtcatgtgaagtaaccattcatccaatcacaccggccacacttctggattcaatctgctggacaatctctgagccaacttcatctgcgtcaatttatatggactcttcgtggtccgatgatgccaatgagcagcaaagcaccacttactttgatgcaaatggggacgtgagggatccagatcaacctaatgacaatttttcccgtccactgaaagaaagtgagcgaagtgagctgatcttcaagaatcacttccttaccatactcttccctgttgatcgttttggagaacttggaccttcctcaaagacgttctataacaatggtggctttacgtgtatacaagtactgaatcacatttacaacttctaccaggtatataactactgcacactcatcgctcaagtttggactctttttgtcttgtaaaacattgatggcagtaaaactattct

SEQ ID NO: 66012 - DNA, 1974 bp, Zea Mays
cgctgttctttcatccgtctgatctactgctccgccctgcagtagcgaaaacacaaacaccaatacaaaaaaggaaaagaaaaggcaaccaagcgaaccagaccctcccaacggtcacctcacctcgcccgccgcgccgtgtagccagatcgccttcaggttccacgacctgaccacaacccctcggcgctcatcgtcatccaccgccgcccgcgaggtccccctccagccttcactgggcgaaggagaaggagaaggtgaagggaaactccgcgcgattgccgccattaactccctccccccacccttctcgcaagcgccaccggatccggtccctccccacccgccctttctccccacctcacggaaccccgcccgcccttttaatagtttcgccccacatgcgtggcgcgagtgccgccgccttccgacgcagcagccgcggccgggatgtcgcgtatccgtagcggggtggaggtggtcgccagtagggggtgcgcgcggatggtgatccccgggatgcatcacaacccctcatccgccgcatccgtctcctcctccgcggcatcgcgcgcggcccccgccgccggttccgggccggcggcgcatgccgatgggcccttcgcaggcctcgtcatctgcgtcactgggctgtccaaagaggcgagagttcaggtgaaggaggcgacggagcggctcgggggcgagtacagcgggagcttgcaccccaagtgcacgcacctcgtgcacagctttgccggacgcaagttcgagcatgcactgaagcatggtccgaggaatgggctattcctcgttacgctgggttggtttgtggactgcgtgaggaggaacatgaggttggatgaatccttgtatgccatcaagagcattggggagaatggtgtgccgcccggggagttcagccgccttgttggagttcctgttaacgagaagtcttgccttccaccgttgatatttcaggacaaggcatgctcagatatgacccagaagcattcgctccagactcctgggaacggtggtggtcatgatgggttggtttttatgaatgacacaatctacattgaccctgggatatctgatgagatgaggaaaaagatttctgacgctgttactagagaaggtggaaagttgctggagcactggtttattggttgccctacaacttatattgtctgtgaggatgtttgcgttaagagatatgtaggccactcagaaaacattgttactccgctttggatcttgaaaacagtgaaggaaaaaaacttgcagcgtcttgtccatttgtcttccgacctagctaggcatgttgccatggttctggaaaatgttcagacatctgaagagaataggaaacttggaagtgtaccttctataaacacaagctcatgtggtcgtccatcaaccaaagaggagatcaatgaagtccatcaagcgaagcaaaagtttgttgaaggagcaaagaaagaagtccgagaccgccgtgcccgtcgtatgcagccagtcatgtgaagtaaccattcatccaatcacaccggccacacttctggattcaatctgctggacaatctctgagccaacttcatctgcgtcaatttatatggactcttcgtggtccgatgatgccaatgagcagcaaagcaccacttactttgatgcaaatggggacgtgagggatccagatcaacctaatgacaatttttcccgtccactgaaagaaagtgagcgaagtgagctgatcttcaagaatcacttccttaccatactcttccctgttgatcgttttggagaacttggaccttcctcaaagacgttctataacaatggtggctttacgtgtatacaagtactgaatcacatttacaacttctaccaggtatataactactgcacactcatcgctcaagtttggactctttttgtcttgtaaaacattgatggcagtaaaactattct

SEQ ID NO: 66013 - DNA, 1868 bp, Zea Mays
aaaggcaaccaagcgaaccagaccctcccaacggtcacctcacctcgcccgccgcgccgtgtagccagatcgccttcaggttccacgacctgaccacaacccctcggcgctcatcgtcatccaccgccgcccgcgaggtccccctccagccttcactgggcgaaggagaaggagaaggtgaagggaaactccgcgcgattgccgccattaactccctccccccacccttctcgcaagcgccaccggatccggtccctccccacccgccctttctccccacctcacggaaccccgcccgcccttttaatagtttcgccccacatgcgtggcgcgagtgccgccgccttccgacgcagcagccgcggccgggatgtcgcgtatccgtagcggggtggaggtggtcgccagtagggggtgcgcgcggatggtgatccccgggatgcatcacaacccctcatccgccgcatccgtctcctcctccgcggcatcgcgcgcggcccccgccgccggttccgggccggcggcgcatgccgatgggcccttcgcaggcctcgtcatctgcgtcactgggctgtccaaagaggcgagagttcaggtgaaggaggcgacggagcggctcgggggcgagtacagcgggagcttgcaccccaagtgcacgcacctcgtgcacagctttgccggacgcaagttcgagcatgcactgaagcatggtccgaggaatgggctattcctcgttacgctgggttggtttgtggactgcgtgaggaggaacatgaggttggatgaatccttgtatgccatcaagagcattggggagaatggtgtgccgcccggggagttcagccgccttgttggagttcctgttaacgagaagtcttgccttccaccgttgatatttcaggacaaggcatgctcagatatgacccagaagcattcgctccagactcctgggaacggtggtggtcatgatgggttggtttttatgaatgacacaatctacattgaccctgggatatctgatgagatgaggaaaaagatttctgacgctgttactagagaaggtggaaagttgctggagcactggtttattggttgccctacaacttatattgtctgtgaggatgtttgcgttaagagatatgtaggccactcagaaaacattgttacttgaaggaaaaaaacttgcagcgtcttgtccatttgtcttccgacctagctaggcatgttgccatggttctggaaaatgttcagacatctgaagagaataggaaacttggaagtgtaccttctataaacacaagctcatgtggtcgtccatcaaccaaagaggagatcaatgaagtccatcaagcgaagcaaaagtttgttgaaggagcaaagaaagaagtccgagaccgccgtgcccgtcgtatgcagtcatgtgaagtaaccattcatccaatcacaccggccacacttctggattcaatctgctggacaatctctgagccaacttcatctgcgtcaatttatatggactcttcgtggtccgatgatgccaatgagcagcaaagcaccacttactttgatgcaaatggggacgtgagggatccagatcaacctaatgacaatttttcccgtccactgaaagaaagtgagcgaagtgagctgatcttcaagaatcacttccttaccatactcttccctgttgatcgttttggagaacttggaccttcctcaaagacgttctataacaatggtggctttacgtgtatacaagtactgaatcacatttacaacttctaccaggtatataactactgcacactcatcgctcaagtttggactctttttgtcttgtaaaacattgatggcagtaaaactattct

SEQ ID NO: 66014 - DNA, 1885 bp, Zea Mays
aaaggcaaccaagcgaaccagaccctcccaacggtcacctcacctcgcccgccgcgccgtgtagccagatcgccttcaggttccacgacctgaccacaacccctcggcgctcatcgtcatccaccgccgcccgcgaggtccccctccagccttcactgggcgaaggagaaggagaaggtgaagggaaactccgcgcgattgccgccattaactccctccccccacccttctcgcaagcgccaccggatccggtccctccccacccgccctttctccccacctcacggaaccccgcccgcccttttaatagtttcgccccacatgcgtggcgcgagtgccgccgccttccgacgcagcagccgcggccgggatgtcgcgtatccgtagcggggtggaggtggtcgccagtagggggtgcgcgcggatggtgatccccgggatgcatcacaacccctcatccgccgcatccgtctcctcctccgcggcatcgcgcgcggcccccgccgccggttccgggccggcggcgcatgccgatgggcccttcgcaggcctcgtcatctgcgtcactgggctgtccaaagaggcgagagttcaggtgaaggaggcgacggagcggctcgggggcgagtacagcgggagcttgcaccccaagtgcacgcacctcgtgcacagctttgccggacgcaagttcgagcatgcactgaagcatggtccgaggaatgggctattcctcgttacgctgggttggtttgtggactgcgtgaggaggaacatgaggttggatgaatccttgtatgccatcaagagcattggggagaatggtgtgccgcccggggagttcagccgccttgttggagttcctgttaacgagaagtcttgccttccaccgttgatatttcaggacaaggcatgctcagatatgacccagaagcattcgctccagactcctgggaacggtggtggtcatgatgggttggtttttatgaatgacacaatctacattgaccctgggatatctgatgagatgaggaaaaagatttctgacgctgttactagagaaggtggaaagttgctggagcactggtttattggttgccctacaacttatattgtctgtgaggatgtttgcgttaagagatatgtaggccactcagaaaacattgttactccgctttggatcttgaaaacagtgaaggaaaaaaacttgcagcgtcttgtccatttgtcttccgacctagctaggcatgttgccatggttctggaaaatgttcagacatctgaagaggaaacttggaagtgtaccttctataaacacaagctcatgtggtcgtccatcaaccaaagaggagatcaatgaagtccatcaagcgaagcaaaagtttgttgaaggagcaaagaaagaagtccgagaccgccgtgcccgtcgtatgcagtcatgtgaagtaaccattcatccaatcacaccggccacacttctggattcaatctgctggacaatctctgagccaacttcatctgcgtcaatttatatggactcttcgtggtccgatgatgccaatgagcagcaaagcaccacttactttgatgcaaatggggacgtgagggatccagatcaacctaatgacaatttttcccgtccactgaaagaaagtgagcgaagtgagctgatcttcaagaatcacttccttaccatactcttccctgttgatcgttttggagaacttggaccttcctcaaagacgttctataacaatggtggctttacgtgtatacaagtactgaatcacatttacaacttctaccaggtatataactactgcacactcatcgctcaagtttggactctttttgtcttgtaaaacattgatggcagtaaaactattct

SEQ ID NO: 66015 - DNA, 1872 bp, Zea Mays
aaaggcaaccaagcgaaccagaccctcccaacggtcacctcacctcgcccgccgcgccgtgtagccagatcgccttcaggttccacgacctgaccacaacccctcggcgctcatcgtcatccaccgccgcccgcgaggtccccctccagccttcactgggcgaaggagaaggagaaggtgaagggaaactccgcgcgattgccgccattaactccctccccccacccttctcgcaagcgccaccggatccggtccctccccacccgccctttctccccacctcacggaaccccgcccgcccttttaatagtttcgccccacatgcgtggcgcgagtgccgccgccttccgacgcagcagccgcggccgggatgtcgcgtatccgtagcggggtggaggtggtcgccagtagggggtgcgcgcggatggtgatccccgggatgcatcacaacccctcatccgccgcatccgtctcctcctccgcggcatcgcgcgcggcccccgccgccggttccgggccggcggcgcatgccgatgggcccttcgcaggcctcgtcatctgcgtcactgggctgtccaaagaggcgagagttcaggtgaaggaggcgacggagcggctcgggggcgagtacagcgggagcttgcaccccaagtgcacgcacctcgtgcacagctttgccggacgcaagttcgagcatgcactgaagcatggtccgaggaatgggctattcctcgttacgctgggttggtttgtggactgcgtgaggaggaacatgaggttggatgaatccttgtatgccatcaagagcattggggagaatggtgtgccgcccggggagttcagccgccttgttggagttcctgttaacgagaagtcttgccttccaccgttgatatttcaggacaaggcatgctcagatatgacccagaagcattcgctccagactcctgggaacggtggtggtcatgatgggttggtttttatgaatgacacaatctacattgaccctgggatatctgatgagatgaggaaaaagatttctgacgctgttactagagaaggtggaaagttgctggagcactggtttattggttgccctacaacttatattgtctgtgaggatgtttgcgttaagagatatgtaggccactcagaaaacattgttacttgaaggaaaaaaacttgcagcgtcttgtccatttgtcttccgacctagctaggcatgttgccatggttctggaaaatgttcagacatctgaagagaataggaaacttggaagtgtaccttctataaacacaagctcatgtggtcgtccatcaaccaaagaggagatcaatgaagtccatcaagcgaagcaaaagtttgttgaaggagcaaagaaagaagtccgagaccgccgtgcccgtcgtatgcagccagtcatgtgaagtaaccattcatccaatcacaccggccacacttctggattcaatctgctggacaatctctgagccaacttcatctgcgtcaatttatatggactcttcgtggtccgatgatgccaatgagcagcaaagcaccacttactttgatgcaaatggggacgtgagggatccagatcaacctaatgacaatttttcccgtccactgaaagaaagtgagcgaagtgagctgatcttcaagaatcacttccttaccatactcttccctgttgatcgttttggagaacttggaccttcctcaaagacgttctataacaatggtggctttacgtgtatacaagtactgaatcacatttacaacttctaccaggtatataactactgcacactcatcgctcaagtttggactctttttgtcttgtaaaacattgatggcagtaaaactattct

SEQ ID NO: 66016 - DNA, 724 bp, Zea Mays
aactgagattcgtcgtctctttctctttcctcgccggcaatccttctcctccctcccattcccattcccatcgccgcttccaagtcccaaccgttcccttctccgccctcgccgccggccaacatgatgcacatgaccttctactggggcaagtcggccacgatcctgttcgacggctggcgcacctccacgtggcccgactaccttctctccctcgcggccctgctcctcgccgccgctttctaccagtacctcgaggccctgcgggtccgcgtgaagctcgtcgcaggaggaggcgccaagccagccccctcctccatcatcccgccaccggccggctccgacccgcggacgccgcttctcgcgcccgccttcgcggccggcgccgggcgctggccggcgcgcctggccgtggccgcgatgttcggggtcaactccggcctcggctacctgctcatgctcgccgtcatgtcgttcaacggcggcgtgtttgtcgccgtcgtcgtgggcctcgcgctcgggtacctcgcgttccgcagcagcgacggggaggatctcgtcgtcgttgacaacccatgcgcctgcgcctaaagttaattgtttgacttcatttgatatcaaattggacaacctctacattgaacatgtttattttgtctgcaatgctactgatccaagttcctttagacgaaccgagtgaagcatagccatacctgtggaagaa

SEQ ID NO: 66017 - DNA, 890 bp, Zea Mays
aactgagattcgtcgtctctttctctttcctcgccggcaatccttctcctccctcccattcccattcccatcgccgcttccaagtcccaaccgttcccttctccgccctcgccgccggccaacatgatgcacatgaccttctactggggcaagtcggccacgatcctgttcgacggctggcgcacctccacgtggcccgactaccttctctccctcgcggccctgctcctcgccgccgctttctaccagtacctcgaggccctgcgggtccgcgtgaagctcgtcgcaggaggaggcgccaagccagccccctcctccatcatcccgccaccggccggctccgacccgcggacgccgcttctcgcgcccgccttcgcggccggcgccgggcgctggccggcgcgcctggccgtggccgcgatgttcggggtcaactccggcctcggctacctgctcatgctcgccgtcatgtcgttcaacggcggcgtgtttgtcgccgtcgtcgtgggcctcgcgctcgggtacctcgcgttccgcagcagcgacggggaggatctcgtcgtcgttgacaacccatgcgcctgcgcctaaaggtatcttcgatccaattgttgtgtttggaggattttcagttttcaaagtgtaattttttttcctttgggggggggggggggggagggtggtatagggtaactaatcagtaatattgtcttgttgctttctatcgattaatggatcggaggagatgatttttagcagttaattgtttgacttcatttgatatcaaattggacaacctctacattgaacatgtttattttgtctgcaatgctactgatccaagttcctttagacgaaccgagtgaagcatagccatacctgtggaagaa

SEQ ID NO: 66018 - DNA, 694 bp, Zea Mays
aactgagattcgtcgtctctttctctttcctcgccggcaatccttctcctccctcccattcccattcccatcgccgcttccaagtcccaaccgttcccttctccgccctcgccgccggccaacatgatgcacatgaccttctactggggcaagtcggccacgatcctgttcgacggctggcgcacctccacgtggcccgactaccttctctccctcgcggccctgctcctcgccgccgctttctaccagtacctcgaggccctgcgggtccgcgtgaagctcgtcgcaggaggaggcgccaagccagccccctcctccatcatcccgccaccggccggctccgacccgcggacgccgcttctcgcgcccgccttcgcggccggcgccgggcgctggccggcgcgcctggccgtggccgcgatgttcggggtcaactccggcctcggctacctgctcatgctcgccgtcatgtcgttcaacggcggcgtgtttgtcgccgtcgtcgtgggcctcgcgctcgggtacctcgcgttccgcagcagcgacggggaggatctcgtcgtcgttgacaacccatgcgcctgcgcctaaagagtgtgcagtcgattattgacaatgacaaaggcaaaattggcatacgacgccctcgtccatgacataagaataagctcggatatgagcatctgtctccttt

SEQ ID NO: 66019 - DNA, 1861 bp, Zea Mays
cccggcgtcgcgtcactccccacacgcatctcgtcccttctctgccgcatagaccccgcccagcagagctcgctccggcgccctgcgagcaacgactgcggccccgccaactcctcgggcctcgccgctgccgccgtgtcaacctggcccgctccctccagccggtgggtgaggagcggctgtagccctgcaggaacccccggcaaggacatggacaagccaccgccccaattcgccttctatcacctcatccctgccctcaccttctcatgcctctccatgtatactttttactttttttgttctaaatatataaagcattattctctctgtgtgtgcaattgcccctgctcggcttctctgtttggacactagatgatagatgatgtgctcctgcctcctaataaatgcgtatggtatgagtcgacattgttttgtactattagaagatgaggcatgaattttagctgaaatcagtgtcctatcaaaatacagagtgcaagattgagttaatgacacttccaatgctgattaaaactaatttatgttcctattttttccctttaaaaacaaatgtaggtctaactaacttgatggaatggactcattagtatatactgattactgagaagagttctccgtttaattaattttggctgtcaaaatcgttttctttgttcgacgcggtgctgccctgttggtcggcaacaccaaagtacaggctagatgggtgaggcatctttggaaggtgacattgatatttgcagcctgttgttgttgttgtaatgattgagacagatgtatttcagaccagttttagtggtccacaggtcaattcgtacttttcatagctagcgtgtccacttcttttaagggagattcaatacaattgttctaatactgttaggttttaaccatagctcatatgccattctgcatatcaactattgtatatcatgcctatgaattaaatcttatctgtacattcataatgaatgtctaaactgagtgcctatttttcataaagattacctttctaccgtgttcctacaaattaattattagctcctctctacatcaacaggtgagtccccaaatcaatgagtgtcgttcccagcctgtcccttacacgtctatccctcgacaacatgttcctttgtggcatcctggatgacatgaacaggttcccaccaatcataggaaccacaacactcggttggtggccttctaggagctgttttgtgctttcttcaggatcttcgctactccaagagctgatttgcggatcagacaccacctcccctctctcagtcttagatcatgcgtatgtgcacacccatgtccttcactgtatctgcgcatgtgcacacccatgtcttttacagggcctgcacctgcaattgtgtgtgctttgcactgaaagttttccaatcaagaaaatttgcttacgtgctgatttcagagtttgtgttggaggcttgtcctcgtctggagagctctcgccatcctctagcggcagctgtagctcttttggccctctctgatgcttctccgcggtcagtacacattattagaaacaatcagatttttcacaggacaagagttcatagacatacagtaagtagattgcgtgttttagatgttagtatattacatatgagtaactaaggtgcttcggacaaaatatgttctttctcgtagcattactgttgctttgatctgatggtgggggtttctagatctcactccaagagcttctcatgtctgaattctcttgtttcaccatccatgttccgaccttttcctgcaaaatcacaaagatttacactaaaacacattgttcaatcaaaaaatgtttgag

SEQ ID NO: 66020 - DNA, 1192 bp, Zea Mays
cttattcctgccattgattgcatggcgggtgcatcaaaatcttgatcaaaactgtgcatatgcgtgccatggttctgctgttcctgccattgcatgcccaactgcaaaaggccatgcttcttggattgctcctgctgctcatgcccagatctgtcatgctgctatcccagctgcaaatcatgcaacaaaccatgctttgggcccaacagctgctcatgttgcgacatatcatgccgcaagccagattgcccatcctgtacctcgagctgcagctcgtgctgcaatcggccatgtggcaacccagactgcagctcgtgctgcacctgcaatccatcatgctgtaaaccaagctgcaactcgtgctgcagaccaaactgtagctcgtgctgcaatctgtcatgctgcaaacccagctgcagctcatgcttctcatgctgtaaagcgaactccagctcatgctgtaaacccaaatgcagctgcttcaaggccctctcgtgctgcaaattacagtgcagcccaaactgctgcacttgcagtctcccgagctgctcaggctgcaacccctgcggcagttgcaagcaatgctgctcatgccccagcgactgctttgattgcaagccaaactgcggctgtttcggcgcgcaatgctgcagctgcgtgggatgctgctcgtgctcctgccctcggtgctcaagctgcttcggttgcttcaagtacttcaagtgctccaacctgttcgggtgctgctcctgcaagcagtgcttcaagtgccagtcctcgtgctgcaagggggcgccgtcctgctgcaaatgccagtcgtcgtgctgtgagggtgaagacggcagcagcagctgctggaggtcatgctgcagcgttccgaagccggattgccctgggtgttcgtgcgggtgcgtttggtcctgcaggaagtgtacagaagggtgccgatgttctgggtgccgcaaaccatgctgtgccaccggatgcttgtgctgaagttgaactagacgttttcttgtttttttttatttgcgtgtgctatttagatgcctgttggcttcgttcgtgcttttgctatatggtgtagcgtccttgcctgtaaagaaatcccatatcaccagaagaatttgagacgtcaacagtcatcaagtactataaaatttagatgccttttgagttttgactttcatga

SEQ ID NO: 66021 - DNA, 302 bp, Zea Mays
gaaatgtcaaatagataccatccctatagcaatagcataatatgccccaatatcactgcaagctactcaaggtgcctccacgtccagtttcaccaccagagctcaagattcgttatccagaaaagagctttccaatgaaattagacgattttccacaagttactcacaaagtgctgccatgttacagttccacttccaccaccaaaatcaaggtttgcaactttggatccaaatatgcccagggatgctaatcccttgacaaacatcgtgcgaagaagagttactttcctagcattagtgac

SEQ ID NO: 66022 - DNA, 137 bp, Zea Mays
gtcaaatagataccatccctatagcaatagcataatatgccccaatatcactgcaagctactcaaggtgcctccacgtccagtttcaccaccagagctcaagattcgttatccaggtgcatcacgtgagaatggtag

SEQ ID NO: 66023 - DNA, 1589 bp, Zea Mays
acctcactcttgtgctcgccgagctcgcccttagccctgtcgtcccccttcctgctgaggccaacaccccatcccctcgcccttccctgctcgacagccccatccctggtcttccaaggctgcgccctcacctccttcccatggtgagctcgcccatggcggctttccccgctcggcgtactcccctctgcaggagctcgccctcaaactccctgactgctcgagctcgcccaggccgcgacctcaccgaatcgcgcagcccctgctctccttccccagtcgcgcttagcctagcctccctcctggctccctgctcttttccatcgccgaggatttggccagcgctatccctactcgcctctaccctggtgctcccctatgtgttgtgcgatggggaatttttagttgcggcaatcgctatctgaacctccaatgtccatgttcttttggtgtgcaatttcaggcttcaatgcagcagttgctgggtgcttctttgccattgaaactgtattaagacctcttaaaccagaaaattcacctccatttacgactgcaatgataatattggcatctattatatcatctactgtttcaaatgttttacttggagccagaccagcttttatagtgccagcctatgagctaaaatctgctgccggttggaatggctgctacactagcttcagtctgttcagtcccattgacttcagtactgcttctctttgagctgacaaaggattacaggattttgcttcctctcatgtgaacaagggagaatattatgaactgaaggtcatgtatcagcgaaaagcaggctttcctcttgtagcaattgtgcactgaaaaactacagtgcccttatgacaccacaacagtcgctcgaatgcaactgtctggcctagcatccaatcgacctcaaccactcttcatcccacgagtgtgtggagctgatgaacttgtcgatgtatcggtcctgaccatattgaagctttgtatcagtatgccaaatttcagtttgagtgtggtaactactcaggggctgctgattacctttaccagtatggtgctttgtgcacaaacagtgagcgaaatgtgagtgccctctgaggaaagctggcagcagaaatcctaacgcagaactgggacctagctttggaggaactcaaccgcttgaaggaaataattgattcaaaggtacttgaatgctatacagacaaatgcacaccatcttattaggtatctagctacttcagttgttgtcaacaaaaggagaaggaatatgcttaaagagttgattaaggtcattcaacaggagcaccatacctacaaggatcccataactgaatttctggaatgcttatatgttaactatgtagttgtgggcttttgaacaatagctagagtgatatgaaacattagtgatgtagttgtgggcttttgaactacttcaagctagagtgatgtcgttgtggtgcttttgtgactgatcatctctggagcttttgtgaatgatctagctagctatctgtaaatgatctagttgtgaatgatatcataattgtgatgcttttgtgaatatataattgcgg

SEQ ID NO: 66024 - DNA, 1614 bp, Zea Mays
ccccttcctgctgaggccaacaccccatcccctcgcccttccctgctcgacagccccatccctggtcttccaaggctgcgccctcacctccttcccatggtgagctcgcccatggcggctttccccgctcggcgtactcccctctgcaggagctcgccctcaaactccctgactgctcgagctcgcccaggccgcgacctcaccgaatcgcgcagcccctgctctccttccccagtcgcgcttagcctagcctccctcctggctccctgctcttttccatcgccgaggatttggccagcgctatccctactcgcctctaccctggtgctcccctatgtgttgtgcgatggggaatttttagttgcggcaatcgctatctgaacctccaatgtccatgttcttttggtgtgcaatttcaggcttcaatgcagcagttgctgggtgcttctttgccattgaaactgtattaagacctcttaaaccagaaaattcacctccatttacgactgcaatgataatattggcatctattatatcatctactgtttcaaatgttttacttggagccagaccagcttttatagtgccagcctatgagctaaaatctgctgccggttggaatggctgctacactagcttcagtctgttcagtcccattgacttcagtactgcttctctttgagctgacaaaggattacaggattttgcttcctctcatgtgaacaagggagaatattatgaactgaaggtcatgtatcagcgaaaagcaggctttcctcttgtagcaattgtgcactgaaaaactacagtgcccttatgacaccacaacagtcgctcgaatgcaactgtctggcctagcatccaatcgacctcaaccactcttcatcccacgagtgtgtggagctgatgaacttgtcgatgtgttctaagcatgagcaagctgggttatgatggtgttgtggcactgctggttgctgatatatcactttcaatcggtcctgaccatattgaagctttgtatcagtatgccaaatttcagtttgagtgtggtaactactcaggggctgctgattacctttaccagtatggtgctttgtgcacaaacagtgagcgaaatgtgagtgccctctgaggaaagctggcagcagaaatcctaacgcagaactgggacctagctttggaggaactcaaccgcttgaaggaaataattgattcaaaggtacttgaatgctatacagacaaatgcacaccatcttattaggtatctagctacttcagttgttgtcaacaaaaggagaaggaatatgcttaaagagttgattaaggtcattcaacaggagcaccatacctacaaggatcccataactgaatttctggaatgcttatatgttaactatgtagttgtgggcttttgaacaatagctagagtgatatgaaacattagtgatgtagttgtgggcttttgaactacttcaagctagagtgatgtcgttgtggtgcttttgtgactgatcatctctggagcttttgtgaatgatctagctagctatctgtaaatgatctagttgtgaatgatatcataattgtgatgcttttgtgaatatataattgcgg

SEQ ID NO: 66025 - DNA, 2369 bp, Zea Mays
gcgccctcacctccttcccatggtgagctcgcccatggcggctttccccgctcggcgtactcccctctgcaggagctcgccctcaaactccctgactgctcgagctcgcccaggccgcgacctcaccgaatcgcgcagcccctgctctccttccccagtcgcgcttagcctagcctccctcctggctccctgctcttttccatcgccgaggatttggccagcgctatccctactcgcctctaccctggtgctcccctatgtgttgtgcgatggggaatttttagttgcggcaatcgctatctgaacctccaatgtccatgttcttttggtgtgcaatttcaggcttcaatgcagcagttgctgggtgcttctttgccattgaaactgtattaagacctcttaaaccagaaaattcacctccatttacgactgcaatgataatattggcatctattatatcatctactgtttcaaatgttttacttggagccagaccagcttttatagtgccagcctatgagctaaaatctgctgccggttggaatggctgctacactagcttcagtctgttcagtcccattgacttcagtactgcttctctttgagctgacaaaggattacaggattttgcttcctctcatgtgaacaagggagaatattatgaactgaaggtcatgtatcagcgaaaagcaggctttcctcttgtagcaattgtgcactgaaaaactacagtgcccttatgacaccacaacagtaagcaagactacaggacatctatgcgaaatgcagctagccagctacactgatgtagagatcattcatgcaatttaacctctatactgtatcattttaatttaaccagctatttcactactgccttttatagtgtttaggttataaccaatgacctctgttaaagtttataatttaaactcattgattgaaaaacatttagttgtgatgtcactaaaaggtgaaataaatttcttatagtgtgcattattatcccttttttcatttctaagtaaaattcttaacaacttctgtataataatgattgaatttatgattgttgtttgcactaacatctggtctaatttcattattcttgaacttcttttgtgcccatgcttcattacacatgtaggtcgctcgaatgcaactgtctggcctagcatccaatcgacctcaaccactcttcatcccacgagtgtgtggagctgatgaacttgtcgatgtgtactgattttttctcatatgtttctagccatactttaattgattctttgtcaaattgtgcaacttgtaaaccatatgattacttggtattattgctttgatatggacatccagaaaaatattcaacttcgaatatctttggctttagtgactagtcttctccattgtttctctagactttgaggtatttgccatcgtgttattcatcatgtaagcttaaaatatgacacaaagaaactcctaatattatgttttatttttagactacgcagacaaatagggtagctatgctagatgagatcctggattatgtgaagtttctaaggctttagcctttaggtcaaggttcagctcattgtgctgacatatttgggttattaaccaccaattgggttacttgtttgatcaccgatgggtccctgattttgaaaatgttaggttctaagcatgagcaagctgggttatgatggtgttgtggcactgctggttgctgatatatcactttcaatcggtcctgaccatattgaagctttgtatcagtatgccaaatttcagtttgagtgtggtaactactcaggggctgctgattacctttaccagtatggtgctttgtgcacaaacagtgagcgaaatgtgagtgccctctgaggaaagctggcagcagaaatcctaacgcagaactgggacctagctttggaggaactcaaccgcttgaaggaaataattgattcaaaggtacttgaatgctatacagacaaatgcacaccatcttattaggtatctagctacttcagttgttgtcaacaaaaggagaaggaatatgcttaaagagttgattaaggtcattcaacaggagcaccatacctacaaggatcccataactgaatttctggaatgcttatatgttaactatgtagttgtgggcttttgaacaatagctagagtgatatgaaacattagtgatgtagttgtgggcttttgaactacttcaagctagagtgatgtcgttgtggtgcttttgtgactgatcatctctggagcttttgtgaatgatctagctagctatctgtaaatgatctagttgtgaatgatatcataattgtgatgcttttgtgaatatataattgcgg

SEQ ID NO: 66026 - DNA, 1469 bp, Zea Mays
gcttttgaggagccacaaattagcttctccaaaacggctccagctcccctcaaggagcccctcacgagaaagactggagggaggatgggattgtgagcccagtgaaaaaccagggccactgtggatcatgctggaccttcagcactactggtgcacttgaggctgcatatacccaggcaactggcaagcccatctctctctctgagcaacagcttattgactgtggttttgcattcaacaatttcggatgcaacggaggccttccatcccaggcctttgaatacatcaaatacaatggtggccttgacactgaggaatcttacccttaccaaggtgtcaatggaatctgcaagtttaagaatgagaatgttggagtcaaggttttggactcggttaacatcaccctgggtgctgaggatgaactgaaggatgctgttggtctggttcgcccagttagtgttgccttcgaggtgatcactggtttcaggctgtacaagagcggagtttacactagcgaccattgtggaactacaccgatggatgtgaaccacgctgttctggctgttggctacggtgtcgaagatggtgtaccctactggctcatcaagaactcatggggcgctgactggggtgatgagggttacttcaagatggaaatgggcaagaacatgtgcggtgttgctacgtgtgcatcctaccctattgtcgcatgaggcccttacgaagtgttacatggtctgtttggcatcaataatgcatgtttaacctgagcttggcgatgggttatacagaacggaaactctgtttgtgaatagaaaatcatgaagggaaggagttgaccggacccctgcttgtacgtctccccgactgtgtaggtagattgtcagttggggttccgaagtactctactcatacgtgtgtatgacagtttatttatgaaacaaaatacgcattgatcgttatggtgcagcctgggatttcttattataacataatgtatcgtatgtataaacggaccgtcctcagcacggacctaatataagcacgacctgttggcatcacatcagggatgggccgcatggcacatcgcacctagagagatgacaatgggaatccgaatgcccgacggttttacttgatatgaaaacatgatatgaaggcggatgcagatctagagatggcaatgggtgcttaatactcgacaggttttacctgatatgaagacggatacggaatgatttctctacccatgggtatgttaatgggtacaaacctctacccgttgggtatgagtatgggttgatattattcataccacttgtctacacatgggtaaaatgtacccgcatcaatatcactataaccatctaatagagttcatcttagctaaaaataaaatctttctctagctatcatttatctagataccaacttatgtaatcactaggtgagtgccggtgcgttgcaac

SEQ ID NO: 66027 - DNA, 1384 bp, Zea Mays
attacttgcatcgtcttcatgtcctttaaatcaatcatggtcttgaaagtaatcaggcactactggtgcacttgaggctgcatatacccaggcaactggcaagcccatctctctctctgagcaacagcttattgactgtggttttgcattcaacaatttcggatgcaacggaggccttccatcccaggcctttgaatacatcaaatacaatggtggccttgacactgaggaatcttacccttaccaaggtgtcaatggaatctgcaagtttaagaatgagaatgttggagtcaaggttttggactcggttaacatcaccctgggtgctgaggatgaactgaaggatgctgttggtctggttcgcccagttagtgttgccttcgaggtgatcactggtttcaggctgtacaagagcggagtttacactagcgaccattgtggaactacaccgatggatgtgaaccacgctgttctggctgttggctacggtgtcgaagatggtgtaccctactggctcatcaagaactcatggggcgctgactggggtgatgagggttacttcaagatggaaatgggcaagaacatgtgcggtgttgctacgtgtgcatcctaccctattgtcgcatgaggcccttacgaagtgttacatggtctgtttggcatcaataatgcatgtttaacctgagcttggcgatgggttatacagaacggaaactctgtttgtgaatagaaaatcatgaagggaaggagttgaccggacccctgcttgtacgtctccccgactgtgtaggtagattgtcagttggggttccgaagtactctactcatacgtgtgtatgacagtttatttatgaaacaaaatacgcattgatcgttatggtgcagcctgggatttcttattataacataatgtatcgtatgtataaacggaccgtcctcagcacggacctaatataagcacgacctgttggcatcacatcagggatgggccgcatggcacatcgcacctagagagatgacaatgggaatccgaatgcccgacggttttacttgatatgaaaacatgatatgaaggcggatgcagatctagagatggcaatgggtgcttaatactcgacaggttttacctgatatgaagacggatacggaatgatttctctacccatgggtatgttaatgggtacaaacctctacccgttgggtatgagtatgggttgatattattcataccacttgtctacacatgggtaaaatgtacccgcatcaatatcactataaccatctaatagagttcatcttagctaaaaataaaatctttctctagctatcatttatctagataccaacttatgtaatcactaggtgagtgccggtgcgttgcaac

SEQ ID NO: 66028 - DNA, 1354 bp, Zea Mays
gtaggagagctttcatggaatgttgagcactactggtgcacttgaggctgcatatacccaggcaactggcaagcccatctctctctctgagcaacagcttattgactgtggttttgcattcaacaatttcggatgcaacggaggccttccatcccaggcctttgaatacatcaaatacaatggtggccttgacactgaggaatcttacccttaccaaggtgtcaatggaatctgcaagtttaagaatgagaatgttggagtcaaggttttggactcggttaacatcaccctgggtgctgaggatgaactgaaggatgctgttggtctggttcgcccagttagtgttgccttcgaggtgatcactggtttcaggctgtacaagagcggagtttacactagcgaccattgtggaactacaccgatggatgtgaaccacgctgttctggctgttggctacggtgtcgaagatggtgtaccctactggctcatcaagaactcatggggcgctgactggggtgatgagggttacttcaagatggaaatgggcaagaacatgtgcggtgttgctacgtgtgcatcctaccctattgtcgcatgaggcccttacgaagtgttacatggtctgtttggcatcaataatgcatgtttaacctgagcttggcgatgggttatacagaacggaaactctgtttgtgaatagaaaatcatgaagggaaggagttgaccggacccctgcttgtacgtctccccgactgtgtaggtagattgtcagttggggttccgaagtactctactcatacgtgtgtatgacagtttatttatgaaacaaaatacgcattgatcgttatggtgcagcctgggatttcttattataacataatgtatcgtatgtataaacggaccgtcctcagcacggacctaatataagcacgacctgttggcatcacatcagggatgggccgcatggcacatcgcacctagagagatgacaatgggaatccgaatgcccgacggttttacttgatatgaaaacatgatatgaaggcggatgcagatctagagatggcaatgggtgcttaatactcgacaggttttacctgatatgaagacggatacggaatgatttctctacccatgggtatgttaatgggtacaaacctctacccgttgggtatgagtatgggttgatattattcataccacttgtctacacatgggtaaaatgtacccgcatcaatatcactataaccatctaatagagttcatcttagctaaaaataaaatctttctctagctatcatttatctagataccaacttatgtaatcactaggtgagtgccggtgcgttgcaac

SEQ ID NO: 66029 - DNA, 953 bp, Zea Mays
catcaacctacgatttatctatggatgtgaaccacgctgttctggctgttggctacggtgtcgaagatggtgtaccctactggctcatcaagaactcatggggcgctgactggggtgatgagggttacttcaagatggaaatgggcaagaacatgtgcggtgttgctacgtgtgcatcctaccctattgtcgcatgaggcccttacgaagtgttacatggtctgtttggcatcaataatgcatgtttaacctgagcttggcgatgggttatacagaacggaaactctgtttgtgaatagaaaatcatgaagggaaggagttgaccggacccctgcttgtacgtctccccgactgtgtaggtagattgtcagttggggttccgaagtactctactcatacgtgtgtatgacagtttatttatgaaacaaaatacgcattgatcgttatggtgcagcctgggatttcttattataacataatgtatcgtatgtataaacggaccgtcctcagcacggacctaatataagcacgacctgttggcatcacatcagggatgggccgcatggcacatcgcacctagagagatgacaatgggaatccgaatgcccgacggttttacttgatatgaaaacatgatatgaaggcggatgcagatctagagatggcaatgggtgcttaatactcgacaggttttacctgatatgaagacggatacggaatgatttctctacccatgggtatgttaatgggtacaaacctctacccgttgggtatgagtatgggttgatattattcataccacttgtctacacatgggtaaaatgtacccgcatcaatatcactataaccatctaatagagttcatcttagctaaaaataaaatctttctctagctatcatttatctagataccaacttatgtaatcactaggtgagtgccggtgcgttgcaac

SEQ ID NO: 66030 - DNA, 2233 bp, Zea Mays
gctcgcgccgccattaccttccgttcttcattgggagattgaattttgcggcaaccactagtttagggactgcatgcgaacgcctgagtcaggcctgacccgcgctgattttaggctgccggctgccaagatataaaaaagatcgcttatcgccggcgccaagtgcagttaccaatacatcatgtcaagggacgcgtggtccgtgctggcggtttcggtctgcctcttggcttgccccgtgacgatcggcgggttctcgtggaacatcttctcctccccgtccccgtcgacggccgccacgggcggcgaccgcggtccggcgatggcgctcgacggcgcggtggccgacttcgccatggacggggccggtgggcccagagggctcaagctgctggagaacgcgcggggcaagctcgccgggccgcggaactgctggcaggatgcgtacggaaagctgttcgccagctgcggcgagatcatggccgacaaggagaggcagtcgcgcctggcgtggcacctcagcagctgcttccaggaggactcggggcgctcgcccttcccgtcctgcgccgagggatccgagatggtgcactgccgcaagcggctcggtgagtcccaagacaaggtcttcctcgagttcttcttggagaccaacaccctgtgccaccaattgcaggctgaagctttcaagcacaacaccgagagactcgtcaacgacctcacaaggacatccaagtatgccgaggagaagctcgaggtgatcgaggagagggctgaccacatcatcaaagagtcgagcaaagtccaggacacactgtcgtcgatcgagatgcagaccgacaacctggcagaggcgtcgaagcacgtcggggtgcagatcaacgacgtgctgctccactccaagtccatcttcgagcagtccaaggagatcgccaccgctcaggctgaactgggcagagggcaggcggagatgagggagaagatcgaggccggcatggcgcgcgttgaggagtcgtaccaaacgctaggaaacgggatggataagctgaaacaggagactggatatatccacaaggaaatccaaagtgtcggtgcgtcgatgtcttcgaagatgcagcatttgcagagcaccgctgatgacattgggagtgctgctggaaagtcgttggagaaccagatgcagctactgaatggacaggcccaggccatggatggactgaatgaactccacagctttcaagcacaagctcttgaagaaagcagggaaacagttcagagacttgcacagtttggccagcgtcagcaggaggagctgctgtcccgacaagaagagatccggcaagcccatgagcatctcatccagaattctcactccatactggaagcacaggaagagtttagagcaaagcaggctaacattttcgctgctctggacaagctgtacattctgcacaacgccattctagccgagtctcgcttcatcaaggcctttttcttctactgctgcattgtgttcctcgtctacatgctcaccagcgcaaagcagacgttcagcatcaggggccacctctactttggcctgtgcttcacgcttctgttggagatagggctgatcaaactcggtgctgacgacttcgacaggcagttctgggtcatgtccaaggtgttcttggtcagaatggcgttcctcggcgctgccactgttcagatcctgcactccatattcacctacagggactacgaagtgctgaactacgggctgctccagacgctggtggagaaggtccgggcgctggaggaaaacgccggtgggagggcaccgtcgtacgcctcggagtcggaggagagcctgagggactactcgtgggtcttcgacgagctggcagacgacgtggacagcaagatggacccaacctatgtcgtgccgccggagaggtcacctccaactcgacggcgcgaccaaatcgtcgtggcagaggagactggcgagaactccgtcaccacgtttgtctcccggaaatacaatctgcgggcacgaaaataggcagcggtctggtttttttttagttccgaaagagctattttgagtgccgcatcagatgttggtgaaattttaatttacacgttggtctaccgcattgtaaagaagctaccattcggaaataaaatcacgctggagaaatctcgtgtgctattcagcattttgcaattttcatgcttccattcgagcggc

SEQ ID NO: 66031 - DNA, 1790 bp, Zea Mays
atcagcgcccagcggctcagccataggagcatagtcctttctcctttgtgacccggcgcaaaaatatggcgtcgtcaccgtccctgcgccccacggacagactccgcaggcctccggcctctcccgcgttctgctccttttcggctgtctccctgcgcggcctcgtctcgctctccagcgcctctagggttctctccgtctccttccggcagcgcctgctgacggctgtgcggagctccagagaccctggagaggtgattgatgtggctagtggtgaaggaactgagctacctggaggctccactggtccaagaaaagatggaaaagagactgccaaaagtttctcaactaaagagtattcactaactgtaaacccaaacgtcaatgatgataaatctgccatatcctatctagatgtcatggtataatttaataaggtcatggatgtcgaagcttatttttacattggaaattttgttgagtggaagtaaatcttgcacttgaagaggcagaagacctcccagaagtcaattctcttagaattattaatttaacaggtttgaaataaatattggcgatgtttttttgtcaacttattagactgaattggctgagagagctattgcttggatggatagagttaagataaaaaatggaattggaaataagaattattggttaaataaccactatgtatggatctagatctatcttgtttatactggccactaggaaatttgcaagccattctcatgaacatttacacacttatacttgtccttgtaatgacattagctttgccttttcaattccgtactacaagtgacattattgatcatgtatttctacaagtgacagattgctagaaaaactaaagagatatggtgttgctggggttctgtcatatggactacttaacactgtctactatgtgactgcatttttgttagtctggttttatgttgcgcctgcacctggtaggatgggttatggtgcagctgttgagaggtttgttaaactaatggcaatggtctgggctggcagtcaagttactaagatttttcgagctggagggcttttatgactattgtagggttgtgctttgctgttgctgctctcatgttctttggattaacaatactttgggcatagaacatctgctttcctgacacagttaggaatcttgaagagatgctgtggatccaatcagtaacgcagtgatcacactctactgaaaaatctcacctaatattttcagtgtggttgtccatagcctgcatgaatatgtatcttcatggttcgttagtgatcgcaaacatcttgagtatacatatccctgtaaggtcctgttggaccgtgtgcagtcatgacacattttcaaaacaaaacatgtttgctagtggaattttgccatccaagcttgagatctggtaggagtagcttgtgatctttgtcgagctccacttgatctcctccccaaatctggagtttctctttttctgtgatttttggagccttttttgagagatttttagttcgtcggatttgggtgcaatttgtgtgaaatttcttatggaaaattggtgctaggacatatgtaaacaagcctagggtaattccctaacaaatacctcacttgagcaccgcaaattttgatttctcccaaatttccccatttccttagggtttctggaatgtctgtaattcgtggtaagtatttttgttgaatttcatggtgatgcactctcttggatgtgctgctggtgcacacaaatttgcttgcagtcggt

SEQ ID NO: 66032 - DNA, 1866 bp, Zea Mays
atcagcgcccagcggctcagccataggagcatagtcctttctcctttgtgacccggcgcaaaaatatggcgtcgtcaccgtccctgcgccccacggacagactccgcaggcctccggcctctcccgcgttctgctccttttcggctgtctccctgcgcggcctcgtctcgctctccagcgcctctagggttctctccgtctccttccggcagcgcctgctgacggctgtgcggagctccagagaccctggagagattgatgtggctagtggtgaaggaactgagctacctggaggctccactggtccaagaaaagatggaaaagagactgccaaaagtttctcaactaaagagtattcactaactgtaaacccaaacgtcaatgatgataaatctgccatatcctatctagatgtcatggtataatttaataaggtcatggatgtcgaagcttatttttacattggaaattttgttgagtggaagtaaatcttgcacttgaagaggcagaagacctcccagaagtcaattctcttagaattattaatttaacaggtttgaaataaatattggcgatgtttttttgtcaacttattagactgaattggctgagagagctattgcttggatggatagagttaagataaaaaatggaattggaaataagaattattggttaaataaccactatgtatggatctagatctatcttgtttatactggccactaggaaatttgcaagccattctcatgaacatttacacacttatacttgtccttgtaatgacattagctttgccttttcaattccgtactacaagtgacattattgatcatgtatttctacaagtgacagattgctagaaaaactaaagagatatggtgttgctggggttctgtcatatggactacttaacactgtctactatgtgactgcatttttgttagtctggttttatgttgcgcctgcacctggtaggatgggttatggtgcagctgttgagaggtttgttaaactaatggcaatggtctgggctggcagtcaagttactaagatttttcgagctggaggagcccttgctctggctccttttgttgagagagggctgaaatggttcacagtcaagttcaacttcaagtcagaagggaaggcttttatgactattgtagggttgtgctttgctgttgctgctctcatgttctttggattaacaatactttgggcatagaacatctgctttcctgacacagttaggaatcttgaagagatgctgtggatccaatcagtaacgcagtgatcacactctactgaaaaatctcacctaatattttcagtgtggttgtccatagcctgcatgaatatgtatcttcatggttcgttagtgatcgcaaacatcttgagtatacatatccctgtaaggtcctgttggaccgtgtgcagtcatgacacattttcaaaacaaaacatgtttgctagtggaattttgccatccaagcttgagatctggtaggagtagcttgtgatctttgtcgagctccacttgatctcctccccaaatctggagtttctctttttctgtgatttttggagccttttttgagagatttttagttcgtcggatttgggtgcaatttgtgtgaaatttcttatggaaaattggtgctaggacatatgtaaacaagcctagggtaattccctaacaaatacctcacttgagcaccgcaaattttgatttctcccaaatttccccatttccttagggtttctggaatgtctgtaattcgtggtaagtatttttgttgaatttcatggtgatgcactctcttggatgtgctgctggtgcacacaaatttgcttgcagtcggt

SEQ ID NO: 66033 - DNA, 1369 bp, Zea Mays
atcagcgcccagcggctcagccataggagcatagtcctttctcctttgtgacccggcgcaaaaatatggcgtcgtcaccgtccctgcgccccacggacagactccgcaggcctccggcctctcccgcgttctgctccttttcggctgtctccctgcgcggcctcgtctcgctctccagcgcctctagggttctctccgtctccttccggcagcgcctgctgacggctgtgcggagctccagagaccctggagagattgatgtggctagtggtgaaggaactgagctacctggaggctccactggtccaagaaaagatggaaaagagactgccaaaagtttctcaactaaagatgacagattgctagaaaaactaaagagatatggtgttgctggggttctgtcatatggactacttaacactgtctactatgtgactgcatttttgttagtctggttttatgttgcgcctgcacctggtaggatgggttatggtgcagctgttgagaggtttgttaaactaatggcaatggtctgggctggcagtcaagttactaagatttttcgagctggaggagcccttgctctggctccttttgttgagagagggctgaaatggttcacagtcaagttcaacttcaagtcagaagggaaggcttttatgactattgtagggttgtgctttgctgttgctgctctcatgttctttggattaacaatactttgggcatagaacatctgctttcctgacacagttaggaatcttgaagagatgctgtggatccaatcagtaacgcagtgatcacactctactgaaaaatctcacctaatattttcagtgtggttgtccatagcctgcatgaatatgtatcttcatggttcgttagtgatcgcaaacatcttgagtatacatatccctgtaaggtcctgttggaccgtgtgcagtcatgacacattttcaaaacaaaacatgtttgctagtggaattttgccatccaagcttgagatctggtaggagtagcttgtgatctttgtcgagctccacttgatctcctccccaaatctggagtttctctttttctgtgatttttggagccttttttgagagatttttagttcgtcggatttgggtgcaatttgtgtgaaatttcttatggaaaattggtgctaggacatatgtaaacaagcctagggtaattccctaacaaatacctcacttgagcaccgcaaattttgatttctcccaaatttccccatttccttagggtttctggaatgtctgtaattcgtggtaagtatttttgttgaatttcatggtgatgcactctcttggatgtgctgctggtgcacacaaatttgcttgcagtcggt

SEQ ID NO: 66034 - DNA, 2988 bp, Zea Mays
cttttcctccctttgtcagagtccgcagttactaccgcagctgagagatcaagacgagatctcggacgaaatggaagtttctcaaatttctgcatgcgaacgagaacgagcgccgacgcgtccaaatggcaaggccgtaattgcagtgccacgtctgaccgtttccctgtgtgtctgtctcctcactcccgtgtcccgtctccttttttcccactacgcggtcttcgctcgctcctcgagttcagtcctcacctccccaccgagctccattaatggcgcctcccctaattttgccataagtgccgagaccacgtggggtctgggaaggaaaggctactgccacttcagaggtcggcctgggaggctgcatcgcatccacatggggtaccagcccatgcacggcaacggcgggacagccggtgccgggacatcaggctccggcggcggcggcggcggagaccacttgcgccaccaccagcagcagcgcctgcacagcccccgcatggccggcggaggctccatgacgcgccgggccagctcgttcaagcgcggcgggggcggcgagatcgagctccagatcggctctccgcgctcgccgaggtgcgacgggttggggagccctccctcggactccgtggagtcgtccggtagcggcctcctcctccaccagagccagcagaaccagcacctccggttccggctcttcaagccgccggtctccggcggcagcgcggtcggacttggtctggggatccgcgagaggaggaagctcgggaacatgctgttcctcgccttctgcggcgtgtgcttgctcctcggcgtcgtcaagatcttggcgggcggctggttcgccctccctggcaatgacaaagacgccgatttgaaggatctctctatctccttctctggtgagaaagtgcatcaagctgatcatcacttcgtatacatgggaggaaaagagagtgacaggactttgatgacagtggaatctagcatcggtggaagagaagacggtgtggctgaggcctctgatatctggtctcagccaagcagtacaaatttcagacaatgcattgtttcaaactctcataaaaagcaagattctcatacgaatggttacattctcataaatgcaaatggaggtttgaatcaaatgagatttgggatatgtgacatggttgctgttgctaagatcctgaaggcaactctggttcttccttcactcgatcatacatcctactgggcagatgacagtgaatttaaggaccttttcaactggaggcacttcattgagtcactgaaagaagacattgatattgttgaaacacttccccctgaatacagtgacattgaacctttggctaaagctccggtatcttggtcgaaggttgaagcctgaaactcgatgtctttaagtattgagatatgatgaaagcactcactcagtattttattctgggcaggtgcattattacagagatgaaatcctcccccttctgaagaaacacaaagtcatttactttacacatacagattctcgccttgctaacaatggccttcctagttacattcagaaattaagatgccgagttaattacagatctttgaagtattctcatacaattgaagatcttggtaataccctagtttcaagaatgcgtcaggaccgaagcccatatcttgctctccatctaagttttgatttctttcaggtacgagaaggacatgctagcttttactggttgcagccataacttgacatcagaagaagaggaggaactgcgtaaaatgcggtatgaagtcagtcactggaaagagaaagaaatcaatgctactgagagaagaagccttggtggctgtcctttgacgccaagggaaacttcaattttactcaaaggactgggtttcactcgaagcaccagaatttacttggttgctggtgaagcttttggcaatggaagcatgaatgctctgaaggacgattttcccaatatttattctcattctacgctggcaacagaagaggaacttgcacccttcaaaaaccatcagaatatgcttgctggtcttgattacatcgtggctcttcagagtgatgtctttatttacacttatgatggaaatatggcaaaagctgtacaaggacatcgtcgttttgagaacttcagaaagactgttaatccagacaggatgaattttgtgaacctgatagatgaattcgatggaggaagagtgccttgggatatattcagctcagaagtgaaaagattacacaaagatagaataggtgctccatattttagggagcctggcgaattcccaaagctagaagagtctttctttgcaaatcccttgcctggctgtatatgtgagcaacatagtgaagaatgaagatgcaggtgtgctgatggttcttaacccacgcctctgaagtcagaaaatataggcctcttactgcctgccagatgttacttacaccgttgtcgagccacggtcagtgaattcgttccaatgaatacaccactgctgggacaattaattccagtctcagcccttactggactacacagtatggataatggatgttctgcaacgggcgtgactgaatcagtttttgcacgactgtagtatgagtggctaggcctatgaggctatgaaatttgctgcaattggtacataaaagatacacacactggaggagtgtatgccgagggcttataattttccacaacttttgtacttgattatttgtaacaagacattgtttgcagaattgcacaactacatttgcaaatacaatggtacatacaacatacatttccagtgctagccattcagaatgcagcaacggattttgattgtgcatacaaccctagcttatatgttcaagtctcaagaaaacagtttgaacttgtgcaaaatgtgtcaggttatagctatccatatatccgactaatttacatgaaactggccttgtatcccccactg

SEQ ID NO: 66035 - DNA, 2714 bp, Zea Mays
gaacggagtcctcctgcacctaccgctgccgatcccactgccccacagatcagccgcacatatctggcttcacgattcagtcgagcgttgtacccgcctacgtgcaccgggcgcatgggagcgatcgttgtggacctgtggcgcggcggtgtcccccagcctcttctctccctctcgcgcgacctcacaagcgcgaaccccacgaagccggagccaagccacgacgggtcgaccggtcgacggcccctcgacctgcccgcctcgcttcctccgacgcctagggttttctaccggacgccgccgccgccgcagcagcggcccgggatgcaggtgtgcccgcgcagttagccgccgtcggacccaccgccgccgcgcgccatgtcattcttgcggcggcgaaagccgctgccgccctctgacggtgacgagtccgaccacgacgacaacgacaaggggaagaagccgtcctcatcctccgggtcgccgtccaaggagcccacgaagcggaccaaggccaagtggtcgtgcgtggacagctgctgctggctggtcgggtgcgtgtgctccgcctggtggctgctgctctttctatacaacgcgatgccggcctcgttcccgcagtatgtcaccgaggccatcacggggccgctcccggacccgcccggggtcaagctgcagaaggaggggctgcgagttaagcaccccgtcgtcttcgtcccgggcatcgtcaccgggggcctggagttatgggaggggcaccactgcgccgaggggctcttccgcaagcggctatggggcggcacatttggtgacgtatacaagagacctctatgctgggtcgaacatatgtcattggacaatgaaactggattagacaaacctggaataagggtcaggccggtcacaggcctggttgcagcagactattttgtccctggatattttgtttgggctgtcttaattgccaatttagcacgtattggatatgaagaaaagaccatgtacatggctgcatatgattggaggttatctttccagaacactgaggtccgtgatcaaactttgagcagaataaagagcaacattgaactcatggtagcaacaaatggtggaaatagggtggtggtgatcccacactccatgggggtcctctattttttgcattttatgaaatgggtcgaagcacctcctcccatggggggtggcggtggtccagactggtgtgagaagcatattaaagctgtaatgaatattggaggacctttcttaggagttcctaaggctgttgctggccttttctcatctgaagccaaagatgttgccgttgctagagctatcgctcctgatgtcttggactctgatttccttgggcttcaaactttgcgccatttgatgcgtatgacccgaacatgggattcaacaatgtcaatgattcctaaaggtggtgatacaatttggggaaatctggattggtctccagaagatggcattgaatgtaaagctaagaagcacaaagccaatgatactggggtttctaaggatagcaatgggggaaatatcgaggttcaacctgaacctattaactatggaaggctggtatcttttggtaaagatgtagcagaagcaccttcttcagagattgagcagatagaatttcgtgatgctgttaaaggtaataatatcgcccattcaaatacgtcatgccgggagatctggacagagtatcacgaattaggatggggtggaataaaggcagtcgcagactacaaagtttacactgctagttctgttgtagaccttcttcattttgttgctccaaggatgatgcagcgtggaaatgttcacttttcatatggaattgctgataacttggatgatccaaaataccaacattacaaatattggtcaaaccccttggaaacgaagcattcctactgaaagggcatatgtctataagttggccccacaggcagaatgttatatacctttccgaattgacacctcggctgaaggcggggaggaaaatagctgcttgaaagggggtgtttacttagccgatggtgatgaaactgttccagttcttagtgcgggctacatgtgtgcaaaaggatggcgtggcaaaactcgtttcaaccctgccggcagcaagacttacgtgagagaatacagccattcaccaccctctactctcctggaaggcaggggcacccagagcggtgcacatgttgatataatggggaactttgctctaattgaggacgtcatcagaatagctgctggggcaaccggtgaggaaattggtggcgatcaggtttattcagatatattcaagtggtcagagaaaatcaaattgaaattgtaacctatgggaagttaaagaagtgccgacccgtttattgcgttccaaagtgtcctgcctgagtgcaactctggattttgcttaaatattgtaatttttcacgcttcattcgtccctttgtcaaatttacatttgacaggacgccaatgcgatacgatgttgtaccgctattttcagcattgtatattaaactgtacaggtgtaagttgcatttgccagctgaaattgtgtagtcgttttctttacggtttaataacaagtgacggagcagtacaccaagcagaaaaagatccacttctaaaccagttttcattgttttagagaaggtttggacaaaatatgccactttaatttt

SEQ ID NO: 66036 - DNA, 2167 bp, Zea Mays
actcgctcctcgagcctcctgcctgccatcaacgccagatcctagcccgccattaatgccgttaacccgagctcgagatcggaggcggcggccccgtgttcgcgccaggagtggccaccgtacgtgtgacacgcgccgccgccgtttataaaagcacaccgccgctcgctcgctcgctcgcccgcccgcccgccactactcactcggctcgggttctgctctgcacctcagtacctcacactgtcaccgcgcttctgtgacctgacgaccttcggcggcaggatgctcacgtgcatcgcgtgctccaagcagcagttcgccggcggcggcccgccgctgcacgaaccgccggaggacgacgatgtagttgacggaggaggcggcggcacggcgacgcccagaacacggcacgccatcaaggcgctgactgcccagatcaaggacatggcgctcaaggcgtcgggcgcgtacaggcactgcaagccctgcgcaggctcctcggcggcggcctcgcggcggcaccacccgtaccaccaccgcggcggcagcgccttcgggggctccgacgccggctcggcctccgaccgcttccactacgcgtaccgtcgcgcgggcagttcggcggacgccacgacgtccatgagcgtgcgcacggacttccctgccggcgacggggaggacgacgaggtggcgtcagaagccgctggcggatgcggtggcaaggacgacgacgccaaggagtgggtggcgcaggtggagcccggcgtgctcattaccttcgtctcactggcgcaaggtggcaacgatctaaaacgtattcggttcagccgtgagatattcaacaaatggcaagcacaaaggtggtgggctgaaaattatgacagaattatggaactttacaatgtgcagaggtttaaccaaactgtccctctagtcccgactaccccaaaatctgaagacgagagctccaaggacgacagcccagtaacaccaccactggacaaggaacggctgcctcgcactttccacagacaagcgatgggctactcgtcatcagattctctcgagcatcactcaaaccgctactgtactggcctcctgcaccagcatggacaccaatgctgtgattcaatgggcctggcatcaacaccgaagttgtcaagtatcagtggggccaagacagaaacctcatccatggacgcatcgatgaggacaagctcgtcacctgaagaggtcgacaggtctggtgagctcacggtgtccatcagcaatgcaagcgaccaggagagggagtgggtcgaggaagacgagcctggtgtatatatcacaatccgggctttacctggcgggaccagagagcttcgccgtgttcggttcagccgggagaagttcagcgagaggcatgccagactatggtgggaagagaaccgagcgaggatacacgaacaatacctctgagaagaaacgcccgagaccatcagcatcagaagcacagaaagctttccttcggttgagctgatggtacatctggcactaacacttctacatgcatttccagcttcattcaatgttttgatgaccgaagaggcgaaggggtcccgtttccggcattttacattctttcagtccttttgccgttttctcgtcagttttgaactggaaatgcgtgagcgactcatttagctcaaaaaggtctctcgttttgggggtggggtaatgtacgtctttcactgctgagcctgtagtttccactttccggcaaccaaaaggtctctcgtttttcatcaataatactacatatctacctgttgtttcccataggacaaaatagcatgtttgtgtcgttgggcactattttgctgttgtcactgtcttattgtactactcttccagacagcacaattatcaacacacaagttggtactgagtgcgccccaactcaaaaccactttgtgacgggttgattgtatcattaacgatagttggacgcacaacgactaagagcctttttcttacgtgctattataaaagtttataattgtccctaagctattagaaaaaagtaagtaatcagaggtgccactggttcacttttctttatccttcatatcacttaggactagtttaataactgttgggaacttattcccaaatgctatgaatcaag

SEQ ID NO: 66037 - DNA, 2082 bp, Zea Mays
actcgctcctcgagcctcctgcctgccatcaacgccagatcctagcccgccattaatgccgttaacccgagctcgagatcggaggcggcggccccgtgttcgcgccaggagtggccaccgtacgtgtgacacgcgccgccgccgtttataaaagcacaccgccgctcgctcgctcgctcgcccgcccgcccgccactactcactcggctcggcagttcgccggcggcggcccgccgctgcacgaaccgccggaggacgacgatgtagttgacggaggaggcggcggcacggcgacgcccagaacacggcacgccatcaaggcgctgactgcccagatcaaggacatggcgctcaaggcgtcgggcgcgtacaggcactgcaagccctgcgcaggctcctcggcggcggcctcgcggcggcaccacccgtaccaccaccgcggcggcagcgccttcgggggctccgacgccggctcggcctccgaccgcttccactacgcgtaccgtcgcgcgggcagttcggcggacgccacgacgtccatgagcgtgcgcacggacttccctgccggcgacggggaggacgacgaggtggcgtcagaagccgctggcggatgcggtggcaaggacgacgacgccaaggagtgggtggcgcaggtggagcccggcgtgctcattaccttcgtctcactggcgcaaggtggcaacgatctaaaacgtattcggttcagccgtgagatattcaacaaatggcaagcacaaaggtggtgggctgaaaattatgacagaattatggaactttacaatgtgcagaggtttaaccaaactgtccctctagtcccgactaccccaaaatctgaagacgagagctccaaggacgacagcccagtaacaccaccactggacaaggaacggctgcctcgcactttccacagacaagaaaagttgggtgcagcgatgggctactcgtcatcagattctctcgagcatcactcaaaccgctactgtactggcctcctgcaccagcatggacaccaatgctgtgattcaatgggcctggcatcaacaccgaagttgtcaagtatcagtggggccaagacagaaacctcatccatggacgcatcgatgaggacaagctcgtcacctgaagaggtcgacaggtctggtgagctcacggtgtccatcagcaatgcaagcgaccaggagagggagtgggtcgaggaagacgagcctggtgtatatatcacaatccgggctttacctggcgggaccagagagcttcgccgtgttcggttcagccgggagaagttcagcgagaggcatgccagactatggtgggaagagaaccgagcgaggatacacgaacaatacctctgagaagaaacgcccgagaccatcagcatcagaagcacagaaagctttccttcggttgagctgatggtacatctggcactaacacttctacatgcatttccagcttcattcaatgttttgatgaccgaagaggcgaaggggtcccgtttccggcattttacattctttcagtccttttgccgttttctcgtcagttttgaactggaaatgcgtgagcgactcatttagctcaaaaaggtctctcgttttgggggtggggtaatgtacgtctttcactgctgagcctgtagtttccactttccggcaaccaaaaggtctctcgtttttcatcaataatactacatatctacctgttgtttcccataggacaaaatagcatgtttgtgtcgttgggcactattttgctgttgtcactgtcttattgtactactcttccagacagcacaattatcaacacacaagttggtactgagtgcgccccaactcaaaaccactttgtgacgggttgattgtatcattaacgatagttggacgcacaacgactaagagcctttttcttacgtgctattataaaagtttataattgtccctaagctattagaaaaaagtaagtaatcagaggtgccactggttcacttttctttatccttcatatcacttaggactagtttaataactgttgggaacttattcccaaatgctatgaatcaag

SEQ ID NO: 66038 - DNA, 471 bp, Zea Mays
gttcagtgtttaaattgaggctgggtgctggtattgtatgagcaccctgggatcactcctttgctgcatgcttgacatgttcactaggtgtttgctccatttaagctgccgtaaagactttgttcagtgatattctacttcctatcctcaagctctaaccagtgtccactgcaaaggtgaagcagctctggcatttctactactgttaccttctccttcatcataaggttaaactactcaagagccctgcacaccatcgccagtctggtgaccatgccacccggttccctcacctcgccgtgggcaagacgtctcagggagtgaccagcccgaatgaccctcgttccacgttctcctaagagcacctagaagaagtggtgtttaaaggaggagtctactccagtggctgctaatcaagtggaggagccatctaactgggtattggatagtaggatctggaacctcttcact

SEQ ID NO: 66039 - DNA, 776 bp, Zea Mays
ctttgttttgcttataaatgatagcttgttcgagctaatgagctagctcggggtgatcgagttggctcattaacaattcagtttcgttaacaagcctggagggaaaaaggacacatcacccaaaggcacagggaatcgcaccatcgtgggacccgtacagcgcaccgcccagccgccggatctgcgccggcgacgcgcccggacgtcggatctacgccgccgcaggaggggggaggcggcgctgtggccgttctctgcccgtgagcgcccggatccgtcccgccgcaaggattatggatccgaaagagaagccaaatgtatcgagcagtccaccaacaccacggctggactgcataaaatgctttgatatgctctggttctgttactcaccattccaccagatgcagaattattaccggtatggggagttcgacacctgcttcggcaagtggggcgatcttatgggctgcctcgctctcaagacaaagcggaaggcagaggtggaggagatcctcatcgcgcgggagaaggccaaaccacatatctggacctaccggacggtcgatgaggcatcggagaattggtggcggatgtacaagcatgctgtgatgatgtcaccactgccaggttctgctcagcttcctcgggtccctaagccgacgagtgagtgtgctgcgtgccccagcccagatgggtcgagcgcgtgggcgagcgcggaggggggagaggcgaggcggccggagccgagcgtgagagaggtggaagtcccgcggcct

SEQ ID NO: 66040 - DNA, 2007 bp, Zea Mays
cggggtgatcgagttggctcattaacaattcagtttcgttaacaagcctggagggaaaaaggacacatcacccaaaggcacagggaatcgcaccatcgtgggacccgtacagcgcaccgcccagccgccggatctgcgccggcgacgcgcccggacgtcggatctacgccgccgcaggaggggggaggcggcgctgtggccgttctctgcccgtgagcgcccggatccgtcccgccggtcataattccagaccgctggcgtcgtcgggtacttaggttccgacatgttcattcatgaagcgtgttttggctttctgattttttggtgttattcaattgcaaatacgtgggcttcggatctcgtataatttcttatcaaacatgttggattactcgtggagtgtttctcacttgtgtgaaaccgtgtgagctatttgaacaattcgatccggtcagcaaagggaaaacttttttttaaaaaaatatctgtgtggggggatcgatttgttcctagcatcctgtggacttaaatcagttgaactttggagtccttgtttagcttgtcaccgtcaattaattctacttcatttctggccgcatgcaaaatctgcctaactaatcgtaaacatttctggtggcatgcaaaatccgcactgatcccaatcactggattgtattacagacctatgtgattctgatgatatttggtcacctagtaccaaaacaggcggaaatggttgttttcctcgagaagctaattattattttttacattttaggcttgttcatttcgccgttaatccatgtggattgggtggtattgagtcggtttaaatccataataggttaaaattcatctcaatccatcccaatacactctaatccacatggaattggaataaccgaacaaggctttagtgagaataatacacgtgtatgcttacatgtgtgttgttataaatcctctttattgattctactctctgtccgagattgagatctaagctttagtgacatttctagttataatggtcttatcaccagtggttttgaaatgtagtcagaagcttgcaacactcaaatataatctactacttattgtggtcaacagttgttaataggtttatcgccttataggggatagacttgtgaagccatgctacctcactctggcaaaggactgtaacttagtcctttgcaatggaatgagcaaagaaaagatccaaagaatattgcgtttatggaagcaacttgatagttctgttacatgctaggctgctagctaatccatttgtaccagacaacagacatctgtaatcgctccatatttttttgtatttcctagatttgtctagaatcttacatttatcattgcatgaacgttcattttgtgttatatagtattcatttatcatatatatcaatcaaaatggtcctgtgatatcgagcttcagttgatgcagaggtggtgaaaacatcttgtcttctccaaagactgctgactgcaagttgcaaaacaaggattatggatccgaaagagaagccaaatgtatcgagcagtccaccaacaccacggctggactgcataaaatgctttgatatgctctggttctgttactcaccattccaccagatgcagaattattaccggtatggggagttcgacacctgcttcggcaagtggggcgatcttatgggctgcctcgctctcaagacaaagcggaaggcagaggtggaggagatcctcatcgcgcgggagaaggccaaaccacatatctggacctaccggacggtcgatgaggcatcggagaattggtggcggatgtacaagcatgctgtgatgatgtcaccactgccaggttctgctcagcttcctcgggtccctaagccgacgagtgagtgtgctgcgtgccccagcccagatgggtcgagcgcgtgggcgagcgcggaggggggagaggcgaggcggccggagccgagcgtgagagaggtggaagtcccgcggcct

SEQ ID NO: 66041 - DNA, 600 bp, Zea Mays
gatcgagttggctcattaacaattcagtttcgttaacaagcctggagggaaaaaggacacatcacccaaaggcacagggaatcgcaccatcgtgggacccgtacagcgcaccgcccagccgccggatctgcgccggcgacgcgcccggacgtcggatctacgccgccgcaggaggggggaggcggcgctgtggccgttctctgcccgtgagcgcccggatccgtcccgccgaattattaccggtatggggagttcgacacctgcttcggcaagtggggcgatcttatgggctgcctcgctctcaagacaaagcggaaggcagaggtggaggagatcctcatcgcgcgggagaaggccaaaccacatatctggacctaccggacggtcgatgaggcatcggagaattggtggcggatgtacaagcatgctgtgatgatgtcaccactgccaggttctgctcagcttcctcgggtccctaagccgacgagtgagtgtgctgcgtgccccagcccagatgggtcgagcgcgtgggcgagcgcggaggggggagaggcgaggcggccggagccgagcgtgagagaggtggaagtcccgcggcct

SEQ ID NO: 66042 - DNA, 1229 bp, Zea Mays
acgacttctgaaacgggtaatgctagtgctgagctgctgaagacggttgtgctctcaggcaccaaaacattcggatctgaaatcctaaacggaagtgagacgcccaatcggtgatccaccgcttccccgtcggtaccatgtccgctggaagcgagaggccgtacgccttctcgcccccgtcggcggtcccgggccccttctcccgcggctccggctccgctcccaccacggccgcgacagatagcactgggaggagctcgtcctccgtggcgccgacgaagagccgaaagccaccgttccggcccgccgtggacgacacaaagcccgtcctccgcgatccgatatcacgctcggacctggcggtcaccgagcaggtcgtgctgcggctgccgccgttcccctaagttcgcgccacccaatggcatatgaaaataaagaagaggaagaaaatgttgaggatcgagaacattcaaactagtatattctgtggcgagatttgaattccacatgtacagccaaaaaattgaattcaaaagagagaaaactctactaagttatcacaaatactctttcatcctgtagcggcacaccaggagtgtactagtgttaaatctgtagtagagtcagttgctacctcgcttgctattctttatgattcgcttgtgacaaagaatctattcttgtcgataacccaattcatagattttaggtcttccccgcattctatttacaatgtcacggagaaatgactaagcaactgacttgtgaaggtaacaggtataagtgctgcaacagtgaagtatcacagggtcgtaagaatgtttgttttgtttatggcatgctgttatgtggggacattaataccagaggagaaccaagaagcagcagaacgggttagagattagttagatcagttcaagtttattagaatggatagaatcagtttgaatacagtttattagattggatagaataagtctgttaggatatgcagtcgagttattagataagtgttagcacttagatctcctatttggagaatattcggttggccttaggcctatatattcaagattattgttagcaagaaaaggcaagcactgaaatcaatctattatcctctaccctagcttacctagtctccctcctgctagtcaccattgatcatttgatcgatggcgtccttccggcgatcaccactatctgcgcagtgaggggcctgcgcctcc

SEQ ID NO: 66043 - DNA, 602 bp, Zea Mays
acgacttctgaaacgggtaatgctagtgctgagctgctgaagacggttgtgctctcaggcaccaaaacattcggatctgaaatcctaaacggaagtgagacgcccaatcggtgatccaccgcttccccgtcggtaccatgtccgctggaagcgagaggccgtacgccttctcgcccccgtcggcggtcccgggccccttctcccgcggctccggctccgctcccaccacggccgcgacagatagcactgggaggagctcgtcctccgtggcgccgacgaagagccgaaagccaccgttccggcccgccgtggacgacacaaagcccgtcctccgcgatccgttctttgctcaaccatattaatctaaagatggtgccctttctgcgcatgttcgtcaactcgacagtttgtcaattggaaactttgcccgtctaattatggttctggaccattagtggtttttgtattcaattagtaaactgagttatatagaagtaatgataattggttatctacatacatgtttgatttaccctggtaaatcagggttaaattactagtataagaatttacacaagtggtgctgtggccgggaaacaata

SEQ ID NO: 66044 - DNA, 3914 bp, Zea Mays
ggcctaccgcacccgcaaaatttcccaaaccccgcacacaattgccggaaccctagctccactccatcctcccagcccgcaccaatgacggaccaacaaacccaggatctcgtcaaggagctcgtccaccgcctcctctccgccgccgaatccggcgggcgcggcggcgggcgcgacacgggcggtgcgctgcggttcgcgcaccgaatcctctccagccgcctcgcccccgcggtcctccccgatgagcacgcgctcgcggagtccatcaagcgccgcctcgccgcctcgggccgccccgatgatgcgctctcattcgctgacctccactccaagctctccgtccgtgcccgcccagcgtcgctgtggccgctcctctacctgctcgactctctctcctcgcagtaccgcgccgccgccgcggcttcgtgcctcccaaaccttcccatcgccgccctaccgcagaatgccacctcggggacggcgccgggcgccggtgtcaggccgggttcgcggacgcacggggcgccgccgggcggcctggtgctggtctccaaggatccggacaacatccgcgagatcgcgctgcgtgagtacaccgagctggtgatcgacgagacggaggtgtcggaggccgcgcttgtgcgggacgtgctgtacgcgtgccagggcatcgacggccgctacgtgcgctatgacaagtccgtggactcctacgaccttccagacggtgttcgagtgccgcgatccacgcgcaccctcgttcgcaagctatgcgagcttggctggctgttcagcaaggtgcggggcttcatttctgacaacataagccgctcgccctcagatgctgccactgaggtgggcactgttacccaggcattctgctcggcgctccaggaggagctgtctgattattataagctgctggctgttctggaatcgtactcattgaatccaattcccacacctggatctgattcaggtgtgtccagtaattacctctcactgcgccgtcttgcagtgtggcttgctgagcctgcagtgagaatgcgcctaatggctgttctggttgatggatgccggggactgaggggtggtgctatggctggtgtgatccatgggcacgcacaacacggagatcctatgtttcaggagtttatgggccgattactgcgccgggtgtgctcgccgttgtttgagatggtcaggagctgggtgctagaaggggaattggaggatgtatttgcagagttttttatcgttgggcagccagtgaaagcagaatctttgtggcgggagggctaccttattcaatctgatatgcttccagctttcatatctccagtgctcgcaaaacggattcttagaactggcaagtcaatcaactttcttagagtatgctgtgacgatagtggctgggctgatgctgctgccgaggctgctgcatatgttggcactacaacatctcggggtggccttggttatggggagactgatgctttggaggcattggtggttgaggcagccaagaggattgatcgacatttgatggatgtcattcataagcggtaccgatttaaggaccactgccttgctattaagcgttacttgcttcttgggcagggtgattttgtccagtatcttatggacgttgttggccccgagttatcagagccagcaaataggattagctccttccaattggctggcttgcttgagactgcaatccgagcatccaatgcacaatatgatgactgtgatatcttggaccggataaaggtaaagatgatggatcatggggatggtgatcgtggctgggatgtcttctctttggagtatgatgctagggtccccctggacactgtgttcacagcttcagttatgaagatgtatctcaaggttttcaacttcttgtggaagctcaaacgcgtagatcactcccttaccggagtgtggaagactatgaaacctaactgcattgtttcttctccattttacaaggaaggaacaagcatcagagctcaatttgtatcagttcttcgtaaatgtcaagttctattcaatgagatgaatcactttgtgaccaatttccaatactacattatgtttgaggtcctggaggtttcgtgggcccgtttttctgatgaaatggatgcagcaaaggatttagatgaccttctcttagcacacgataaatatctcaactcgatactggagaaggccctgcttggtgaacattcccaaggacttttgaggaatctgtttgaactgtttgacattattttacagtttcgaagccatgctgatcgatggtttgaaaggatatatgagttgcagctaaggggaaagggtaaatcaaaatcaaaggatacaggttcatggtttgatggcggcagaaaagctatgatccaactagctggagaacttttctggaaaatgggtgaagacctggatagcatcgcaaaggattatacagcttctcttgatgcttttattacgcagctgcccatgcaacagcacgtcgatttgaagttccttctcttccgccttgacttcactgaatattacagtcgtgtttcctccaacaaatgaataagaggatctgaatacccttttactgaggattgccaatgctacaatctggtgattctgtcagctgtttgcatgctgatgcttatgtgccgattcaacgaggctaaagccacgcatttcatgcaactctgtacacaatttgtccataagctagtgacctgcttggagcatgatgcaactgaatggcctgcttggagcatgatgcaactgaatggatgcggaaaaaggagacttgaagaaatccgtgggaatttgcagatgttcaagctttgtcaaatacaaaaaatttggttagttttgggagtggttgctatttcttgtgcaaaattgtgagcaacgatcttaaattgaaacatttgcatgtagagaaaatacttgagcgttatattgaataaaactaattgtatagcaccaaccgaggatgaatggatgatctatgcaaaatgtaacttacaagtgccaaataacaggtttgcaaggctaaattaaagtgacaatctgaaatttccaacaatacttagggtgtgtttggttcaggtttctgaatcaaattcagaaccaaaaatctgaaatcttaaccaaatgggtacaacaacgaaatatattcctgaaaatcaaatttatagttcaatttagaatcacctcttatcttaggtttttcagatttctgacatctatgttataaactgtcatagtcttatagaatctatagttgatagttgttttaactaaataaattttagtttttcattattgttagctcacctcggtcttttcacagctcacaactagaataatatttttagaaatgtacaaatgaaccaaatatacccttaatctgtgtatgtctagaaatttagaaaacacatagttttaaaattgattaaccatgcatggaatatctccagttctgtgtatgtcgagaaattcagaaatctggagatctcttggaattagttgcatcccataaagatgccttatcaactttagatatgctggagcgccctattgaaaattttgagagtacatttcatcctggtggcaatgaaagtaacctgtttatagcgggggataagaaagacgataacgaggaaggagatgttcaaaatggtcagctagtacaagaagaagagagggagaaaggccgggttggatttattgtctactggaagtatattatgatggcatataatggaacacttgtgccacttattttgctagctcagataattttccaagttcttcaaattggatgcaatttctggatggcttcggcagcaccaatatcaaaaaatgtgaatcctccaatcagtagtttgcag

SEQ ID NO: 66045 - DNA, 4170 bp, Zea Mays
ggcctaccgcacccgcaaaatttcccaaaccccgcacacaattgccggaaccctagctccactccatcctcccagcccgcaccaatgacggaccaacaaacccaggatctcgtcaaggagctcgtccaccgcctcctctccgccgccgaatccggcgggcgcggcggcgggcgcgacacgggcggtgcgctgcggttcgcgcaccgaatcctctccagccgcctcgcccccgcggtcctccccgatgagcacgcgctcgcggagtccatcaagcgccgcctcgccgcctcgggccgccccgatgatgcgctctcattcgctgacctccactccaagctctccgtccgtgcccgcccagcgtcgctgtggccgctcctctacctgctcgactctctctcctcgcagtaccgcgccgccgccgcggcttcgtgcctcccaaaccttcccatcgccgccctaccgcagaatgccacctcggggacggcgccgggcgccggtgtcaggccgggttcgcggacgcacggggcgccgccgggcggcctggtgctggtctccaaggatccggacaacatccgcgagatcgcgctgcgtgagtacaccgagctggtgatcgacgagacggaggtgtcggaggccgcgcttgtgcgggacgtgctgtacgcgtgccagggcatcgacggccgctacgtgcgctatgacaagtccgtggactcctacgaccttccagacggtgttcgagtgccgcgatccacgcgcaccctcgttcgcaagctatgcgagcttggctggctgttcagcaaggtgcggggcttcatttctgacaacataagccgctcgccctcagatgctgccactgaggtgggcactgttacccaggcattctgctcggcgctccaggaggagctgtctgattattataagctgctggctgttctggaatcgtactcattgaatccaattcccacacctggatctgattcaggtgtgtccagtaattacctctcactgcgccgtcttgcagtgtggcttgctgagcctgcagtgagaatgcgcctaatggctgttctggttgatggatgccggggactgaggggtggtgctatggctggtgtgatccatgggcacgcacaacacggagatcctatgtttcaggagtttatgggccgattactgcgccgggtgtgctcgccgttgtttgagatggtcaggagctgggtgctagaaggggaattggaggatgtatttgcagagttttttatcgttgggcagccagtgaaagcagaatctttgtggcgggagggctaccttattcaatctgatatgcttccagctttcatatctccagtgctcgcaaaacggattcttagaactggcaagtcaatcaactttcttagagtatgctgtgacgatagtggctgggctgatgctgctgccgaggctgctgcatatgttggcactacaacatctcggggtggccttggttatggggagactgatgctttggaggcattggtggttgaggcagccaagaggattgatcgacatttgatggatgtcattcataagcggtaccgatttaaggaccactgccttgctattaagcgttacttgcttcttgggcagggtgattttgtccagtatcttatggacgttgttggccccgagttatcagagccagcaaataggattagctccttccaattggctggcttgcttgagactgcaatccgagcatccaatgcacaatatgatgactgtgatatcttggaccggataaaggtaaagatgatggatcatggggatggtgatcgtggctgggatgtcttctctttggagtatgatgctagggtccccctggacactgtgttcacagcttcagttatgaagatgtatctcaaggaacaagcatcagagctcaatttgtatcagttcttcgtaaatgtcaagttctattcaatgagatgaatcactttgtgaccaatttccaatactacattatgtttgaggtcctggaggtttcgtgggcccgtttttctgatgaaatggatgcagcaaaggatttagatgaccttctcttagcacacgataaatatctcaactcgatactggagaaggccctgcttggtgaacattcccaaggacttttgaggaatctgtttgaactgtttgacattattttacagtttcgaagccatgctgatcgatggtttgaaaggatatatgagttgcagctaaggggaaagggtaaatcaaaatcaaaggatacaggttcatggtttgatggcggcagaaaagctatgatccaactagctggagaacttttctggaaaatgggtgaagacctggatagcatcgcaaaggattatacagcttctcttgatgcttttattacgcagctgcccatgcaacagcacgtcgatttgaagttccttctcttccgccttgacttcactgaatattacagtcgtgtttcctccaacaaatgaataagaggatctgaatacccttttactgaggattgccaatgctacaatctggtgattctgtcagctgtttgcatgctgatgcttatgtgccgattcaacgaggctaaagccacgcatttcatgcaactctgtacacaattgtaagtttgttttgatcttgattttcatggatgttctggtgtaaatttaatatttattttttctctattaatttcttgagaattaaagctggaggtcttgaagatttgtccttaacagtttgtattgtcagttttacaagagcagataactcattacattgttttgatcttgaagtttggtttagaaatgtaatgtaaatagcaacggtaatgatttacactcgagtatcggtaataataagctaaaatagaacaatattaatttttagtgtggtatccgattacggtaacgttatcagttatctatcaccagttatctctcacgttacaaatacaaatatgtgaagcaaacatcacctcagtgtccataagctagtgacctgcttggagcatgatgcaactgaatggcctgcttggagcatgatgcaactgaatggatgcggaaaaaggagacttgaagaaatccgtgggaatttgcagatgttcaagctttgtcaaatacaaaaaatttggttagttttgggagtggttgctatttcttgtgcaaaattgtgagcaacgatcttaaattgaaacatttgcatgtagagaaaatacttgagcgttatattgaataaaactaattgtatagcaccaaccgaggatgaatggatgatctatgcaaaatgtaacttacaagtgccaaataacaggtttgcaaggctaaattaaagtgacaatctgaaatttccaacaatacttagggtgtgtttggttcaggtttctgaatcaaattcagaaccaaaaatctgaaatcttaaccaaatgggtacaacaacgaaatatattcctgaaaatcaaatttatagttcaatttagaatcacctcttatcttaggtttttcagatttctgacatctatgttataaactgtcatagtcttatagaatctatagttgatagttgttttaactaaataaattttagtttttcattattgttagctcacctcggtcttttcacagctcacaactagaataatatttttagaaatgtacaaatgaaccaaatatacccttaatctgtgtatgtctagaaatttagaaaacacatagttttaaaattgattaaccatgcatggaatatctccagttctgtgtatgtcgagaaattcagaaatctggagatctcttggaattagttgcatcccataaagatgccttatcaactttagatatgctggagcgccctattgaaaattttgagagtacatttcatcctggtggcaatgaaagtaacctgtttatagcgggggataagaaagacgataacgaggaaggagatgttcaaaatggtcagctagtacaagaagaagagagggagaaaggccgggttggatttattgtctactggaagtatattatgatggcatataatggaacacttgtgccacttattttgctagctcagataattttccaagttcttcaaattggatgcaatttctggatggcttcggcagcaccaatatcaaaaaatgtgaatcctccaatcagtagtttgcag

SEQ ID NO: 66046 - DNA, 4123 bp, Zea Mays
ctctctctcctctctcctagcctttctttcctggcggcggcgacgccgactactgggcgagcagcgccgccatacccagttcgtcgggcccttcgaccttcgtcggcaacgagcttccaccagaagccattacagtaccatggaggaacctctgttggaccatgaatcttcttccttatctgaagcaacaggtcgtagatcacttttctcagatgctggattgtttagtaatatcaccttttcttggatgggtcctttacttgatcttggcaagaggaaaacactagaccttcatgatgtgccattcttggatgacagtgacagtgtccacggaatcacccctaagtttaaatcaaagattgcctcgatttctgccacagggcaatacactgatgttacaacagttaagttagtcaaatctcttgtgctcacaacatggaagctaatcattatcactgcagtttatgccctaatccgtaccgttacttcatatgttggtccctatctcatcgagcacttcgttgactacttaaatcaaagcacacgatccactaaaagaggataccttttggtgttggcatttgttgctgcacagctgatggaaggtctctcatcaaggcatttgctctttagatctcaacaattaggcttgcgcgtgcattctgctcttattgcaattatttaccaaaagggtcttgccctctccagccaatccaagcaaggtagttcaagcggggagctgatcaatgttgtgaacattgatgctgagcgagtaggagatttcaattggtctctgcatgaactttggctgctcccagtgcaaattagtctcgcaatgattatcttatactctactcttggcttggcatcattcgctgcccttgctgcctgtgttttgacaatgttggctaacatacctttggggcggattgagcaaaattaccaggagaaaactatgaatgccaaggatgctagaatgagtgctatgtctgagatattacagaacatgcatattctcaagcttcatggttgggaattggttttcttgtcaaagattaaagagataaggaaggttgagatgaactgggtaaagaaatatgtctacacctcatcaatgcttatatctgtatttttttgtgcccctgcatttgttgctatgatcacttttggaacttgtataattatcggcatcccattagaaacagggaaagtattatctgctctagcaacatttaggcagttgcaaggtccgattcacagtctgccagacgcgatctcatcaatcattcagacaaaagtatcacttgacaggatatgttcatttctctgccttgaggaattagcaagtgatgcagtaactaagcttccgagtggtagcaccgatatatccattaaggtgagaaatggtagcttctcctggcaaaaattctctcaggtgcctactctccaagatctggacttgtgtgtgcaacaaggaactagagttgctatctgtggaactgttggatcgggtaagtcaagcttattgtcttgcatacttggtgagataccgaagttatctggagaggttcaaacttgtggtacaattgcttgtgttagccaatcaccatggatacaaagtgggacaattgaagaaaacatacgttttggtacacaaatgaacagggaaaggtacaaaaatgtccttgaggcatgctgtttaaataacgatttggatatattacctttgggtgaccaaacaattataggagaaagaggaatcaacttaagtggtggacaaaaacagaggatacagattgcccgtgctttgtatcaagatgctgatatcttcctatttgatgatccatttagtgcagttgatgctcgcactggactgcacttgttcaaggagtgcttgctagaatttttagcttcaaaaactgttatatatgttacccatcatgttgaatttttaccttcagctgatcttatcctggtcatgagagatggaaaaataacacagtcaggggattacactgaaattctgaaatctggagaagatctcttggaattagttgcatcccataaagatgccttatcaactttagacatgctggagcgccctattgaaaattttgagagtacatatcatcctggtggcaatgaaagtaacctgtttatagcgggggataagaaagaccagaacgaggaaggagatattcaaaatggtcagctagtacaagaagaagagagggagaaaggccgggttggatttattgtctactggaagtatattatgatggcatataatggagcacttgtgccacttattttgctagctcagataattttccaagttcttcaaattggatgcaatttctggatggcttgggcagcaccaatatctgaaaatgtgaatcctccaatcagtagtttgcagatggtaaatgtgtactttgcattagcaattgttagctcattgtgcatattcattcgatcacatcttcttgtcatgaccggatgtaagactgctaatattctatttgagaacatgcacaactgcattttccgagcaccaatgtctttctttgactccacacctagtgggcgaatcttgaacagagcttccacagatcaaagcacagtggatacaagaatttttgacctgatgggctatcttctatttcctgctattgagattctaggaacagttattctgatgtcacatgttgcatggcaagtcttcatagtttttgtccccattattactgcatcgctgtggtatcagcaatactacatagatgcagctagagagttgcaaaggttggttggagtttgcagatcccccgtgcttcaacatttttctgaatcaatggctggctcaaatataattagatgctttcaaaaggaaagacaatttatccgttatattggatatttggtggataatttatctcgaccaagtttgtataatgcagccgcaatggaatggttgtgctttcgcttggatatgctttcatcctttgttttttccttcacattgatacttctggtctcttcaccatctgctttaattgacccaaagactgctggtcttgcggtcacttatggactaagcctcaatatgctacaagggtgggctattgctgtcctctgcagtttagaaaatagaatgatatcagtggaaagaatgttgcagtatacgactattccttcagaaccaccacttacaatatcagaacgccaaccaaatagacagtggccaacaaagggcgaaattgagtttcttaacctccatgttcgatatgcaccgcagctgccttttgttttaaaaggcctgacgtgcaccttactcggaggaaagaagacaggtattgttggtagaacaggtggtggcaaatcaaccttgattcaggcactatttcgcattgtggacccatgtattggccaagtgtttatagatggcactgacatctgcaccattggactacatgacctccggacaagattgagcatcattccacaagatcctgttatgtttgaggggaccttgcgaaccaatattgacccccttggggagtacagtgacgagaaaatctgggaggcattggattcatgtcatcttggggatgaagttagaaagaacgagcttaagcttgactctacagtgacagaaaagggcaaaaactggagcacaggtcagcgtcaacttgtgtgtctgggaagggtgattctgaaacggaggaagatcttggttttggatgaggcaacttcatccgtggatccaattacagacagcttgattcaaaaaaccttaaaacaacaatttctcaaatgcacaatgattacaatagctcaccgtatcacatcagttcttgatagcgacaaagtcttgcttctggataatggtgaaattgcagagcatgacgccccagcaaaactgctagaggacagttcatccctattctccaaacttgtatctgagtataccatgggatctgataagtggcgaatgcaagaaagcagctaaatcaatactctacagataatacaggacaaacgccctaggaagtacaggaggtcgtactactctgctagcactgccagcaccatcggtagcttgtctccaccgcaacctcaggta

SEQ ID NO: 66047 - DNA, 4072 bp, Zea Mays
cctttctttcctggcggcggcgacgccgactactgggcgagcagcgccgccatacccagttcgtcgggcccttcgaccttcgtcggcaacgagcttccaccagaagccattacagtaccatggaggaacctctgttggaccatgaatcttcttccttatctgaagcaacaggtcgtagatcacttttctcagatgctggattgtttagtaatatcaccttttcttggatgggtcctttacttgatcttggcaagaggaaaacactagaccttcatgatgtgccattcttggatgacagtgacagtgtccacggaatcacccctaagtttaaatcaaagattgcctcgatttctgccacagggcaatacactgatgttacaacagttaagttagtcaaatctcttgtgctcacaacatggaagctaatcattatcactgcagtttatgccctaatccgtaccgttacttcatatgttggtccctatctcatcgagcacttcgttgactacttaaatcaaagcacacgatccactaaaagaggataccttttggtgttggcatttgttgctgcacagctgatggaaggtctctcatcaaggcatttgctctttagatctcaacaattaggcttgcgcgtgcattctgctcttattgcaattatttaccaaaagggtcttgccctctccagccaatccaagcaaggtagttcaagcggggagctgatcaatgttgtgaacattgatgctgagcgagtaggagatttcaattggtctctgcatgaactttggctgctcccagtgcaaattagtctcgcaatgattatcttatactctactcttggcttggcatcattcgctgcccttgctgcctgtgttttgacaatgttggctaacatacctttggggcggattgagcaaaattaccaggagaaaactatgaatgccaaggatgctagaatgagtgctatgtctgagatattacagaacatgcatattctcaagcttcatggttgggaattggttttcttgtcaaagattaaagagataaggaaggttgagatgaactgggtaaagaaatatgtctacacctcatcaatgcttatatctgtatttttttgtgcccctgcatttgttgctatgatcacttttggaacttgtataattatcggcatcccattagaaacagggaaagtattatctgctctagcaacatttaggcagttgcaaggtccgattcacagtctgccagacgcgatctcatcaatcattcagacaaaagtatcacttgacaggatatgttcatttctctgccttgaggaattagcaagtgatgcagtaactaagcttccgagtggtagcaccgatatatccattaaggtgagaaatggtagcttctcctggcaaaaattctctcaggtgcctactctccaagatctggacttgtgtgtgcaacaaggaactagagttgctatctgtggaactgttggatcgggtaagtcaagcttattgtcttgcatacttggtgagataccgaagttatctggagaggttcaaacttgtggtacaattgcttgtgttagccaatcaccatggatacaaagtgggacaattgaagaaaacatacgttttggtacacaaatgaacagggaaaggtacaaaaatgtccttgaggcatgctgtttaaataacgatttggatatattacctttgggtgaccaaacaattataggagaaagaggaatcaacttaagtggtggacaaaaacagaggatacagattgcccgtgctttgtatcaagatgctgatatcttcctatttgatgatccatttagtgcagttgatgctcgcactggactgcacttgttcaaggagtgcttgctagaatttttagcttcaaaaactgttatatatgttacccatcatgttgaatttttaccttcagctgatcttatcctggtcatgagagatggaaaaataacacagtcaggggattacactgaaattctgaaatctggagaagatctcttggaattagttgcatcccataaagatgccttatcaactttagacatgctggagcgccctattgaaaattttgagagtacatatcatcctggtggcaatgaaagtaacctgtttatagcgggggataagaaagaccagaacgaggaaggagatattcaaaatggtcagctagtacaagaagaagagagggagaaaggccgggttggatttattgtctactggaagtatattatgatggcatataatggagcacttgtgccacttattttgctagctcagataattttccaagttcttcaaattggatgcaatttctggatggcttgggcagcaccaatatctgaaaatgtgaatcctccaatcagtagtttgcagatggtaaatgtgtactttgcattagcaattgttagctcattgtgcatattcattcgatcacatcttcttgtcatgaccggatgtaagactgctaatattctatttgagaacatgcacaactgcattttccgagcaccaatgtctttctttgactccacacctagtgggcgaatcttgaacagagcttccacagatcaaagcacagtggatacaagaatttttgacctgatgggctatcttctatttcctgctattgagattctaggaacagttattctgatgtcacatgttgcatggcaagtcttcatagtttttgtccccattattactgcatcgctgtggtatcagcaatactacatagatgcagctagagagttgcaaaggttggttggagtttgcagatcccccgtgcttcaacatttttctgaatcaatggctggctcaaatataattagatgctttcaaaaggaaagacaatttatccgttatattggatatttggtggataatttatctcgaccaagtttgtataatgcagccgcaatggaatggttgtgctttcgcttggatatgctttcatcctttgttttttccttcacattgatacttctggtctcttcaccatctgctttaattgacccaaagactgctggtcttgcggtcacttatggactaagcctcaatatgctacaagggtgggctattgctgtcctctgcagtttagaaaatagaatgatatcagtggaaagaatgttgcagtatacgactattccttcagaaccaccacttacaatatcagaacgccaaccaaatagacagtggccaacaaagggcgaaattgagtttcttaacctccatgttcgatatgcaccgcagctgccttttgttttaaaaggcctgacgtgcaccttactcggaggaaagaagacaggtattgttggtagaacaggtggtggcaaatcaaccttgattcaggcactatttcgcattgtggacccatgtattggccaagtgtttatagatggcactgacatctgcaccattggactacatgacctccggacaagattgagcatcattccacaagatcctgttatgtttgaggggaccttgcgaaccaatattgacccccttggggagtacagtgacgagaaaatctgggaggcattggattcatgtcatcttggggatgaagttagaaagaacgagcttaagcttgactctacagtgacagaaaagggcaaaaactggagcacaggtcagcgtcaacttgtgtgtctgggaagggtgattctgaaacggaggaagatcttggttttggatgaggcaacttcatccgtggatccaattacagacagcttgattcaaaaaaccttaaaacaacaatttctcaaatgcacaatgattacaatagctcaccgtatcacatcagttcttgatagcgacaaagtcttgcttctggataatggtgaaattgcagagcatgacgccccagcaaaactgctagaggacagttcatccctattctccaaacttgtatctgagtataccatgggatctgataagtggcgaatgcaagaaagcagctaaatcaatactctacagataatacaggacaaacgccctaggaagtcttcatagtactggaccctatccgacagccttgcaatctc

SEQ ID NO: 66048 - DNA, 4114 bp, Zea Mays
cgactactgggcgagcagcgccgccatacccagttcgtcgggcccttcgaccttcgtcggcaacgagcttccaccagccattacagtaccatggaggaacctctgttggaccatgaatcttcttccttatctgaagcaacaggtcgtagatcacttttctcagatgctggattgtttagtaatatcaccttttcttggatgggtcctttacttgatcttggcaagaggaaaacactagaccttcatgatgtgccattcttggatgacagtgacagtgtccacggaatcacccctaagtttaaatcaaagattgcctcgatttctgccacagggcaatacactgatgttacaacagttaagttagtcaaatctcttgtgctcacaacatggaagctaatcattatcactgcagtttatgccctaatccgtaccgttacttcatatgttggtccctatctcatcgagcacttcgttgactacttaaatcaaagcacacgatccactaaaagaggataccttttggtgttggcatttgttgctgcacagctgatggaaggtctctcatcaaggcatttgctctttagatctcaacaattaggcttgcgcgtgcattctgctcttattgcaattatttaccaaaagggtcttgccctctccagccaatccaagcaaggtagttcaagcggggagctgatcaatgttgtgaacattgatgctgagcgagtaggagatttcaattggtctctgcatgaactttggctgctcccagtgcaaattagtctcgcaatgattatcttatactctactcttggcttggcatcattcgctgcccttgctgcctgtgttttgacaatgttggctaacatacctttggggcggattgagcaaaattaccaggagaaaactatgaatgccaaggatgctagaatgagtgctatgtctgagatattacagaacatgcatattctcaagcttcatggttgggaattggttttcttgtcaaagattaaagagataaggaaggttgagatgaactgggtaaagaaatatgtctacacctcatcaatgcttatatctgtatttttttgtgcccctgcatttgttgctatgatcacttttggaacttgtataattatcggcatcccattagaaacagggaaagtattatctgctctagcaacatttaggcagttgcaaggtccgattcacagtctgccagacgcgatctcatcaatcattcagacaaaagtatcacttgacaggatatgttcatttctctgccttgaggaattagcaagtgatgcagtaactaagcttccgagtggtagcaccgatatatccattaaggtgagaaatggtagcttctcctggcaaaaattctctcaggtgcctactctccaagatctggacttgtgtgtgcaacaaggaactagagttgctatctgtggaactgttggatcgggtaagtcaagcttattgtcttgcatacttggtgagataccgaagttatctggagaggttcaaacttgtggtacaattgcttgtgttagccaatcaccatggatacaaagtgggacaattgaagaaaacatacgttttggtacacaaatgaacagggaaaggtacaaaaatgtccttgaggcatgctgtttaaataacgatttggatatattacctttgggtgaccaaacaattataggagaaagaggaatcaacttaagtggtggacaaaaacagaggatacagattgcccgtgctttgtatcaagatgctgatatcttcctatttgatgatccatttagtgcagttgatgctcgcactggactgcacttgttcaaggagtgcttgctagaatttttagcttcaaaaactgttatatatgttacccatcatgttgaatttttaccttcagctgatcttatcctggtcatgagagatggaaaaataacacagtcaggggattacactgaaattctgaaatctggagaagatctcttggaattagttgcatcccataaagatgccttatcaactttagacatgctggagcgccctattgaaaattttgagagtacatatcatcctggtggcaatgaaagtaacctgtttatagcgggggataagaaagaccagaacgaggaaggagatattcaaaatggtcagctagtacaagaagaagagagggagaaaggccgggttggatttattgtctactggaagtatattatgatggcatataatggagcacttgtgccacttattttgctagctcagataattttccaagttcttcaaattggatgcaatttctggatggcttgggcagcaccaatatctgaaaatgtgaatcctccaatcagtagtttgcagatggtaaatgtgtactttgcattagcaattgttagctcattgtgcatattcattcgatcacatcttcttgtcatgaccggatgtaagactgctaatattctatttgagaacatgcacaactgcattttccgagcaccaatgtctttctttgactccacacctagtgggcgaatcttgaacagagcttccacagatcaaagcacagtggatacaagaatttttgacctgatgggctatcttctatttcctgctattgagattctaggaacagttattctgatgtcacatgttgcatggcaagtcttcatagtttttgtccccattattactgcatcgctgtggtatcagcaatactacatagatgcagctagagagttgcaaaggttggttggagtttgcagatcccccgtgcttcaacatttttctgaatcaatggctggctcaaatataattagatgctttcaaaaggaaagacaatttatccgttatattggatatttggtggataatttatctcgaccaagtttgtataatgcagccgcaatggaatggttgtgctttcgcttggatatgctttcatcctttgttttttccttcacattgatacttctggtctcttcaccatctgctttaattgacccaaagactgctggtcttgcggtcacttatggactaagcctcaatatgctacaagggtgggctattgctgtcctctgcagtttagaaaatagaatgatatcagtggaaagaatgttgcagtatacgactattccttcagaaccaccacttacaatatcagaacgccaaccaaatagacagtggccaacaaagggcgaaattgagtttcttaacctccatgttcgatatgcaccgcagctgccttttgttttaaaaggcctgacgtgcaccttactcggaggaaagaagacaggtattgttggtagaacaggtggtggcaaatcaaccttgattcaggcactatttcgcattgtggacccatgtattggccaagtgtttatagatggcactgacatctgcaccattggactacatgacctccggacaagattgagcatcattccacaagatcctgttatgtttgaggggaccttgcgaaccaatattgacccccttggggagtacagtgacgagaaaatctgggaggcattggattcatgtcatcttggggatgaagttagaaagaacgagcttaagcttgactctacagtgacagaaaagggcaaaaactggagcacaggtcagcgtcaacttgtgtgtctgggaagggtgattctgaaacggaggaagatcttggttttggatgaggcaacttcatccgtggatccaattacagacagcttgattcaaaaaaccttaaaacaacaatttctcaaatgcacaatgattacaatagctcaccgtatcacatcagttcttgatagcgacaaagtcttgcttctggataatggtgaaattgcagagcatgacgccccagcaaaactgctagaggacagttcatccctattctccaaacttgtatctgagtataccatgggatctgataagtggcgaatgcaagaaagcagctaaatcaatactctacagataatacaggacaaacgccctaggaagtgtgagtatctacgtgtcaccaattttatagcttaataaaaagcaaatttttaaaaaacaaaaaaaaaactatgaatatccatattccccaaggcccttggaagtgtgatat

SEQ ID NO: 66049 - DNA, 4070 bp, Zea Mays
cttcgaccttcgtcggcaacgagcttccaccagccattacagtaccatggaggaacctctgttggaccatgaatcttcttccttatctgaagcaacaggtcgtagatcacttttctcagatgctggattgtttagtaatatcaccttttcttggatgggtcctttacttgatcttggcaagaggaaaacactagaccttcatgatgtgccattcttggatgacagtgacagtgtccacggaatcacccctaagtttaaatcaaagattgcctcgatttctgccacagggcaatacactgatgttacaacagttaagttagtcaaatctcttgtgctcacaacatggaagctaatcattatcactgcagtttatgccctaatccgtaccgttacttcatatgttggtccctatctcatcgagcacttcgttgactacttaaatcaaagcacacgatccactaaaagaggataccttttggtgttggcatttgttgctgcacagctgatggaaggtctctcatcaaggcatttgctctttagatctcaacaattaggcttgcgcgtgcattctgctcttattgcaattatttaccaaaagggtcttgccctctccagccaatccaagcaaggtagttcaagcggggagctgatcaatgttgtgaacattgatgctgagcgagtaggagatttcaattggtctctgcatgaactttggctgctcccagtgcaaattagtctcgcaatgattatcttatactctactcttggcttggcatcattcgctgcccttgctgcctgtgttttgacaatgttggctaacatacctttggggcggattgagcaaaattaccaggagaaaactatgaatgccaaggatgctagaatgagtgctatgtctgagatattacagaacatgcatattctcaagcttcatggttgggaattggttttcttgtcaaagattaaagagataaggaaggttgagatgaactgggtaaagaaatatgtctacacctcatcaatgcttatatctgtatttttttgtgcccctgcatttgttgctatgatcacttttggaacttgtataattatcggcatcccattagaaacagggaaagtattatctgctctagcaacatttaggcagttgcaaggtccgattcacagtctgccagacgcgatctcatcaatcattcagacaaaagtatcacttgacaggatatgttcatttctctgccttgaggaattagcaagtgatgcagtaactaagcttccgagtggtagcaccgatatatccattaaggtgagaaatggtagcttctcctggcaaaaattctctcaggtgcctactctccaagatctggacttgtgtgtgcaacaaggaactagagttgctatctgtggaactgttggatcgggtaagtcaagcttattgtcttgcatacttggtgagataccgaagttatctggagaggttcaaacttgtggtacaattgcttgtgttagccaatcaccatggatacaaagtgggacaattgaagaaaacatacgttttggtacacaaatgaacagggaaaggtacaaaaatgtccttgaggcatgctgtttaaataacgatttggatatattacctttgggtgaccaaacaattataggagaaagaggaatcaacttaagtggtggacaaaaacagaggatacagattgcccgtgctttgtatcaagatgctgatatcttcctatttgatgatccatttagtgcagttgatgctcgcactggactgcacttgttcaaggagtgcttgctagaatttttagcttcaaaaactgttatatatgttacccatcatgttgaatttttaccttcagctgatcttatcctggtcatgagagatggaaaaataacacagtcaggggattacactgaaattctgaaatctggagaagatctcttggaattagttgcatcccataaagatgccttatcaactttagacatgctggagcgccctattgaaaattttgagagtacatatcatcctggtggcaatgaaagtaacctgtttatagcgggggataagaaagaccagaacgaggaaggagatattcaaaatggtcagctagtacaagaagaagagagggagaaaggccgggttggatttattgtctactggaagtatattatgatggcatataatggagcacttgtgccacttattttgctagctcagataattttccaagttcttcaaattggatgcaatttctggatggcttgggcagcaccaatatctgaaaatgtgaatcctccaatcagtagtttgcagatggtaaatgtgtactttgcattagcaattgttagctcattgtgcatattcattcgatcacatcttcttgtcatgaccggatgtaagactgctaatattctatttgagaacatgcacaactgcattttccgagcaccaatgtctttctttgactccacacctagtgggcgaatcttgaacagagcttccacagatcaaagcacagtggatacaagaatttttgacctgatgggctatcttctatttcctgctattgagattctaggaacagttattctgatgtcacatgttgcatggcaagtcttcatagtttttgtccccattattactgcatcgctgtggtatcagcaatactacatagatgcagctagagagttgcaaaggttggttggagtttgcagatcccccgtgcttcaacatttttctgaatcaatggctggctcaaatataattagatgctttcaaaaggaaagacaatttatccgttatattggatatttggtggataatttatctcgaccaagtttgtataatgcagccgcaatggaatggttgtgctttcgcttggatatgctttcatcctttgttttttccttcacattgatacttctggtctcttcaccatctgctttaattgacccaaagactgctggtcttgcggtcacttatggactaagcctcaatatgctacaagggtgggctattgctgtcctctgcagtttagaaaatagaatgatatcagtggaaagaatgttgcagtatacgactattccttcagaaccaccacttacaatatcagaacgccaaccaaatagacagtggccaacaaagggcgaaattgagtttcttaacctccatgttcgatatgcaccgcagctgccttttgttttaaaaggcctgacgtgcaccttactcggaggaaagaagacaggtattgttggtagaacaggtggtggcaaatcaaccttgattcaggcactatttcgcattgtggacccatgtattggccaagtgtttatagatggcactgacatctgcaccattggactacatgacctccggacaagattgagcatcattccacaagatcctgttatgtttgaggggaccttgcgaaccaatattgacccccttggggagtacagtgacgagaaaatctgggaggcattggattcatgtcatcttggggatgaagttagaaagaacgagcttaagcttgactctacagtgacagaaaagggcaaaaactggagcacaggtcagcgtcaacttgtgtgtctgggaagggtgattctgaaacggaggaagatcttggttttggatgaggcaacttcatccgtggatccaattacagacagcttgattcaaaaaaccttaaaacaacaatttctcaaatgcacaatgattacaatagctcaccgtatcacatcagttcttgatagcgacaaagtcttgcttctggataatggtgaaattgcagagcatgacgccccagcaaaactgctagaggacagttcatccctattctccaaacttgtatctgagtataccatgggatctgataagtggcgaatgcaagaaagcagctaaatcaatactctacagataatacaggacaaacgccctaggaagtgtgagtatctacgtgtcaccaattttatagcttaataaaaagcaaatttttaaaaaacaaaaaaaaaactatgaatatccatattccccaaggcccttggaagtgtgatat

SEQ ID NO: 66050 - DNA, 1592 bp, Zea Mays
ctttctttgactccacacctagtgggcgaatcttgaacagaatcaaagcacagtggatacaagaatttttgacctgatgggctatcttctatttcctgctattgagattctaggaacagttattctgatgtcacatgttgcatggcaagtcttcatagtttttgtccccattattactgcatcgctgtggtatcagcaatactacatagatgcagctagagagttgcaaaggttggttggagtttgcagatcccccgtgcttcaacatttttctgaatcaatggctggctcaaatataattagatgctttcaaaaggaaagacaatttatccgttatattggatatttggtggataatttatctcgaccaagtttgtataatgcagccgcaatggaatggttgtgctttcgcttggatatgctttcatcctttgttttttccttcacattgatacttctggtctcttcaccatctgctttaattgacccaaagactgctggtcttgcggtcacttatggactaagcctcaatatgctacaagggtgggctattgctgtcctctgcagtttagaaaatagaatgatatcagtggaaagaatgttgcagtatacgactattccttcagaaccaccacttacaatatcagaacgccaaccaaatagacagtggccaacaaagggcgaaattgagtttcttaacctccatgttcgatatgcaccgcagctgccttttgttttaaaaggcctgacgtgcaccttactcggaggaaagaagacaggtattgttggtagaacaggtggtggcaaatcaaccttgattcaggcactatttcgcattgtggacccatgtattggccaagtgtttatagatggcactgacatctgcaccattggactacatgacctccggacaagattgagcatcattccacaagatcctgttatgtttgaggggaccttgcgaaccaatattgacccccttggggagtacagtgacgagaaaatctgggaggcattggattcatgtcatcttggggatgaagttagaaagaacgagcttaagcttgactctacagtgacagaaaagggcaaaaactggagcacaggtcagcgtcaacttgtgtgtctgggaagggtgattctgaaacggaggaagatcttggttttggatgaggcaacttcatccgtggatccaattacagacagcttgattcaaaaaaccttaaaacaacaatttctcaaatgcacaatgattacaatagctcaccgtatcacatcagttcttgatagcgacaaagtcttgcttctggataatggtgaaattgcagagcatgacgccccagcaaaactgctagaggacagttcatccctattctccaaacttgtatctgagtataccatgggatctgataagtggcgaatgcaagaaagcagctaaatcaatactctacagataatacaggacaaacgccctaggaagtgtgagtatctacgtgtcaccaattttatagcttaataaaaagcaaatttttaaaaaacaaaaaaaaaactatgaatatccatattccccaaggcccttggaagtgtgatat

SEQ ID NO: 66051 - DNA, 1239 bp, Zea Mays
atactacatagatgcagctagagagttgcaaagccgcaatggaatggttgtgctttcgcttggatatgctttcatcctttgttttttccttcacattgatacttctggtctcttcaccatctgctttaattgacccaaagactgctggtcttgcggtcacttatggactaagcctcaatatgctacaagggtgggctattgctgtcctctgcagtttagaaaatagaatgatatcagtggaaagaatgttgcagtatacgactattccttcagaaccaccacttacaatatcagaacgccaaccaaatagacagtggccaacaaagggcgaaattgagtttcttaacctccatgttcgatatgcaccgcagctgccttttgttttaaaaggcctgacgtgcaccttactcggaggaaagaagacaggtattgttggtagaacaggtggtggcaaatcaaccttgattcaggcactatttcgcattgtggacccatgtattggccaagtgtttatagatggcactgacatctgcaccattggactacatgacctccggacaagattgagcatcattccacaagatcctgttatgtttgaggggaccttgcgaaccaatattgacccccttggggagtacagtgacgagaaaatctgggaggcattggattcatgtcatcttggggatgaagttagaaagaacgagcttaagcttgactctacagtgacagaaaagggcaaaaactggagcacaggtcagcgtcaacttgtgtgtctgggaagggtgattctgaaacggaggaagatcttggttttggatgaggcaacttcatccgtggatccaattacagacagcttgattcaaaaaaccttaaaacaacaatttctcaaatgcacaatgattacaatagctcaccgtatcacatcagttcttgatagcgacaaagtcttgcttctggataatggtgaaattgcagagcatgacgccccagcaaaactgctagaggacagttcatccctattctccaaacttgtatctgagtataccatgggatctgataagtggcgaatgcaagaaagcagctaaatcaatactctacagataatacaggacaaacgccctaggaagtgtgagtatctacgtgtcaccaattttatagcttaataaaaagcaaatttttaaaaaacaaaaaaaaaactatgaatatccatattccccaaggcccttggaagtgtgatat

SEQ ID NO: 66052 - DNA, 2488 bp, Zea Mays
ggggccgccttcgttttctggtctcctctccaccaacacggcgcgcgcggagctcccatgacgacgacgagcacccacctggatctcgaggctgcgcggcgcggaggcggcggcggcggtggcggtggcagcagcagcccgcccggatacgagcaggcggaggctggcaacgaccttcgcaaagatctagcccttgcttacaagaccctcggcgttgtgtttggtggcctcgtcacgtctcccctctacgtttatccgtcaatgaacttgtcatctcccacgaaagatgactacatggggttatacagcataatgttttggactcttactttgattggtgtggtcaagtatgtaggcatagcactcaacgccgacgatcatggtgaagggggtacatttgccatgtactctttgctgtgtaggcatgctgatataggcatacttccttccaaaaaggtttatttggaagaggagccactgcttcgaaatcagtctgcagcagctagaaggcctagctggctggggaaattctttgagcgaagcataacagccagaagagcgctgctgttcatgtcaatactgggaatgtgcatgctcattggggatggcatactcactcctgccatttcagttttatcagcgatccaagggttgagagggccatttccatccgtcaggaattctgtagtggaagctctgtctgccgtgatccttatcggcttgttcttgctgcaaaagtatgggacctcgaaagtgagcttcctgttctcaccgatcatggcggcgtggaccttcaccactccaatcatcggcctgtacagcatcgttcattactaccccggcatcttcaaagccatctcaccgcactatatcgtccgtttcttcctgagaaacaaaaaggaagggtggcgcatgctcggtggaactgttctatgcatcacgggcgctgaagccatgtttgcagaccttggccacttcagtaagaagggtattcagatagcatttctgtctagcatatacccttctctggtgctcacatacgctgggcaaacagcgtacctcatcaacaacgtcaacgacttcagtgacggattctacaagtttgttcctcgccctgtttactggcccatgttcatcatcgcgacgctggcggcgatcgtcgcaagccaatccttgatatccgcgacgttctcagtcatcaagcaatccgttgtcctggactacttcccgcgcgttaaggtggtgcacacgtcgcagcacaaggaaggggaggtttactccccagaaaccaattacatcctcatggtgctttgcgttagcgtcgtactaggcttcggagctgggaatgcgatcgggaacgcattcggtgttgtggtcatcatggtcatgctcataaccacagtcatgctcaccctggtgatgatcattatatggagaacgccgcctgttcttgtggcgctctacttcgtgcctttcgtcgtcatggaagggtcttatgtcagtgcagtcttcaccaagatccccgaaggcggctggctcccctttgcggtgtccatcatcctggcgatggtcatgttcggctggtactacggcaggcagcggaagacggagtacgagatagcgaacaaggtgaccgtggagcgcctcggcgagctcctggcgaagccggaggtccagagggtccccgggctgtgcttcttctacagcaacatccaggacgggctcacgcccatcgtcggccactacatcaagaacatgagctcgctgcacgcggtcacggtcttcgtcaccctccggtacctgctggtggccaaggtggacgagcgggagagggtcctcgtcgcgaggctgggaccggacggggtgtacggctgcactgtccagtacgggtacgcggacagcctcagcggcggcgacctcaccgcgcaggtcacgggctccctgcgccggcactttgggacggcggaggccggggcggaagaggccgcgcgcctggaggcggcgaggacgaacggcgtcgtgcacgttcggggtaagatgaggttctacgtgggcgaggacgccgggtggttcgacaaggtcatgctcgggttctacgagttcctgcacggcatctgtcgctccgcgctgccggcgctggggacgccgctgcaacagcgagtcgagatcggcatgctgtacaaggtttgatcgatcaaggttatcaaatgcgcacataaccaatatacgcaacatcaaaataagtcaatgagtatacccgtggcgtgtcatagtgtgattgtgttcaagaaattcacatgcatgaacagaacctagtaaaaagctgcgaatgaagctgcacaaattttgttttgccggtttgtatggcatgacatggttactggcaaggacctttgtttcactttttcagttctgcagcagtgcttttcggttgccttattcaaaatagaacagttcgcatgcaaaaaggtgactaccaattcaaaac

SEQ ID NO: 66053 - DNA, 1218 bp, Zea Mays
aagctctgtctgtctccacccagcctctctcacagtccactcagtctttacacactgtctgcctcactcacgtccttctcctgctgccgctacaccgagccatggaaagggaggtgcagctgatggaggggaggcaagcgtggccgctccacatgatggggatggctgccgctggtacgaccgccacctgcttcgacaactacagcagcagtggcagtggcggcggcggcggcgactgcttcgtgctcgggtgggagcagctagcgccggcgccgttcggctgcttcgggctcctcaccgccgacgtccacgacctcttcccgctcttcgccacaggcatggagccggcgctgcccgcgctgccgccgtcggcgcacgacgtggccgccgcgatccccggcgagctggacgaccttctcctgatgatgacaatgatgacggcgatgatcccttgagctcgattttctccgcgggcctcgcgccggcagcggagggagcggtgtgccccgccgccgcagaggcagagcccctccccagctcgtcctcgtccaactgccgcgggggggacccgcgcgccggcggggtcgacctgcagccgcagggacagatgcagcagggcaccgcgcgggcgcggggccgggccgggaccccgccgctgccgaggacctccgcgccctcgctgaaacgcgcgacacgcgaagagtcgtcgtcggagcacgcggcggcggcggcggcggaggagtgcagccagagcggcggcggcagcaagcggcggaagggcgcgggggtggtgcgcccgttcgcgctgctgaagcccgacgggctggacggcggcgcgacgctggcggacatcaacgcgcgcatcctgatgcggcccgcgcggccggtccggcaccccgtgggcgagttcgcgtgcgcgccgcgcgtgtccgcggaccagccgggcttctcgggcaaggccgtcgccagcctcacgcgcctgcacacccccggcgggcgcggcaccatcaccatcataaggacgcgaggctaggctaggcttgtactatgcatgaatcatggcggtgtatgtaggattagctagctagccacctgttgtggtgtaaattatgagcgtaacctgcaatgtaaatcgaacgaataaatttctccaatcatggcggtggtggctcatgacatccctcctgcactgcaccgacgaaccgcaactagcttttg

SEQ ID NO: 66054 - DNA, 1928 bp, Zea Mays
aagctctgtctgtctccacccagcctctctcacagtccactcagtctttacacactgtctgcctcactcacgtccttctcctgctgccgctacaccgagccatggaaagggaggtgcagctgatggaggggaggcaagcgtggccgctccacatgatggggatggctgccgctggtacgaccgccacctgcttcgacaactacagcagcagtggcagtggcggcggcggcggcgactgcttcgtgctcgggtgggagcagctagcgccggcgccgttcggctgcttcgggctcctcaccgccgacgtccacgacctcttcccgctcttcgccacaggcatggagccggcgctgcccgcgctgccgccgtcggcgcacgacgtggccgccgcgatccccggcgagctggacgaccttctcctgagcttctgggacgcgagctgccacgacggcgacgtgggcgagccgctcaaggcgcagcagcaggccgccttcaattccagctgctgcgtcacgcacgagcggggggaggactactgcacccccaccaccgactccttcgtccactgtgagcgagcgcccccgtttgaatcgacccctcctcctccgctcccactctctcaactgaaattgaccggctttcgtcgtcgtctgcaatgcagacggacggacctgttagattttaggtcctgttggtccctcgcgcctcgcgtgaagtacacacaccccgtggtggggggttgggtcggggtcggggtcggacggaggccgaggacagagccagccaggtcgtagagctaagcgttaaacaatgttgttttgtcaatgcgttgccatcggagacgtggggcccgcgggagtttagcgtcacgtaattgtcacggcccgccccatgatttgcgcatgatcgatgcatggattggtagcacattgttaatttgttattagaatcattatgtgtgctagtttcagtattattattattattatatatatagtggcaactgcgtagtactacactggtatagcagggcgcgtcttttgaagaaaagacagatctgggttctacgtgtttagattgtactagtgctgacagagattctactactgctaatagtaaattagtcattagtatgatgacaatgatgacggcgatgatcccttgagctcgattttctccgcgggcctcgcgccggcagcggagggagcggtgtgccccgccgccgcagaggcagagcccctccccagctcgtcctcgtccaactgccgcgggggggacccgcgcgccggcggggtcgacctgcagccgcagggacagatgcagcagggcaccgcgcgggcgcggggccgggccgggaccccgccgctgccgaggacctccgcgccctcgctgaaacgcgcgacacgcgaagagtcgtcgtcggagcacgcggcggcggcggcggcggaggagtgcagccagagcggcggcggcagcaagcggcggaagggcgcgggggtggtgcgcccgttcgcgctgctgaagcccgacgggctggacggcggcgcgacgctggcggacatcaacgcgcgcatcctgatgcggcccgcgcggccggtccggcaccccgtgggcgagttcgcgtgcgcgccgcgcgtgtccgcggaccagccgggcttctcgggcaaggccgtcgccagcctcacgcgcctgcacacccccggcgggcgcggcaccatcaccatcataaggacgcgaggctaggctaggcttgtactatgcatgaatcatggcggtgtatgtaggattagctagctagccacctgttgtggtgtaaattatgagcgtaacctgcaatgtaaatcgaacgaataaatttctccaatcatggcggtggtggctcatgacatccctcctgcactgcaccgacgaaccgcaactagcttttg

SEQ ID NO: 66055 - DNA, 1123 bp, Zea Mays
aagctctgtctgtctccacccagcctctctcacagtccactcagtctttacacactgtctgcctcactcacgtccttctcctgctgccgctacaccgagccatggaaagggaggtgcagctgatggaggggaggcaagcgtggccgctccacatgatggggatggctgccgctggtacgaccgccacctgcttcgacaactacagcagcagtggcagtggcggcggcggcggcgactgcttcgtgctcgggtgggagcagctagcgccggcgccgttcggctgcttcgggctcctcaccgccgacgtccacgacctcttcccgctctatgatgacaatgatgacggcgatgatcccttgagctcgattttctccgcgggcctcgcgccggcagcggagggagcggtgtgccccgccgccgcagaggcagagcccctccccagctcgtcctcgtccaactgccgcgggggggacccgcgcgccggcggggtcgacctgcagccgcagggacagatgcagcagggcaccgcgcgggcgcggggccgggccgggaccccgccgctgccgaggacctccgcgccctcgctgaaacgcgcgacacgcgaagagtcgtcgtcggagcacgcggcggcggcggcggcggaggagtgcagccagagcggcggcggcagcaagcggcggaagggcgcgggggtggtgcgcccgttcgcgctgctgaagcccgacgggctggacggcggcgcgacgctggcggacatcaacgcgcgcatcctgatgcggcccgcgcggccggtccggcaccccgtgggcgagttcgcgtgcgcgccgcgcgtgtccgcggaccagccgggcttctcgggcaaggccgtcgccagcctcacgcgcctgcacacccccggcgggcgcggcaccatcaccatcataaggacgcgaggctaggctaggcttgtactatgcatgaatcatggcggtgtatgtaggattagctagctagccacctgttgtggtgtaaattatgagcgtaacctgcaatgtaaatcgaacgaataaatttctccaatcatggcggtggtggctcatgacatccctcctgcactgcaccgacgaaccgcaactagcttttg

SEQ ID NO: 66056 - DNA, 1789 bp, Zea Mays
taaaaaacaaaaaaattcgggaacctcgtcgcgggtctgagctccgcggcgtcctacaaccggtgagcggcgatcgttgccgcgcgcaatgtcacccatcgtaccaccaaaacccctcccgttcctcaccacgctcaccacccgcttctcacttgcctgcttacccacgcggcgtttcacccaaacctgctgttccagtgccgggcaccgcggtcccgcggtcgcggccactcctcgtcccggtggagtttgcagggtccattccccccttaggtctcttctccttgccagcgcggcaacttcggcccgaaccgcggcagcggcggaagacatgtctgacccggagctgaggctggtgctcgagcttgctactgacgaggaactgatggaggtcgaggagatcctctacggcaccagggggtggagaccatcgtacagagatgtcttgctcagagtaagaaaaaaaattggtgttcagtgctctagcaaattgtgtactgcagaccttgaggcagaaatatttcttcacctcgtgaatgaatattcaagccaccagaaagaccgactttcatttccatgggataaacgaaaatctccaaacaatatctctagccttggtgcaaacaagtggaagatgcttactgatgtggcttggaggattggaacaaagggaatggaaagtacctttctgaagggtggtagtgcattgactatgaaaacaatatatgaatcgattgactggaaaactgctgaaggaggctgcaaattacaagataaagaaagaacttgttaagcagtaagtggtggcaggagcgatcggagggtttccaggtggcatgacggcaacacatcactagggaggcaacacaggcagggtgggagattggctgctgttaacctggagtctagagctggtttgcttgcagctaggcagggtttggttcgtgctgcatcgagatacgttggactcaggagtgtcgtgacatttcttggaccaatattgtgggggacgctcttggctgatattgtgattcaaatgttgggcaccgattatgctaggatcgtccaggcagtctatgcatttgctcagattcgtttgactcggacaagttacgtggaatctgatggtgaaggaccagagtaagatcgctactggactagcctaactggcattctgatctaaaagcaaccgtattgtacattctagccatgaagatcaccatctgattctgcgggttccagtgcaaatactccacgggacaacgaggttatagcttcagacttcggagtactgtactgctaatgtgagtgcgtataagtgacagacgagcggtgttacaagacgttgggtcgcagagacagtcatagagcacaacacaaccggctactcccctgatcgatgtaaagcttagcaaaaataacctaaccgtgacaatgaaaatatgatacagtaatgtttaacaacgagctccgcaagtgtcatttgggcggcgacctaccctgtgagcgcggaagttgtgactgaatttacttgggcgtcacacttccgcgcggggcccgaagttgtagaccatgcattctgctctgccccggttgaatactgtaaaatattgctccccttatcctaaactattcctcctaacgttcggttaggcaaggcagatctcattgacacagcctgatgccacaatctacagtcatgcttgaacacaacacaacacaacagcacagaatttacgtgtaacaccctgcctgtttcctgtatatgaaaacactactctcattcatg

SEQ ID NO: 66057 - DNA, 1949 bp, Zea Mays
aaaaaacaaaaaaattcgggaacctcgtcgcgggtctgagctccgcggcgtcctacaaccggtgagcggcgatcgttgccgcgcgcaatgtcacccatcgtaccaccaaaacccctcccgttcctcaccacgctcaccacccgcttctcacttgcctgcttacccacgcggcgtttcacccaaacctgctgttccagtgccgggcaccgcggtcccgcggtcgcggccactcctcgtcccggtggagtttgcagggtccattccccccttaggtctcttctccttgccagcgcggcaacttcggcccgaaccgcggcagcggcggaagacatgtctgacccggagctgaggctggtgctcgagcttgctactgacgaggaactgatggaggtcgaggagatcctctacggcaccagctattttagcccattgctaaaatcaattgcaagaagaccgaactcagatggtgttgttgttttggatgatatcgaggagagagatcatttcatctcaaaattagagtcaaggttcctgtatcttgctgcagatgctcgttttgttatgagggggtggagaccatcgtacagagatgtcttgctcagagtaagaaaaaaaattggtgttcagtgctctagcaaattgtgtactgcagaccttgaggcagaaatatttcttcacctcgtgaatgaatattcaagccaccagaaagaccgactttcatttccatgggataaacgaaaatctccaaacaatatctctagccttggtgcaaacaagtggaagatgcttactgatgtggcttggaggattggaacaaagggaatggaaagtacctttctgaagggtggtagtgcattgactatgaaaacaatatatgaatcgttagccaatagattgactggaaaactgctgaaggaggctgcaaattacaagataaagaaagaacttgttaagcagtaagtggtggcaggagcgatcggagggtttccaggtggcatgacggcaacacatcactagggaggcaacacaggcagggtgggagattggctgctgttaacctggagtctagagctggtttgcttgcagctaggcagggtttggttcgtgctgcatcgagatacgttggactcaggagtgtcgtgacatttcttggaccaatattgtgggggacgctcttggctgatattgtgattcaaatgttgggcaccgattatgctaggatcgtccaggcagtctatgcatttgctcagattcgtttgactcggacaagttacgtggaatctgatggtgaaggaccagagtaagatcgctactggactagcctaactggcattctgatctaaaagcaaccgtattgtacattctagccatgaagatcaccatctgattctgcgggttccagtgcaaatactccacgggacaacgaggttatagcttcagacttcggagtactgtactgctaatgtgagtgcgtataagtgacagacgagcggtgttacaagacgttgggtcgcagagacagtcatagagcacaacacaaccggctactcccctgatcgatgtaaagcttagcaaaaataacctaaccgtgacaatgaaaatatgatacagtaatgtttaacaacgagctccgcaagtgtcatttgggcggcgacctaccctgtgagcgcggaagttgtgactgaatttacttgggcgtcacacttccgcgcggggcccgaagttgtagaccatgcattctgctctgccccggttgaatactgtaaaatattgctccccttatcctaaactattcctcctaacgttcggttaggcaaggcagatctcattgacacagcctgatgccacaatctacagtcatgcttgaacacaacacaacacaacagcacagaatttacgtgtaacaccctgcctgtttcctgtatatgaaaacactactctcattcatg

SEQ ID NO: 66058 - DNA, 2215 bp, Zea Mays
aaaaaacaaaaaaattcgggaacctcgtcgcgggtctgagctccgcggcgtcctacaaccggtgagcggcgatcgttgccgcgcgcaatgtcacccatcgtaccaccaaaacccctcccgttcctcaccacgctcaccacccgcttctcacttgcctgcttacccacgcggcgtttcacccaaacctgctgttccagtgccgggcaccgcggtcccgcggtcgcggccactcctcgtcccggtggagtttgcagggtccattccccccttaggtctcttctccttgccagcgcggcaacttcggcccgaaccgcggcagcggcggaagacatgtctgacccggagctgaggctggtgctcgagcttgctactgacgaggaactgatggaggtcgaggagatcctctacggcaccagctattttagcccattgctaaaatcaattgcaagaagaccgaactcagatggtgttgttgttttggatgatatcgaggagagagatcatttcatctcaaaattagagtcaaggttcctgtatcttgctgcagatgctcgttttgttatgagggggtggagaccatcgtacagagatgtcttgctcagagtaagaaaaaaaattggtgttcagtgctctagcaaattgtgtactgcagaccttgaggcagaaatatttcttcacctcgtgaatgaatattcaagccaccagaaagaccgactttcatttccatgggataaacgaaaatctccaaacaatatctctagccttggtgcaaacaagtggaagatgcttactgatgtggcttggaggattggaacaaagggaatggaaagtacctttctgaagggtggtagtgcattgactatgaaaacaatatatgaatcgttagccaatagattgactggaaaactgctgaaggaggctgcaaattacaagataaagaaagaacttgttaagcagtaagtggtggcaggagcgatcggagggtttccaggtggcatgacggcaacacatcactagggaggcaacacaggcagggtgggagattggctgctgttaacctggagtctagagctggtttgcttgcagctaggcagggtttggttcgtgctgcatcgagatacgttggactcaggagtgtcgtgacatttcttggaccaatgtatgcttctagtagtaaatctgtaactgttacttcccattttgtttcaagacaatcattattagggtctgaatacttctatcacatttcaagcaccgctgttattttgagcagtttaagctgtttttttttgtttattgctggatgatgttttgattaattcataaacatttagtgttgaccttgggccacaaagcatataaatcagaatcccttcatggagtgatatatcatgccctattagtaatttatacccctttggtcagattgtgggggacgctcttggctgatattgtgattcaaatgttgggcaccgattatgctaggatcgtccaggcagtctatgcatttgctcagattcgtttgactcggacaagttacgtggaatctgatggtgaaggaccagagtaagatcgctactggactagcctaactggcattctgatctaaaagcaaccgtattgtacattctagccatgaagatcaccatctgattctgcgggttccagtgcaaatactccacgggacaacgaggttatagcttcagacttcggagtactgtactgctaatgtgagtgcgtataagtgacagacgagcggtgttacaagacgttgggtcgcagagacagtcatagagcacaacacaaccggctactcccctgatcgatgtaaagcttagcaaaaataacctaaccgtgacaatgaaaatatgatacagtaatgtttaacaacgagctccgcaagtgtcatttgggcggcgacctaccctgtgagcgcggaagttgtgactgaatttacttgggcgtcacacttccgcgcggggcccgaagttgtagaccatgcattctgctctgccccggttgaatactgtaaaatattgctccccttatcctaaactattcctcctaacgttcggttaggcaaggcagatctcattgacacagcctgatgccacaatctacagtcatgcttgaacacaacacaacacaacagcacagaatttacgtgtaacaccctgcctgtttcctgtatatgaaaacactactctcattcatg

SEQ ID NO: 66059 - DNA, 1940 bp, Zea Mays
aaaaaacaaaaaaattcgggaacctcgtcgcgggtctgagctccgcggcgtcctacaaccggtgagcggcgatcgttgccgcgcgcaatgtcacccatcgtaccaccaaaacccctcccgttcctcaccacgctcaccacccgcttctcacttgcctgcttacccacgcggcgtttcacccaaacctgctgttccagtgccgggcaccgcggtcccgcggtcgcggccactcctcgtcccggtggagtttgcagggtccattccccccttaggtctcttctccttgccagcgcggcaacttcggcccgaaccgcggcagcggcggaagacatgtctgacccggagctgaggctggtgctcgagcttgctactgacgaggaactgatggaggtcgaggagatcctctacggcaccagcccattgctaaaatcaattgcaagaagaccgaactcagatggtgttgttgttttggatgatatcgaggagagagatcatttcatctcaaaattagagtcaaggttcctgtatcttgctgcagatgctcgttttgttatgagggggtggagaccatcgtacagagatgtcttgctcagagtaagaaaaaaaattggtgttcagtgctctagcaaattgtgtactgcagaccttgaggcagaaatatttcttcacctcgtgaatgaatattcaagccaccagaaagaccgactttcatttccatgggataaacgaaaatctccaaacaatatctctagccttggtgcaaacaagtggaagatgcttactgatgtggcttggaggattggaacaaagggaatggaaagtacctttctgaagggtggtagtgcattgactatgaaaacaatatatgaatcgttagccaatagattgactggaaaactgctgaaggaggctgcaaattacaagataaagaaagaacttgttaagcagtaagtggtggcaggagcgatcggagggtttccaggtggcatgacggcaacacatcactagggaggcaacacaggcagggtgggagattggctgctgttaacctggagtctagagctggtttgcttgcagctaggcagggtttggttcgtgctgcatcgagatacgttggactcaggagtgtcgtgacatttcttggaccaatattgtgggggacgctcttggctgatattgtgattcaaatgttgggcaccgattatgctaggatcgtccaggcagtctatgcatttgctcagattcgtttgactcggacaagttacgtggaatctgatggtgaaggaccagagtaagatcgctactggactagcctaactggcattctgatctaaaagcaaccgtattgtacattctagccatgaagatcaccatctgattctgcgggttccagtgcaaatactccacgggacaacgaggttatagcttcagacttcggagtactgtactgctaatgtgagtgcgtataagtgacagacgagcggtgttacaagacgttgggtcgcagagacagtcatagagcacaacacaaccggctactcccctgatcgatgtaaagcttagcaaaaataacctaaccgtgacaatgaaaatatgatacagtaatgtttaacaacgagctccgcaagtgtcatttgggcggcgacctaccctgtgagcgcggaagttgtgactgaatttacttgggcgtcacacttccgcgcggggcccgaagttgtagaccatgcattctgctctgccccggttgaatactgtaaaatattgctccccttatcctaaactattcctcctaacgttcggttaggcaaggcagatctcattgacacagcctgatgccacaatctacagtcatgcttgaacacaacacaacacaacagcacagaatttacgtgtaacaccctgcctgtttcctgtatatgaaaacactactctcattcatg

SEQ ID NO: 66060 - DNA, 1549 bp, Zea Mays
aaaaattcgggaacctcgtcgcgggtctgagctccgcggcgtcctacaaccggtgagcggcgatcgttgccgcgcgcaatgtcacccatcgtaccaccaaaacccctcccgttcctcaccacgctcaccacccgcttctcacttgcctgcttacccacgcggcgtttcacccaaacctgctgttccagtgccgggcaccgcggtcccgcggtcgcggccactcctcgtcccggtggagtttgcagggtccattccccccttaggtctcttctccttgccagcgcggcaacttcggcccgaaccgcggcagcggcggaagacatgtctgacccggagctgaggctggtgctcgagcttgctactgacgaggaactgatggaggtcgaggagatcctctacggcaccagctattttagcccattgctaaaatcaattgcaagaagaccgaactcagatggtgttgttgttttggatgatatcgaggagagagatcatttcatctcaaaattagagtcaaggttcctgtatcttgctgcagatgctcgttttgttatgagtaagtggtggcaggagcgatcggagggtttccaggtggcatgacggcaacacatcactagggaggcaacacaggcagggtgggagattggctgctgttaacctggagtctagagctggtttgcttgcagctaggcagggtttggttcgtgctgcatcgagatacgttggactcaggagtgtcgtgacatttcttggaccaatattgtgggggacgctcttggctgatattgtgattcaaatgttgggcaccgattatgctaggatcgtccaggcagtctatgcatttgctcagattcgtttgactcggacaagttacgtggaatctgatggtgaaggaccagagtaagatcgctactggactagcctaactggcattctgatctaaaagcaaccgtattgtacattctagccatgaagatcaccatctgattctgcgggttccagtgcaaatactccacgggacaacgaggttatagcttcagacttcggagtactgtactgctaatgtgagtgcgtataagtgacagacgagcggtgttacaagacgttgggtcgcagagacagtcatagagcacaacacaaccggctactcccctgatcgatgtaaagcttagcaaaaataacctaaccgtgacaatgaaaatatgatacagtaatgtttaacaacgagctccgcaagtgtcatttgggcggcgacctaccctgtgagcgcggaagttgtgactgaatttacttgggcgtcacacttccgcgcggggcccgaagttgtagaccatgcattctgctctgccccggttgaatactgtaaaatattgctccccttatcctaaactattcctcctaacgttcggttaggcaaggcagatctcattgacacagcctgatgccacaatctacagtcatgcttgaacacaacacaacacaacagcacagaatttacgtgtaacaccctgcctgtttcctgtatatgaaaacactactctcattcatg

SEQ ID NO: 66061 - DNA, 1928 bp, Zea Mays
gggaacctcgtcgcgggtctgagctccgcggcgtcctacaaccggtgagcggcgatcgttgccgcgcgcaatgtcacccatcgtaccaccaaaacccctcccgttcctcaccacgctcaccacccgcttctcacttgcctgcttacccacgcggcgtttcacccaaacctgctgttccagtgccgggcaccgcggtcccgcggtcgcggccactcctcgtcccggtggagtttgcagggtccattccccccttaggtctcttctccttgccagcgcggcaacttcggcccgaaccgcggcagcggcggaagacatgtctgacccggagctgaggctggtgctcgagcttgctactgacgaggaactgatggaggtcgaggagatcctctacggcaccagctattttagcccattgctaaaatcaattgcaagaagaccgaactcagatggtgttgttgttttggatgatatcgaggagagagatcatttcatctcaaaattagagtcaaggttcctgtatcttgctgcagatgctcgttttgttatgagggggtggagaccatcgtacagagatgtcttgctcagagtaagaaaaaaaattggtgttcagtgctctagcaaattgtgtactgcagaccttgaggcagaaatatttcttcacctcgtgaatgaatattcaagccaccagaaagaccgactttcatttccatgggataaacgaaaatctccaaacaatatctctagccttggtgcaaacaagtggaagatgcttactgatgtggcttggaggattggaacaaagggaatggaaagtacctttctgaagggtggtagtgcattgactatgaaaacaatatatgaatcgccaatagattgactggaaaactgctgaaggaggctgcaaattacaagataaagaaagaacttgttaagcagtaagtggtggcaggagcgatcggagggtttccaggtggcatgacggcaacacatcactagggaggcaacacaggcagggtgggagattggctgctgttaacctggagtctagagctggtttgcttgcagctaggcagggtttggttcgtgctgcatcgagatacgttggactcaggagtgtcgtgacatttcttggaccaatattgtgggggacgctcttggctgatattgtgattcaaatgttgggcaccgattatgctaggatcgtccaggcagtctatgcatttgctcagattcgtttgactcggacaagttacgtggaatctgatggtgaaggaccagagtaagatcgctactggactagcctaactggcattctgatctaaaagcaaccgtattgtacattctagccatgaagatcaccatctgattctgcgggttccagtgcaaatactccacgggacaacgaggttatagcttcagacttcggagtactgtactgctaatgtgagtgcgtataagtgacagacgagcggtgttacaagacgttgggtcgcagagacagtcatagagcacaacacaaccggctactcccctgatcgatgtaaagcttagcaaaaataacctaaccgtgacaatgaaaatatgatacagtaatgtttaacaacgagctccgcaagtgtcatttgggcggcgacctaccctgtgagcgcggaagttgtgactgaatttacttgggcgtcacacttccgcgcggggcccgaagttgtagaccatgcattctgctctgccccggttgaatactgtaaaatattgctccccttatcctaaactattcctcctaacgttcggttaggcaaggcagatctcattgacacagcctgatgccacaatctacagtcatgcttgaacacaacacaacacaacagcacagaatttacgtgtaacaccctgcctgtttcctgtatatgaaaacactactctcattcatg

SEQ ID NO: 66062 - DNA, 1705 bp, Zea Mays
gggaacctcgtcgcgggtctgagctccgcggcgtcctacaaccggtgagcggcgatcgttgccgcgcgcaatgtcacccatcgtaccaccaaaacccctcccgttcctcaccacgctcaccacccgcttctcacttgcctgcttacccacgcggcgtttcacccaaacctgctgttccagtgccgggcaccgcggtcccgcggtcgcggccactcctcgtcccggtggagtttgcagggtccattccccccttaggtctcttctccttgccagcgcggcaacttcggcccgaaccgcggcagcggcggaagacatgtctgacccggagctgaggctggtgctcgagcttgctactgacgaggaactgatggaggtcgaggagatcctctacggcaccagggggtggagaccatcgtacagagatgtcttgctcagagtaagaaaaaaaattggtgttcagtgctctagcaaattgtgtactgcagaccttgaggcagaaatatttcttcacctcgtgaatgaatattcaagccaccagaaagaccgactttcatttccatgggataaacgaaaatctccaaacaatatctctagccttggtgcaaacaagtggaagatgcttactgatgtggcttggaggattggaacaaagggaatggaaagtacctttctgaagggtggtagtgcattgactatgaaaacaatatatgaatcgttagccaatagattgactggaaaactgctgaaggaggctgcaaattacaagataaagaaagaacttgttaagcagggtgggagattggctgctgttaacctggagtctagagctggtttgcttgcagctaggcagggtttggttcgtgctgcatcgagatacgttggactcaggagtgtcgtgacatttcttggaccaatattgtgggggacgctcttggctgatattgtgattcaaatgttgggcaccgattatgctaggatcgtccaggcagtctatgcatttgctcagattcgtttgactcggacaagttacgtggaatctgatggtgaaggaccagagtaagatcgctactggactagcctaactggcattctgatctaaaagcaaccgtattgtacattctagccatgaagatcaccatctgattctgcgggttccagtgcaaatactccacgggacaacgaggttatagcttcagacttcggagtactgtactgctaatgtgagtgcgtataagtgacagacgagcggtgttacaagacgttgggtcgcagagacagtcatagagcacaacacaaccggctactcccctgatcgatgtaaagcttagcaaaaataacctaaccgtgacaatgaaaatatgatacagtaatgtttaacaacgagctccgcaagtgtcatttgggcggcgacctaccctgtgagcgcggaagttgtgactgaatttacttgggcgtcacacttccgcgcggggcccgaagttgtagaccatgcattctgctctgccccggttgaatactgtaaaatattgctccccttatcctaaactattcctcctaacgttcggttaggcaaggcagatctcattgacacagcctgatgccacaatctacagtcatgcttgaacacaacacaacacaacagcacagaatttacgtgtaacaccctgcctgtttcctgtatatgaaaacactactctcattcatg

SEQ ID NO: 66063 - DNA, 2411 bp, Zea Mays
caaagaaagctgctaaaacctaaagcgtggaaagttgcatcttctcactctcgtttggtgctgtctctgtagcagctccacaaaagccaacaccaaagaccccttcttcccaccaccaccctccacccctccttaataattccttctcccagcacaacctgagttgtaattattatactagtactcgtcagtattcaccttcgtttattgtttgttcccccatctggttgttgatctcttcttctcccctcgggcgctctgcggctatatatatacgtccaatccaatcccctctccattcggtctccatcgcctgatcaaactagctagaggtggtgggggggaaaaggaacaagttttctggctcttcttcttgttccctagtccctcctccgtactattcttagcgctagctgctcttcaccgagatcgcctcgccgtcacccatgttgggcttctgcgcccccgccgccggatcgcctcccgacgaggcgatgccggagccgttctgttcgctgcagatcgccaccacggccgccgccgccgccacgacaaagaagaagcgccggcccgccggcacaccagacccggacgcggaggtggtctcgctgtcgccgcggacgctgctggagtcggaccggtacgtgtgcgagatctgcgggcaggggttccagcgcgaccagaacctgcagatgcaccggcggcggcacaaggtgccgtggaagctgctgaagcgggaggccggggaggcggcgcggaagcgggtgttcgtgtgcccggagcccagctgcctgcaccacaacccctcccacgcgctgggcgacctcgtcggcatcaagaagcacttccgccgcaagcacagcggccagcgccagtgggcctgcgcccgctgctccaaggcctacgccgtccactccgactacaaggcccacctcaagacctgcggcacccgcggccactcctgcgactgcggccgcgtcttctcccgggtggagagcttcatagagcaccaggacacttgcaacgccgggcgggcacgggcggacccctcgccggcgtgtggcgccgggagcaccggtgtggctgctgctagtgctgggtcgcagccgcaggcgccgccgcccatgtcactgtcgaggaccgcgtcgagcaccagcccgtccagcgacattgtcatcagcccggtggccgcctggcccggttcgtcggcaccgacgattccaagccctgcgaccgccgcgttccaccggttcgaacaagtcccgtcgccgcggacaccgccatcggaccaccatcaccgcggcgggcacaacctcgagctgcagctcatgccgccgtccggcagcggcgtggtgggccgtggcgcgccgggggtggcggagtacggcgtcgcgccacgcactccggccgctcctccacagagccaccccgccaccatgcagctgcagctgtccatcggcgtctgcggcggcggggggttcggggacgaggcgatgctggcagcggcgagggagaaagaggaggtggaggcgcgggagcagctgcggcaagctgtggcggagaaggcggcggcgaacgaggcccgcgcgcaggcgaggcggcacgcggagctggccgagcaggagctggcgagcgccaagcggatgcggcggcaggcgcaggtggagctgagccgagcccacgcgctccgggagcacgccgtgcgccaggtgaacgcgacgcttctccagatcacctgcctcggctgccgccacaagttccgcgcgcgtccgcagctcctggatgcggccctgggcgcccccgaggtgacctgcagctacatgtcctccgtcgtgacagaaggcggcgacgccgaggccgacgatgagccgcccctcgacggcagggacggcatgctgcagcggcgccgacacgccatggcaatggacgtcatcctctagctaacctgaaatgagatgatggtcttcgtttcaaatagtttcttgtgtttttgccggcaagacgccggggttgcatttgcattggcccctgctgtatgaggtgtatcagatgccgatgcctgatggtgcgtagacagtggaagaccccgctagctcgatcgggccagtgctgcctagacttcgagtcctgtgatgagaaggaaggaccggagaggtagccattaggcaagtccaaggagagacgaagacgagggctagctgctactagcttactgtgacgtacgtgcatggaatctttcggtgtttgcttcctattggatcttgttggaaagaaacattcattatattgctcatggaaagcaagttgatgatgccctttgtaaaggtcttcagtagccaacagggaaatcaagaatatttgtcacacctaaattcagcgactgcaatataacaccaaattacattaatttg

SEQ ID NO: 66064 - DNA, 1446 bp, Zea Mays
gctccggctccgctctccttttgggtggagagcttcatagagcaccaggacacttgcaacgccgggcgggcacgggcggacccctcgccggcgtgtggcgccgggagcaccggtgtggctgctgctagtgctgggtcgcagccgcaggcgccgccgcccatgtcactgtcgaggaccgcgtcgagcaccagcccgtccagcgacattgtcatcagcccggtggccgcctggcccggttcgtcggcaccgacgattccaagccctgcgaccgccgcgttccaccggttcgaacaagtcccgtcgccgcggacaccgccatcggaccaccatcaccgcggcgggcacaacctcgagctgcagctcatgccgccgtccggcagcggcgtggtgggccgtggcgcgccgggggtggcggagtacggcgtcgcgccacgcactccggccgctcctccacagagccaccccgccaccatgcagctgcagctgtccatcggcgtctgcggcggcggggggttcggggacgaggcgatgctggcagcggcgagggagaaagaggaggtggaggcgcgggagcagctgcggcaagctgtggcggagaaggcggcggcgaacgaggcccgcgcgcaggcgaggcggcacgcggagctggccgagcaggagctggcgagcgccaagcggatgcggcggcaggcgcaggtggagctgagccgagcccacgcgctccgggagcacgccgtgcgccaggtgaacgcgacgcttctccagatcacctgcctcggctgccgccacaagttccgcgcgcgtccgcagctcctggatgcggccctgggcgcccccgaggtgacctgcagctacatgtcctccgtcgtgacagaaggcggcgacgccgaggccgacgatgagccgcccctcgacggcagggacggcatgctgcagcggcgccgacacgccatggcaatggacgtcatcctctagctaacctgaaatgagatgatggtcttcgtttcaaatagtttcttgtgtttttgccggcaagacgccggggttgcatttgcattggcccctgctgtatgaggtgtatcagatgccgatgcctgatggtgcgtagacagtggaagaccccgctagctcgatcgggccagtgctgcctagacttcgagtcctgtgatgagaaggaaggaccggagaggtagccattaggcaagtccaaggagagacgaagacgagggctagctgctactagcttactgtgacgtacgtgcatggaatctttcggtgtttgcttcctattggatcttgttggaaagaaacattcattatattgctcatggaaagcaagttgatgatgccctttgtaaaggtcttcagtagccaacagggaaatcaagaatatttgtcacacctaaattcagcgactgcaatataacaccaaattacattaatttg

SEQ ID NO: 66065 - DNA, 1564 bp, Zea Mays
gacgacgttaaattcatcgttgtcgtctcacgctcacacatgcaataaagtctccctggtcacgcactcacgctcttggcttttgttcttgagttcacgcggccatgcacgcatccttgcctccttggtctttgcactcatggtggagagcttcatagagcaccaggacacttgcaacgccgggcgggcacgggcggacccctcgccggcgtgtggcgccgggagcaccggtgtggctgctgctagtgctgggtcgcagccgcaggcgccgccgcccatgtcactgtcgaggaccgcgtcgagcaccagcccgtccagcgacattgtcatcagcccggtggccgcctggcccggttcgtcggcaccgacgattccaagccctgcgaccgccgcgttccaccggttcgaacaagtcccgtcgccgcggacaccgccatcggaccaccatcaccgcggcgggcacaacctcgagctgcagctcatgccgccgtccggcagcggcgtggtgggccgtggcgcgccgggggtggcggagtacggcgtcgcgccacgcactccggccgctcctccacagagccaccccgccaccatgcagctgcagctgtccatcggcgtctgcggcggcggggggttcggggacgaggcgatgctggcagcggcgagggagaaagaggaggtggaggcgcgggagcagctgcggcaagctgtggcggagaaggcggcggcgaacgaggcccgcgcgcaggcgaggcggcacgcggagctggccgagcaggagctggcgagcgccaagcggatgcggcggcaggcgcaggtggagctgagccgagcccacgcgctccgggagcacgccgtgcgccaggtgaacgcgacgcttctccagatcacctgcctcggctgccgccacaagttccgcgcgcgtccgcagctcctggatgcggccctgggcgcccccgaggtgacctgcagctacatgtcctccgtcgtgacagaaggcggcgacgccgaggccgacgatgagccgcccctcgacggcagggacggcatgctgcagcggcgccgacacgccatggcaatggacgtcatcctctagctaacctgaaatgagatgatggtcttcgtttcaaatagtttcttgtgtttttgccggcaagacgccggggttgcatttgcattggcccctgctgtatgaggtgtatcagatgccgatgcctgatggtgcgtagacagtggaagaccccgctagctcgatcgggccagtgctgcctagacttcgagtcctgtgatgagaaggaaggaccggagaggtagccattaggcaagtccaaggagagacgaagacgagggctagctgctactagcttactgtgacgtacgtgcatggaatctttcggtgtttgcttcctattggatcttgttggaaagaaacattcattatattgctcatggaaagcaagttgatgatgccctttgtaaaggtcttcagtagccaacagggaaatcaagaatatttgtcacacctaaattcagcgactgcaatataacaccaaattacattaatttg

SEQ ID NO: 66066 - DNA, 1494 bp, Zea Mays
ctcgttcgttactcttccccgaattcctttcgttctcaggtctgtctccgctgccgtcgtgcagcgcggctccgttgtactgccgcaggagtccgccacttctcaaggtcgccatcgctaagacgcggccagctgttcaccaatctgctcctgcaagcttccgaaaatgtgcagctatgtcagaacatggacgtcaggaactccggaccaatgagtaccagctggatgatgatgatgagccgttttggctggcagtggtcagagaccttgctgtgggtttcaagggattggtagctttcttagctgagcagccgaggcaactgaagcacctggagtggccgggctttctacacacgctgaagacggccacacttactcttgtattggtagctatgtttattgttgcattatcaactattgatgctgccctctgctacatgctggcctggctacttcgaaaatctgcctagaataatgctggaatatccatgtattgcttgaatatgatttagccagacaggatagtagcaggcactgcagctggaactcaagctcttgttgtcgtcgaggtcagcaatgttaatcagactggaggtagcaggaaggtggatcttgcacggtgtgccattttatttttgggaggattgagaaaatcaaaacagctgccctacaaatagtgctgatgtcatgtgatgcagatgctcatagtggcatttcaaagggttaattagatctgtgccattataactttgctgttttggaggcacaccgttacatgttgaggtccaatttaacagagaaagagcacatcatggataggatccgagaactgtgtgtagtgatttgtaacttctcttttatgttaagcagacttgcttgtaacttgttggtccgtcagctaggatatggagtatttttaagacatctggtctactttgtaggcttaacaagtcttccactctgatttctcattagtattggattggtgaattcttatctagattgtctgctgttgagctacaaaatgcaacttacatggtttggtagttatgggaggctgcaaaattggattttatacatcagaggaaggatgcaaattttgcaaacatggttaacttctgtatgaattagcaacattgcatgcctgtactactactgtaccgatgtgaaaatactactgaagggaagtttgcaggctattatttgaaatctggagtttacagatcctggtatgatacagaagtcatacaaaaaaaagtggtagatgcaagagttttggaaggaatatatgtatcaatatttcatgcaataacattactggcttcttcagataatgtgcacatttataattgatcccagttgtgattcgaggacatggacaccacaactatctgatgctttcctgtgactgtcttggcgtttgttgaactagaagtcagagacatgacagataaattcttcatccaggagagtccatgagtttccaaagttgac

SEQ ID NO: 66067 - DNA, 1738 bp, Zea Mays
cttaaatcgcagcaccactgcgaaacccgatcgctagtcgtctcgtcactgccgtttgatccctccacccgtttccagaagcttcgcggctccgtcatgcgtcccgccgtcgtcacggtgctcctcctagtagcagcggccgcctcgccggccgccgcactctactccgccggttcccccgtcctccagctcaatcccaacaacttcaaatcgaagtgcaggtgctgaactcgaacggcgtggtgctggttgaattcttcgcgccgtggtgtgggcactgcaagcagctggcgccggcttgggagaaggctgccggcgtgctcaagggcgttgccacggtcgcagcgcttgatgccgatgcgcaccaggcgctcgcgcaggaatatggaatcaagggatttcccactattaaggtgttttcccctggtaaacctccagttgattatcaaggagcaagagatgtaaagccgattgtagagtttgctctgtcacaggtcaagtcccttcttagagataggttgagtggtaaggcatcagcagggtcaaatggcaagacatctggaggctcaagtgagaaaagtgaaccaagtgcatcagtagaattaaattcacgcaactttgacgagcttgttgtcaaaagcaaggacctttggattgtggaattctttgcgccatggtgtgggcactgcaagaaattggcacctgaatggaaaaaggctgcaaagaacttgaagggccaagtgaagctagggcatgttgattgcgatgctgaaaagtccttgatgagcaagtacaaggtggaaggttttccaactattttggtatttggtgctgataaggagagcccattcccctaccagggggctagagttgcatctgccattgaatcctttgcattggagcagttggaagccaattctggcccggctgaagtttctgagttgactggcccggatgtcatggaagagaagtgcgcttctgctgccatttgttttgtatcattccttccagacatccttgattcaaaggcagaaggaagaaacaagtaccttgagctcctgctctctgtagctgagaagtttaaaaagagtccatacagttttgtctggacagctgctggcaagcaagctaatctcgagaaccaggttggtgtgggcggctacggctatcccgccatggtagctctcaacgtgaagaaaggtgcatacgctccactccgtagtgccttccagcgcgacgaaatcatcgagttcgtgaaggaggcagggcgtggtggaaagggaaaccttcctctgaacgatgcacctacagtagtcgcgtccgagccgtgggacggcaaagatggagaggtcattgaggaggatgaattctccctcgacgagctcatgggcgacagctcctcagcaaacgatgagttgtgattctgatggttcttggactgatctgcgtgtcggttagccagactgtaaatctgaggaactctgttttgaaaaatcattccttgagtggcataattttccaggttatggatgctagaatggattaagattaaggagaactgatgtgatagaccttttctttaacgtttttttttatccctgaagtaaagtcagtttggacgtatatgttgaacaagtggtctacgctttagaacatgctcttctgctcacattggaatattggatagacagaccccaacttccagtcctacccccagaggacagaagacgaaacatac

SEQ ID NO: 66068 - DNA, 1706 bp, Zea Mays
ccgatcgctagtcgtctcgtcactgccgtttgatccctccacccgtttccagaagcttcgcggctccgtcatgcgtcccgccgtcgtcacggtgctcctcctagtagcagcggccgcctcgccggccgccgcactctactccgccggttcccccgtcctccagctcaatcccaacaacttcaaatcgaaggtgctgaactcgaacggcgtggtgctggttgaattcttcgcgccgtggtgtgggcactgcaagcagctggcgccggcttgggagaaggctgccggcgtgctcaagggcgttgccacggtcgcagcgcttgatgccgatgcgcaccaggcgctcgcgcaggaatatggaatcaagggatttcccactattaaggtgttttcccctggtaaacctccagttgattatcaaggagcaagagatgtaaagccgattgtagagtttgctctgtcacaggtcaagtcccttcttagagataggttgagtggtaaggcatcagcagggtcaaatggcaagacatctggaggctcaagtgagaaaagtgaaccaagtgcatcagtagaattaaattcacgcaactttgacgagcttgttgtcaaaagcaaggacctttggattgtggaattctttgcgccatggtgtgggcactgcaagaaattggcacctgaatggaaaaaggctgcaaagaacttgaagggccaagtgaagctagggcatgttgattgcgatgctgaaaagtccttgatgagcaagtacaaggtggaaggttttccaactattttggtatttggtgctgataaggagagcccattcccctaccagggggctagagttgcatctgccattgaatcctttgcattggagcagttggaagccaattctggcccggctgaagtttctgagttgactggcccggatgtcatggaagagaagtgcgcttctgctgccatttgttttgtatcattccttccagacatccttgattcaaaggcagaaggaagaaacaagtaccttgagctcctgctctctgtagctgagaagtttaaaaagagtccatacagtttgtctggacagctgctggcaagcaagctaatctcgagaaccaggttggtgtgggcggctacggctatcccgccatggtagctctcaacgtgaagaaaggtgcatacgctccactccgtagtgccttccagcgcgacgaaatcatcgagttcgtgaaggaggcagggcgtggtggaaagggaaaccttcctctgaacgatgcacctacagtagtcgcgtccgagccgtgggacggcaaagatggagaggtcattgaggaggatgaattctccctcgacgagctcatgggcgacagctcctcagcaaacgatgagttgtgattctgatggttcttggactgatctgcgtgtcggttagccagactgtaaatctgaggaactctgttttgaaaaatcattccttgagtggcataattttccaggttatggatgctagaatggattaagattaaggagaactgatgtgatagaccttttctttaacgtttttttttatccctgaagtaaagtcagtttggacgtatatgttgaacaagtggtctacgctttagaacatgctcttctgctcacattggaatattggatagacagaccccaacttccagtcctacccccagaggacagaagacgaaacatac

SEQ ID NO: 66069 - DNA, 1630 bp, Zea Mays
aaccaacacccgactcgctcggcccagcagagggagcatcgcaattcacaccagcgcagcgcgacgaggggaagaggagtttctcagccgcagtcgccgaaccacacgccgccgaggccgtaggcgcgcttgctgtcccgccgcccgcatggcaccgaagcgcccggccgccgcagcggcggcggcctcggggtcggcgtccgaggcatccgacgcggaggcggacgtgggccaccagccgtcctccccatccccgtccaagacgccgccgaccaaccctaaccctaagtccgctgccgctggccccgccgaggactccaccgcggccggatccgactccgaggccgcgtacgactctgacgcggaccaccgccccgcgcaccggaaggcggcggtagcggcgtccccatcgcgcaagcccaggagccccaggccgcgctcccgctcccgctccccggacgcagcctcgtactccgacggcgcggcctcagatgccgacgctgaccctgccgcccgagacggcgccgactccgccgacgacggcaacgcctctccgctcgcgctcccgcgcctatcccgcgccgaggctgccgccatcaagcccctcagctcgcgccccatggatccgccgcgccgctccatgctcagtgacaaggtacggcgtctcaagcagaagtacaaccagcttgcgtcccgtggcaagaacgggcgggatccagacttgcccacccagcatgaacagagtgtttatgagattggcaagaaggtatggggaacaagtacgggtggtgatgggtatgagattggtggtgacagccaagaggagcatgaaattggagagagtgacgaggatgtggagagtgggtgggatgaacgtgcccgcaagaacaggaggctgatgccaatcactatggcaaatggacacggatctgggttcggggctggcagagggaagtttgatgttgagaagggaaaggatgcttatccatacctttgggagactgtagaggatctgtcaaaggagcacccgaatggggtagcattcaagaaagcctttgagctgatcgaaggcgccagagcgcgtgggatggaggagaagctacgaaaattcaggctgacagagatcagacaccagctgcgacgtatggaattgatgaaggagacagtgaagatggtgcttgatgcgctggaaggttgactgagtaatgatcttctggtgggtgagttgtgcaatgtttaaaggagcaatcagtgtcttcttttgtttctagatagagtttctgtgactgaattacttgacttgcatagacaagttgcacttgtgtctcttgggtgctaacttttgcattatatggtatacagtttctatgctcacttaagtttggttacttaagttcggtttgatgcatctgatgaaggttttgttctatcttactccttttgcagtttttttttttgctactgtatctacaaattggaataccatgattggtgaatatcatggttcctaacctactagatttaggttgtttgctgtgctaggagggttaattttaaatggcatgtagttgatggtcaaaaccaaggaggaattgtgtgttgctattgaagaataaaaggtttattctaa

SEQ ID NO: 66070 - DNA, 1662 bp, Zea Mays
cacagctctcctaactcaaatcgcactcacacaatgccaaacgggcccaacaaacttgcagacccactcgtcatcgctactcgctcacacatgcgcgccttggcacctcgcccctcgcagagtcgcagtctacagcagccgcgcaacctttgccgcgccctgcacaccggagtccaggcggcgcccggcccagccctcatgaatctggccgccttttcctccacccttgccacgctcccctggtcgcagagcggctggaaaagttcaagacaacaattttcactcagatgagcatgcttgccatcaagcatggagcaataaaccttggccagggctttccgaattttgatggcccagactttgtgaaagaggccgcaattcaagctatcaatgctgggaagaatcagtacgcaagagggtttggtgtgcctgaactgaactcggctatcgctgaaaggttcctgaaggacagtggattgcaagttgaccctgacaaggaagtcactgttacatctggatgcactgaggcaatagctgcaaccatactaggtctgatcaatcctggcgacgaggtgatactgttcgccccattctacgattcatacgaggctacactgtcgatggccggtgccaacgtgaaggccattaccctccgcgctccagatttcgcggtcccgcttgaggagctggaggctgcagtctccaaggacacgaaagcgataatgataaacacgccgcacaacccaaccgggaaaatgttcaccagggaggagctcgaatccatcgccgccctctgcaaggaaaacgacgttttgctgttctcagatgaggtctatgacaagctggtgtttgaggctgaccacatatccatggcttctatcccgggcatgtacgagaggacggtgaccatgaactctctggggaagacgttctctcttacaggatggaagatcgggtgggcaatcgcgccgccgcacctgacatggggcctcaggcaggcgcactcgttcctgacgttcgccacctgcacaccgatgcaggcggcggccgcggcggctctgagggcaccggacagctactacgacgagctgaagagggactacagcgcgaagaaggctatcctgctggaaggactcgaagccgcagggttcatcgtctacccatcgagtgggacatactacatcatggtcgaccacaccccgttcggtttcgacagcgacgtagagttctgcgagtacttgatccgcgaagtcggcgtctgcgctataccgcccagcgtgttctacctcgaccccgaagagggaaagaaattggtgaggttcaccttcagcaaggacgaaggcacgctgcgggccgcggtcgagaggttgaaggcgaagctcaggaggaaatgaatgaaggggggattacatgtttgtggctggtgattgttgaataatctgtgctgggtttcaactgcgcccggatgcctgtactgtctctttttttttttgctagcaatagttatgctgccagcgacttcatgcctagtgtcgttactatttgttttgtctgtgtgtaagcagatggcgatggatcaggatacctgccggctgccgctacacttttgtaacctatggagcaatttgtgtcaaaaaaccatggcatagaaagaaaaaaaaa

SEQ ID NO: 66071 - DNA, 1985 bp, Zea Mays
cactcgtcatcgctactcgctcacacatgcgcgccttggcacctcgcccctcgcagagtcgcagtctacagcagccgcgcaacctttgccgcgccctgcacaccggagtccaggcggcgcccggcccagccctcatgaatctggccgccttttcctccacccttgccacgctcccctggtatgagatgccatcaataaattcctccgcaactttctcgtcctcactgctccgccgctcgctctgcgcgtcgctccggacgatctcccacatggcctccgccgccgcccccacctccgcgcccgtcgccaccaccgagaacggcgccgcgaaggcgatagagcagcggcccgtgcaggtcgcagagcggctggaaaagttcaagacaacaattttcactcagatgagcatgcttgccatcaagcatggagcaataaaccttggccagggctttccgaattttgatggcccagactttgtgaaagaggccgcaattcaagctatcaatgctgggaagaatcagtacgcaagagggtttggtgtgcctgaactgaactcggctatcgctgaaaggttcctgaaggacagtggattgcaagttgaccctgacaaggaagtcactgttacatctggatgcactgaggcaatagctgcaaccatactaggtctgatcaatcctggcgacgaggtgatactgttcgccccattctacgattcatacgaggctacactgtcgatggccggtgccaacgtgaaggccattaccctccgcgctccagatttcgcggtcccgcttgaggagctggaggctgcagtctccaaggacacgaaagcgataatgataaacacgccgcacaacccaaccgggaaaatgttcaccagggaggagctcgaatccatcgccgccctctgcaaggaaaacgacgttttgctgttctcagatgaggtctatgacaagctggtgtttgaggctgaccacatatccatggcttctatcccgggcatgtacgagaggacggtgaccatgaactctctggggaagacgttctctcttacaggatggaagatcgggtgggcaatcgcgccgccgcacctgacatggggcctcaggcaggcgcactcgttcctgacgttcgccacctgcacaccgatgcaggcggcggccgcggcggctctgagggcaccggacagctactacgacgagctgaagagggactacagcgcgaagaaggctatcctgctggaaggactcgaagccgcagggttcatcgtctacccatcgagtgggacatactacatcatggtcgaccacaccccgttcggtttcgacagcgacgtagagttctgcgagtacttgatccgcgaagtcggcgtctgcgctataccgcccagcgtgttctacctcgaccccgaagagggaaagaaattggtgaggttcaccttcagcaaggacgaaggcacgctgcgggccgcggtcgagaggttgaaggcgaagctcaggaggaaatgaatgaaggggggattacatgtttgtggctggtgattgttgaataatctgtgctgggtttcaactgcgcccggatgcctatggcgatggatcaggatacctgccggctgccgctacacttttgtaacctatggagcaatttgtgtccgctgtctgttcacccttgtcaacctgtcctatacgtcacgttcggagcggccaataaaataagctgatcaaaccagatcctcgcaacagcgagcttgttcttgtacgtacctcgcaacagtgaggccgctgtgctggagagactcgtagctgtgactgtgagagccccttttaagtgcacagcgttttattttatccccgtcgcatgattccgcacgactacacgtctgcacttgtcgcatctctatccagcaatccacagcgatgagacaccatcgtgcccaaccaccaaaaccggtaaagaaaaaaccatggcatagaaagaaaaaaaaa

SEQ ID NO: 66072 - DNA, 1901 bp, Zea Mays
cactcgtcatcgctactcgctcacacatgcgcgccttggcacctcgcccctcgcagagtcgcagtctacagcagccgcgcaacctttgccgcgccctgcacaccggagtccaggcggcgcccggcccagccctcatgaatctggccgccttttcctccacccttgccacgctcccctggtcgcagagcggctggaaaagttcaagacaacaattttcactcagatgagcatgcttgccatcaagcatggagcaataaaccttggccagggctttccgaattttgatggcccagactttgtgaaagaggccgcaattcaagctatcaatgctgggaagaatcagtacgcaagagggtttggtgtgcctgaactgaactcggctatcgctgaaaggttcctgaaggacagtggattgcaagttgaccctgacaaggaagtcactgttacatctggatgcactgaggcaatagctgcaaccatactaggtctgatcaatcctggcgacgaggtgatactgttcgccccattctacgattcatacgaggctacactgtcgatggccggtgccaacgtgaaggccattaccctccgcgctccagatttcgcggtcccgcttgaggagctggaggctgcagtctccaaggacacgaaagcgataatgataaacacgccgcacaacccaaccgggaaaatgttcaccagggaggagctcgaatccatcgccgccctctgcaaggaaaacgacgttttgctgttctcagatgaggtctatgacaagctggtgtttgaggctgaccacatatccatggcttctatcccgggcatgtacgagaggacggtgaccatgaactctctggggaagacgttctctcttacaggatggaagatcgggtgggcaatcgcgccgccgcacctgacatggggcctcaggcaggcgcactcgttcctgacgttcgccacctgcacaccgatgcaggcggcggccgcggcggctctgagggcaccggacagctactacgacgagctgaagagggactacagcgcgaagaaggctatcctgctggaaggactcgaagccgcagggttcatcgtctacccatcgagtgggacatactacatcatggtcgaccacaccccgttcggtttcgacagcgacgtagagttctgcgagtacttgatccgcgaagtcggcgtctgcgctataccgcccagcgtgttctacctcgaccccgaagagggaaagaaattggtgaggttcaccttcagcaaggacgaaggcacgctgcgggccgcggtcgagaggttgaaggcgaagctcaggaggaaatgaatgaaggggggattacatgtttgtggctggtgattgttgaataatctgtgctgggtttcaactgcgcccggatgcctgtactgtctctttttttttttgctagcaatagttatgctgccagcgacttcatgcctagtgtcgttactatttgttttgtctgtgtgtaagcagatggcgatggatcaggatacctgccggctgccgctacacttttgtaacctatggagcaatttgtgtccgctgtctgttcacccttgtcaacctgtcctatacgtcacgttcggagcggccaataaaataagctgatcaaaccagatcctcgcaacagcgagcttgttcttgtacgtacctcgcaacagtgaggccgctgtgctggagagactcgtagctgtgactgtgagagccccttttaagtgcacagcgttttattttatccccgtcgcatgattccgcacgactacacgtctgcacttgtcgcatctctatccagcaatccacagcgatgagacaccatcgtgcccaaccaccaaaaccggtaaagaaaaaaccatggcatagaaagaaaaaaaaa

SEQ ID NO: 66073 - DNA, 1454 bp, Zea Mays
gctgactgtgcgacatcagtttgatactgaataggtcgcagagcggctggaaaagttcaagacaacaattttcactcagatgagcatgcttgccatcaagcatggagcaataaaccttggccagggctttccgaattttgatggcccagactttgtgaaagaggccgcaattcaagctatcaatgctgggaagaatcagtacgcaagagggtttggtgtgcctgaactgaactcggctatcgctgaaaggttcctgaaggacagtggattgcaagttgaccctgacaaggaagtcactgttacatctggatgcactgaggcaatagctgcaaccatactaggtctgatcaatcctggcgacgaggtgatactgttcgccccattctacgattcatacgaggctacactgtcgatggccggtgccaacgtgaaggccattaccctccgcgctccagatttcgcggtcccgcttgaggagctggaggctgcagtctccaaggacacgaaagcgataatgataaacacgccgcacaacccaaccgggaaaatgttcaccagggaggagctcgaatccatcgccgccctctgcaaggaaaacgacgttttgctgttctcagatgaggtctatgacaagctggtgtttgaggctgaccacatatccatggcttctatcccgggcatgtacgagaggacggtgaccatgaactctctggggaagacgttctctcttacaggatggaagatcgggtgggcaatcgcgccgccgcacctgacatggggcctcaggcaggcgcactcgttcctgacgttcgccacctgcacaccgatgcaggcggcggccgcggcggctctgagggcaccggacagctactacgacgagctgaagagggactacagcgcgaagaaggctatcctgctggaaggactcgaagccgcagggttcatcgtctacccatcgagtgggacatactacatcatggtcgaccacaccccgttcggtttcgacagcgacgtagagttctgcgagtacttgatccgcgaagtcggcgtctgcgctataccgcccagcgtgttctacctcgaccccgaagagggaaagaaattggtgaggttcaccttcagcaaggacgaaggcacgctgcgggccgcggtcgagaggttgaaggcgaagctcaggaggaaatgaatgaaggggggattacatgtttgtggctggtgattgttgaataatctgtgctgggtttcaactgcgcccggatgcctgtactgtctctttttttttttgctagcaatagttatgctgccagcgacttcatgcctagtgtcgttactatttgttttgtctgtgtgtaagcagatggcgatggatcaggatacctgccggctgccgctacacttttgtaacctatggagcaatttgtgtcaaaaaaccatggcatagaaagaaaaaaaaa

SEQ ID NO: 66074 - DNA, 1590 bp, Zea Mays
agagcttatacaaattgaacatgtcttcaactccacaggccacacgcatcatcctcgccggccttgcccccgactgctcgtataaaacggacggggaggcagcctctccaactgaccggggaagtcacactcacacgttcgcgtgttagactctcctgaaaccagcgtgctgtgccgcccgggacgatggcgccgcgccagccgctgctccccagtttcctctacgcggcgtcgtccggcgtcaacggcagcagggaggcgcctccggtggtggcgggcgccccgagcgagccgctcggcaagatcgagatgttctcgcccgcatactacgcagcgggcgccttgggaggcgccgcggcctgcgggttcacgcacgccgccgtcacgccgctcgacgtcatcaagtgcaatatccagatcgaccccgccaagtacaagaacacctcgtcggcgttcagcgtggtgatgagggagcagggcctccggggcttctacagggggtgggcgccgacgttcgtgggctacagcgctcagggtgcgttcaagtacggcctctacgagttcttcaagaagacgtacgccgacatggccggccccgagcacgccgccaggtacaagaccctcatctacctggcgggctcggccaccgcggaggttttcgccgacgtcgcgctctgccccatggaggccgtcaaggtccgggtgcagacgcagcccggcttcgccaggggactcagcgacggcttccccaagatcgtcagggccgagggctacgcagggctattcagaggactggttcctctttgggggcgacagattccttacaccatgatgaagttcgcgacgtacgagaacatcgtggagatgacctacaagcacctcatccccacgccgaaggatcagtgcagcaagcctctccagctcggggtaagcttcgggagcggctacgtcgccggagttttctgcgccgccgtctcgcaccctgcagacaacttggtgtcgttcctgaacaacgccaagggagccacagttggagatgctgtcaagaaccttggcctgttgggcctcttcactcgtggcctccctcttcgcatcctgatggtcggcaccctgactggcgctcagtgggtgatctatgattccttcaaagttatgattggactgccaacgactggcggagcgcctgctcctgctactgtcccaatggaaggactcggagagctaaaagcctctgcctgaagttctaaagtttgacagagagtatgcatgcttccgtccatagcgtatactggtgactgtaacagaccctcacccccaccagaaaatattgtctcaagctggtgattttgttttgaataagataagttattactgtatgctacgagtatataatacgacatgtagaagactataagttactagtcacaaagttgataaatcatttttgggtgaaatttatttgggttcgtactggattgtgttcctccaatataaattgtgttcctccaatataaatgtattcatatcgaactatatatgtatatatgttgcaacatggcttcaatcaaatatatattgtcttttttgggg

SEQ ID NO: 66075 - DNA, 1680 bp, Zea Mays
cccccttcctggccccccacaatccgaggatccgaatccccgacgcaacccttgcgtggtggcgtcaccacccaaatcccaccatccggatctgccgatccgccgccgccatgtcccgctcggagcgccgcctcgcctcggccgtggtgcgccttcccggccgctccagggtctccgcctcgccatccccgcgccgccgctcccagtccccatccccgcgccgcgaccgccgccgccgcgaccgctccccgatcccttaccgcgatcgctccccaagtccatatcgagcccgtcgccgtgaccgctccccgagcccttaccgcgatcgccgcgaccgctccccgagcccttatcgcgatcgccgccgccagtggtcaccctaccacaacgaccgcggccgggaccgtgaccgggtcctgcccgtccgtagcggcgggggcgcctggtccgatgacgacgacgacgacaaggaactccagggcctcagctacttcgagtaccgccgcctcaagcgccagaagcttcgcaagagcaagaaaaggtgcatctggaacatcacgcccagcccgccccgtgttgaaggcgacgaggagaactacggctacagcgacgtggaagaggagaaggtatctccgaaggcctcgccggaggctagcgaggaggagagcaaggatgcgtcggagtcagaatccggtgagtctgatagcctctccgagtccagcggatcggaagcttctatgaggaagaagaaagggaggaataaaagtcgccgtagtagcaagcgcagccggcagcgccaccgccaccgctcatacagttcggagattgaggacgaaagcaagagcgacgatgattctgtgggctcttatgattcggaggagtctagggataggagcaaaaagaggtcgcgcaggcataatagatctaagaagaggagcaggagctccaggaggaagaagaggaggagccaggatacagcatcggagcaaagctctgaggaggaagaggaggaggatagtaagaaaaagaataagggcttgaagaggaagcggagcaagcgatctgattctgaagaatcggtcccttctgatgccactcctgatgatgtaaaagaaattgaagaaactaaagtgccagaaattgatccagaagcaatcaagttcaaggaaatccttgaggcccagaagaaggcttccttggagaacgatatgcctgttggtccaatgccacttccacgcgcagaagggcatattagttatggtggtgcacttaggcctggagaaggtgacgcaattgcacagtatgttcagcaagggaagcgtatcccacggcgtggtgaggttggtctgtctgcagaagagattcagaagtttgaggatctggggtatgtgatgagtgggagtaggcaccagaggatgaatgctatccgtatcaggaaggaaaatcaggtttatagtgctgaggataagagagcattggccatgtttaactacgaggagaagtcaaagcgggagcacaaggttatggctgacttgcagcgcttggtgcagagaaccattggccatgatgtgggaccttcacatgatccatttgctactacagatggttgagtaatgatttcttgttcaactagtcacctgtatcaggaaatacagacctggtgtagtggtgagagctgac

SEQ ID NO: 66076 - DNA, 2937 bp, Zea Mays
gcaccggcacggacgtgggcgccgcgccgctccaggtccaggtccaggcgaaccatcacaaaaaataatccggaagctatcagtcgagcgcatcatcacgcgacattcttgatgctcagttcacctcacctcaccggctcaccgcaccttgtgtcagtcaccctcctcgagatgccgttcctgcctccacgtcgcagtccgccacagcgacctctattaaacggcaacaactcatgctgcccccgctgccacacccgccgcttatcatgcgctggcgaaggcgattgagcgagttcagcggctaatagattttcagttttatttccgggagaatgcggggtggcggcggggcttcctggctttcgtttcgcggcgtggtggtggaggaagaagaggcggtggtttcggcgccggaaaagccaatgcggcgggggcggcggaggtggggagcggaggtggacgacggctactcgccgagctccacgggcggcggcgggagcagctgctgcgattccttcggctgcgactcgcctttggccgggttcgtgcgcccagatggtgacccagacacagatctggagacagatgggttggccacttccacctccagtgcttctgcagcctttaccgagcggcaggacgacgaagcggaagaggcgctgtacggggtgaaggaagaggagtgggctcagatacaagaaccagccaagaatccggcattccgtgccaccccagaatgccacaaacagcggtaccggacggatgctgctgttcttttgcatggtaggaaggggtcgaaacagcggccggcctcacttgacctcggtagccctgggttccatggagccacgttttctccaagtttcgtgattggtggtgtggggttgatgaacaaaggacttggagcatcagtcatcaggtcagacgtgtttcatagtcctgggacgccgaactatccgcgccaccgtgcatcagtgttagggtgccataaagggtggagctctgagagagttccacatccttctaaaggaaataggcggtacccaggcagcagcatggcatttccttacagcaatgggaggacattgccctcgaaatgggaggatgcagagaggtggatcttcagtcccaattccagcgacgcgcttggaagaactacggttgctcatgctcggcgaccgaagtctaaaagtggccccctggggcctccaggaagacttggtggacagtattcatctgtttcttcagtgtcattgcttgataatgggagagctggacctattacagcaaattcaccttttgcggctggagtactaatgccggaacatgtttgtgaaggaaaaagtacaaatggaacctattcaagtagaccaattggtaacgaaatcaacattggaagaggagtcaaaatttgtccactgaatggtgggtctcatcctgttcgaacttccagagttcgccagcgattagattatgcagtcgaatcatctgtttcattgcctagcacgcaagaatctgtccaagacgagcaggttgaaatcacagaagattcagcttctactattgcttctataatttctagaaaagatgctgcaacccagaccagtccagagctaagtaggtcctcttcacccaacactagaccaacatttaatggttccttgtcaacagaacaagtgaaagagaaggggagctgtttgtcagatcttgatatcagggatgttcagatggatgatcgagtgactttgactaggtggtcaaagaaaaatgtaacacggtcgtctaacaagaattcaacaaacataatagagtggagcgaaaagacagtggaatcaaaatcttcgtcctggggctttgccaaagcgaagtgcatttctaagattgatagagaggacacagaaattactgcatgggagaatattgaaaaagcaaaagctgatgcagcaattcagaagttagtgattaagttagagaagaaaaggtcatcttcgcttgataagattttgaacaccctcaaatctgctcaaaggaaatcccaggtgatgcatgagcatgagcgtgatgcagtaacagcaaaccaagatggaaaaggctctaggaaggcaaaaaagagagcacaactcagcaagaatggccaaatcagttcactgagtggctgcttcacttgccatgctttctgatacatgtaattccaaaattgagaatcaggatccgacaaattccttcgcattccatgcaccaccttcatgttccccacatcaaaatctgggtgaagttcggagatccatcacatatcagtacataatatgatgatcccacagctggagattagacagagatctttcgaagatgctagctgcaggctccagctgctatgatagggacaatgccaaggggacaaataaaatgcagcacgaaggaaaggaggaacagtactgcgtacaccccatgtgcccgggtcgatgcctcctttatcattgtgctctgccttgtagctaggcactgtgaggctctgattgcaatcttgttgccaaagctgtatggatcatactaagagcaattccattgcacccaagggacagcaaaatcttgaggtacgaggagaaatcatgtcctgcttgtgcgtgtgactatttgagtgctctgctgggcgctggaagggaaccacgccccgttgtctcttttgtttggtacagtgctttacgaaggtgccatcggggtgactacttgcatttgcttttcagcagcgtcggtgtgttgtgttgtgtgtacctcttctctttgggaaactgagatgttggtttggcctggaaacttcggaatatcatatacagggacgaaaataatcatcactatgacgatttgttgtgggtgtcattttacggcagttattcatctggaatgctagtggcctttttaacatattcttcacttgcc

SEQ ID NO: 66077 - DNA, 2627 bp, Zea Mays
gcaccggcacggacgtgggcgccgcgccgctccaggtccaggtccaggcgaaccatcacaaaaaataatccggaagctatcagtcgagcgcatcatcacgcgacattcttgatgctcagttcacctcacctcaccggctcaccgcaccttgtgtcagtcaccctcctcgagatgccgttcctgcctccacgtcgcagtccgccacagcgacctctattaaacggcaacaactcatgctgcccccgctgccacacccgccgcttatcatgcgctggcgaaggcgattgagcgagttcagcggctaatagattttcagttttatttccgggagaatgcggggtggcggcggggcttcctggctttcgtttcgcggcgtggtggtggaggaagaagaggcggtggtttcggcgccggaaaagccaatgcggcgggggcggcggaggtggggagcggaggtggacgacggctactcgccgagctccacgggcggcggcgggagcagctgctgcgattccttcggctgcgactcgcctttggccgggttcgtgcgcccagatggtgacccagacacagatctggagacagatgggttggccacttccacctccagtgcttctgcagcctttaccgagcggcaggacgacgaagcggaagaggcgctgtacggggtgaaggaagaggagtgggctcagatacaagaaccagccaagaatccggcattccgtgccaccccagaatgccacaaacagcggtaccggacggatgctgctgttcttttgcatggtaggaaggggtcgaaacagcggccggcctcacttgacctcggtagccctgggttccatggagccacgttttctccaagtttcgtgattggtggtgtggggttgatgaacaaaggacttggagcatcagtcatcaggtcagacgtgtttcatagtcctgggacgccgaactatccgcgccaccgtgcatcagtgttagggtgccataaagggtggagctctgagagagttccacatccttctaaaggaaataggcggtacccaggcagcagcatggcatttccttacagcaatgggaggacattgccctcgaaatgggaggatgcagagaggtggatcttcagtcccaattccagcgacgcgcttggaagaactacggttgctcatgctcggcgaccgaagtctaaaagtggccccctggggcctccaggaagacttggtggacagtattcatctgtttcttcagtgtcattgcttgataatgggagagctggacctattacagcaaattcaccttttgcggctggagtactaatgccggaacatgtttgtgaaggaaaaagtacaaatggaacctattcaagtagaccaattggtaacgaaatcaacattggaagaggagtcaaaatttgtccactgaatggtgggtctcatcctgttcgaacttccagagttcgccagcgattagattatgcagtcgaatcatctgtttcattgcctagcacgcaagaatctgtccaagacgagcaggttgaaatcacagaagattcagcttctactattgcttctataatttctagaaaagatgctgcaacccagaccagtccagagctaagtaggtcctcttcacccaacactagaccaacatttaatggttccttgtcaacagaacaagtgaaagagaaggggagctgtttgtcagatcttgatatcagggatgttcagatggatgatcgagtgactttgactaggtggtcaaagaaaaatgtaacacggtcgtctaacaagaattcaacaaacataatagagtggagcgaaaagacagtggaatcaaaatcttcgtcctggggctttgccaaagcgaagtgcatttctaagattgatagagaggacacagaaattactgcatgggagaatattgaaaaagcaaaagctgatgcagcaattcagaagttagtgattaagttagagaagaaaaggtcatcttcgcttgataagattttgaacaccctcaaatctgctcaaaggaaatcccaggtgatgcatgagcatgagcgtgatgcagtaacagcaaaccaagatggaaaaggctctaggaaggcaaaaaagagagcacaactcagcaagaatggccaaatcagttcactgagtggctgcttcacttgccatgctttctgatacatgtaattccaaaattgagaatcaggatccgacaaattccttcgcattccatgcaccaccttcatgttccccacatcaaaatctgggtgaagttcggagatccatcacatatcagtacataatatgatgatcccacagctggagattagacagagatctttcgaagatgctagctgcaggctccagctgctatgatagggacaatgccaaggggacaaataaaatgcagcacgaaggaaaggaggaacagtactgcgtacaccccatgtgcccgggtcgatgcctcctttatcattgtgctctgccttgtagctaggcactgtgaggctctgattgcaatcttgttgccaaagctgtatggatcatactaagagcaattccattgcacccaagggacagcaaaatcttgaggtcgggacggtgaggaggacgtgatggggcgtg

SEQ ID NO: 66078 - DNA, 3968 bp, Zea Mays
cgcatcatcacgcgacattcttgatgctcagttcacctcacctcaccggctcaccgcaccttgtgtcagtcaccctcctcgagatgccgttcctgcctccacgtcgcagtccgccacagcgacctctattaaacggcaacaactcatgctgcccccgctgccacacccgccgcttatcatgcgctggcgaaggcgattgagcgagttcagcggctaatagattttcagttttatttccgggagaatgcggggtggcggcggggcttcctggctttcgtttcgcggcgtggtggtggaggaagaagaggcggtggtttcggcgccggaaaagccaatgcggcgggggcggcggaggtggggagcggaggtggacgacggctactcgccgagctccacgggcggcggcgggagcagctgctgcgattccttcggctgcgactcgcctttggccgggttcgtgcgcccagatggtgacccagacacagatctggagacagatgggttggccacttccacctccagtgcctttaccgagcggcaggacgacgaagcggaagaggcgctgtacggggtgaaggaagaggagtgggctcagatacaagaaccagccaagaatccggcattccgtgccaccccagaatgccacaaacagcggtaccggacggatgctgctgttcttttgcatggtaggaaggggtcgaaacagcggccggcctcacttgacctcggtagccctgggttccatggagccacgttttctccaagtttcgtgattggtggtgtggggttgatgaacaaaggacttggagcatcagtcatcaggtcagacgtgtttcatagtcctgggacgccgaactatccgcgccaccgtgcatcagtgttagggtgccataaagggtggagctctgagagagttccacatccttctaaaggaaataggcggtacccaggcagcagcatggcatttccttacagcaatgggaggacattgccctcgaaatgggaggatgcagagaggtggatcttcagtcccaattccagcgacgcgcttggaagaactacggttgctcatgctcggcgaccgaagtctaaaagtggccccctggggcctccaggaagacttggtggacagtattcatctgtttcttcagtgtcattgcttgataatgggagagctggacctattacagcaaattcaccttttgcggctggagtactaatgccggaacatgtttgtgaaggaaaaagtacaaatggaacctattcaagtagaccaattggtaacgaaatcaacattggaagaggagtcaaaatttgtccactgaatggtgggtctcatcctgttcgaacttccagagttcgccagcgattagattatgcagtcgaatcatctgtttcattgcctagcacgcaagaatctgtccaagacgagcaggttgaaatcacagaagattcagcttctactattgcttctataatttctagaaaagatgctgcaacccagaccagtccagagctaagtaggtcctcttcacccaacactagaccaacatttaatggttccttgtcaacagaacaagtgaaagagaaggggagctgtttgtcagatcttgatatcagggatgttcagatggatgatcgagtgactttgactaggtggtcaaagaaaaatgtaacacggtcgtctaacaagaattcaacaaacataatagagtggagcgaaaagacagtggaatcaaaatcttcgtcctggggctttgccaaagcgaagtgcatttctaagtaagagattacagatcactgcatattcgattattttgctgcttgaagcctaatttcctaatatttgttatcttatgcttcatgaaatcttctgtcatgcttatctgttgtagttatgtccaagccttaaccatttcttgagattttgtttttaaaattttcaatatatatttacaccaacaaactgtgaaagttgataagtccctacaatgttataaggattgatagagaggacacagaaattactgcatgggagaatattgaaaaagcaaaagctgatgcagcaattcagaagttagtgattaagttagagaagaaaaggtcatcttcgcttgataagattttgaacaccctcaaatctgctcaaaggaaatcccaggtgatgcatgagcatgagcgtgatgcagtaacagcaaaccaagatggaaaaggctctaggaaggcaaaaaagagagcacaactcagcaagaatggccaaatcagttcactgagtggctgcttcacttgccatgctttctgatacatgtaattccaaaattgagaatcaggatccgacaaattccttcgcattccatgcaccaccttcatgttccccacatcaaaatctgggtgaagttcggagatccatcacatatcagtacataatatgatgatcccacagctggagattagacagagatctttcgaagatgctagctgcaggctccagctgctatgatagggacaatgccaaggggacaaataaaatgcagcacgaaggaaaggaggaacagtactgcgtacaccccatgtgcccgggtcgatgcctcctttatcattgtgctctgccttgtagctaggcactgtgaggctctgattgcaatcttgttgccaaagctgtatggatcatactaagagcaattccattgcacccaagggacagcaaaatcttgaggtacgaggagaaatcatgtcctgcttgtgcgtgtgactatttgagtgctctgctgggcgctggaagggaaccacgccccgttgtctcttttgtttggtacagtgctttacgaaggtgccatcggggtgactacttgcatttgcttttcagcagcgtcggtgtgttgtgttgtgtgtacctcttctctttgggaaactgagatgttggtttggcctggaaacttcggaatatcatatacagggacgaaaataatcatcactatgacgatttgttgtgggtgtcattttacggcagttattcatctggaatgctagtggcctttttaacatattcttcacttgcctggctcgcgtatctatactatacttaaagcaccagtttcaacggttgtcgtgcgtcattttttttacagaaacccccctgctttttttgtaatcaacccgcagcccaatacaacaggattgaccaataacacgatcagcgtccaccacaacaattagcgcgcacctaaaccctaattccatctgctcccaaccgtcaacagcacgacataggctccaccgccgccgcctgacccaatgtccatgtccaacacaatcaacctgcataggagctggcggtcgtggggtgatcgccttccgcgtgccgtaggagcagttcaccgccgaccactccatcggcttgtactccaagatggttcgggccaagaagaagaacacggactgtatctacacactcaagatcatggacaagaagttcatcacaacaagatctcatacgtcaagatggagcgcatcatgctcaaccacctaggcgtcatgaggatcttcttcactttctaggacatgtactctctctacatggtgctcgagtcgtgtgaaggtggggagttgttcaaccaaatcgtccgggttaatgtccaactgcttgtaatatagttcattcatgttctacctttgcttcttgtgctcataatttgtttgtagaaaggtcggctctctgaggataatgcacagttttatgctgctgaaatcgtcaataaattggagtttttgcatggctctgggctaattcatccggacgttatggtagtgtgaaatgaaaattaggatggagttgctcatgacattttatatttaggaaatttggatatgtaccaaaaaatctactgcttatttctggtgggcacataaagattgctgactttggtagtgtcaagcatgcaagggatacttcaaatcgaagttctccc

SEQ ID NO: 66079 - DNA, 2805 bp, Zea Mays
ctcacctcaccggctcaccgcaccttgtgtcagtcaccctcctcgagatgccgttcctgcctccacgtcgcagtccgccacagcgacctctattaaacggcaacaactcatgctgcccccgctgccacacccgccgcttatcatgcgctggcgaaggcgattgagcgagttcagcggctaatagattttcagttttatttccgggagaatgcggggtggcggcggggcttcctggctttcgtttcgcggcgtggtggtggaggaagaagaggcggtggtttcggcgccggaaaagccaatgcggcgggggcggcggaggtggggagcggaggtggacgacggctactcgccgagctccacgggcggcggcgggagcagctgctgcgattccttcggctgcgactcgcctttggccgggttcgtgcgcccagatggtgacccagacacagatctggagacagatgggttggccacttccacctccagtgcttctgcagcctttaccgagcggcaggacgacgaagcggaagaggcgctgtacggggtgaaggaagaggagtgggctcagatacaagaaccagccaagaatccggcattccgtgccaccccagaatgccacaaacagcggtaccggacggatgctgctgttcttttgcatggtaggaaggggtcgaaacagcggccggcctcacttgacctcggtagccctgggttccatggagccacgttttctccaagtttcgtgattggtggtgtggggttgatgaacaaaggacttggagcatcagtcatcaggtcagacgtgtttcatagtcctgggacgccgaactatccgcgccaccgtgcatcagtgttagggtgccataaagggtggagctctgagagagttccacatccttctaaaggaaataggcggtacccaggcagcagcatggcatttccttacagcaatgggaggacattgccctcgaaatgggaggatgcagagaggtggatcttcagtcccaattccagcgacgcgcttggaagaactacggttgctcatgctcggcgaccgaagtctaaaagtggccccctggggcctccaggaagacttggtggacagtattcatctgtttcttcagtgtcattgcttgataatgggagagctggacctattacagcaaattcaccttttgcggctggagtactaatgccggaacatgtttgtgaaggaaaaagtacaaatggaacctattcaagtagaccaattggtaacgaaatcaacattggaagaggagtcaaaatttgtccactgaatggtgggtctcatcctgttcgaacttccagagttcgccagcgattagattatgcagtcgaatcatctgtttcattgcctagcacgcaagaatctgtccaaggttgaaatcacagaagattcagcttctactattgcttctataatttctagaaaagatgctgcaacccagaccagtccagagctaagtaggtcctcttcacccaacactagaccaacatttaatggttccttgtcaacagaacaagtgaaagagaaggggagctgtttgtcagatcttgatatcagggatgttcagatggatgatcgagtgactttgactaggtggtcaaagaaaaatgtaacacggtcgtctaacaagaattcaacaaacataatagagtggagcgaaaagacagtggaatcaaaatcttcgtcctggggctttgccaaagcgaagtgcatttctaagattgatagagaggacacagaaattactgcatgggagaatattgaaaaagcaaaagctgatgcagcaattcagaagttagtgattaagttagagaagaaaaggtcatcttcgcttgataagattttgaacaccctcaaatctgctcaaaggaaatcccaggtgatgcatgagcatgagcgtgatgcagtaacagcaaaccaagatggaaaaggctctaggaaggcaaaaaagagagcacaactcagcaagaatggccaaatcagttcactgagtggctgcttcacttgccatgctttctgatacatgtaattccaaaattgagaatcaggatccgacaaattccttcgcattccatgcaccaccttcatgttccccacatcaaaatctgggtgaagttcggagatccatcacatatcagtacataatatgatgatcccacagctggagattagacagagatctttcgaagatgctagctgcaggctccagctgctatgatagggacaatgccaaggggacaaataaaatgcagcacgaaggaaaggaggaacagtactgcgtacaccccatgtgcccgggtcgatgcctcctttatcattgtgctctgccttgtagctaggcactgtgaggctctgattgcaatcttgttgccaaagctgtatggatcatactaagagcaattccattgcacccaagggacagcaaaatcttgaggtacgaggagaaatcatgtcctgcttgtgcgtgtgactatttgagtgctctgctgggcgctggaagggaaccacgccccgttgtctcttttgtttggtacagtgctttacgaaggtgccatcggggtgactacttgcatttgcttttcagcagcgtcggtgtgttgtgttgtgtgtacctcttctctttgggaaactgagatgttggtttggcctggaaacttcggaatatcatatacagggacgaaaataatcatcactatgacgatttgttgtgggtgtcattttacggcagttattcatctggaatgctagtggcctttttaacatattcttcacttgcc

SEQ ID NO: 66080 - DNA, 2798 bp, Zea Mays
ctcaccggctcaccgcaccttgtgtcagtcaccctcctcgagatgccgttcctgcctccacgtcgcagtccgccacagcgacctctattaaacggcaacaactcatgctgcccccgctgccacacccgccgcttatcatgcgctggcgaaggcgattgagcgagttcagcggctaatagattttcagttttatttccgggagaatgcggggtggcggcggggcttcctggctttcgtttcgcggcgtggtggtggaggaagaagaggcggtggtttcggcgccggaaaagccaatgcggcgggggcggcggaggtggggagcggaggtggacgacggctactcgccgagctccacgggcggcggcgggagcagctgctgcgattccttcggctgcgactcgcctttggccgggttcgtgcgcccagatggtgacccagacacagatctggagacagatgggttggccacttccacctccagtgcctttaccgagcggcaggacgacgaagcggaagaggcgctgtacggggtgaaggaagaggagtgggctcagatacaagaaccagccaagaatccggcattccgtgccaccccagaatgccacaaacagcggtaccggacggatgctgctgttcttttgcatggtaggaaggggtcgaaacagcggccggcctcacttgacctcggtagccctgggttccatggagccacgttttctccaagtttcgtgattggtggtgtggggttgatgaacaaaggacttggagcatcagtcatcaggtcagacgtgtttcatagtcctgggacgccgaactatccgcgccaccgtgcatcagtgttagggtgccataaagggtggagctctgagagagttccacatccttctaaaggaaataggcggtacccaggcagcagcatggcatttccttacagcaatgggaggacattgccctcgaaatgggaggatgcagagaggtggatcttcagtcccaattccagcgacgcgcttggaagaactacggttgctcatgctcggcgaccgaagtctaaaagtggccccctggggcctccaggaagacttggtggacagtattcatctgtttcttcagtgtcattgcttgataatgggagagctggacctattacagcaaattcaccttttgcggctggagtactaatgccggaacatgtttgtgaaggaaaaagtacaaatggaacctattcaagtagaccaattggtaacgaaatcaacattggaagaggagtcaaaatttgtccactgaatggtgggtctcatcctgttcgaacttccagagttcgccagcgattagattatgcagtcgaatcatctgtttcattgcctagcacgcaagaatctgtccaagacgagcaggttgaaatcacagaagattcagcttctactattgcttctataatttctagaaaagatgctgcaacccagaccagtccagagctaagtaggtcctcttcacccaacactagaccaacatttaatggttccttgtcaacagaacaagtgaaagagaaggggagctgtttgtcagatcttgatatcagggatgttcagatggatgatcgagtgactttgactaggtggtcaaagaaaaatgtaacacggtcgtctaacaagaattcaacaaacataatagagtggagcgaaaagacagtggaatcaaaatcttcgtcctggggctttgccaaagcgaagtgcatttctaaattgatagagaggacacagaaattactgcatgggagaatattgaaaaagcaaaagctgatgcagcaattcagaagttagtgattaagttagagaagaaaaggtcatcttcgcttgataagattttgaacaccctcaaatctgctcaaaggaaatcccaggtgatgcatgagcatgagcgtgatgcagtaacagcaaaccaagatggaaaaggctctaggaaggcaaaaaagagagcacaactcagcaagaatggccaaatcagttcactgagtggctgcttcacttgccatgctttctgatacatgtaattccaaaattgagaatcaggatccgacaaattccttcgcattccatgcaccaccttcatgttccccacatcaaaatctgggtgaagttcggagatccatcacatatcagtacataatatgatgatcccacagctggagattagacagagatctttcgaagatgctagctgcaggctccagctgctatgatagggacaatgccaaggggacaaataaaatgcagcacgaaggaaaggaggaacagtactgcgtacaccccatgtgcccgggtcgatgcctcctttatcattgtgctctgccttgtagctaggcactgtgaggctctgattgcaatcttgttgccaaagctgtatggatcatactaagagcaattccattgcacccaagggacagcaaaatcttgaggtacgaggagaaatcatgtcctgcttgtgcgtgtgactatttgagtgctctgctgggcgctggaagggaaccacgccccgttgtctcttttgtttggtacagtgctttacgaaggtgccatcggggtgactacttgcatttgcttttcagcagcgtcggtgtgttgtgttgtgtgtacctcttctctttgggaaactgagatgttggtttggcctggaaacttcggaatatcatatacagggacgaaaataatcatcactatgacgatttgttgtgggtgtcattttacggcagttattcatctggaatgctagtggcctttttaacatattcttcacttgcc

SEQ ID NO: 66081 - DNA, 2634 bp, Zea Mays
cgcaccttgtgtcagtcaccctcctcgagatgccgttcctgcctccacgtcgcagtccgccacagcgacctctattaaacggcaacaactcatgctgcccccgctgccacacccgccgcttatcatgcgctggcgaaggcgattgagcgagttcagcggctaatagattttcagttttatttccgggagaatgcggggtggcggcggggcttcctggctttcgtttcgcggcgtggtggtggaggaagaagaggcggtggtttcggcgccggaaaagccaatgcggcgggggcggcggaggtggggagcggaggtggacgacggctactcgccgagctccacgggcggcggcgggagcagctgctgcgattccttcggctgcgactcgcctttggccgggttcgtgcgcccagatggtgacccagacacagatctggagacagatgggttggccacttccacctccagtgcctttaccgagcggcaggacgacgaagcggaagaggcgctgtacggggtgaaggaagaggagtgggctcagatacaagaaccagccaagaatccggcattccgtgccaccccagaatgccacaaacagcggtaccggacggatgctgctgttcttttgcatggtaggaaggggtcgaaacagcggccggcctcacttgacctcggtagccctgggttccatggagccacgttttctccaagtttcgtgattggtggtgtggggttgatgaacaaaggacttggagcatcagtcatcaggtcagacgtgtttcatagtcctgggacgccgaactatccgcgccaccgtgcatcagtgttagggtgccataaagggtggagctctgagagagttccacatccttctaaaggaaataggcggtacccaggcagcagcatggcatttccttacagcaatgggaggacattgccctcgaaatgggaggatgcagagaggtggatcttcagtcccaattccagcgacgcgcttggaagaactacggttgctcatgctcggcgaccgaagtctaaaagtggccccctggggcctccaggaagacttggtggacagtattcatctgtttcttcagtgtcattgcttgataatgggagagctggacctattacagcaaattcaccttttgcggctggagtactaatgccggaacatgtttgtgaaggaaaaagtacaaatggaacctattcaagtagaccaattggtaacgaaatcaacattggaagaggagtcaaaatttgtccactgaatggtgggtctcatcctgttcgaacttccagagttcgccagcgattagattatgcagtcgaatcatctgtttcattgcctagcacgcaagaatctgtccaagacgagcaggttgaaatcacagaagattcagcttctactattgcttctataatttctagaaaagatgctgcaacccagaccagtccagagctaagtggtcaaagaaaaatgtaacacggtcgtctaacaagaattcaacaaacataatagagtggagcgaaaagacagtggaatcaaaatcttcgtcctggggctttgccaaagcgaagtgcatttctaagattgatagagaggacacagaaattactgcatgggagaatattgaaaaagcaaaagctgatgcagcaattcagaagttagtgattaagttagagaagaaaaggtcatcttcgcttgataagattttgaacaccctcaaatctgctcaaaggaaatcccaggtgatgcatgagcatgagcgtgatgcagtaacagcaaaccaagatggaaaaggctctaggaaggcaaaaaagagagcacaactcagcaagaatggccaaatcagttcactgagtggctgcttcacttgccatgctttctgatacatgaatcaggatccgacaaattccttcgcattccatgcaccaccttcatgttccccacatcaaaatctgggtgaagttcggagatccatcacatatcagtacataatatgatgatcccacagctggagattagacagagatctttcgaagatgctagctgcaggctccagctgctatgatagggacaatgccaaggggacaaataaaatgcagcacgaaggaaaggaggaacagtactgcgtacaccccatgtgcccgggtcgatgcctcctttatcattgtgctctgccttgtagctaggcactgtgaggctctgattgcaatcttgttgccaaagctgtatggatcatactaagagcaattccattgcacccaagggacagcaaaatcttgaggtacgaggagaaatcatgtcctgcttgtgcgtgtgactatttgagtgctctgctgggcgctggaagggaaccacgccccgttgtctcttttgtttggtacagtgctttacgaaggtgccatcggggtgactacttgcatttgcttttcagcagcgtcggtgtgttgtgttgtgtgtacctcttctctttgggaaactgagatgttggtttggcctggaaacttcggaatatcatatacagggacgaaaataatcatcactatgacgatttgttgtgggtgtcattttacggcagttattcatctggaatgctagtggcctttttaacatattcttcacttgcc

SEQ ID NO: 66082 - DNA, 2184 bp, Zea Mays
cgccgcttatcatgcgctggcgaaggcgattgagcgagttcagcggctaatagattttcagttttatttccgggagaatgcggggtggcggcggggcttcctggctttcgtttcgcggcgtggtggtggaggaagaagaggcggtggtttcggcgccggaaaagccaatgcggcgggggcggcggaggtggggagcggaggtggacgacggctactcgccgagctccacgggcggcggcgggagcagctgctgcgattccttcggctgcgactcgcctttggccgggttcgtgcgcccagatggtgacccagacacagatctggagacagatgggttggccacttccacctccagtgcctttaccgagcggcaggacgacgaagcggaagaggcgctgtacggggtgaaggaagaggagtgggctcagatacaagaaccagccaagaatccggcattccgtgccaccccagaatgccacaaacagcggtaccggacggatgctgctgttcttttgcatggtaggaaggggtcgaaacagcggccggcctcacttgacctcggtagccctgggttccatggagccacgttttctccaagtttcgtgattggtggtgtggggttgatgaacaaaggacttggagcatcagtcatcaggtcagacgtgtttcatagtcctgggacgccgaactatccgcgccaccgtgcatcagtgttagggtgccataaagggtggagctctgagagagttccacatccttctaaaggaaataggcggtacccaggcagcagcatggcatttccttacagcaatgggaggacattgccctcgaaatgggaggatgcagagaggtggatcttcagtcccaattccagcgacgcgcttggaagaactacggttgctcatgctcggcgaccgaagtctaaaagtggccccctggggcctccaggaagacttggtggacagtattcatctgtttcttcagtgtcattgcttgataatgggagagctggacctattacagcaaattcaccttttgcggctggagtactaatgccggaacatgtttgtgaaggaaaaagtacaaatggaacctattcaagtagaccaattggtaacgaaatcaacattggaagaggagtcaaaatttgtccactgaatggtgggtctcatcctgttcgaacttccagagttcgccagcgattagattatgcagtcgaatcatctgtttcattgcctagcacgcaagaatctgtccaagacgagcaggttgaaatcacagaagattcagcttctactattgcttctataatttctagaaaagatgctgcaacccagaccagtccagagctaagtaggtcctcttcacccaacactagaccaacatttaatggttccttgtcaacagaacaagtgaaagagaaggggagctgtttgtcagatcttgatatcagggatgttcagatggatgatcgagtgactttgactaggtggtcaaagaaaaatgtaacacggtcgtctaacaagaattcaacaaacataatagagtggagcgaaaagacagtggaatcaaaatcttcgtcctggggctttgccaaagcgaagtgcatttctaagattgatagagaggacacagaaattactgcatgggagaatattgaaaaagcaaaagctgatgcagcaattcagaagttagtgattaagttagagaagaaaaggtcatcttcgcttgataagattttgaacaccctcaaatctgctcaaaggaaatcccaggtgatgcatgagcatgagcgtgatgcagtaacagcaaaccaagatggaaaaggctctaggaaggcaaaaaagagagcacaactcagcaagaatggccaaatcagttcactgagtggctgcttcacttgccatgctttctgatacatgtaattccaaaattgaggcagactcagtgctgaaggctcccccactcatgtggccatgtggggtatgggaaaaggataaaccgaggcaaacttccctcgcgaatacggagagactgctttgaatctgtgacccggtgacttagtgagacgttctcactattgcacccagtgtgcccttaaaaaatgctctattgatgtatacgtaatttttgtaattgttcccacataaaacacccaatttttcacatttgtggaactttctg

SEQ ID NO: 66083 - DNA, 2574 bp, Zea Mays
cgccgcttatcatgcgctggcgaaggcgattgagcgagttcagcggctaatagattttcagttttatttccgggagaatgcggggtggcggcggggcttcctggctttcgtttcgcggcgtggtggtggaggaagaagaggcggtggtttcggcgccggaaaagccaatgcggcgggggcggcggaggtggggagcggaggtggacgacggctactcgccgagctccacgggcggcggcgggagcagctgctgcgattccttcggctgcgactcgcctttggccgggttcgtgcgcccagatggtgacccagacacagatctggagacagatgggttggccacttccacctccagtgcctttaccgagcggcaggacgacgaagcggaagaggcgctgtacggggtgaaggaagaggagtgggctcagatacaagaaccagccaagaatccggcattccgtgccaccccagaatgccacaaacagcggtaccggacggatgctgctgttcttttgcatggtaggaaggggtcgaaacagcggccggcctcacttgacctcggtagccctgggttccatggagccacgttttctccaagtttcgtgattggtggtgtggggttgatgaacaaaggacttggagcatcagtcatcaggtcagacgtgtttcatagtcctgggacgccgaactatccgcgccaccgtgcatcagtgttagggtgccataaagggtggagctctgagagagttccacatccttctaaaggaaataggcggtacccaggcagcagcatggcatttccttacagcaatgggaggacattgccctcgaaatgggaggatgcagagaggtggatcttcagtcccaattccagcgacgcgcttggaagaactacggttgctcatgctcggcgaccgaagtctaaaagtggccccctggggcctccaggaagacttggtggacagtattcatctgtttcttcagtgtcattgcttgataatgggagagctggacctattacagcaaattcaccttttgcggctggagtactaatgccggaacatgtttgtgaaggaaaaagtacaaatggaacctattcaagtagaccaattggtaacgaaatcaacattggaagaggagtcaaaatttgtccactgaatgacgagcaggttgaaatcacagaagattcagcttctactattgcttctataatttctagaaaagatgctgcaacccagaccagtccagagctaagtaggtcctcttcacccaacactagaccaacatttaatggttccttgtcaacagaacaagtgaaagagaaggggagctgtttgtcagatcttgatatcagggatgttcagatggatgatcgagtgactttgactaggtggtcaaagaaaaatgtaacacggtcgtctaacaagaattcaacaaacataatagagtggagcgaaaagacagtggaatcaaaatcttcgtcctggggctttgccaaagcgaagtgcatttctaagattgatagagaggacacagaaattactgcatgggagaatattgaaaaagcaaaagctgatgcagcaattcagaagttagtgattaagttagagaagaaaaggtcatcttcgcttgataagattttgaacaccctcaaatctgctcaaaggaaatcccaggtgatgcatgagcatgagcgtgatgcagtaacagcaaaccaagatggaaaaggctctaggaaggcaaaaaagagagcacaactcagcaagaatggccaaatcagttcactgagtggctgcttcacttgccatgctttctgatacatgtaattccaaaattgagaatcaggatccgacaaattccttcgcattccatgcaccaccttcatgttccccacatcaaaatctgggtgaagttcggagatccatcacatatcagtacataatatgatgatcccacagctggagattagacagagatctttcgaagatgctagctgcaggctccagctgctatgatagggacaatgccaaggggacaaataaaatgcagcacgaaggaaaggaggaacagtactgcgtacaccccatgtgcccgggtcgatgcctcctttatcattgtgctctgccttgtagctaggcactgtgaggctctgattgcaatcttgttgccaaagctgtatggatcatactaagagcaattccattgcacccaagggacagcaaaatcttgaggtacgaggagaaatcatgtcctgcttgtgcgtgtgactatttgagtgctctgctgggcgctggaagggaaccacgccccgttgtctcttttgtttggtacagtgctttacgaaggtgccatcggggtgactacttgcatttgcttttcagcagcgtcggtgtgttgtgttgtgtgtacctcttctctttgggaaactgagatgttggtttggcctggaaacttcggaatatcatatacagggacgaaaataatcatcactatgacgatttgttgtgggtgtcattttacggcagttattcatctggaatgctagtggcctttttaacatattcttcacttgcc

SEQ ID NO: 66084 - DNA, 2205 bp, Zea Mays
gcaaccaccgcgctggtctctcgcctgtgccgccctcgatcgcgcgtgaagagaagcccctcacttccgtcctcctcctgtcctgtccagctaccccggccccgaccccgataaagcccgccctttaaatcggcggatcgaggcgatgagcgcctctcgcgacgccagggcggagagctagccggccgggagcccacacgcagctggaagcaccagaccgatcgtgccggccgagcggcggcgcaggcgcaggcgcttacatgggagtagaggcgggcgggtgcgggcggagggcggtcgtcaccgggttctacgtctggggctgggagttcctcaccgccctccttctcttctcggccgccgtcgccgccgcagactcctactagcaagctaccaaccttctttctttcattcccttaggtagctcagccgtacacacaacaacacacaagtcatcagttactagctagttagtagcctatacaacacatacatacatacaaaggtgagtgaggttcgcgtgcaagcagagccaatcgtgccgatcgagctatatacatagccggcggcgagggatgggagaagcggccgcggccgtggcggcgtcgaagaggggcggcgggccggcgccgttcctgaccaagacgcaccagatggtggaggagcggggcacggacgaggtgatctcgtgggcggagcagggccgctccttcgtggtgtggaagcccgtggagctggcgcgcgacctcctcccgctccacttcaagcactgcaacttctcctccttcgtccgccagctcaacacctacgtgagtacactacgccgccgctccggccatcatctcttctactacgatcgatgcaatatatcacctgtcgtcgtcgtttagtgattgcaaaacacatacacttggtttccgtattaaattaatcagctagctagctagatgatcgttctctgctctatgatctgttagttctgaagcatgttgttgttttcgtctgtgctcgataaattaagctatgttatgtggtcgacgagcgagccttccaggcagctaccgtaccgtcttccaaggagtatatgcgtggtttccgaaaggtggtgccggaccggtgggagttcgcgaacgacaacttccgtcgaggcgagcagggtctcctgtccggcatccgccgccgcaagtcaacggcgctgcagatgtccaagtccggatccggcggcagcggcggcgtgaacgccacgttccccccgcctctgccccctccgcctcccgcgtcggccaccacgtccggcgtccacgagcgcagctcgtcgtcggcgtcgtcgccaccgcgggcgcccgacctggccagcgagaacgagcagctcaagaaggacaaccacacgctgtccgccgagctggcgcaggcgcgccggcactgcgaggagctcctgggcttcctctcgcgcttcctcgacgtccggcagctcgacctccggctgctcatgcaggaggacgtgcgagcgggggcaagcgacgacggcgcacagcgccgcgcgcacgcagtggccagccagctggagcgcggcggcggcgaggaggggaagagcgtgaagctgttcggcgtactcttaaaggacgccgcgaggaagaggggccggtgcgaggaagcggcggccagcgagcggcccatcaagatgatcagggtcggcgagccgtgggtcggcgtcccgtcgtcgggcccgggccggtgcggcggcgagaattaactgtcatccaatgtgaggttgatgacaaggacagtttcatccatcatatcgagcaagtaacaaagccagtgctgtggtaaaactgcaaagacagaacacaggacacaggagaaatataggcgtaagcatgttaattaagaattaattatatatgggatgcttttgaagtagcaagattggaagtagagataagtaaaacgggctagaagcagcgcccatgtgttcagaatggaaaattagcgtttccgtgtgtgtgttaagaaaaacttatatgcgctttctgcgagcacggttgattcttaagagcgacagcaaatgaaaggtgtattattaattgaaggtcacttgaccacaaatattacctatctcatcatttcgttatggccttcacaggacgaggaagaaagagaaggatagactgtagagttctgtaaaagattctctaaatcaat

SEQ ID NO: 66085 - DNA, 1795 bp, Zea Mays
ctcgcctgtgccgccctcgatcgcgcgtgaagagaagcccctcacttccgtcctcctcctgtcctgtccagctaccccggccccgaccccgataaagcccgccctttaaatcggcggatcgaggcgatgagcgcctctcgcgacgccagggcggagagctagccggccgggagcccacacgcagctggaagcaccagaccgatcgtgccggccgagcggcggcgcaggcgcaggcgcttacatgggagtagaggcgggcgggtgcgggcggagggcggtcgtcaccgggttctacgtctggggctgggagttcctcaccgccctccttctcttctcggccgccgtcgccgccgcagactcctactagcaagctaccaaccttctttctttcattcccttagagccaatcgtgccgatcgagctatatacatagccggcggcgagggatgggagaagcggccgcggccgtggcggcgtcgaagaggggcggcgggccggcgccgttcctgaccaagacgcaccagatggtggaggagcggggcacggacgaggtgatctcgtgggcggagcagggccgctccttcgtggtgtggaagcccgtggagctggcgcgcgacctcctcccgctccacttcaagcactgcaacttctcctccttcgtccgccagctcaacacctacggtttccgaaaggtggtgccggaccggtgggagttcgcgaacgacaacttccgtcgaggcgagcagggtctcctgtccggcatccgccgccgcaagtcaacggcgctgcagatgtccaagtccggatccggcggcagcggcggcgtgaacgccacgttccccccgcctctgccccctccgcctcccgcgtcggccaccacgtccggcgtccacgagcgcagctcgtcgtcggcgtcgtcgccaccgcgggcgcccgacctggccagcgagaacgagcagctcaagaaggacaaccacacgctgtccgccgagctggcgcaggcgcgccggcactgcgaggagctcctgggcttcctctcgcgcttcctcgacgtccggcagctcgacctccggctgctcatgcaggaggacgtgcgagcgggggcaagcgacgacggcgcacagcgccgcgcgcacgcagtggccagccagctggagcgcggcggcggcgaggaggggaagagcgtgaagctgttcggcgtactcttaaaggacgccgcgaggaagaggggccggtgcgaggaagcggcggccagcgagcggcccatcaagatgatcagggtcggcgagccgtgggtcggcgtcccgtcgtcgggcccgggccggtgcggcggcgagaattaactgtcatccaatgtgaggttgatgacaaggacagtttcatccatcatatcgagcaagtaacaaagccagtgctgtggtaaaactgcaaagacagaacacaggacacaggagaaatataggcgtaagcatgttaattaagaattaattatatatgggatgcttttgaagtagcaagattggaagtagagataagtaaaacgggctagaagcagcgcccatgtgttcagaatggaaaattagcgtttccgtgtgtgtgttaagaaaaacttatatgcgctttctgcgagcacggttgattcttaagagcgacagcaaatgaaaggtgtattattaattgaaggtcacttgaccacaaatattacctatctcatcatttcgttatggccttcacaggacgaggaagaaagagaaggatagactgtagagttctgtaaaagattctctaaatcaat

SEQ ID NO: 66086 - DNA, 214 bp, Zea Mays
gaagggtgaagcgagaacttgaagtaaatgggcagcatcataaaaagcaggtgcctcttgactgaacagataggctttttatgaaaagaagcaagttccatgttttctcattttttttctttccttacgctatgtacccttgatttaaattgtttgcttattgaacccttgctcttggtgcattagagatgaactcaatcatatccaaggttga

SEQ ID NO: 66087 - DNA, 1653 bp, Zea Mays
cgcgaaatgaaacggaactgggacagcaaaggaagatacggcgcgatattttagattacaggagagtaggagaccggcgccgaaagctccgtggcctcgtctccttccccacttcggcctcggcagttccgcgtgccggccggagcctcgtctcgcttcgcatctcgcacttcgcgccttcgccgctgcgattcctcagcagctcctcggccgctccacccacccctgcgccggcgagatggagctcaagcccggcatgtcggcgctcgtcaccggcggcgcctctggcatcgggaaagcactttgtattgcttttgcaaggaggggtttatttgtgactgtcgttgatttctcagaggaaaatggaagagaagttgctacattagttcaaaaagaaaatagcaaatttcacggagatcttagaattccatcttcaatatttgttaagtgtgatgttagtaatgcagataatcttgctgcttgttttgagaagcatgtacagacatacaatggactagatatctgcatcaactgtgctggaattgctaataaaacactagtttatgatgatacatctgatggaactagaacatggaggcatgctgttaatgtgaaccttgttgctgtcattgatggtactcgcattgcaagtcaaataatgcgaaaccaaaagaagcccggtgtcataataaacattggttcagcggcaggtctttatcctatgttcctcgatcccgtatatagtgcggcaaaagggggtgtggttatgtttacaagatcactttctccattgaaacgccatggtgttcgtgtcaatgtgctctgcccggagtttgtccaaaccaatatggcggaacaaatgagccgcaaagttatagattcatctggtggatatttggagatggaagatgttgttaacggcacatttgagcttatacaggatgagagcaaggctggtgcttgcctttggataacaaaacgacgagggatggagtactggccaacaccagaagaacaaagaaagtatatggtgaatcctaacaaatcaaaaaggatgctgacaaacaatatatatcctagcatccgaatgcctgaattctttgagaagatagttgttcacacactcagccataattttcgcaatgctacaagacttgagcgtgtgcaactgagatttcctatcaaagcgcatagtgctctggttaaaataatatatgctggcgtaaatgctagtgatgtcaacttcagttcaggacgttattttagtggtaatcctaaagaaactgcttcacgccttccatttgatgctggttttgaaggtgtgggaattgttgccgctgttggagattcagtcagtcatatcaaagttggcactcctgtggcccttatgacttttgggagctatgctgaattcacggaggttccagccaaacatcttcttccagtgccaagaccagaccctgaggttgttgcaatgttgacatcaggactgactgcatcaattagtcttgaaaaggcaggacaaatgacatctgggcaagttgttttagttacagcagctgctggtggaacaggacagttcgcagttcagttcttagggacatactttggtagcttgtatttttactggattgagcaatgggcaagatattc

SEQ ID NO: 66088 - DNA, 2397 bp, Zea Mays
cgcgaaatgaaacggaactgggacagcaaaggaagatacggcgcgatattttagattacaggagagtaggagaccggcgccgaaagctccgtggcctcgtctccttccccacttcggcctcggcagttccgcgtgccggccggagcctcgtctcgcttcgcatctcgcacttcgcgccttcgccgctgcgattcctcagcagctcctcggccgctccacccacccctgcgccggcgagatggagctcaagcccggcatgtcggcgctcgtcaccggcggcgcctctggcatcgggaaagcactttgtattgcttttgcaaggaggggtttatttgtgactgtcgttgatttctcagaggaaaatggaagagaagttgctacattagttcaaaaagaaaatagcaaatttcacggagatcttagaattccatcttcaatatttgttaagtgtgatgttagtaatgcagataatcttgctgcttgttttgagaagcatgtacagacatacaatggactagatatctgcatcaactgtgctggaattgctaataaaacactagtttatgatgatacatctgatggaactagaacatggaggcatgctgttaatgtgaaccttgttgctgtcattgatggtactcgcattgcaagtcaaataatgcgaaaccaaaagaagcccggtgtcataataaacattggttcagcggcaggtctttatcctatgttcctcgatcccgtatatagtgcggcaaaagggggtgtggttatgtttacaagatcactttctccattgaaacgccatggtgttcgtgtcaatgtgctctgcccggagtttgtccaaaccaatatggcggaacaaatgagccgcaaagttatagattcatctggtggatatttggagatggaagatgttgttaacggcacatttgagcttatacaggatgagagcaaggctggtgcttgcctttggataacaaaacgacgagggatggagtactggccaacaccagaagaacaaagaaagtatatggtgaatcctaacaaatcaaaaaggatgctgacaaacaatatatatcctagcatccgaatgcctgaattctttgagaagatagttgttcacacactcagccataattttcgcaatgctacaagacttgagcgtgtgcaactgagatttcctatcaaagcgcatagtgctctggttaaaataatatatgctggcgtaaatgctagtgatgtcaacttcagttcaggacgttattttagtggtaatcctaaagaaactgcttcacgccttccatttgatgctggttttgaaggtgtgggaattgttgccgctgttggagattcagtcagtcatatcaaagttggcactcctgtggcccttatgacttttgggagctatgctgaattcacggaggttccagccaaacatcttcttccagtgccaagaccagaccctgaggttgttgcaatgttgacatcaggactgactgcatcaattagtcttgaaaaggcaggacaaatgacatctgggcaagttgttttagttacagcagctgctggtggaacaggacagttcgcagttcaggttctgaagaaagagtttccaagaggtgtagatatcatatatgaatctgtaggtggggaaatgtttgacttgtgcttgaatgcacttgcagtccatgggcatctcattgtaattggtatgatctcccagtatcaaggagaggatggctggaagccaaagaactacactggactatgtgagaagattctagctaaaagtcaaactgtggctggatttttccttgttcagtatgctcacttgtggcaagatcatcttaacaaactttttgacctgtatgcctctggaaagctaaaggtttccctagaccccaagcaattcttgggtgttgcttcagtcgtagatgcggtcgaatatcttcattctggcaagagtgttggcaaggtcgttgtgtgtattgatccatcatacggtcagatcgttgcaaaattataatccatggacatgatgcgcattgtcttccatggtcacgtaggttattgtcttatagttacacatatacatcaagaccgtattttcccagcgggtgacaaatgaataagggaacatgttggtgtatagtttagtttcatttttccaaagtgtaagatgcacaactatactgaaggacaagcatgggcatggaaatcgattaagtttctaatcccgtgcagtaggatatgcattcgtgtggcctcgttccacgttgtatgtatacagtatatattatataacttgtctcagtgccacatgcttcaattcgaaccggtaacaataattcaaacagctcatgcagatgcattctcaaatacacagcttggaacatcgat

SEQ ID NO: 66089 - DNA, 2484 bp, Zea Mays
cgcgaaatgaaacggaactgggacagcaaaggaagatacggcgcgatattttagattacaggagagtaggagaccggcgccgaaagctccgtggcctcgtctccttccccacttcggcctcggcagttccgcgtgccggccggagcctcgtctcgcttcgcatctcgcacttcgcgccttcgccgctgcgattcctcagcagctcctcggccgctccacccacccctgcgccggcgagatggagctcaagcccggcatgtcggcgctcgtcaccggcggcgcctctggcatcgggaaagcactttgtattgcttttgcaaggaggggtttatttgtgactgtcgttgatttctcagaggaaaatggaagagaagttgctacattagttcaaaaagaaaatagcaaatttcacggagatcttagaattccatcttcaatatttgttaagtgtgatgttagtaatgcagataatcttgctgcttgttttgagaagcatgtacagacatacaatggactagatatctgcatcaactgtgctggaattgctaataaaacactagtttatgatgatacatctgatggaactagaacatggaggcatgctgttaatgtgaaccttgttgctgtcattgatggtactcgcattgcaagtcaaataatgcgaaaccaaaagaagcccggtgtcataataaacattggttcagcggcaggtctttatcctatgttcctcgatcccgtatatagtgcggcaaaagggggtgtggttatgtttacaagatcactttctccattgaaacgccatggtgttcgtgtcaatgtgctctgcccggagtttgtccaaaccaatatggcggaacaaatgagccgcaaagttatagattcatctggtggatatttggagatggaagatgttgttaacggcacatttgagcttatacaggatgagagcaaggctggtgcttgcctttggataacaaaacgacgagggatggagtactggccaacaccagaagaacaaagaaagtatatggtgaatcctaacaaatcaaaaaggatgctgacaaacaatatatatcctagcatccgaatgcctgaattctttgagaagatagttgttcacacactcagccataattttcgcaatgctacaagacttgagcgtgtgcaactgagatttcctatcaaagcgcatagtgctctggttaaaataatatatgctggcgtaaatgctagtgatgtcaacttcagttcaggacgttattttagtggtaatcctaaagaaactgcttcacgccttccatttgatgctggttttgaaggtgtgggaattgttgccgctgttggagattcagtcagtcatatcaaagttggcactcctgtggcccttatgacttttgggagctatgctgaattcacggaggttccagccaaacatcttcttccagtgccaagaccagaccctgaggttgttgcaatgttgacatcaggactgactgcatcaattagtcttgaaaaggcaggacaaatgacatctgggcaagttgttttagttacagcagctgctggtggaacaggacagttcgcagttcagctggcgaaattagcaggcaacaaggttgttgccacatgtggaggtgaaagtaaagctgaacttctggcttccttaggagttgatcgtgttatcaattacagaaatgaacgagtcaaagatgttctgaagaaagagtttccaagaggtgtagatatcatatatgaatctgtaggtggggaaatgtttgacttgtgcttgaatgcacttgcagtccatgggcatctcattgtaattggtatgatctcccagtatcaaggagaggatggctggaagccaaagaactacactggactatgtgagaagattctagctaaaagtcaaactgtggctggatttttccttgttcagtatgctcacttgtggcaagatcatcttaacaaactttttgacctgtatgcctctggaaagctaaaggtttccctagaccccaagcaattcttgggtgttgcttcagtcgtagatgcggtcgaatatcttcattctggcaagagtgttggcaagatcgttgcaaaattataatccatggacatgatgcgcattgtcttccatggtcacgtaggttattgtcttatagttacacatatacatcaagaccgtattttcccagcgggtgacaaatgaataagggaacatgttggtgtatagtttagtttcatttttccaaagtgtaagatgcacaactatactgaaggacaagcatgggcatggaaatcgattaagtttctaatcccgtgcagtaggatatgcattcgtgtggcctcgttccacgttgtatgtatacagtatatattatataacttgtctcagtgccacatgcttcaattcgaaccggtaacaataattcaaacagctcatgcagatgcattctcaaatacacagcttggaacatcgat

SEQ ID NO: 66090 - DNA, 1412 bp, Zea Mays
agttcttgaaccctttctttttcaagaacatggaacatgatatgaatgaagttccgggaatctatggttgttcacacactcagccataacttccggaatgctacaaggcttgagcgtgtgcgcctgagattacccattgaaccgcacaacactctagttaaaattatatatgctggtgtaaatgctagtgatgtaaatttcagttctggtcgttatttcagtgttaattctaaagaagctgcttcacaccttccatttgacgctggttttgaggccgtgggaattgttgcttctgttggagattcggtgaaacatatcaaagttggcacttctgttgcccttatgacttttggaagctatgctgaattcgtgctgatttcagccaaaagtcttattccagtgccaagaccagacccagaggtggttgctatgctaacatcaggattgactgcatccatcgctcttgaaaaggctggtcaaatgatatctggacaggttgttttagtcactgcagctgctggtggaacaggacaatttgctgttcagcttgcaaaattagcaggcaacaaggttgtagccacatgtggaggtgaaagtaaatctatgtttctgacttccttgggagttgatcgagttatcaactaccaaagtgaaaagatcaaagatgttctgaagaaagagtttccaagaggtgtagatatcatatacgaatcagtaggaggagaaacgtttgatgtgtgtctgaatgccctagcagtctatgggcgtctcattgtaattggtatgatctctcagtatcaaggagagggaggatggaagccacagaattacactggattatgcgagaagattcttgggaaaagtcagactgtggctggctttttcctggtccaatatgcgcacctgtggcaagaccatcttgaaaaactgtttaacctgtattcctctggaaagctaaaggtcttcgttgaccccaagaaattcgtgggtgttgcttccgtggcagatgcagtagaatatctccattctggcaggagtgttggcaaggtcgttgtttgcatggatctatcctatggccagacccttgctaagctataattggtacttcggtgcatgtgggctgcagtttcagcagaagattattcttcagatttttattctgtctggaagaacccttgctatttgctaataagctatatactgtgtactgatgagcagagttacgccgtatgttcggacttggcggcacatagctcgcttttccgagtctgaaaggcacgttattagtgggaccgtgggacgggcgaaaattggaaggaaatcgaataagtcagatgagttttaaataaactaagccctctgctcaattgtgaactctttttgggtaaacaataaatgaaacttgagtgaat

SEQ ID NO: 66091 - DNA, 1385 bp, Zea Mays
atggaacatgatatgaatgaagttccgggaatctatagggttgttcacacactcagccataacttccggaatgctacaaggcttgagcgtgtgcgcctgagattacccattgaaccgcacaacactctagttaaaattatatatgctggtgtaaatgctagtgatgtaaatttcagttctggtcgttatttcagtgttaattctaaagaagctgcttcacaccttccatttgacgctggttttgaggccgtgggaattgttgcttctgttggagattcggtgaaacatatcaaagttggcacttctgttgcccttatgacttttggaagctatgctgaattcgtgctgatttcagccaaaagtcttattccagtgccaagaccagacccagaggtggttgctatgctaacatcaggattgactgcatccatcgctcttgaaaaggctggtcaaatgatatctggacaggttgttttagtcactgcagctgctggtggaacaggacaatttgctgttcagcttgcaaaattagcaggcaacaaggttgtagccacatgtggaggtgaaagtaaatctatgtttctgacttccttgggagttgatcgagttatcaactaccaaagtgaaaagatcaaagatgttctgaagaaagagtttccaagaggtgtagatatcatatacgaatcagtaggaggagaaacgtttgatgtgtgtctgaatgccctagcagtctatgggcgtctcattgtaattggtatgatctctcagtatcaaggagagggaggatggaagccacagaattacactggattatgcgagaagattcttgggaaaagtcagactgtggctggctttttcctggtccaatatgcgcacctgtggcaagaccatcttgaaaaactgtttaacctgtattcctctggaaagctaaaggtcttcgttgaccccaagaaattcgtgggtgttgcttccgtggcagatgcagtagaatatctccattctggcaggagtgttggcaaggtcgttgtttgcatggatctatcctatggccagacccttgctaagctataattggtacttcggtgcatgtgggctgcagtttcagcagaagattattcttcagatttttattctgtctggaagaacccttgctatttgctaataagctatatactgtgtactgatgagcagagttacgccgtatgttcggacttggcggcacatagctcgcttttccgagtctgaaaggcacgttattagtgggaccgtgggacgggcgaaaattggaaggaaatcgaataagtcagatgagttttaaataaactaagccctctgctcaattgtgaactctttttgggtaaacaataaatgaaacttgagtgaat

SEQ ID NO: 66092 - DNA, 1358 bp, Zea Mays
atcccctagttcctagtttctcttccaaatttcagacctctacgcacgcaggtcgtaggctatcctcaatccccgatcccgtgcggcggcggttccatagcaacacagtacggcaagacggcaagtccaagtttgcagcgattgcagctccactgctccccaccttctcgccgtgcacgcctgcgcagcgcgcggcgaacggttcgtcggtgccgtggtcgtggtcgtgcgcgagcgcctgtccacggcgggcccacggcgaggtgcgaagccgctacagggcccacggcgagcactgaccgccgagcgggcgaggccgtgacaagcacccactaggtgtccagcacaacagcacgccaggaacagaccttgtacgaggttttatctgtgagtgaagacgctacatacgatgagatccgcgcagcatacagcgtgcagaaagcatgggaagtcctacgacatcctacatccagagcatattatgacaagcagctgcagtcatccagacaaagcatcgagatcatcgcatctgaaatccaagtcggggacatgatcgtcgagagcgctgctggtgctctagagctgctgtacccatgcaggtgtggcgattatttctccatcacttcgggtgaacttagcgggatggggattgtcgtcactggggatggagaagaggtagaagggctgcaggcgtcggattccgggtcggcttctgtcgttctgggctgtggctcctgttctctcaaaatacggctggttatagatggaacctcatgatcacatttcaggctctggttgcgcgctattcagcagtgtggtcagtttgaatgcttaacaaccaccaccacatgtttgtcaaacagtatgcaattcctgctctgctgaaaatcgtgcagcttatcccaatggtggttgcattgtgataaatggcgttttgaccgttgttatcagctaaccaccatcgtcaagtccagctgctgggagttcaaagccggtggtggttattcggtagatgtttagttaatgttgttttttctaggccaatttaatggtctcatctgtcagccattcacttaaacgatggctaaactaacggttttttttatttggtatcagctgaatgaatgcctgttgtttttgatagctgctgatgagaaagaagtgttggctgcggccgttggtgttgtattgaataacttgtgaccgtatctgtactgctaagcatgggcagcatcccatacagaagtagaacggctctgtatctgtatcctcagaatttgatatgcgtaaaactgtgcctgccgttaccgccgagtctggcatgttcggctcctggattggtatccggaacgatttat

SEQ ID NO: 66093 - DNA, 1204 bp, Zea Mays
cgccaacaggctctccttgcaagcctctctttttaagttacggggcacttgtcatgcacatgggcgaccgagctcttccatttatatctctaccactcctcatcggtgaccggacgaacgccgggagaaacaggccgatccgtagctgcctgcacacatcggtgatcgttcgatccatgtgcgattgattgatcagggaggagcgagtgatataatgccttgcttggcgcaagagttccacccgaagctgcccgcggcgaaccactactgcaagtccttgtcgtcgctcatccgggagacctacgcgcactgccatgtcccctgcgtcgggatcgccgggtggagctccggcggggacagcgacgacgacagcgtcctcgacgaagcgcgagataccaagcaggtgatcctcagcgagatgaggagccggcagatgaagaggcggtccaggtgcagcgtggactcgccgacgccgctgcccctgccgtcgtcgagctccgctttcgcctggtcgtactcgtacgctccgctcggtccgagaaccgttctcgacgagctgtcgagtcccaagacgtgcgtcgtggtggagggggcggccgtggccgacgacgacgatggggacgtctactgcgacgcggacgacgagagcgaggcgttcttctccgtgaagagctgcttcacgcgcagcacgagcccgagcccgagccgggcggcgaccgcggcgtcgtcgccgcgcatgatgacaggcccgtccccgccgatgctgcgccggtcgcccgaggcctgggagcgcttccgggactgcgacgggtggccgttcgggctgtgccgtcgcccagccgtcctcccgctgctgccgccgctgcccagcacgccagccgactcgtggaagtggcgcaagagcgtcagtacagtagcctcgccgcgcaggcgcagcccaaccccggcttacagacacaaagcagccactgctgctacgctagcagtaaatgaccgcgccgccgctagtggcctgcgtgcttgaatgcgagagttccatagggattctacatttctacaggacacgaaacagttcatttgctccgacaaaatggtgaagcttcccgcaggattcctacgcgaagatgtggcatgcatgcttgttcgaggccttgatcttttgcaaggatttttcagttcgtgaagttcttcgttcgatttggat

SEQ ID NO: 66094 - DNA, 2853 bp, Zea Mays
aggagccgtcgtacgcggctgggagcgagcgggtgctcgggcacgagacggtactcgtcggagacgacgattcgacgatggcgcgggcacgcgctgcgatcgagggaggtgaggtaggcgtggaagacgaagctgacggcggtgtggaggcagaagccgccgccgaagtacacaaggtttggaagcttcttactgcttccaccattgtcatcggtcttcttggcgagcggcgggaggaaagggcggacggcaacatctggggagacggcgcggtcgttggaggcgacgtccatagcagattagcagcgtccgtggcggccgggacgccgggacgcgagcatccggtccccgctctctacggggacgcgtggacggcgctccagtgggtggccgcgcactccgtgggccgggggcaggaaccctggctgactgcccacgcggacctcgggcgcgtccacgtcggcggagagagcgcgggcgcgaacattgcccaccacgccgcgatgcgcgctggcagagaggagctgggccacggcgtgaagctcagctcgctcgtgatgatccatccctacttcctgggaggcgagagctccgagacagacgacatgggcgtagcgttgctccgcgagctcgtccggctgtggccggtggtgtgcccgggcacgagcgggtgcgatgacgacccgttgatcaatccgatggcagagggtgcccccaatctcgctagcttggggtgccgacgcgtactggtgtgcgtcgggggaaaggacccgatgagaggcagaggaaggctgtattgtgagaagctgaagagaagtgggtggcgcggggaggtggatgactgggaggcggacggccagggacacggtttccatctctcgtgccccatgagcgcagaggcggaggcgcaagtccgggtcatcgctgagtttctgacctacggatgacatatctgttttcccactccttcacgcggccatgattctcaattttcatcagaagaaggggttactgagctgtattagacttacctttgggttaatatctattggtgcaagacccagattggctatacctttgtaatcgaatttgctttgcctggctaaagtttatgacaaaatcgtcgcattgctcacattctctttaatacagtcctggtgaccttgtcgcataacatgagcagtcatttagtatacatgagtgatgagtcgtgaggcttctcataatagagcagtgttcctgcacaaatgggagaaagggctggtagtctcacatgcaaagagtccaggagcagccacctatgatggatcataacccaacagttgtaaaagaaatcaatatggggagaatttctcttggaccaacttatttgatgatatctcttgctttgatatccaccttcaggcatcctaggtgtgttttgtttgtcctacaaggcatgcattatgtcttggtcaatcttttacttccattgctgcatcatggggctttgagaaatactgcttccttgacttgtccttttgctttcattgaccaaacacactttcctttatcatcttgcaaaaggcatgctgtttgagcaagacataagttatacacataaattttatgatatgcgtggactgaaggctaaaaggctttttaaagctaccccaacttgcttgggataaaaggcttttgttgttgttgttgttgcatgaactgaaggatcttggtagaatttacagagaaatgctgtagcgatttgatctgttgcaatatcaatgattgagttagggttgaccatcttgcatatgttcgttggggatcagaagtacaacacaatggatgctctactatcagatatttgtatcagcacatctgctgctccaacctatcttcctgcatactctacttcaagacagaagatttccatgggaacaccaaggagttccatcctattgatggaggagtagctgccaataatctggtgcaatatttgtcagtaattatgcatcgcacttcaatcatgacgcaaggttgatacattatttgcacttctatgtgtaaaatcttgcaaagtgtcaacatggctttagttgccatttgagaagtaaccaagcagatattcaaggaaagcccagattcttcccaataaaacctatggatcatgactgatttttggtcatttcactaggcaggctcagcaaagtttgaagcaaactacaacgcacaaacaactaaatcatggagagtgttgagttggttgcttggcagtggatccactcccttagtatctattttcacacaggcaagtgcagatatggtggatattcatatctctgctagtttcaaagccttgcattctgagtaaaacgatctgagcattcaggatgatactctacaaggactgtgtcctcggttgatgttgcaaccgaggaaaaaatggagaaacttgccagagttagagatatgctactaaagaaacctgtctcacaggcgaatttggaaactggctatatggtgcgtgcctgtcataggacagagctgactaatgacgaagctctcaagagatttgcgaagctgctgtctgatgaaaggcaaattcgtaaggcaagatggccaaaatgaagaaagcccttgtggttgtttcaacacacagagaactctgcattacttcaattaagaattatggttgatattatttgttgatatgaattgtaacaataaaacaacttgtattggatcatgctgacactatgaattgatgatgttggcttctgccgggtgccggctgtcttttgtagcgtgtgaaggaatggaaaatattaatattctttttgataaatataagcattggattacttgtatagt

SEQ ID NO: 66095 - DNA, 2766 bp, Zea Mays
atggcgcgggcacgcgctgcgatcgagggaggtgaggtaggcgtggaagacgaagctgacggcggtgtggaggcagaagccgccgccgaagtacacaaggtttggaagcttcttactgcttccaccattgtcatcggtcttcttggcgagcggcgggaggaaagggcggacggcaacatctggggagacggcgcggtcgttggaggcgacgtccatagcagattagcagcgtccgtggcggccgggacgccgggacgcgagcatccggtccccgctctctacggggacgcgtggacggcgctccagtgggtggccgcgcactccgtgggccgggggcaggaaccctggctgactgcccacgcggacctcgggcgcgtccacgtcggcggagagagcgcgggcgcgaacattgcccaccacgccgcgatgcgcgctggcagagaggagctgggccacggcgtgaagctcagctcgctcgtgatgatccatccctacttcctgggaggcgagagctccgagacagacgacatgggcgtagcgttgctccgcgagctcgtccggctgtggccggtggtgtgcccgggcacgagcgggtgcgatgacgacccgttgatcaatccgatggcagagggtgcccccaatctcgctagcttggggtgccgacgcgtactggtgtgcgtcgggggaaaggacccgatgagaggcagaggaaggctgtattgtgagaagctgaagagaagtgggtggcgcggggaggtggatgactgggaggcggacggccagggacacggtttccatctctcgtgccccatgagcgcagaggcggaggcgcaagtccgggtcatcgctgagtttctgacctacggatgacatatctgttttcccactccttcacgcggccatgattctcaattttcatcagaagaaggggttactgagctgtattagacttacctttgggttaatatctattggtgcaagacccagattggctatacctttgtaatcgaatttgctttgcctggctaaagtttatgacaaaatcgtcgcattgctcacattctctttaatacagtcctggtgaccttgtcgcataacatgagcagtcatttagtatacatgagtgatgagtcgtgaggcttctcataatagagcagtgttcctgcacaaatgggagaaagggctggtagtctcacatgcaaagagtccaggagcagccacctatgatggatcataacccaacagttgtaaaagaaatcaatatggggagaatttctcttggaccaacttatttgatgatatctcttgctttgatatccaccttcaggcatcctaggtgtgttttgtttgtcctacaaggcatgcattatgtcttggtcaatcttttacttccattgctgcatcatggggctttgagaaatactgcttccttgacttgtccttttgctttcattgaccaaacacactttcctttatcatcttgcaaaaggcatgctgtttgagcaagacataagttatacacataaattttatgatatgcgtggactgaaggctaaaaggctttttaaagctaccccaacttgcttgggataaaaggcttttgttgttgttgttgttgcatgaactgaaggatcttggtagaatttacagagaaatgctgtagcgatttgatctgttgcaatatcaatgattgagttagggttgaccatcttgcatatgttcgttggggatcagaagtacaacacaatggatgctctactatcagatatttgtatcagcacatctgctgctccaacctatcttcctgcatactctacttcaagacagaagatttccatgggaacaccaaggagttccatcctattgatggaggagtagctgccaataatctggtgcaatatttgtcagtaattatgcatcgcacttcaatcatgacgcaaggttgatacattatttgcacttctatgtgtaaaatcttgcaaagtgtcaacatggtatgtgattcagaaattaaaattatcaccaaactttttaaagaaatctaatttatctttctgttgtttaggctttagttgccatttgagaagtaaccaagcagatattcaaggaaagcccagattcttcccaataaaacctatggatcatgactgatttttggtcatttcactaggcaggctcagcaaagtttgaagcaaactacaacgcacaaacaactaaatcatggagagtgttgagttggttgcttggcagtggatccactcccttagtatctattttcacacaggatgatactctacaaggactgtgtcctcggttgatgttgcaaccgaggaaaaaatggagaaacttgccagagttagagatatgctactaaagaaacctgtctcacaggcgaatttggaaactggctatatggtgcgtgcctgtcataggacagagctgactaatgacgaagctctcaagagatttgcgaagctgctgtctgatgaaaggcaaattcgtaaggcaagatggccaaaatgaagaaagcccttgtggttgtttcaacacacagagaactctgcattacttcaattaagaattatggttgatattatttgttgatatgaattgtaacaataaaacaacttgtattggatcatgctgacactatgaattgatgatgttggcttctgccgggtgccggctgtcttttgtagcgtgtgaaggaatggaaaatattaatattctttttgataaatataagcattggattacttgtatagt

SEQ ID NO: 66096 - DNA, 2723 bp, Zea Mays
atggcgcgggcacgcgctgcgatcgagggaggtgaggtaggcgtggaagacgaagctgacggcggtgtggaggcagaagccgccgccgaagtacacaaggtttggaagcttcttactgcttccaccattgtcatcggtcttcttggcgagcggcgggaggaaagggcggacggcaacatctggggagacggcgcggtcgttggaggcgacgtccatagcagattagcagcgtccgtggcggccgggacgccgggacgcgagcatccggtccccgctctctacggggacgcgtggacggcgctccagtgggtggccgcgcactccgtgggccgggggcaggaaccctggctgactgcccacgcggacctcgggcgcgtccacgtcggcggagagagcgcgggcgcgaacattgcccaccacgccgcgatgcgcgctggcagagaggagctgggccacggcgtgaagctcagctcgctcgtgatgatccatccctacttcctgggaggcgagagctccgagacagacgacatgggcgtagcgttgctccgcgagctcgtccggctgtggccggtggtgtgcccgggcacgagcgggtgcgatgacgacccgttgatcaatccgatggcagagggtgcccccaatctcgctagcttggggtgccgacgcgtactggtgtgcgtcgggggaaaggacccgatgagaggcagaggaaggctgtattgtgagaagctgaagagaagtgggtggcgcggggaggtggatgactgggaggcggacggccagggacacggtttccatctctcgtgccccatgagcgcagaggcggaggcgcaagtccgggtcatcgctgagtttctgacctacggatgacatatctgttttcccactccttcacgcggccatgattctcaattttcatcagaagaaggggttactgagctgtattagacttacctttgggttaatatctattggtgcaagacccagattggctatacctttgtaatcgaatttgctttgcctggctaaagtttatgacaaaatcgtcgcattgctcacattctctttaatacagtcctggtgaccttgtcgcataacatgagcagtcatttagtatacatgagtgatgagtcgtgaggcttctcataatagagcagtgttcctgcacaaatgggagaaagggctggtagtctcacatgcaaagagtccaggagcagccacctatgatggatcataacccaacagttgtaaaagaaatcaatatggggagaatttctcttggaccaacttatttgatgatatctcttgctttgatatccaccttcaggcatcctaggtgtgttttgtttgtcctacaaggcatgcattatgtcttggtcaatcttttacttccattgctgcatcatggggctttgagaaatactgcttccttgacttgtccttttgctttcattgaccaaacacactttcctttatcatcttgcaaaaggcatgctgtttgagcaagacataagttatacacataaattttatgatatgcgtggactgaaggctaaaaggctttttaaagctaccccaacttgcttgggataaaaggcttttgttgttgttgttgttgcatgaactgaaggatcttggtagaatttacagagaaatgctgtagcgatttgatctgttgcaatatcaatgattgagttagggttgaccatcttgcatatgttcgttggggatcagaagtacaacacaatggatgctctactatcagatatttgtatcagcacatctgctgctccaacctatcttcctgcatactctacttcaagacagaagatttccatgggaacaccaaggagttccatcctattgatggaggagtagctgccaataatctggtgcaatatttgtcagtaattatgcatcgcacttcaatcatgacgcaaggctttagttgccatttgagaagtaaccaagcagatattcaaggaaagcccagattcttcccaataaaacctatggatcatgactgatttttggtcatttcactaggcaggctcagcaaagtttgaagcaaactacaacgcacaaacaactaaatcatggagagtgttgagttggttgcttggcagtggatccactcccttagtatctattttcacacaggcaagtgcagatatggtggatattcatatctctgctagtttcaaagccttgcattctgagtaaaacgatctgagcattcaggatgatactctacaaggactgtgtcctcggttgatgttgcaaccgaggaaaaaatggagaaacttgccagagttagagatatgctactaaagaaacctgtctcacaggcgaatttggaaactggctatatggtgcgtgcctgtcataggacagagctgactaatgacgaagctctcaagagatttgcgaagctgctgtctgatgaaaggcaaattcgtaaggcaagatggccaaaatgaagaaagcccttgtggttgtttcaacacacagagaactctgcattacttcaattaagaattatggttgatattatttgttgatatgaattgtaacaataaaacaacttgtattggatcatgctgacactatgaattgatgatgttggcttctgccgggtgccggctgtcttttgtagcgtgtgaaggaatggaaaatattaatattctttttgataaatataagcattggattacttgtatagt

SEQ ID NO: 66097 - DNA, 2614 bp, Zea Mays
atggcgcgggcacgcgctgcgatcgagggaggtgaggtaggcgtggaagacgaagctgacggcggtgtggaggcagaagccgccgccgaagtacacaaggtttggaagcttcttactgcttccaccattgtcatcggtcttcttggcgagcggcgggaggaaagggcggacggcaacatctggggagacggcgcggtcgttggaggcgacgtccatagcagattagcagcgtccgtggcggccgggacgccgggacgcgagcatccggtccccgctctctacggggacgcgtggacggcgctccagtgggtggccgcgcactccgtgggccgggggcaggaaccctggctgactgcccacgcggacctcgggcgcgtccacgtcggcggagagagcgcgggcgcgaacattgcccaccacgccgcgatgcgcgctggcagagaggagctgggccacggcgtgaagctcagctcgctcgtgatgatccatccctacttcctgggaggcgagagctccgagacagacgacatgggcgtagcgttgctccgcgagctcgtccggctgtggccggtggtgtgcccgggcacgagcgggtgcgatgacgacccgttgatcaatccgatggcagagggtgcccccaatctcgctagcttggggtgccgacgcgtactggtgtgcgtcgggggaaaggacccgatgagaggcagaggaaggctgtattgtgagaagctgaagagaagtgggtggcgcggggaggtggatgactgggaggcggacggccagggacacggtttccatctctcgtgccccatgagcgcagaggcggaggcgcaagtccgggtcatcgctgagtttctgacctacggatgacatatctgttttcccactccttcacgcggccatgattctcaattttcatcagaagaaggggttactgagctgtattagacttacctttgggttaatatctattggtgcaagacccagattggctatacctttgtaatcgaatttgctttgcctggctaaagtttatgacaaaatcgtcgcattgctcacattctctttaatacagtcctggtgaccttgtcgcataacatgagcagtcatttagtatacatgagtgatgagtcgtgaggcttctcataatagagcagtgttcctgcacaaatgggagaaagggctggtagtctcacatgcaaagagtccaggagcagccacctatgatggatcataacccaacagttgtaaaagaaatcaatatggggagaatttctcttggaccaacttatttgatgatatctcttgctttgatatccaccttcaggcatcctaggtgtgttttgtttgtcctacaaggcatgcattatgtcttggtcaatcttttacttccattgctgcatcatggggctttgagaaatactgcttccttgacttgtccttttgctttcattgaccaaacacactttcctttatcatcttgcaaaaggcatgctgtttgagcaagacataagttatacacataaattttatgatatgcgtggactgaaggctaaaaggctttttaaagctaccccaacttgcttgggataaaaggcttttgttgttgttgttgttgcatgaactgaaggatcttggtagaatttacagagaaatgctgtagcgatttgatctgttgcaatatcaatgattgagttagggttgaccatcttgcatatgttcgttggggatcagaagtacaacacaatggatgctctactatcagatatttgtatcagcacatctgctgctccaacctatcttcctgcatactctacttcaagacagaagatttccatgggaacaccaaggagttccatcctattgatggaggagtagctgccaataatctggtgcaatatttgtcagtaattatgcatcgcacttcaatcatgacgcaaggctcagcaaagtttgaagcaaactacaacgcacaaacaactaaatcatggagagtgttgagttggttgcttggcagtggatccactcccttagtatctattttcacacaggcaagtgcagatatggtggatattcatatctctgctagtttcaaagccttgcattctgagtaaaacgatctgagcattcaggatgatactctacaaggactgtgtcctcggttgatgttgcaaccgaggaaaaaatggagaaacttgccagagttagagatatgctactaaagaaacctgtctcacaggcgaatttggaaactggctatatggtgcgtgcctgtcataggacagagctgactaatgacgaagctctcaagagatttgcgaagctgctgtctgatgaaaggcaaattcgtaaggcaagatggccaaaatgaagaaagcccttgtggttgtttcaacacacagagaactctgcattacttcaattaagaattatggttgatattatttgttgatatgaattgtaacaataaaacaacttgtattggatcatgctgacactatgaattgatgatgttggcttctgccgggtgccggctgtcttttgtagcgtgtgaaggaatggaaaatattaatattctttttgataaatataagcattggattacttgtatagt

SEQ ID NO: 66098 - DNA, 3029 bp, Zea Mays
ccacggctgacgtctgcgccgcttccgcgtcggcggcggacagctcggagccgctaggtctccgctctctgccgcattccgtggcatatcctataacaatttccccaacgccacatggccaacgccgacgctggcgacggcgacgaggtcatcctcgacgctcccggcttcatacgagtgtacaggagcggccgcgtcgagcgctttctgccggtcgacttcgccccgccctccactgacgccgccaccggcgtctcttcaaaggacgtcgccatcctcccagacgcctgcctattggttcgcatttacctcccattgcccccctcttccggaagttacagcggcaaactccccgtcctggtgttcttccacggcggcgggttctgcctcggttcggcgtttgatgcggcggtgcactcccacgccaaccggttagccgcggctgccggcgcaatcatcgtgtcggactgtcggtggaataccgcctcgcgccagagcatccggtccccgctctctacggggacgcgtggacggcgctccagtgggtggccgcgcactccgtgggccgggggcaggaaccctggctgactgcccacgcggacctcgggcgcgtccacgtcggcggagagagcgcgggcgcgaacattgcccaccacgccgcgatgcgcgctggcagagaggagctgggccacggcgtgaagctcagctcgctcgtgatgatccatccctacttcctgggaggcgagagctccgagacagacgacatgggcgtagcgttgctccgcgagctcgtccggctgtggccggtggtgtgcccgggcacgagcgggtgcgatgacgacccgttgatcaatccgatggcagagggtgcccccaatctcgctagcttggggtgccgacgcgtactggtgtgcgtcgggggaaaggacccgatgagaggcagaggaaggctgtattgtgagaagctgaagagaagtgggtggcgcggggaggtggatgactgggaggcggacggccagggacacggtttccatctctcgtgccccatgagcgcagaggcggaggcgcaagtccgggtcatcgctgagtttctgacctacggatgacatatctgttttcccactccttcacgcggccatggtgcattgttctcgaatctgatatacattttttgtttcgagtttggattgaggacatgcatgtttatattttatatttttatctactatttcataagcttaataaatgtttggctatgggttccagattctcaattttcatcagaagaaggggttactgagctgtattagacttacctttgggttaatatctattggtgcaagacccagattggctatacctttgtaatcgaatttgctttgcctggctaaagtttatgacaaaatcgtcgcattgctcacattctctttaatacagtcctggtgaccttgtcgcataacatgagcagtcatttagtatacatgagtgatgagtcgtgaggcttctcataatagagcagtgttcctgcacaaatgggagaaagggctggtagtctcacatgcaaagagtccaggagcagccacctatgatggatcataacccaacagttgtaaaagaaatcaatatggggagaatttctcttggaccaacttatttgatgatatctcttgctttgatatccaccttcaggcatcctaggtgtgttttgtttgtcctacaaggcatgcattatgtcttggtcaatcttttacttccattgctgcatcatggggctttgagaaatactgcttccttgacttgtccttttgctttcattgaccaaacacactttcctttatcatcttgcaaaaggcatgctgtttgagcaagacataagttatacacataaattttatgatatgcgtggactgaaggctaaaaggctttttaaagctaccccaacttgcttgggataaaaggcttttgttgttgttgttgttgcatgaactgaaggatcttggtagaatttacagagaaatgctgtagcgatttgatctgttgcaatatcaatgattgagttagggttgaccatcttgcatatgttcgttggggatcagaagtacaacacaatggatgctctactatcagatatttgtatcagcacatctgctgctccaacctatcttcctgcatactctacttcaagacagaagatttccatgggaacaccaaggagttccatcctattgatggaggagtagctgccaataatctggtgcaatatttgtcagtaattatgcatcgcacttcaatcatgacgcaaggttgatacattatttgcacttctatgtgtaaaatcttgcaaagtgtcaacatggctcagcaaagtttgaagcaaactacaacgcacaaacaactaaatcatggagagtgttgagttggttgcttggcagtggatccactcccttagtatctattttcacacaggcaagtgcagatatggtggatattcatatctctgctagtttcaaagccttgcattctgagtaaaacgatctgagcattcaggatgatactctacaaggactgtgtcctcggttgatgttgcaaccgaggaaaaaatggagaaacttgccagagttagagatatgctactaaagaaacctgtctcacaggcgaatttggaaactggctatatggtgcgtgcctgtcataggacagagctgactaatgacgaagctctcaagagatttgcgaagctgctgtctgatgaaaggcaaattcgtaaggcaagatggccaaaatgaagaaagcccttgtggttgtttcaacacacagagaactctgcattacttcaattaagaattatggttgatattatttgttgatatgaattgtaacaataaaacaacttgtattggatcatgctgacactatgaattgatgatgttggcttctgccgggtgccggctgtcttttgtagcgtgtgaaggaatggaaaatattaatattctttttgataaatataagcattggattacttgtatagt

SEQ ID NO: 66099 - DNA, 2963 bp, Zea Mays
gccgcttccgcgtcggcggcggacagctcggagccgctaggtctccgctctctgccgcattccgtggcatatcctataacaatttccccaacgccacatggccaacgccgacgctggcgacggcgacgaggtcatcctcgacgctcccggcttcatacgagtgtacaggagcggccgcgtcgagcgctttctgccggtcgacttcgccccgccctccactgacgccgccaccggcgtctcttcaaaggacgtcgccatcctcccagacgcctgcctattggttcgcatttacctcccattgcccccctcttccggaagttacagcggcaaactccccgtcctggtgttcttccacggcggcgggttctgcctcggttcggcgtttgatgcggcggtgcactcccacgccaaccggttagccgcggctgccggcgcaatcatcgtgtcggactgtcggtggaataccgcctcgcgccagagcatccggtccccgctctctacggggacgcgtggacggcgctccagtgggtggccgcgcactccgtgggccgggggcaggaaccctggctgactgcccacgcggacctcgggcgcgtccacgtcggcggagagagcgcgggcgcgaacattgcccaccacgccgcgatgcgcgctggcagagaggagctgggccacggcgtgaagctcagctcgctcgtgatgatccatccctacttcctgggaggcgagagctccgagacagacgacatgggcgtagcgttgctccgcgagctcgtccggctgtggccggtggtgtgcccgggcacgagcgggtgcgatgacgacccgttgatcaatccgatggcagagggtgcccccaatctcgctagcttggggtgccgacgcgtactggtgtgcgtcgggggaaaggacccgatgagaggcagaggaaggctgtattgtgagaagctgaagagaagtgggtggcgcggggaggtggatgactgggaggcggacggccagggacacggtttccatctctcgtgccccatgagcgcagaggcggaggcgcaagtccgggtcatcgctgagtttctgacctacggatgacatatctgttttcccactccttcacgcggccatggtgcattgttctcgaatctgatatacattttttgtttcgagtttggattgaggacatgcatgtttatattttatatttttatctactatttcataagcttaataaatgtttggctatgggttccagattctcaattttcatcagaagaaggggttactgagctgtattagacttacctttgggttaatatctattggtgcaagacccagattggctatacctttgtaatcgaatttgctttgcctggctaaagtttatgacaaaatcgtcgcattgctcacattctctttaatacagtcctggtgaccttgtcgcataacatgagcagtcatttagtatacatgagtgatgagtcgtgaggcttctcataatagagcagtgttcctgcacaaatgggagaaagggctggtagtctcacatgcaaagagtccaggagcagccacctatgatggatcataacccaacagttgtaaaagaaatcaatatggggagaatttctcttggaccaacttatttgatgatatctcttgctttgatatccaccttcaggcatcctaggtgtgttttgtttgtcctacaaggcatgcattatgtcttggtcaatcttttacttccattgctgcatcatggggctttgagaaatactgcttccttgacttgtccttttgctttcattgaccaaacacactttcctttatcatcttgcaaaaggcatgctgtttgagcaagacataagttatacacataaattttatgatatgcgtggactgaaggctaaaaggctttttaaagctaccccaacttgcttgggataaaaggcttttgttgttgttgttgttgcatgaactgaaggatcttggtagaatttacagagaaatgctgtagcgatttgatctgttgcaatatcaatgattgagttagggttgaccatcttgcatatgttcgttggggatcagaagtacaacacaatggatgctctactatcagatatttgtatcagcacatctgctgctccaacctatcttcctgcatactctacttcaagacagaagatttccatgggaacaccaaggagttccatcctattgatggaggagtagctgccaataatctggtgcaatatttgtcagtaattatgcatcgcacttcaatcatgacgcaaggcaggctcagcaaagtttgaagcaaactacaacgcacaaacaactaaatcatggagagtgttgagttggttgcttggcagtggatccactcccttagtatctattttcacacaggcaagtgcagatatggtggatattcatatctctgctagtttcaaagccttgcattctgagtaaaacgatctgagcattcaggatgatactctacaaggactgtgtcctcggttgatgttgcaaccgaggaaaaaatggagaaacttgccagagttagagatatgctactaaagaaacctgtctcacaggcgaatttggaaactggctatatggtgcgtgcctgtcataggacagagctgactaatgacgaagctctcaagagatttgcgaagctgctgtctgatgaaaggcaaattcgtaaggcaagatggccaaaatgaagaaagcccttgtggttgtttcaacacacagagaactctgcattacttcaattaagaattatggttgatattatttgttgatatgaattgtaacaataaaacaacttgtattggatcatgctgacactatgaattgatgatgttggcttctgccgggtgccggctgtcttttgtagcgtgtgaaggaatggaaaatattaatattctttttgataaatataagcattggattacttgtatagt

SEQ ID NO: 66100 - DNA, 2723 bp, Zea Mays
gccgcttccgcgtcggcggcggacagctcggagccgctaggtctccgctctctgccgcattccgtggcatatcctataacaatttccccaacgccacatggccaacgccgacgctggcgacggcgacgaggtcatcctcgacgctcccggcttcatacgagtgtacaggagcggccgcgtcgagcgctttctgccggtcgacttcgccccgccctccactgacgccgccaccggcgtctcttcaaaggacgtcgccatcctcccagacgcctgcctattggttcgcatttacctcccattgcccccctcttccggaagttacagcggcaaactccccgtcctggtgttcttccacggcggcgggttctgcctcggttcggcgtttgatgcggcggtgcactcccacgccaaccggttagccgcggctgccggcgcaatcatcgtgtcggactgtcggtggaataccgcctcgcgccagagcatccggtccccgctctctacggggacgcgtggacggcgctccagtgggtggccgcgcactccgtgggccgggggcaggaaccctggctgactgcccacgcggacctcgggcgcgtccacgtcggcggagagagcgcgggcgcgaacattgcccaccacgccgcgatgcgcgctggcagagaggagctgggccacggcgtgaagctcagctcgctcgtgatgatccatccctacttcctgggaggcgagagctccgagacagacgacatgggcgtagcgttgctccgcgagctcgtccggctgtggccggtggtgtgcccgggcacgagcgggtgcgatgacgacccgttgatcaatccgatggcagagggtgcccccaatctcgctagcttggggtgccgacgcgtactggtgtgcgtcgggggaaaggacccgatgagaggcagaggaaggctgtattgtgagaagctgaagagaagtgggtggcgcggggaggtggatgactgggaggcggacggccagggacacggtttccatctctcgtgccccatgagcgcagaggcggaggcgcaagtccgggtcatcgctgagtttctgacctacggatgacatatctgttttcccactccttcacgcggccatggtgcattgttctcgaatctgatatacattttttgtttcgagtttggattgaggacatgcatgtttatattttatatttttatctactatttcataagcttaataaatgtttggctatgggttccagattctcaattttcatcagaagaaggggttactgagctgtattagacttacctttgggttaatatctattggtgcaagacccagattggctatacctttgtaatcgaatttgctttgcctggctaaagtttatgacaaaatcgtcgcattgctcacattctctttaatacagtcctggtgaccttgtcgcataacatgagcagtcatttagtatacatgagtgatgagtcgtgaggcttctcataatagagcagtgttcctgcacaaatgggagaaagggctggtagtctcacatgcaaagagtccaggagcagccacctatgatggatcataacccaacagttgtaaaagaaatcaatatggggagaatttctcttggaccaacttatttgatgatatctcttgctttgatatccaccttcaggcatcctagaagtacaacacaatggatgctctactatcagatatttgtatcagcacatctgctgctccaacctatcttcctgcatactctacttcaagacagaagatttccatgggaacaccaaggagttccatcctattgatggaggagtagctgccaataatctggtgcaatatttgtcagtaattatgcatcgcacttcaatcatgacgcaaggttgatacattatttgcacttctatgtgtaaaatcttgcaaagtgtcaacatggctttagttgccatttgagaagtaaccaagcagatattcaaggaaagcccagattcttcccaataaaacctatggatcatgactgatttttggtcatttcactaggcaggctcagcaaagtttgaagcaaactacaacgcacaaacaactaaatcatggagagtgttgagttggttgcttggcagtggatccactcccttagtatctattttcacacaggcaagtgcagatatggtggatattcatatctctgctagtttcaaagccttgcattctgagtaaaacgatctgagcattcaggatgatactctacaaggactgtgtcctcggttgatgttgcaaccgaggaaaaaatggagaaacttgccagagttagagatatgctactaaagaaacctgtctcacaggcgaatttggaaactggctatatggtgcgtgcctgtcataggacagagctgactaatgacgaagctctcaagagatttgcgaagctgctgtctgatgaaaggcaaattcgtaaggcaagatggccaaaatgaagaaagcccttgtggttgtttcaacacacagagaactctgcattacttcaattaagaattatggttgatattatttgttgatatgaattgtaacaataaaacaacttgtattggatcatgctgacactatgaattgatgatgttggcttctgccgggtgccggctgtcttttgtagcgtgtgaaggaatggaaaatattaatattctttttgataaatataagcattggattacttgtatagt

SEQ ID NO: 66101 - DNA, 1282 bp, Zea Mays
aaacctaccctgtgatacatgttgtggcgatcaaagttatccgcaacaagcagactgggcagtccgaaggatacgggttcgtcgagttctacagccacgctgcggctgaaaaagttctcgaagggttttctggccatatcatgccgaacaccgaccagcctttcaggctaaactgggcatcgtttagcatgggagacaggcgctcggattctgcctcggaccattccatattcgtaggcgaccttgcctctgacgtcaatgacgccacgctgctggaggccttctccagcaggtactcctctgtcaaaggtgccaaggttgttatcgatgctaacactggtagatccaagggctatggcttcgtgaggtttggagatgacagcgagaagacacaggccatgactgagatgaacggcgtgtattgctcgtctaggcccatgagaattggcccggcaactccgaggaaatcatcaggtacttctggatccaatggttcagctgctcgatcagacggaggagatttgacaaacacaacggtatttgtgggtgggctcgacccaaatgttagcgaagaggaccttaggcaaaccttctcccagtacggagagatttcttctgtaaagattccaattgggaaacagtgcggcttcgtgcagtttgctcagaggaagaacgcagaggacgcattgcaaggattaaatggcagcactattggcaaacaaaacgtgcgtctttcatggggccgcaacccagcaaacaagcagttcagaggcgacaacggcaaccagtggaacaacgggggcatgtactacgcggcgcccccgttctacaacggctacggttaccctgcggcggccccgttccctgatccaggcatgtacgctgctccagcctacggtgcctacccgttctatggcaatcagcagcaagtgagctgacctggactaccgcgacacgcacgcctcgctcggagctggagactggaggtgttaggcgcttaggtgtagctctcggtagaagaagaagaggaagaaggtagacgacgacggtttcttaggtgagctagataccgtgactagtctcgtatagtgcgatttgttatacgtgctatggtctagcgccgccgacgactgagagtccgagtgtccgacacacctattgactggccacggcatgtcgaattgaacgacaaaaagaatttctgatgtcctggagctgcatgcatgctaccttgaagcagaacaataagctaatggaatcctttggcctctgctattcgatt

SEQ ID NO: 66102 - DNA, 659 bp, Zea Mays
agccccggagacctctagctcccttgaaccaaaacttcgtgtgctagtcgaggttccgagcgctcgtcggtaccgagcataggccgaaagagagaggatagggagagggacaaccactctagccatctcatgatcatgccatggttcagacgtcgattggtgccatagagaagtcgtcgtcgcttgagaagtttgtgggtagcactatgggacgcgagggtcgaccagagtatgatgagttgcttgctgaaattcgtcgaaccatggtgcaacatcgctgacactcgtcgttggttcaaacaccggtagtcaattttggtgcaccgatagtggcagcggccctgctgtgcgaagaggggtctcgggtcgagggcaattcctcgtgtcgatccagcgcagctgcggatcggccttgcgccatgggcagggctacatgttgcacaaaccatcggttagtcatctctgacgtgctctccatgagcctcgctacgtttagcgcctttagtatctgagttttatgtgacggagcatcggatggtcgtacaccagcgatggcgccgccgtgagcaccctgtgcgcggttgggatgaggatgaaggcgtgtggctggtatgatctcaagtgaatggtctagattttgttatcgtatcccttctctg

SEQ ID NO: 66103 - DNA, 346 bp, Zea Mays
agccccggagacctctagctcccttgaaccaaaacttcgtgtgctagtcgaggttccgagcgctcgtcggtaccgagcataggccgaaagagagaggatagggagagggacaaccactctagccatctcatgatcatgccatggttcagacgtcgattggtgccatagagaagtcgtcgtcgcttgagaagtttgtgggtagcactatgggacgcgagggtcgaccagagtatgatgagttgcttgctgaaattcgtcgaaccatggtgcaacatcgctgacactcgtcgttggttcaaacaccgaaaatatcctctccatgtatgtaacaagcaaagactgggag

SEQ ID NO: 66104 - DNA, 2412 bp, Zea Mays
gactgccatttcatgttaccacaactcgccgtatatatacaacggcaccgccgccggccgcgatagctacaactacaacccgagaccaattccgccatactacccaaggaaacctgcgcaccgccatcaccgccgccgcagcctctgttcccacagacgcctctctcctactcccaaccccaatcaaacgcaccgctgaatcgcctgcagtagctggagcgcaccttggtgcgatcctaccacacctctgagctcacgaggaatctttaatggcgtcggagtggcatcgccagccatagcagcctggctggctgaggtgcaggctgccaggctgccgaggcgatcacttgccaaccctctgctctccttttctaggcgcactgtcttgctttgatgcatacggcaccacagatgaatgcccggtctcggaggccggcggcggcgcgcggtgcgaaagcgcccccgaagagcgacagcagagtgacggagacggatccgaggaagaccgtgacgccggtgaagggatcgggcaacgccggtaccaggggcaccatgaacaggatccagtcgaggagagagcgaaagctcgcgctacagcaagatgtggataagctgaagaagaagctgcggcacgaggagaacgtccaccgtgcgctggagcgggcgttcacgcggccgctcggcgccctacctcgcctgccgccgtacctgccgtctcagacgctagcccttctcgcggaggtggcggtgctggaggaggaggtcgtccggctagaggagcaggtggtgagtttccggcagggaatctaccaggaggcgaccgtcttctcctccgccaagaacacccaactccccggcggcgatgctcccgtgccggcgcagctcacaccgccgaacccggtgctgaattctgacatctcacccgcgacagaaagccaccatcctcccaacgctcgtccatcgtcgccgcacaacggcgtggccaatggcaagcaaacgccaacaaagcccgtcgtcaacactacctcgccgagccaggatgaccggtccggggcagggaaagagaaccagtcctgcagcaactcgtcgagcacgagcggccgccggacgcccaagtccaggccgacggcgacgccgcccgacagacgcagcagagctactccctctcagctaaatttaaaaaaacaaacagcagagcacctctgacaaagcgacgtcccacgacgactcgatctggagcgtgccgaacatagctgctccgatgcctgctgaccatcttctccgatgcctgctccgaggacaaggaaacgaggatcagcaggcgctgtccccgtcggtctccggctccagcgagagctcgtcggggtacgccgcaggacccctacgggctacggcatcctggagctgggcgccagggacaccgggccctacaagcggttccacgtggtcgacgccgcgtccttggaccccaatgcgctggccggcgacggcgactgaaattcggctgcctggcgatcgggtggcggtttgactttgaacgcgcggatgctgatcggggagatgcccaattatgtgctgatctgctgggtcttgctgctggctgctgcggaggctgtcgtgggttgacctggcgtggggctctcccatcagcacaagctggcgttctggatcaacgtctacaatggctgcatgatgaagtcagataaatgctctgctggagatagccttaactggatctactcattgcgtgatggatggttttttgttagaaaaaaagagaggcaaattcgcaattttggtctgccgcaaagcaactacagcctggatatgtggtggtagtggtactagctcttggaggcgtgtgctttaagcctgatgaagcctggcatgcgttccaggagcaagggatacctaccactaccaccccggaaatgctcgtggcgatgacggacacacccaaggtgccggcacaaccgaacccttcccacctccagataggcaggcgtacgcgcgcagggcattcactgaaggtaccctgcgcacaggttttgcttggcaataaaagggatcgatcggtcggatcggatacactctgccgtgccgagccgcaatgcagtttgtacaagtcttttgtatgtaaaaaaaaagaaaagaaaaggtaattgaacccaacgggtacaaatctaccacgcacgccgatacgagacaagaaggaccaggtccaggcggtataaggcaggcaggcccaccgtgcaccacagtaccacacttgcagttgcagcacccccacagaattatgctagtgctttagggctgcagaacagaactcgtgatctcgcgttgtcacttgcagggacggagtcagaaaaaagtttaggagggactgaactaaattgctgtagtataaaaact

SEQ ID NO: 66105 - DNA, 2218 bp, Zea Mays
atttcatgttaccacaactcgccgtatatatacaacggcaccgccgccggccgcgatagctacaactacaacccgagaccaattccgccatactacccaaggaaacctgcgcaccgccatcaccgccgccgcagcctctgttcccacagacgcctctctcctactcccaaccccaatcaaacgcaccgctgaatcgcctgcagtagctggagcgcaccttggtgcgatcctaccacacctctgagctcacgaggaatctttaatggcgtcggagtggcatcgccagccatagcagcctggctggctgaggtgcaggctgccaggctgccgaggcgatcacttgccaaccctctgctctccttttctaggcgcactgtcttgctttgatgcatacggcaccacagatgaatgcccggtctcggaggccggcggcggcgcgcggtgcgaaagcgcccccgaagagcgacagcagagtgacggagacggatccgaggaagaccgtgacgccggtgaagggatcgggcaacgccggtaccaggggcaccatgaacaggatccagtcgaggagagagcgaaagctcgcgctacagcaagatgtggataagctgaagaagaagctgcggcacgaggagaacgtccaccgtgcgctggagcgggcgttcacgcggccgctcggcgccctacctcgcctgccgccgtacctgccgtctcagacgctagcccttctcgcggaggtggcggtgctggaggaggaggtcgtccggctagaggagcaggtggtgagtttccggcagggaatctaccaggaggcgaccgtcttctcctccgccaagaacacccaactccccggcggcgatgctcccgtgccggcgcagctcacaccgccgaacccggtgctgaattctgacatctcacccgcgacagaaagccaccatcctcccaacgctcgtccatcgtcgccgcacaacggcgtggccaatggcaagcaaacgccaacaaagcccgtcgtcaacactacctcgccgagccaggatgaccggtccggggcagggaaagagaaccagtcctgcagcaactcgtcgagcacgagcggccgccggacgcccaagtccaggccgacggcgacgccgcccgacagacgcagcagagctactccctctcagctaaatttaaaaaaacaaacagcagagcacctctgacaaagcgacgtcccacgacgactcgatctggagcgtgccgaacatagctgctccgatgcctgctgaccatcttctccgatgcctgctccgaggacaaggaaacgaggatcagcaggcgctgtccccgtcggtctccggctccagcgagagctcgtcggggtacgccgcaggacccctacgggctacggcatcctggagctgggcgccagggacaccgggccctacaagcggttccacgtggtcgacgccgcgtccttggaccccaatgcgctggccggcgacggcgactgaactagattcggctgcctggcgatcgggtggcggtttgactttgaacgcgcggatgctgatcggggagatgcccaattatgtgctgatctgctgggtcttgctgctggctgctgcggaggctgtcgtgggttgacctggcgtggggctctcccatcagcacaagctggcgttctggatcaacgtctacaatggctgcatgatgaaggcgttccaggagcaagggatacctaccactaccaccccggaaatgctcgtggcgatgacggacacacccaaggtgccggcacaaccgaacccttcccacctccagataggcaggcgtacgcgcgcagggcattcactgaaggtaccctgcgcacaggttttgcttggcaataaaagggatcgatcggtcggatcggatacactctgccgtgccgagccgcaatgcagtttgtacaagtcttttgtatgtaaaaaaaaagaaaagaaaaggtaattgaacccaacgggtacaaatctaccacgcacgccgatacgagacaagaaggaccaggtccaggcggtataaggcaggcaggcccaccgtgcaccacagtaccacacttgcagttgcagcacccccacagaattatgctagtgctttagggctgcagaacagaactcgtgatctcgcgttgtcacttgcagggacggagtcagaaaaaagtttaggagggactgaactaaattgctgtagtataaaaact

SEQ ID NO: 66106 - DNA, 1365 bp, Zea Mays
cccgagaccaattccgccatactacccaaggaaacctgcgcaccgccatcaccgccgccgcagcctctgttcccacagacgcctctctcctactcccaaccccaatcaaacgcaccgctgaatcgcctgcagtagctggagcgcaccttggtgcgatcctaccacacctctgagctcacgaggaatctttaatggcgtcggagtggcatcgccagccatagcagcctggctggctgaggtgcaggctgccaggctgccgaggcgatcacttgccaaccctctgctctccttttctaggcgcactgtcttgctttgatgcatacggcaccacagatgaatgcccggtctcggaggccggcggcggcgcgcggtgcgaaagcgcccccgaagagcgacagcagagtgacggagacggatccgaggaagaccgtgacgccggtgaagggatcgggcaacgccggtaccaggggcaccatgaacaggatccagtcgaggagagagcgaaagctcgcgctacagcaagatgtggataagctgaagaagaagctgcggcacgaggagaacgtccaccgtgcgctggagcgggcgttcacgcggccgctcggcgccctacctcgcctgccgccgtacctgccgtctcagattcggctgcctggcgatcgggtggcggtttgactttgaacgcgcggatgctgatcggggagatgcccaattatgtgctgatctgctgggtcttgctgctggctgctgcggaggctgtcgtgggttgacctggcgtggggctctcccatcagcacaagctggcgttctggatcaacgtctacaatggctgcatgatgaaggcgttccaggagcaagggatacctaccactaccaccccggaaatgctcgtggcgatgacggacacacccaaggtgccggcacaaccgaacccttcccacctccagataggcaggcgtacgcgcgcagggcattcactgaaggtaccctgcgcacaggttttgcttggcaataaaagggatcgatcggtcggatcggatacactctgccgtgccgagccgcaatgcagtttgtacaagtcttttgtatgtaaaaaaaaagaaaagaaaaggtaattgaacccaacgggtacaaatctaccacgcacgccgatacgagacaagaaggaccaggtccaggcggtataaggcaggcaggcccaccgtgcaccacagtaccacacttgcagttgcagcacccccacagaattatgctagtgctttagggctgcagaacagaactcgtgatctcgcgttgtcacttgcagggacggagtcagaaaaaagtttaggagggactgaactaaattgctgtagtataaaaact

SEQ ID NO: 66107 - DNA, 2065 bp, Zea Mays
aaagaatggtcgatgacctggtggcgtctatgacaagatctcgacgcgggttctttggcctcagggctctgccatttctgagagctactcgcactgactcccccagccccatattttcctttagtttccctttgagccttatctttcagagcggagcagaggaatctgtgctttgcttccgtgacggagacggatccgaggaagaccgtgacgccggtgaagggatcgggcaacgccggtaccaggggcaccatgaacaggatccagtcgaggagagagcgaaagctcgcgctacagcaagatgtggataagctgaagaagaagctgcggcacgaggagaacgtccaccgtgcgctggagcgggcgttcacgcggccgctcggcgccctacctcgcctgccgccgtacctgccgtctcagacgctagcccttctcgcggaggtggcggtgctggaggaggaggtcgtccggctagaggagcaggtggtgagtttccggcagggaatctaccaggaggcgaccgtcttctcctccgccaagaacacccaactccccggcggcgatgctcccgtgccggcgcagctcacaccgccgaacccggtgctgaattctgacatctcacccgcgacagaaagccaccatcctcccaacgctcgtccatcgtcgccgcacaacggcgtggccaatggcaagcaaacgccaacaaagcccgtcgtcaacactacctcgccgagccaggatgaccggtccggggcagggaaagagaaccagtcctgcagcaactcgtcgagcacgagcggccgccggacgcccaagtccaggccgacggcgacgccgcccgacagacgcagcagagctactccctctcagctaaatttaaaaaaacaaacagcagaggcatgcattctgtgattcagagttgtccgccgctgataattgatcagcgtgtagatgctattgcatgcatcgtccacgcagacagacaaaaactgctgcgcctgaccgtaaaacgcctgctgacgctgctgctggcactggcagcacctctgacaaagcgacgtcccacgacgactcgatctggagcgtgccgaacatagctgctccgatgcctgctgaccatcttctccgatgcctgctccgaggacaaggaaacgaggatcagcaggcgctgtccccgtcggtctccggctccagcgagagctcgtcggggtacgccgcaggacccctacgggctacggcatcctggagctgggcgccagggacaccgggccctacaagcggttccacgtggtcgacgccgcgtccttggaccccaatgcgctggccggcgacggcgactgaaattcggctgcctggcgatcgggtggcggtttgactttgaacgcgcggatgctgatcggggagatgcccaattatgtgctgatctgctgggtcttgctgctggctgctgcggaggctgtcgtgggttgacctggcgtggggctctcccatcagcacaagctggcgttctggatcaacgtctacaatggctgcatgatgaaggcgttccaggagcaagggatacctaccactaccaccccggaaatgctcgtggcgatgacggacacacccaaggtgccggcacaaccgaacccttcccacctccagataggcaggcgtacgcgcgcagggcattcactgaaggtaccctgcgcacaggttttgcttggcaataaaagggatcgatcggtcggatcggatacactctgccgtgccgagccgcaatgcagtttgtacaagtcttttgtatgtaaaaaaaaagaaaagaaaaggtaattgaacccaacgggtacaaatctaccacgcacgccgatacgagacaagaaggaccaggtccaggcggtataaggcaggcaggcccaccgtgcaccacagtaccacacttgcagttgcagcacccccacagaattatgctagtgctttagggctgcagaacagaactcgtgatctcgcgttgtcacttgcagggacggagtcagaaaaaagtttaggagggactgaactaaattgctgtagtataaaaact

SEQ ID NO: 66108 - DNA, 1170 bp, Zea Mays
aaggaagacaatcagagcccgcgcagccgtcgtgtaccaaagccaaataccaagtacatcggtgcagagtggcgcgtatagtattgggcatgaactggatccagcaatacagtccgatgaaggtggattgggcgaacaagtgggcagtcattccatataatggatcgccagcatacttgcaaggtgtgcaggtgacattaccagccggcgctgtcaccgaacttttgctcttgtcagtggaatcacaggctacacccgctggacaatcggtcgatccaaaagtccaagcagttctggatcagttcgtggaggtatttgaggatccagtcggcttaccaccaagcagaacatgcgaccacactataccattggttccagggacaaatgtgtgtgtactaccactgtccagtaaggtattcagagactgctcctgtattctccctttaagtttcaaggtctgatgacaagttgtccctgaccaggccgagtagtcagaatatcttgatgctgaatttgatcttgtaaatgccatgtggtagctgtcgcagtgccagaccatgctgaagatgacaacaccatcaggggctgctctataggttcgggcacaacttcagactcgtcatctgttccctgactgaacatctcacggaaaagctcttccggattgtgagtactagagcagatgaaaatgaagtgagcagagtggaatatgtaataaaaaatagattgcagccacaaccagtttgccctcggttgcttgatgcatatgtgtgaccagaccaatctgatatccaaaaacttcttgccataataaatgaggctatcctagaaaaaagacaacaaacctttatcctgcacaacgctctaaacattagacctggtgaacataaatggccaatcaaccattctgtatttatcttgtaacacatcgaaccttactgacaggaaaccacgttgtgtttgttcagagacggcaccaacatcatatgacaagttatctgagcagaagtttagagtcgtaccactgatcttatctccatctgaaatttcatataatgcatcatgcaacctccatgtgaaagatggccatgtgatcatccaaccgtcatacacaattactgtgacccaatatatgtggttgtagtaaaataggagctgccctcgacatgc

SEQ ID NO: 66109 - DNA, 1548 bp, Zea Mays
agtctggaacatgttattgtcgagtcggcaagaaaggaatagataccagagaaattcctggcgtgaaccacgggtgttgttcacatttggtaccagagccaatactggatcctccacacgggtactggacgagatcgcaatcgaagttgggcggcatggcgccagcgaagacggacgatcctttgtcccagcttctggcgaagatcgaggagggaaacaaggagactcaccgacgcatggaggcgattcagggggcggtgggaaatatggaggcggcggtcaaggtggtgatgacggagcagggagatcttcagaagtggaaaccggaggtggaagcgaaagtgacggagatttctgatgctctaaaggcgatccagatccagatgggaaagatggagaagaagccgctcggtttcgggtcgagacaggaagaagaaggagaagacggatttctgaagccgccaccatctgattcttcgaatttggagtttcgtcgtgaagaagggcggacccaattctcgcatggagtattgggcatgaactggatccagcaatacagtccgatgaaggtggattgggcgaacaagtgggcagtcattccatataatggatcgccagcatacttgcaaggtgtgcaggtgacattaccagccggcgctgtcaccgaacttttgctcttgtcagtggaatcacaggctacacccgctggacaatcggtcgatccaaaagtccaagcagttctggatcagttcgtggaggtatttgaggatccagtcggcttaccaccaagcagaacatgcgaccacactataccattggttccagggacaaatgtgtgtgtactaccactgtccagtaaggccgagtagtcagaatatcttgatgctgaatttgatcttgtaaatgccatgtggtagctgtcgcagtgccagaccatgctgaagatgacaacaccatcaggggctgctctataggttcgggcacaacttcagactcgtcatctgttccctgactgaacatctcacggaaaagctcttccggattgtgagtactagagcagatgaaaatgaagtgagcagagtggaatatgtaataaaaaatagattgcagccacaaccagtttgccctcggttgcttgatgcatatgtgtgaccagaccaatctgatatccaaaaacttcttgccataataaatgaggctatcctagaaaaaagacaacaaacctttatcctgcacaacgctctaaacattagacctggtgaacataaatggccaatcaaccattctgtatttatcttgtaacacatcgaaccttactgacaggaaaccacgttgtgtttgttcagagacggcaccaacatcatatgacaagttatctgagcagaagtttagagtcgtaccactgatcttatctccatctgaaatttcatataatgcatcatgcaacctccatgtgaaagatggccatgtgatcatccaaccgtcatacacaattactgtgacccaatatatgtggttgtagtaaaataggagctgccctcgacatgc

SEQ ID NO: 66110 - DNA, 2296 bp, Zea Mays
tttgcggagcggtcgcggcgggcggttggcgggggcggggtcgcggcgggcggttggcggaggtcgcggcgggatcgagcgggcggttgtggcgggggcagtctacaatacagtcttaatagttagtacagatatgtcaggtaactattaaatgcaccatgaatagcattagatgcaaatttgctagtttcaaaaacatgtcttgaattacacgatgtttggctgtgtccagcagattatgtatataatattatgtatatgattgtgtaaaatattattttatattatagacaacactttgttaagtaagatttaaaataaaaggtgagatattaaataaaataggagagctggttacaccttctatgtaaataatgttatctacgcagcgtaaaaacattgctacggccactcagctgtttacaccgatctacgagtatccccacgagaaacccccattccaccatcctctacccacccaatggatccgtccgccgttggctcctcgcggcggaaggcggagcagtggttgagcgtggctgagaagctcatggtggcgcgggacattgaagggtgcaagcagttcgcctcgcaggccctggccgccgatccccacaccccgggcgccgacgacctccacgccgccgccatctccctcctggcagcccagcagcgccgcctccctaacggtcagcctgatccctacggcgtccttggtctggaccccgcaaaccccgcatcacgccgaccggatgccatccactcacaatatcgccgcctctctttcctcctcaatcgttcccaccaggaccgcccctgctcgctcgccttcgccgaagctgcccggctcgtcgctgatgcctgggcttttctctctgatcccgttcttaaatcctcccttgacgtggacctcgatgccgccgccgcagctcgcgcgtaccactctcctccaaatctaccgcagccgcactcgcagccacatctgcctgcacggctaactccgccggtggctgctccctccccgcggtcgactccgccgctggtttctccccttccgcgggcaacatcaccgccggctgcttcccctccacggcaaactcagcggccggctgtcccccaaacaaggtcaacaccgccgccggctgcttctgctccacgatctactccaccaccaccggtttctcctcaaacactgtcaacaccgctgcctgccgctcccgctcccgctccacggtctacaccaccacctgttgttccccaaacaccgtcaagtacgctgcggccgactactccccaaacgccggtggctgcaactgtcccagcagcgaagtctggtgcggcaccttcatcaacgttctggacagtgtgctcggcctgctgccacattcaccagttcgactgccaatatgagacgtgcaaattactgtgccctagttgccgccagccatttgtggccaaggcaatggctgagccaccgcctattgtgccaggcaccgacatgtattactgcacttgggggttcttccccgttgggttccctgggtgtcctggctttgaaagaatggtcaatgcacagccatcgggagtagatcagctgaatgcgccatggcttggaagcgcaggtggtgtacatggtaatgctcagaatggggtgccaccagttagtgccccagtggtagaagtgccagtcaaggatcccatagaggtgcctgcagtgacaccgccagcgaagccgatgcgagtgaaggtgggtgcgaagaagcgtggtcgccccaagggtagcaagaacaagaagaaattatgaatgccaatgatgaacatgatggttatcatcatagatcacatgaattaactgagatatgcattcaatcacactgccattgtagtcaaccgaagcactcgtctgctggttgaattctcacttgctgttgccaggatctctaatgtggagcaagcaattttattgctgaaagacttctttttcaatggaggcctagaaatgttgcccgactaattggtccatggaaagaaggaaatactgcactttcattctggaacatgtatagcaggtgctgtatctaatgatagtcagtcgatggcgagttagtggggaacagagttacagatctacgagagcccttgtgccatggaagatgaagaacaatgagcgtgggttaagttctaggattttagctgacgaatgcctatagctactcagatgctatagtgattgcatttcccctttgatagtgtggctatagtgcttgtattgaagcggtgcagaaacagagtcagg

SEQ ID NO: 66111 - DNA, 1363 bp, Zea Mays
atgacacggggcccacttagttgcttatgtgagcaacccaacgctattattacgccacgataacccaaacaaaccaatcatcctctccgtgtaggccgcgggattccgtgtccctctccaatccggcgtagccatcgtcgccggatacaggatccggtccccgcgatggagccctcaccaacctcctcctcgccggctgtggcgcgccggttgtcgccggaggtaaggagggtgccgaagcgggcgctggaggagttgttggagcaggtccagcgggctgttgagatgctgcgcgatgccgacgctgatctcgccatctctctctcggaggagaccgcagcagcctcgccggaggccgaggaccgcaaggacgatgttggtgtcgatggagatggcatggcgacgtcgtcggttgcgagtgactccgattacgagacgacgcagatgtgtgaccttcttaaatctaaggttggatcactcgagttccttcaaaagctcaatggtattcagaagtcagtagatcagaattgtgcaggaagatgtggttgatgggatcacttcctttatggctgcatgcctgttatcacttaaaagaaccaaggacctgcctcctgatcaacttcagaaagcacttaggaagatgttttcagctgaaaagaagaaaagtaaaatcagaaaggcttgggatggaactaaactcatttataatgttacttcatggggcgccactgctgttgggttctacaataatcgagcattgcttacggtcgcaagtacagcatttcggacttcctgccgtgtgatatccaagttcctttgaatattgtgtagggtatgttagaactgcttgcgtctgcttttccgttcttcagctaataaaaaggtagcataaagtcggaatccatttgcttaaatctgtcctgtttgccagcgacatcaagatttcgcagtcgagttcgactgctaattacgtattctcttcattttttttatttgtcgcggtttagttcaaaaatgaacaaatattagcatttagcagcgcctctagtccaaagcagcgttggtattgcacaactgtaaatgttgccttgcattgaacaaacttgcttccgtgccagaattttattttggtcacctgaaattattactttgtactattttccgtatcaaacaaaactaaaatccttgatattgacctgctcgatgtacatatcagctacttgcacatttttttgagggatgcggatctttagattgacaaggatatacggatgtaagatgtgtgatgctttggaggcttgaagcgaacgcaatggtacatgaggagatgcggacaccaccgtattttttttttgcttttgga

SEQ ID NO: 66112 - DNA, 1328 bp, Zea Mays
atgacacggggcccacttagttgcttatgtgagcaacccaacgctattattacgccacgataacccaaacaaaccaatcatcctctccgtgtaggccgcgggattccgtgtccctctccaatccggcgtagccatcgtcgccggatacaggatccggtccccgcgatggagccctcaccaacctcctcctcgccggctgtggcgcgccggttgtcgccggagcctcgccggaggccgaggaccgcaaggacgatgttggtgtcgatggagatggcatggcgacgtcgtcggttgcgagtgactccgattacgagacgacgcagatgtgtgaccttcttaaatctaaggttggatcactcgagttccttcaaaagctcaatggtattcagaagtcagtagatcagaattgtgcagttgaacctgatacatcatgggatataataaagtcggatttgtgggaagatggtgactcagatgatggatatgttcttgttaaacaggaagatgtggttgatgggatcacttcctttatggctgcatgcctgttatcacttaaaagaaccaaggacctgcctcctgatcaacttcagaaagcacttaggaagatgttttcagctgaaaagaagaaaagtaaaatcagaaaggcttgggatggaactaaactcatttataatgttacttcatggggcgccactgctgttgggttctacaataatcgagcattgcttacggtcgcaagtacagcatttcggacttcctgccgtgtgatatccaagttcctttgaatattgtgtagggtatgttagaactgcttgcgtctgcttttccgttcttcagctaataaaaaggtagcataaagtcggaatccatttgcttaaatctgtcctgtttgccagcgacatcaagatttcgcagtcgagttcgactgctaattacgtattctcttcattttttttatttgtcgcggtttagttcaaaaatgaacaaatattagcatttagcagcgcctctagtccaaagcagcgttggtattgcacaactgtaaatgttgccttgcattgaacaaacttgcttccgtgccagaattttattttggtcacctgaaattattactttgtactattttccgtatcaaacaaaactaaaatccttgatattgacctgctcgatgtacatatcagctacttgcacatttttttgagggatgcggatctttagattgacaaggatatacggatgtaagatgtgtgatgctttggaggcttgaagcgaacgcaatggtacatgaggagatgcggacaccaccgtattttttttttgcttttgga

SEQ ID NO: 66113 - DNA, 1425 bp, Zea Mays
atgacacggggcccacttagttgcttatgtgagcaacccaacgctattattacgccacgataacccaaacaaaccaatcatcctctccgtgtaggccgcgggattccgtgtccctctccaatccggcgtagccatcgtcgccggatacaggatccggtccccgcgatggagccctcaccaacctcctcctcgccggctgtggcgcgccggttgtcgccggaggtaaggagggtgccgaagcgggcgctggaggagttgttggagcaggtccagcgggctgttgagatgctgcgcgatgccgacgctgatctcgccatctctctctcggaggagaccgcagcagcctcgccggaggccgaggaccgcaaggacgatgttggtgtcgatggagatggcatggcgacgtcgtcggttgcgagtgactccgattacgagacgacgcaggttggatcactcgagttccttcaaaagctcaatggtattcagaagtcagtagatcagaattgtgcagttgaacctgatacatcatgggatataataaagtcggatttgtgggaagatggtgactcagatgatggatatgttcttgttaaacaggaagatgtggttgatgggatcacttcctttatggctgcatgcctgttatcacttaaaagaaccaaggacctgcctcctgatcaacttcagaaagcacttaggaagatgttttcagctgaaaagaagaaaagtaaaatcagaaaggcttgggatggaactaaactcatttataatgttacttcatggggcgccactgctgttgggttctacaataatcgagcattgcttacggtcgcaagtacagcatttcggacttcctgccgtgtgatatccaagttcctttgaatattgtgtagggtatgttagaactgcttgcgtctgcttttccgttcttcagctaataaaaaggtagcataaagtcggaatccatttgcttaaatctgtcctgtttgccagcgacatcaagatttcgcagtcgagttcgactgctaattacgtattctcttcattttttttatttgtcgcggtttagttcaaaaatgaacaaatattagcatttagcagcgcctctagtccaaagcagcgttggtattgcacaactgtaaatgttgccttgcattgaacaaacttgcttccgtgccagaattttattttggtcacctgaaattattactttgtactattttccgtatcaaacaaaactaaaatccttgatattgacctgctcgatgtacatatcagctacttgcacatttttttgagggatgcggatctttagattgacaaggatatacggatgtaagatgtgtgatgctttggaggcttgaagcgaacgcaatggtacatgaggagatgcggacaccaccgtattttttttttgcttttgga

SEQ ID NO: 66114 - DNA, 2414 bp, Zea Mays
gtcctagtcacttctttccgaaaatgcccctgcctgttctgcacgccggttcatacaaaaagggcctcacggcacacagcatatttgctcttgctcactcgcccggtcgcccctcctcttccactcctcgctcgcagtcgcagcaagccgggaacaacacgagcagggggaggggaagaagaggagacctaccataccatagattcggagccagatactcaatcagtatcctgtaccattaccaccaggcgcgcaccaggttaccaaaatctcgtgtggagggaaatggcgcccagcagctacgaggtggcggcttccatcctcctctgcgccgaggacagcagcagcatcctggacctcgaagcggaggccgaggaggaagcgctactggcgcggagcggggagcccggcggcggcgcggagttccccgtgccgtccgaggaatgcgtcgccggtttcctggagtctgaggcagcgcacatgccgcgggaggactacgccgagaggctgcgcagcggggggatggatctccgcgtccggacggacgccatcgactggatttggaaggttcacacgtgctacggtttcggccctctcactgcctgcttggccgtcaactacctggaccgcttcctctcgctctaccagcttccggaaggcaaggcttggatgacacagctgctgtccgtggcgtgcttgtccctggccgccaagatggaggagacctacgtcccttcgtccctggacctgcagcaggccggggacgcgcggtacgtgttcgaggcgaagacgatccagaggatggagctcctggtcctcagcacgctcaagtggaggatgcaagcggtcacccccttgtcgtacgtcgactacttcctccaccggctccgaggcggcgccgcgccgagcagacgcgccgtcctccgatccgcggagctcatcctgtgcatcgccagagggacgcactgcttggatttcaggccctcggagatcgccttggccgtcgccgccaccgtggccggcgaagagcgcgccgtggacatcgacagggccttcacccaccgtgtacataaggtatacgcgtgtacctgcctcagcagacgttctcgctagatttgtcgtcggattcgatcggctagcgtctttcatcaatgcagcgcaatgcagtccgttagcgtttaccgcatgcaatgcatcgaagccgtaggtttgcggccgtccttgacttgcctgtgcagcaactagccactagggcacacctgccgaagcgcgtgtgagccgcatttacaacagccacggcgatttaataatgccttgttgctttgcgctgcatactgcggctgcaggagagggtgtcgcgatgcctcgaagcgatccagcaggccaccgccaccatggccctgccgcagccgctgaaaagtgaaggcccgagcagcagcggccgcagggcctcgtcttcctcggccaccgtgccgcggagccccaccggggtgctggacgctggctgcctgagctacaggagagccgccgccgccgccgcctcgcacgcgagctccagctggcgcgacgaggacgacgacgactgccccccggctgtctgcagcaagaggaggaagattagcagatgattaaagccaatgatggacggatgaaaaagtcaagcggtttttgatcgcactgactgaagggtttggtttgctgtgggagcctccgacgccggatttcaaccaaagcgcctgaaaggcaaaaaagaggcgcagacagccaaaaaaaagcagggcatttcggacgtgacggatccggcaggcacaaagacgtagtacgacgcccgggaataaagacggcccgaaacgcatggtagaaacgtactccgaatttcgtgagctttttttttttttgcaacagtaggcactaggcagtcagccaccacaaaagcccacaacggcatcgccagaaaaaaaaaagcaaaggttttgcaggttgacaaagctgagagagacgggacgagacgactgaaataaaaggtcctcgagacgatggggattgggcgtagtttgctctgttttgtaattttgcgaccaatttccgtttgtaaaaaaaggaaaaatgtaaaaagagaagaagaaaaaacaattcttgctcaaaaattgaaaaaaattaatagcggataatcaactagtactggaatccaccaagaagcacgaaaacaaaccaagaacgtaagacaggaacccagaagagctggaaacgggtttcttttcaaggggtcacgagctatcagcgtcagcaaccatcggtttttctcgctatggaagtttgaaacactaggacaccacctcgctgccaccgaaacatttgtttgactgcttgtctgcaaagaccatgggaaccggatccggatagggaaaaaaaag

SEQ ID NO: 66115 - DNA, 1282 bp, Zea Mays
ggagtggagtagtatgcctgaccaacgcgactggtcgactgctagcccgtagctgcgctgttggcctgttgccatgccatatccgtcgagctgaagcctgaagcaaccaccatttcgatacgcgcgagggaacggggccggccggccggccggggatcggaactgaagtgtgggcacacaagagtcacaacagggggagtgggggacattccaatcagttccctgcgtgtgagcgatgcagcgggacgcgagaagctggtcgccggcgccggccacggacgccgccggcccttacgcgatgccttcgcccgtgcagccgtcgaccaagagcacgaaggagacggtgaagaatgcgctgtcgcggtgggggcggaaggtcggggaggcgaccaggaaggccgagggcctgtcgcgcaacacatggcagcactgtgggcgactctgctctgttcatcaactctctctaactatatacaccatcgccgatcagactggttgaggacggcgccgagcatcgcggaggccgcggtggggaggatcgcgcaggggaccaaggtgctggcggagggcggccacgacaggatattccgccaggccttcagcgccccgcccgacgagcagctgcgcaagtcctacgcttgctacctctccacggccgccggcccggtgatgggcgtcctgtacctgtccacggccagggtcgccttctgcagcgacagcccgctgtcctacgaggcttccggcggcgacagaacggagtggacccactacaaggtggcgattcctcttcaacggctgcgggcggcgagcccgtcggccaacaagaccaagcccgcggagaagttcatccagctggtgtcggtggacagtcacgagttctggttcatgggcttcgtcaactacgacggcgcggttgcgcacctgcaggaagcgctgagcgggttccgcaacctgcaggcgtgacatggaggacctcaatgcaatggacagtgttgtcttgtacgtgctcgccagaactgattgatcgaacagagcgattgtgtacccgctctctgtgtgtgttgcggtgctagtgtttgcatcgtgttgtgcgtgtgcggatttgtatgacatttttttgatttggttgccattgtcagcgagagaacagtccaatcattttattcagatttcagagaagaccatggttatccatggcgatggctttgatgatcacctgcaacatcatcaacacatctattttagacgctcttttgtgttggatttgatctcaaacttatat

SEQ ID NO: 66116 - DNA, 1142 bp, Zea Mays
tttcaactcatcttgctaggtcagaaaatgtttggtgttgctgggagccctgcatatgtggcacctgaagttctttctggaagctattcggagaaggttgatatatggggtgccggtgtgctactacatgtactactacttggttcacttccatttcaagggggctctctggacgccgttttcgagtccataaagacacttgaacttgatttcagcagcaccccatgggaatcaatatcagttcttggacgggatcttattgggcgaatgctaaatcgagatgtctcttgcagaatgactgctgatgaagttcttagtaggtcacccatgggtcgtattttacacagaatgccccctgaaggtggtagctgctaatttgtgtctccctaacaaggttatagcacccaaaattccatgggacagacacaaatcagaatgtgactcagtgtcagacgcaagccaaaggtcagaggatcaggatgagtgtggcatagttgacgcattggcggcagcaataacacgtgttagaatatcagagccaaagagaagtcggctctgtagccccgcaattaccattcagcaggaatgctcgtcaaacttgaagaataatctttgcacggctttctgacctgacctagtttatagcacctgatcggaatggcgtccattcttctcgctgagaaggtcgttctgatttaggtgttgtagaggcgaggataataactcagcttttccagccagcaacaaacgtctggtatttagtgtttctttcagtgttcctgatgaaccccgcagttgtagctgctgtaaaattctgtaaatagcatggtcctttctcaagctgcgcctgggttgctaatttgtgccaccaaaaccgtttcacgcaatgttcataattcatgatcgagttgtgcaagacctgtcttaattctgatgcttgtcacccgaaactatatttggcacacgtatcatgaatagcttggtaccaccgatacccatgtgctacccgttctaaactgtggtaatggatatcattcaaatgtttcttcacaatttatttgagttcttaattaattttagtttaaaaatataatttgtttgagtttataattaattttaattcaaaaatatatagaaatata

SEQ ID NO: 66117 - DNA, 2280 bp, Zea Mays
cattcacccagcgtgcgctctcttttgctctctctatctctctcgtggcaacgactgcgcgagcgccggcgcctacgccaggtgcccaggcctccgtcggtcatttcgccaggcattcgtcgcgggctcttcgccggcgacgagcacacccaccaagttgaggattggtcctttacgagcatgttataatgggagagaacggagttcagctgacactgacctccactttgaagagcacaggcaagccacggatcaatgcggacgggctgaataatggatcacatactaccaaagtaagcatcggaaagcgtagagatatagaggagaagcatgaacacggtggcactttccaaccatcaaaaggccagaagcagcagctgtgcacaacatgtgcaaaagggcatacttgtcaatcggtcatcaaccggacaagacaaatgcgagctctaatcgactcaaagaagccttaccaagcacactctgtattcaagcacttaatggatgaggggcacaagccttcattggtcacatacacaattctactgaccgccctgacgaaccagaggatgtttgagtcgattccatcactgcttgctgaagttgaactagctggagttaggccagactccatcttcttcaatgccttgataaatgcgtttgttgaggcgaagcggatgggcgaagcgataaacacattctggaaaatgaaacattctggctgccacccaactacaagcaccttcaacacactgataaaaggttatggcattgtaggcaaacccgaagaatcacagcgcgtcttcgacatgatgggcgttgaaggatcagtcaggcctaacctcacaacatacaacattcttgtgaaggcatggtgtgatcacagaaatcttgaggaggcctggggtgttgtgggcaaaatgcaagcaggtggttttgagcctgatattgtaacttacaataccatagccagtgcatatgccaataatgacgagacatggagagcagaagagctcattgtggagattcagactagagtgcgcaccagtgagcgaacatggggcataatcattggtggttattgccgggagggcaggttggaggaagcattacgatgcgtccagcaaatgaaggatgcaggaagtgttcctaacgtcgtcatcttcaacacactgctgaagggctttcttgatgcaaatgacatggctgctgtcaataagatcctgggtctgatggagaaatttggcatcaaacctgacatcgttacctacagtcaccagttgaacacattcagctcgctgggccacatggctaaatgcatgcatgtatttgacaaaatgatcgaagcaggaattgagccagatcctcaggtatacagcattctcgccaaaggatttgttcgtgctcagcagcctgagaaagcagaagaccttctgttgcaaatgagccatcttggtctctgcccaaatgtcgtcactttcaccactgtcattagcgggtggtgcagcgtggccgacatggagagtgccatgagagtctatgacaagatgtgcaagtcaggcgtctatcccaatctcaggacatttgagactctgatctggggctacagcgaacagaagcagccatggaaagctgaggaagtccttcagatgatgcgggagactggtgtcaagccgaagcaaagcacctactgtctcattgctgatgcatggaaggctgttggtttgactgagaacatcaacaactcaaatggttcccccaatggtccttatgcaatcgagaaattggatcattcaaatgacaattgcaacgtgcgaatatcagaagacaataataacaagctgcagttttttgatgaaagtaatgggcgtgcaatgaatggccgttcacgttccagttttcttcagataacaaatgcactaggcagcagtggtatagtttctgccaaggtcatgaaggctggagaatttccatctgaaagactgaaggctatcaaaaacacatcctttccacaaggatttcaattgttgcatctcgagttttgtaggaagcagcttcggaagaatggtggattctgtagtcagagcatcaactcattcaaaatgggtttctctagcagaggatgcatttattaattcgatgtacacattgggctgaaacttaaacaaaaacaaatctcggtgttccaagtctccgcctatgatgcgggccatttttatgattcagacgcagttcctgcagtgtcaagcatttcaaacgtttaaaaaaaattccacaagcagt

SEQ ID NO: 66118 - DNA, 2092 bp, Zea Mays
cttttgctctctctatctctctcgtggcaacgactgcgcgagcgccggcgcctacgccaggtgcccaggcctccgtcggtcatttcgccaggcattcgtcgcgggctcttcgccggcgacgagcacacccaccaagagaagcatgaacacggtggcactttccaaccatcaaaaggccagaagcagcagctgtgcacaacatgtgcaaaagggcatacttgtcaatcggtcatcaaccggacaagacaaatgcgagctctaatcgactcaaagaagccttaccaagcacactctgtattcaagcacttaatggatgaggggcacaagccttcattggtcacatacacaattctactgaccgccctgacgaaccagaggatgtttgagtcgattccatcactgcttgctgaagttgaactagctggagttaggccagactccatcttcttcaatgccttgataaatgcgtttgttgaggcgaagcggatgggcgaagcgataaacacattctggaaaatgaaacattctggctgccacccaactacaagcaccttcaacacactgataaaaggttatggcattgtaggcaaacccgaagaatcacagcgcgtcttcgacatgatgggcgttgaaggatcagtcaggcctaacctcacaacatacaacattcttgtgaaggcatggtgtgatcacagaaatcttgaggaggcctggggtgttgtgggcaaaatgcaagcaggtggttttgagcctgatattgtaacttacaataccatagccagtgcatatgccaataatgacgagacatggagagcagaagagctcattgtggagattcagactagagtgcgcaccagtgagcgaacatggggcataatcattggtggttattgccgggagggcaggttggaggaagcattacgatgcgtccagcaaatgaaggatgcaggaagtgttcctaacgtcgtcatcttcaacacactgctgaagggctttcttgatgcaaatgacatggctgctgtcaataagatcctgggtctgatggagaaatttggcatcaaacctgacatcgttacctacagtcaccagttgaacacattcagctcgctgggccacatggctaaatgcatgcatgtatttgacaaaatgatcgaagcaggaattgagccagatcctcaggtatacagcattctcgccaaaggatttgttcgtgctcagcagcctgagaaagcagaagaccttctgttgcaaatgagccatcttggtctctgcccaaatgtcgtcactttcaccactgtcattagcgggtggtgcagcgtggccgacatggagagtgccatgagagtctatgacaagatgtgcaagtcaggcgtctatcccaatctcaggacatttgagactctgatctggggctacagcgaacagaagcagccatggaaagctgaggaagtccttcagatgatgcgggagactggtgtcaagccgaagcaaagcacctactgtctcattgctgatgcatggaaggctgttggtttgactgagaacatcaacaactcaaatggttcccccaatggtccttatgcaatcgagaaattggatcattcaaatgacaattgcaacgtgcgaatatcagaagacaataataacaagctgcagttttttgatgaaagtaatgggcgtgcaatgaatggccgttcacgttccagttttcttcagataacaaatgcactaggcagcagtggtatagtttctgccaaggtcatgaaggctggagaatttccatctgaaagactgaaggctatcaaaaacacatcctttccacaaggatttcaattgttgcatctcgagttttgtaggaagcagcttcggaagaatggtggattctgtagtcagagcatcaactcattcaaaatgggtttctctagcagaggatgcatttattaattcgatgtacacattgggctgaaacttaaacaaaaacaaatctcggtgttccaagtctccgcctatgatgcgggccatttttatgattcagacgcagttcctgcagtgtcaagcatttcaaacgtttaaaaaaaattccacaagcagt

SEQ ID NO: 66119 - DNA, 2347 bp, Zea Mays
ctccgtttcacaacagctgaagctgaataattttggcacaaatcgttttcacccgctgaagctgaatagtccatatgtctccatcaatctgttctccctttgccgatgccggacgccccatttttggcgccgttgccaggcgaccgaattatggcctaatcacaccaaaacccgctcccttccaaaccttcccatcagccaatcttatattgcccgaccgagccgagcccatctctttcgtactcgcgttgccactcccgacgcgcaacgggccagcggcgcaggcagctgcgttcgcgtcgcgtcgcgtgtccctccagccccgtagcgccttccagctccaacctgttgctacaactacaagaagccgccacacaaccaccgcgctcccaacggctcaccgtcaccggccgggaggcgatcccatgggagagacgacctaacttttctcggattctagctcgggtctgcactctgcacgctgctgctgctggtttcttgagaggcgagaccctgaagggatggcactggaggccgtggtgctttcccagcaaggcagtcgctttgggtgtggtgccatggcagcaggagggccttggagtggcctgttttttagtggaatggagggcgtggtcgagatcggtagtggcgctggcggcggccgggacgtggccgggtgctcgccgccacagctcctgcaggagccggctgcccgcgcgctgcctgtggcgtcgtccgtggggagcgcgagtggcggcgccggtcaggatgccccggcggcacttgctgtgaccgcgacagcggcggccggaaccggaagaaggaagcggcgaaggatgaggccactgaagaacgaggaggaagtggagagccagcgcatggtccacattgccgtggagcgcaaccggcgcaagcagatgaacgagtacctcgccgcgctccgctccctcatgccgcccgcctacacgcaacggggcgatcaggcgtccatcgtcggcggcgcgatcaacttcgtcaaggagctggagcagctgctccagtcgctggaggcgcagcagaggcgttcctcccggcggcagggccccgcgtgcgccgtcgatccggacgacgcagggccgttcgcggacttcttcaccttcccgcagtactcaatgtgcgctgccgcggcggccccatcagagaaccccggcgccgacgccgacgccgagcaggaggcgtccgggtcgaagccgtcgggcgtggccgacgtggaggcgaccatggtggagagccacgccaacctgcgggtgctgtcccggcgccggccgaggcagctgctgcggctggtgctggggctccagggccaccgcctcaccgtgctccacctcaacatgagcagcgccggccacatggtgctctactcgttcagcctcaaggtaactccacaagaccacaaccacaaccttcctcctcctcctacatttcctcgtaaacaatcacaggcagagataaagctagctacccgatggctctcagtccaaggagtatagtacccgtacctggttcgcaataccacgcctggcctggccaggaagtcgggactcgggaggcaagttggcgcctaggtttccgtgccctcttttggatcttgccttgtctccaacagccgctccaaattttccttcccgttccgcgtctgtttactctattgctattgtttataaataaaaatggagcagatcaaggttgcaattctgtgacttttgtttgcaattctgctgatggatcgtcattatatatatggtgagcacaggtggaggatgattgcccgctcacctcagtggatgagattgcaggtgcggctcatcagatcgtcgagaagatcaacgaagaacaaggcggcggcagcttagagtagtgctttcttgcggtgcatgttatcttttttctttagctcctgtagcaagtgaagtggttttctcccttccctgtgtctgtgtgcaagcgaataatgtactgatcagcttagccggtctctgaaacagtagtatgcatcagaacctatctttgttcatagataatgtccatggccaagcatgcatgcaaggtctccgaaacagctctctccatttccatggtgtgtgtggtggtctggtggagacgtgggagggggagaaaggcatccatgacattcccttggggggctgggggccttgtgggcgctaccgtgttctgatgttcaccacacgatctgacagaactgggctggacaggtgcagacgctgttccagacctggaagaattcttctgtatttctgttccccttgtgaagcaagctagcaccgccccatgccccccaaagcgccaa

SEQ ID NO: 66120 - DNA, 2568 bp, Zea Mays
agaaaatatacttccataacttgaaagttcttaatcctagcaagattcaattcaagtgtcgtccccctgatcgaatccaggcacaacttactctctcgtgtatgatttgcttccttctgaactgagccgcgagggatgcttgcaaggttaaccatggttgcggcttgaccgcactgccggcgtgacctaacctaaccgagttcccggacccgagctccccgtcgcccccctctctctcgctcacgccctttattaacgcacagaggacagcacactgtattgcgggaactgaaagcaaaccaaaaaagaaagagagggggagagacacagaggcctcactccacacactgtcttgtctctcagtcccagagctttcttggatcgcgaggaatccactggaaattttgcaattgtagtagagaactgtatcgtccgacgaaggtgcatggtgttggccatgggtcacggcagggaacagagacgagcaggtcggcgctctccccccagctcattgatcctgtcctcgctataaggtagtcctgcggtggcctccgaatttcactcgatcgaacacgacatgaagcggccacgcggcgccagtccccctctggctgcgatgaccaatccgaacgatgatggttacggcgtggtcgggatggaggcggacgcagacgcggacgcggacgaggagatgatggcgtgcggcggcggcggggagaagaagcggcgcctgagctccgagcaggtgcgcgcgctggagcggagcttcgaggtggagaacaagctggagccggagcgcaaggcgcggctggcgcgcgacctcggcctgcagccgcgccaggtcgccgtctggttccagaaccgccgcgcccgctggaagaccaagcagctggagcgcgactactccgcgctccgccagtcctacgacgcgctgcggcacgaccacgacgcgctgcgccgcgacaaggacgccctcctcgccgagatcaaggagctcaaggcgaagctcggggacgaggaggcagcggcgagcttcacgtcggtcaaggcggagccggcggcctcggacgggcctccccccgtaggggtggggtcgtccgagagtgactccagcgcggtgctgaacgacgcggacccgcccgtggcggaggcgccggtgccggaggtacggggtactcttcttgacgcgcccggcgccgtggcggcgaaccatggcggcgtgttcttccacgggagtttcctgaaggtggaggaggacgagacggggctcctggacgacgatgagccctgcggcgggttcttctccgtggagcagccgccgccgatggcgtggtggaccgagcccacggaacactggaactgaaccgaggcggaggtagatgcagcgcagcgtagactcgggatctgggccgagcggtggaggaataaagaattcggagcgagaggcgggggcttttctgcaaattttgtaaaatggagttttacgtagccctctttcgtcaattctcgcgcgaatattttagcagtagcagtagtctttaggaacccagtcgagatcagtacctggttgcgtttggactcgaatgcaaaaaaaaatgcaagaaaaagagatgagaccaaacactgatgcagaaaggggagagagggacagtgggaagaggagtgtagaggaagagctgagcgaggtagggagtaaaggacaagctgtatgtcactgttagtgggcccagggccacgtgaaagtcaggcattgttggcgcccaattgaccgccggacttgtcagtgatgcggatcggcgacgtgaacgtgtctggccgtgcgctcccccaatggcctcttccgcggaagcgtggctctggctccttcgtcgacctgtcgtgcgtctctgtatctaattttggatgctcgccgacgccgctagatagctgtttggatgccgtgccgtgagaaatggcgatcgtttttgtgccctcttgctcgagcagatgcttgtccttgttataaaaaaaaaccctgcgaggtgttatataggctagtgtggggttctatctttttctccaataaatatgtagccctttataataactaatgaataaaagataacgcaagaaaaagattttctaccattgttttctttgtttctgtgtttacgttacgggaacaggtctcacgcatccattaccgacgagagtgtttgaggttcgaatttgagatgcgcgacagtgtcgttacccaaacacttcatcatcactgttctatcctaacgtcattatggatccaatctgcatcaactctccatcaatcatacaagtctttggccttgttgaactactagcatgaccagaggcatggttggcgctgctggcgtgactagcgacgtggacacccgcatcgatggcaccgatggcggtcatcatcctcgtcaaaacgtaacaaaggtgacaagagataaggcagatctagttctattatctaaaaattggaatgaagagaatatagaaatttgtttaaaaaaacgggacgaaggtagtagtgatgacagcatcttgagtttactcaagctttag

SEQ ID NO: 66121 - DNA, 797 bp, Zea Mays
tgtccctgctctcttctatgccattgttgtagccctctttatctcaagcgccgacgtgtatctacgatcgagagagcaggtctccgaaatcagttgccttcgagattctgcaccaaaaggaggcaaattaaataaggtttttggaagcgccttcacacgactgctcgctttcttctcgatgaccctgttgtttcgatgttgtcgaccttattgcttccacctacatcgacaaccagaaatttcctgatttaactatggctggttttgccgacgcgctgaagccagaaaaactctctgatatgcacttcaagaggtggcaatccaaggtcacgctctgccttgctgctatgaatgtgttccatattagtaaatgcaaacctgaggacgtactgactcatgaagaggagaaaaaatacgacgataccaatactatatatatgggagcagttcttagggtccttgttaactgtttgcttgattcaaaattgtgaatatgcattatacaaacgagaaggagttgtgggatgtacttactactaagtatagtgcatcggatgctggtagtgaaatgtatatcatgaagagctttcatgattataagatggtcgataatcactctattgtggagtaaactcatgaaatacaatgtattgccaaggagctcgaccacattaagtttgtccttcctgactgatttgtggctagatgcattattgtaaagttgccttattcatggagaaacttcgtcgcttatcttacacataagagacaagagatatcagttgaaaatctgatag

SEQ ID NO: 66122 - DNA, 2439 bp, Zea Mays
acagctcatcccccggctgctcgctttttatcacttctcccttctcgaaacacagacgaacacctttcttttattactctcctgtccccctccctctctcatcaaccatcacctccgtcccgtccgcctcccattcgctcaaaccggaaggaggaggagggcgaattaaagcctcgcctcccgcccccgcccccgcccccgccccccaccgcgtcgccggcgccgatggccgacggcggggccggcgcgtaccgggagttcaaggcgctggcggaggcggcggaccgcaagttcgcgcgcgcgcgggacctgccgctctacggcggcggggaccaccacagccggaaggcgttcaaggcctacacgcggctctggcgcctgcagcaggagcgccgccgggagctcgtcgccgccggcctccgccgctgggagatcggcgaggtggcctcccggatcggccagctctactacgcgcgctacctccgcgccgccgagccgcgctcgctcgtcggcgcctacgtcttctacgaggccatatacagccgcggctacttcggcgcggccgcggcagcggtggggacggacggcggcggcggcggcgtcagccgccaccaggcgctcctgatccggtacaaggagcttcggttcatcgcgcggttcctcgtcgtggccatgctgatgcggcgggccgaggcggtggaccacctcgccgcacgcctacgtgcgctcgtcgaggagaccaaggctgcgtaccccaaaacaaacttcaaggaatggaagcaagtacttcaagaacttggcagatttttgaaggctgatggagcatataaaggatctagatcactaagatatgacaacttatttgattcttatccatcgaaccttgtatctattgcacgattccattcaaaaagggtgctcaaactgaaggaagctgtgctaacaagctaccgcagaaatgagatcaagttcacagaactaactttggatacattcagaatgctacagtgtttagagtgggaacccactgggtcttatcagattgctgctaaagaacttacagaaaatggcactgtaagtgatcagagtggaccctctggtctgattgatattcaactgtcaacagaaatatctgatggaagtcttccttcaaatcctcaaaaggttctagcaacaatttgtgaagagctctctcaagatagcattttactcatctatatatcagcgtcagggtctgctgagcagagttttgctagtcaaaagtttggctctagctcatctcgtgcgagggctgcctctgccttccccactgataagccaaactcgcataacagttctgataatcatctatggcttggcccccgtggaagtggaggtccaaacaatctttatccagatgatctaattccatttacaagatatccactgttccttgtaattgatagtgaaaatagccatgcattcaaggcaggtcatacataattcagagaagggagaaccagctgctttattactttctcccaggacatcatcagccatgcctggagtagaatccacggctcacggaagccagtttacatacttcctcactgctccaatgcaagccttctgccaactagcgggaataacttctgacatagacactgatacatacgcaaatgcagagaacatacttttctctgctttggaagaatatgaaggaatactctgcacttctgttggattaaacaatgtctgggggcaaattttaccagacccatttctcagacggctgattctcaggtttattttctgccgggcagtgcttttctatttccactcagatgagcacgaatatctaccgacctgcttacctagtcttccagagtcagtctccccgcatgcagaggccataagaactcctatcctttcgcttgcagaaaaccttgtcgtcagcgaccggtttgacttccgagactccacacgcaacaagaaatgatgaccagcagcaataaccataactcatgccttctgtagatacctctgtggtaaatatagtccagcgatttgttgattgttttgcatttatacagccaacggagcaattagtcagcaccaattagcagcggcatccgcgcctggatggtgtgaattgaatggcgatatgaagaattttgacctgtctccgttgagcgtctgtacaagtttgtttaggtgttctctaatttgctctaggcactgtaggcatgtagccttgtcgtcgattttttttctattttgttgtcttggagaggacggtttgtaagctggaagaggcgtttttaaagtactctagaaggcagattgttttgtagagtttggttaactcaccatatttgacggcagtttacggttttccaattttcgtagcgctacgtttgcctcgtgctcctgttggattaatgtgggcttggcccaaat

SEQ ID NO: 66123 - DNA, 2435 bp, Zea Mays
acagctcatcccccggctgctcgctttttatcacttctcccttctcgaaacacagacgaacacctttcttttattactctcctgtccccctccctctctcatcaaccatcacctccgtcccgtccgcctcccattcgctcaaaccggaaggaggaggagggcgaattaaagcctcgcctcccgcccccgcccccgcccccgccccccaccgcgtcgccggcgccgatggccgacggcggggccggcgcgtaccgggagttcaaggcgctggcggaggcggcggaccgcaagttcgcgcgcgcgcgggacctgccgctctacggcggcggggaccaccacagccggaaggcgttcaaggcctacacgcggctctggcgcctgcagcaggagcgccgccgggagctcgtcgccgccggcctccgccgctgggagatcggcgaggtggcctcccggatcggccagctctactacgcgcgctacctccgcgccgccgagccgcgctcgctcgtcggcgcctacgtcttctacgaggccatatacagccgcggctacttcggcgcggccgcggcagcggtggggacggacggcggcggcggcggcgtcagccgccaccaggcgctcctgatccggtacaaggagcttcggttcatcgcgcggttcctcgtcgtggccatgctgatgcggcgggccgaggcggtggaccacctcgccgcacgcctacgtgcgctcgtcgaggagaccaaggctgcgtaccccaaaacaaacttcaaggaatggaagcaagtacttcaagaacttggcagatttttgaaggctgatggagcatataaaggatctagatcactaagatatgacaacttatttgattcttatccatcgaaccttgtatctattgcacgattccattcaaaaagggtgctcaaactgaaggaagctgtgctaacaagctaccgcagaaatgagatcaagttcacagaactaactttggatacattcagaatgctacagtgtttagagtgggaacccactgggtcttatcagattgctgctaaagaacttacagaaaatggcactgtaagtgatcagagtggaccctctggtctgattgatattcaactgtcaacagaaatatctgatggaagtcttccttcaaatcctcaaaaggttctagcaacaatttgtgaagagctctctcaagatagcattttactcatctatatatcagcgtcagggtctgctgagcagagttttgctagtcaaaagtttggctctagctcatctcgtgcgagggctgcctctgccttccccactgataagccaaactcgcataacagttctgataatcatctatggcttggcccccgtggaagtggaggtccaaacaatctttatccagatgatctaattccatttacaagatatccactgttccttgtaattgatagtgaaaatagccatgcattcaaggtcatacataattcagagaagggagaaccagctgctttattactttctcccaggacatcatcagccatgcctggagtagaatccacggctcacggaagccagtttacatacttcctcactgctccaatgcaagccttctgccaactagcgggaataacttctgacatagacactgatacatacgcaaatgcagagaacatacttttctctgctttggaagaatatgaaggaatactctgcacttctgttggattaaacaatgtctgggggcaaattttaccagacccatttctcagacggctgattctcaggtttattttctgccgggcagtgcttttctatttccactcagatgagcacgaatatctaccgacctgcttacctagtcttccagagtcagtctccccgcatgcagaggccataagaactcctatcctttcgcttgcagaaaaccttgtcgtcagcgaccggtttgacttccgagactccacacgcaacaagaaatgatgaccagcagcaataaccataactcatgccttctgtagatacctctgtggtaaatatagtccagcgatttgttgattgttttgcatttatacagccaacggagcaattagtcagcaccaattagcagcggcatccgcgcctggatggtgtgaattgaatggcgatatgaagaattttgacctgtctccgttgagcgtctgtacaagtttgtttaggtgttctctaatttgctctaggcactgtaggcatgtagccttgtcgtcgattttttttctattttgttgtcttggagaggacggtttgtaagctggaagaggcgtttttaaagtactctagaaggcagattgttttgtagagtttggttaactcaccatatttgacggcagtttacggttttccaattttcgtagcgctacgtttgcctcgtgctcctgttggattaatgtgggcttggcccaaat

SEQ ID NO: 66124 - DNA, 2330 bp, Zea Mays
acagctcatcccccggctgctcgctttttatcacttctcccttctcgaaacacagacgaacacctttcttttattactctcctgtccccctccctctctcatcaaccatcacctccgtcccgtccgcctcccattcgctcaaaccggaaggaggaggagggcgaattaaagcctcgcctcccgcccccgcccccgcccccgccccccaccgcgtcgccggcgccgatggccgacggcggggccggcgcgtaccgggagttcaaggcgctggcggaggcggcggaccgcaagttcgcgcgcgcgcgggacctgccgctctacggcggcggggaccaccacagccggaaggcgttcaaggcctacacgcggctctggcgcctgcagcaggagcgccgccgggagctcgtcgccgccggcctccgccgctgggagatcggcgaggtggcctcccggatcggccagctctactacgcgcgctacctccgcgccgccgagccgcgctcgctcgtcggcgcctacgtcttctacgaggccatatacagccgcggctacttcggcgcggccgcggcagcggtggggacggacggcggcggcggcggcgtcagccgccaccaggcgctcctgatccggtacaaggagcttcggttcatcgcgcggttcctcgtcgtggccatgctgatgcggcgggccgaggcggtggaccacctcgccgcacgcctacgtgcgctcgtcgaggagaccaaggctgcgtaccccaaaacaaacttcaaggaatggaagcaagtacttcaagaacttggcagatttttgaaggctgatggagcatataaaggatctagatcactaagatatgacaacttatttgattcttatccatcgaaccttgtatctattgcacgattccattcaaaaagggtgctcaaactgaaggaagctgtgctaacaagctaccgcagaaatgagatcaagttcacagaactaactttggatacattcagaatgctacagtgtttagagtgggaacccactgggtcttatcagattgctgctaaagaacttacagaaaatggcactgtaagtgatcagagtggaccctctggtctgattgatattcaactgtcaacagaaatatctgatggaagtcttccttcaaatcctcaaaaggcaatcatatatcatcctacagccgctcatcttttagcagttctagcaacaatttgtgaagagctctctcaagatagcattttactcatctatatatcagcgtcaggtccaaacaatctttatccagatgatctaattccatttacaagatatccactgttccttgtaattgatagtgaaaatagccatgcattcaaggtcatacataattcagagaagggagaaccagctgctttattactttctcccaggacatcatcagccatgcctggagtagaatccacggctcacggaagccagtttacatacttcctcactgctccaatgcaagccttctgccaactagcgggaataacttctgacatagacactgatacatacgcaaatgcagagaacatacttttctctgctttggaagaatatgaaggaatactctgcacttctgttggattaaacaatgtctgggggcaaattttaccagacccatttctcagacggctgattctcaggtttattttctgccgggcagtgcttttctatttccactcagatgagcacgaatatctaccgacctgcttacctagtcttccagagtcagtctccccgcatgcagaggccataagaactcctatcctttcgcttgcagaaaaccttgtcgtcagcgaccggtttgacttccgagactccacacgcaacaagaaatgatgaccagcagcaataaccataactcatgccttctgtagatacctctgtggtaaatatagtccagcgatttgttgattgttttgcatttatacagccaacggagcaattagtcagcaccaattagcagcggcatccgcgcctggatggtgtgaattgaatggcgatatgaagaattttgacctgtctccgttgagcgtctgtacaagtttgtttaggtgttctctaatttgctctaggcactgtaggcatgtagccttgtcgtcgattttttttctattttgttgtcttggagaggacggtttgtaagctggaagaggcgtttttaaagtactctagaaggcagattgttttgtagagtttggttaactcaccatatttgacggcagtttacggttttccaattttcgtagcgctacgtttgcctcgtgctcctgttggattaatgtgggcttggcccaaat

SEQ ID NO: 66125 - DNA, 2478 bp, Zea Mays
acagctcatcccccggctgctcgctttttatcacttctcccttctcgaaacacagacgaacacctttcttttattactctcctgtccccctccctctctcatcaaccatcacctccgtcccgtccgcctcccattcgctcaaaccggaaggaggaggagggcgaattaaagcctcgcctcccgcccccgcccccgcccccgccccccaccgcgtcgccggcgccgatggccgacggcggggccggcgcgtaccgggagttcaaggcgctggcggaggcggcggaccgcaagttcgcgcgcgcgcgggacctgccgctctacggcggcggggaccaccacagccggaaggcgttcaaggcctacacgcggctctggcgcctgcagcaggagcgccgccgggagctcgtcgccgccggcctccgccgctgggagatcggcgaggtggcctcccggatcggccagctctactacgcgcgctacctccgcgccgccgagccgcgctcgctcgtcggcgcctacgtcttctacgaggccatatacagccgcggctacttcggcgcggccgcggcagcggtggggacggacggcggcggcggcggcgtcagccgccaccaggcgctcctgatccggtacaaggagcttcggttcatcgcgcggttcctcgtcgtggccatgctgatgcggcgggccgaggcggtggaccacctcgccgcacgcctacgtgcgctcgtcgaggagaccaaggctgcgtaccccaaaacaaacttcaaggaatggaagcaagtacttcaagaacttggcagatttttgaaggctgatggagcatataaaggatctagatcactaagatatgacaacttatttgattcttatccatcgaaccttgtatctattgcacgattccattcaaaaagggtgctcaaactgaaggaagctgtgctaacaagctaccgcagaaatgagatcaagttcacagaactaactttggatacattcagaatgctacagtgtttagagtgggaacccactgggtcttatcagattgctgctaaagaacttacagaaaatggcactgtaagtgatcagagtggaccctctggtctgattgatattcaactgtcaacagaaatatctgatggaagtcttccttcaaatcctcaaaaggcaatcatatatcatcctacagccgctcatcttttagcagttctagcaacaatttgtgaagagctctctcaagatagcattttactcatctatatatcagcgtcagggtctgctgagcagagttttgctagtcaaaagtttggctctagctcatctcgtgcgagggctgcctctgccttccccactgataagccaaactcgcataacagttctgataatcatctatggcttggcccccgtggaagtggaggtccaaacaatctttatccagatgatctaattccatttacaagatatccactgttccttgtaattgatagtgaaaatagccatgcattcaaggcaggtcatacataattcagagaagggagaaccagctgctttattactttctcccaggacatcatcagccatgcctggagtagaatccacggctcacggaagccagtttacatacttcctcactgctccaatgcaagccttctgccaactagcgggaataacttctgacatagacactgatacatacgcaaatgcagagaacatacttttctctgctttggaagaatatgaaggaatactctgcacttctgttggattaaacaatgtctgggggcaaattttaccagacccatttctcagacggctgattctcaggtttattttctgccgggcagtgcttttctatttccactcagatgagcacgaatatctaccgacctgcttacctagtcttccagagtcagtctccccgcatgcagaggccataagaactcctatcctttcgcttgcagaaaaccttgtcgtcagcgaccggtttgacttccgagactccacacgcaacaagaaatgatgaccagcagcaataaccataactcatgccttctgtagatacctctgtggtaaatatagtccagcgatttgttgattgttttgcatttatacagccaacggagcaattagtcagcaccaattagcagcggcatccgcgcctggatggtgtgaattgaatggcgatatgaagaattttgacctgtctccgttgagcgtctgtacaagtttgtttaggtgttctctaatttgctctaggcactgtaggcatgtagccttgtcgtcgattttttttctattttgttgtcttggagaggacggtttgtaagctggaagaggcgtttttaaagtactctagaaggcagattgttttgtagagtttggttaactcaccatatttgacggcagtttacggttttccaattttcgtagcgctacgtttgcctcgtgctcctgttggattaatgtgggcttggcccaaat

SEQ ID NO: 66126 - DNA, 2464 bp, Zea Mays
acagctcatcccccggctgctcgctttttatcacttctcccttctcgaaacacagacgaacacctttcttttattactctcctgtccccctccctctctcatcaaccatcacctccgtcccgtccgcctcccattcgctcaaaccggaaggaggaggagggcgaattaaagcctcgcctcccgcccccgcccccgcccccgccccccaccgcgtcgccggcgccgatggccgacggcggggccggcgcgtaccgggagttcaaggcgctggcggaggcggcggaccgcaagttcgcgcgcgcgcgggacctgccgctctacggcggcggggaccaccacagccggaaggcgttcaaggcctacacgcggctctggcgcctgcagcaggagcgccgccgggagctcgtcgccgccggcctccgccgctgggagatcggcgaggtggcctcccggatcggccagctctactacgcgcgctacctccgcgccgccgagccgcgctcgctcgtcggcgcctacgtcttctacgaggccatatacagccgcggctacttcggcgcggccgcggcagcggtggggacggacggcggcggcggcggcgtcagccgccaccaggcgctcctgatccggtacaaggagcttcggttcatcgcgcggttcctcgtcgtggccatgctgatgcggcgggccgaggcggtggaccacctcgccgcacgcctacgtgcgctcgtcgaggagaccaaggctgcgtaccccaaaacaaacttcaaggaatggaagcaagtacttcaagaacttggcagatttttgaaggctgatggagcatataaaggatctagatcactaagatatgacaacttatttgattcttatccatcgaaccttgtatctattgcacgattccattcaaaaagggtgctcaaactgaaggaagctgtgctaacaagctaccgcagaaatgagatcaagttcacagaactaactttggatacattcagaatgctacagtgtttagagtgggaacccactgggtcttatcagattgctgctaaagaacttacagaaaatggcactgtaagtgatcagagtggaccctctggtctgattgatattcaactgtcaacagaaatatctgatggaagtcttccttcaaatcctcaaaaggcaatcatatatcatcctacagccgctcatcttttagcagttctagcaacaatttgtgaagagctctctcaagatagcattttactcatctatatatcagcgtcagagttttgctagtcaaaagtttggctctagctcatctcgtgcgagggctgcctctgccttccccactgataagccaaactcgcataacagttctgataatcatctatggcttggcccccgtggaagtggaggtccaaacaatctttatccagatgatctaattccatttacaagatatccactgttccttgtaattgatagtgaaaatagccatgcattcaaggcaggtcatacataattcagagaagggagaaccagctgctttattactttctcccaggacatcatcagccatgcctggagtagaatccacggctcacggaagccagtttacatacttcctcactgctccaatgcaagccttctgccaactagcgggaataacttctgacatagacactgatacatacgcaaatgcagagaacatacttttctctgctttggaagaatatgaaggaatactctgcacttctgttggattaaacaatgtctgggggcaaattttaccagacccatttctcagacggctgattctcaggtttattttctgccgggcagtgcttttctatttccactcagatgagcacgaatatctaccgacctgcttacctagtcttccagagtcagtctccccgcatgcagaggccataagaactcctatcctttcgcttgcagaaaaccttgtcgtcagcgaccggtttgacttccgagactccacacgcaacaagaaatgatgaccagcagcaataaccataactcatgccttctgtagatacctctgtggtaaatatagtccagcgatttgttgattgttttgcatttatacagccaacggagcaattagtcagcaccaattagcagcggcatccgcgcctggatggtgtgaattgaatggcgatatgaagaattttgacctgtctccgttgagcgtctgtacaagtttgtttaggtgttctctaatttgctctaggcactgtaggcatgtagccttgtcgtcgattttttttctattttgttgtcttggagaggacggtttgtaagctggaagaggcgtttttaaagtactctagaaggcagattgttttgtagagtttggttaactcaccatatttgacggcagtttacggttttccaattttcgtagcgctacgtttgcctcgtgctcctgttggattaatgtgggcttggcccaaat

SEQ ID NO: 66127 - DNA, 2460 bp, Zea Mays
acagctcatcccccggctgctcgctttttatcacttctcccttctcgaaacacagacgaacacctttcttttattactctcctgtccccctccctctctcatcaaccatcacctccgtcccgtccgcctcccattcgctcaaaccggaaggaggaggagggcgaattaaagcctcgcctcccgcccccgcccccgcccccgccccccaccgcgtcgccggcgccgatggccgacggcggggccggcgcgtaccgggagttcaaggcgctggcggaggcggcggaccgcaagttcgcgcgcgcgcgggacctgccgctctacggcggcggggaccaccacagccggaaggcgttcaaggcctacacgcggctctggcgcctgcagcaggagcgccgccgggagctcgtcgccgccggcctccgccgctgggagatcggcgaggtggcctcccggatcggccagctctactacgcgcgctacctccgcgccgccgagccgcgctcgctcgtcggcgcctacgtcttctacgaggccatatacagccgcggctacttcggcgcggccgcggcagcggtggggacggacggcggcggcggcggcgtcagccgccaccaggcgctcctgatccggtacaaggagcttcggttcatcgcgcggttcctcgtcgtggccatgctgatgcggcgggccgaggcggtggaccacctcgccgcacgcctacgtgcgctcgtcgaggagaccaaggctgcgtaccccaaaacaaacttcaaggaatggaagcaagtacttcaagaacttggcagatttttgaaggctgatggagcatataaaggatctagatcactaagatatgacaacttatttgattcttatccatcgaaccttgtatctattgcacgattccattcaaaaagggtgctcaaactgaaggaagctgtgctaacaagctaccgcagaaatgagatcaagttcacagaactaactttggatacattcagaatgctacagtgtttagagtgggaacccactgggtcttatcagattgctgctaaagaacttacagaaaatggcactgtaagtgatcagagtggaccctctggtctgattgatattcaactgtcaacagaaatatctgatggaagtcttccttcaaatcctcaaaaggcaatcatatatcatcctacagccgctcatcttttagcagttctagcaacaatttgtgaagagctctctcaagatagcattttactcatctatatatcagcgtcagagttttgctagtcaaaagtttggctctagctcatctcgtgcgagggctgcctctgccttccccactgataagccaaactcgcataacagttctgataatcatctatggcttggcccccgtggaagtggaggtccaaacaatctttatccagatgatctaattccatttacaagatatccactgttccttgtaattgatagtgaaaatagccatgcattcaaggtcatacataattcagagaagggagaaccagctgctttattactttctcccaggacatcatcagccatgcctggagtagaatccacggctcacggaagccagtttacatacttcctcactgctccaatgcaagccttctgccaactagcgggaataacttctgacatagacactgatacatacgcaaatgcagagaacatacttttctctgctttggaagaatatgaaggaatactctgcacttctgttggattaaacaatgtctgggggcaaattttaccagacccatttctcagacggctgattctcaggtttattttctgccgggcagtgcttttctatttccactcagatgagcacgaatatctaccgacctgcttacctagtcttccagagtcagtctccccgcatgcagaggccataagaactcctatcctttcgcttgcagaaaaccttgtcgtcagcgaccggtttgacttccgagactccacacgcaacaagaaatgatgaccagcagcaataaccataactcatgccttctgtagatacctctgtggtaaatatagtccagcgatttgttgattgttttgcatttatacagccaacggagcaattagtcagcaccaattagcagcggcatccgcgcctggatggtgtgaattgaatggcgatatgaagaattttgacctgtctccgttgagcgtctgtacaagtttgtttaggtgttctctaatttgctctaggcactgtaggcatgtagccttgtcgtcgattttttttctattttgttgtcttggagaggacggtttgtaagctggaagaggcgtttttaaagtactctagaaggcagattgttttgtagagtttggttaactcaccatatttgacggcagtttacggttttccaattttcgtagcgctacgtttgcctcgtgctcctgttggattaatgtgggcttggcccaaat

SEQ ID NO: 66128 - DNA, 811 bp, Zea Mays
cctcatcaccggagctcagatgtcgactgtccggacgccatccccgtccttggttgccacggcgagttgttagcaacgcgacagttgcgccgtatctcccctttcctggggttttggagctcccccatctttatcatcccctcgatgaaggccctgaagaaggcgtcctggtccttgctgagccgctcgacgacgcgacgggtcctggtgttgtcagagaagagcgtctggtcggagttgaggaagccgcggagcgcgacgaggtcctcgaagtactggttgtcgaagacgcgtggggtggcgtctaggcctcccgtgacctcctcgtcgccgcccttggggcagagtgcgtcgagcgagcggcggtaggcggtgtccatgtgcgggtcggggcggccggatccagactggttgtagaggcggaagacgatggagaagcagcgggcctcgccgatggagtgcgagcccgagagcgcgaccaggtcggtgacgctgaggttgagccccgcgaagagccggatgagagcgctcgcgtttgcgcgcgggctcggcatgatgttgtccgcgtcctcctggctcgccgtcatgctgtcctcgcgcccgagccgcacctcccagttaggcccaccggtctgtgacaacatatccgaacagatgaaagagtcagatgacgtcaaacgatctgacccactcttcagtcacatagaaacgatatcaagtttgactaaatatatataaaaacaataatatctactacaagtgtgcaataagtattactagattaattgcaaaatatatttttatagcaaaa

SEQ ID NO: 66129 - DNA, 3452 bp, Zea Mays
tttcaatacagcccgctcagagcccagctggcgcccctcgccgcctctctgagatccaacccagctttcctccctcgcacccaacccgcatccgcattcctcgccgcgccgccgctctaaacctcagagcctcaaaccgtcagaactcagaagtaaacccctcctagtctgtcgtctctcttcgcacgccgccaccgagaggacgaaggagcgcgcacgcgcgtgacagagtggtaagatgggaggcgggcggaagcgcgggcgcacgcagcgccgccacttcaagcagggccgcgagaacgtctggaagcacaaccctcagcgtcctcccgccggcgaaggaggagaggcgcgagaggacaatccctcgtggcagcccttcgctaccgagaacccagccttcgaggagtactacaaggagcagcaaattgtttctgaggaagagtgggatagcttcatgagcatgctccggaagccattacctgccacttttaggattaatgcgagctgtcaattttttcaagatatctgctcgcaattggaaaacgacttcaggaaatcattagagactgaggtgaccgatgatcatgaagaagatgctattcggcctttgccttggtacccgggtaatcttgcatggcatttgaacttttctcgaatgcagctgaggagaaatcaggcacttgagaggagaggtgcatatcattatattaagaagaaaaatagtcaaggccgaagcggccaatacaaaaagttaagcctcatggaggccaggccaccagatgctgacgcggccacaacagacacctccatccgagaagcactctcaggaatcacatttaaagccggcatgcagccagaaaacactactgtctggaatagaactctctggttgggcgtgttccttggcaaaggttttcatgaattcttgaagcgagagaacgaagttggcaacataactaggcaagaggctgttagtatggtcccaccactgtttctgaacgtgcaacctgatcatcatattcttgatatgtgtgccgctccaggatctaaaactttccagttacttgagatgattcaccagtcaacgaagcctggactgcttccaaatgccctggtggtagctaatgatgttgatgtgcaaagatgcaatcttcttattcaccaaaccaagagaatgtgcacagctaacctgattgtgacaaatcacgaagcacaaaactttcctggttgtaatcttgcaaagttctgttcaaaaatgtgtatggatgaggcaaaggtgcagaggttggagtttgatcgcgttctttgtgacgtgccttgtagtggcgatgggactgtccgtaaggctcctgatatgtggaggaagtggaatgctggtatggggaacggacttcatcacctgcaagtggaaattgctatgcgtggtatgagcttgctcaaagtgggtgggaggatggtttattcgacatgttcaatgaaccctgttgaaaacgaaggcgttgttgctgagattttgcggagatgtggggactctgttgaacttcttgatgtttctaatgaactacctgaattagcccgtcgtcctggacttagcacctggaaggtacgggatagagggtcttggtttggtgttcatgaagatgtacctcgctacaggaagcatgtgatatcagcaagtatgtttccttctgggaaaggcagcaaagatagtggtacggggagcagcagcgttgaggtcaacacagatgtagctgatgcagacatgaaggattcaacagacatgggagagggagaacaagaaacaactgtaacaattgatgacagcaataatggtgacaatctgaaaaccgaagagggaactaaagttgattgcgagtctggtgaagtcacaactagtagtagttataaaaagttaaattctacttccatccgtacggaacattcagattacccactgcatcgctgtatgagaattgttcctcatgaccagaacagtggggcatttttcattgcagtccttcataaactctctcccctgaatgagaaccaggtggtagatggtgtcagaattgaccagaatatctcaaaagacaagactgagaaacttgagaaggatttagtatcacataaggcatcatctgaagaaaatactgtgcatcagcaagtgattgataatgcaaatgttctggatggagaacagaatagagacagggataacaaaagttcagaagataagagctcagaggattctaaggtcaatgttaatgaggcagcaaagggtcaagcaggaacaagggataggaggaggcagcaaaaccaaggcaggtggagaggggttgaccctgtgatattttttaaagatgaagtgacagtcaaaagcattgtatctttctatggtatcacagattcatttccacttgaaggtcatctggtgactagaaaccctgatactagtcatgttaagagaatatactatgtgtcaaaatctgttcaagatgttttggagctcaacataaaaattggcgaaaggctaaagatcacctcactgggcctaaagatttttgaaaggcagtcttcaaaggaaggctccccatgcacatttcggttgtcatcagagggattgccgctcctgcttccatacatcacaaaacagattctatatgcatctgcaattgacttccaacatcttttacagtacaggactattaagtttcctgatttcgtggatgcaaaatttggtgaggaagcttcagctttgcttccaggttgctgtgttgtagttttacgtgaagggcatcaggatataggatccatagctacagatccctcggccattgccattgtttgctggaaaggaaagaccaatttgtgcgtcatggtttctccgctagatggtaaagaattgcttgagaggatttctttgcgccatgggctcaaaatccccaaaggggataaagagaaacccagccaggagattgctggatcagacgagctgcttgattgtgccactgaggtggacgatcaagagtctcttcctgaaagcaaagcatctgacatcgaaatttcagatgctaaggaggctgagtagcttttgttttatgtcactacgcatattacacaggaggtagctgtatcctcgagatggctattagcttttttaagtcacttcggttgccaagggagagagatgatagcccaccacatgggaatgacagactcaaaacaccatctggtaatcgttcacggtgacacagaatctatagacttgtaacttcttggttttatttcttcgagaggatgtattgcatcgattttaatttgttgcactcaacacagaatctagtaaagattgagaaaaacattttttttgagatatctctgtgtaggttcactacgaatgctgaaatctgacattttccgaggctatctagttactatgctatatgcct

SEQ ID NO: 66130 - DNA, 3435 bp, Zea Mays
ctcgcacccaacccgcatccgcattcctcgccgcgccgccgctctaaacctcagagcctcaaaccgtcagaactcagaagtaaacccctcctagtctgtcgtctctcttcgcacgccgccaccgagaggacgaaggagcgcgcacgcgcgtgacagagtggtaagatgggaggcgggcggaagcgcgggcgcacgcagcgccgccacttcaagcagggccgcgagaacgtctggaagcacaaccctcagcgtcctcccgccggcgaaggaggagaggcgcgagaggacaatccctcgtggcagcccttcgctaccgagaacccagccttcgaggagtactacaaggagcagcaaattgtttctgaggaagagtgggatagcttcatgagcatgctccggaagccattacctgccacttttaggattaatgcgagctgtcaattttttcaagatatctgctcgcaattggaaaacgacttcaggaaatcattagagactgaggtgaccgatgatcatgaagaagatgctattcggcctttgccttggtacccgggtaatcttgcatggcatttgaacttttctcgaatgcagctgaggagaaatcaggcacttgagaggagaggtgcatatcattatattaagaagaaaaatagtcaaggccgaagcggccaatacaaaaagttaagcctcatggaggccaggccaccagatgctgacgcggccacaacagacacctccatccgagaagcactctcaggaatcacatttaaagccggcatgcagccagaaaacactactgtctggaatagaactctctggttgggcgtgttccttggcaaagggtgatggcctctccgtctcccccgactcctctcctctccggcgccccttcccctgcccaccacctcccctcgctggtgtcggccctggccccagcgaccacctcctcggctactgcttctgcggggttgatctcccccctcccggggagaaaattttcatgaattcttgaagcgagagaacgaagttggcaacataactaggcaagaggctgttagtatggtcccaccactgtttctgaacgtgcaacctgatcatcatattcttgatatgtgtgccgctccaggatctaaaactttccagttacttgagatgattcaccagtcaacgaagcctggactgcttccaaatgccctggtggtagctaatgatgttgatgtgcaaagatgcaatcttcttattcaccaaaccaagagaatgtgcacagctaacctgattgtgacaaatcacgaagcacaaaactttcctgtggcgatgggactgtccgtaaggctcctgatatgtggaggaagtggaatgctggtatggggaacggacttcatcacctgcaagtggaaattgctatgcgtggtatgagcttgctcaaagtgggtgggaggatggtttattcgacatgttcaatgaaccctgttgaaaacgaaggcgttgttgctgagattttgcggagatgtggggactctgttgaacttcttgatgtttctaatgaactacctgaattagcccgtcgtcctggacttagcacctggaaggtacgggatagagggtcttggtttggtgttcatgaagatgtacctcgctacaggaagcatgtgatatcagcaagtatgtttccttctgggaaaggcagcaaagatagtggtacggggagcagcagcgttgaggtcaacacagatgtagctgatgcagacatgaaggattcaacagacatgggagagggagaacaagaaacaactgtaacaattgatgacagcaataatggtgacaatctgaaaaccgaagagggaactaaagttgattgcgagtctggtgaagtcacaactagtagtagttataaaaagttaaattctacttccatccgtacggaacattcagattacccactgcatcgctgtatgagaattgttcctcatgaccagaacagtggggcatttttcattgcagtccttcataaactctctcccctgaatgagaaccaggtggtagatggtgtcagaattgaccagaatatctcaaaagacaagactgagaaacttgagaaggatttagtatcacataaggcatcatctgaagaaaatactgtgcatcagcaagtgattgataatgcaaatgttctggatggagaacagaatagagacagggataacaaaagttcagaagataagagctcagaggattctaaggtcaatgttaatgaggcagcaaagggtcaagcaggaacaagggataggaggaggcagcaaaaccaaggcaggtggagaggggttgaccctgtgatattttttaaagatgaagtgacagtcaaaagcattgtatctttctatggtatcacagattcatttccacttgaaggtcatctggtgactagaaaccctgatactagtcatgttaagagaatatactatgtgtcaaaatctgttcaagatgttttggagctcaacataaaaattggcgaaaggctaaagatcacctcactgggcctaaagatttttgaaaggcagtcttcaaaggaaggctccccatgcacatttcggttgtcatcagagggattgccgctcctgcttccatacatcacaaaacagattctatatgcatctgcaattgacttccaacatcttttacagtacaggactattaagtttcctgatttcgtggatgcaaaatttggtgaggaagcttcagctttgcttccaggttgctgtgttgtagttttacgtgaagggcatcaggatataggatccatagctacagatccctcggccattgccattgtttgctggaaaggaaagaccaatttgtgcgtcatggtttctccgctagatggtaaagaattgcttgagaggatttctttgcgccatgggctcaaaatccccaaaggggataaagagaaacccagccaggagattgctggatcagacgagctgcttgattgtgccactgaggtggacgatcaagagtctcttcctgaaagcaaagcatctgacatcgaaatttcagatgctaaggaggctgagtagcttttgttttatgtcactacgcatattacacaggaggtagctgtatcctcgagatggctattagcttttttaagtcacttcggttgccaagggagagagatgatagcccaccacatgggaatgacagactcaaaacaccatctggtaatcgttcacggtgacacagaatctatagacttgtaacttcttggttttatttcttcgagaggatgtattgcatcgattttaatttgttgcactcaacacagaatctagtaaagattgagaaaaacattttttttgagatatctctgtgtaggttcactacgaatgctgaaatctgacattttccgaggctatctagttactatgctatatgcct

SEQ ID NO: 66131 - DNA, 3057 bp, Zea Mays
ctcgcacccaacccgcatccgcattcctcgccgcgccgccgctctaaacctcagagcctcaaaccgtcagaactcagaagtaaacccctcctagtctgtcgtctctcttcgcacgccgccaccgagaggacgaaggagcgcgcacgcgcgtgacagagtggtaagatgggaggcgggcggaagcgcgggcgcacgcagcgccgccacttcaagcagggccgcgagaacgtctggaagcacaaccctcagcgtcctcccgccggcgaaggaggagaggcgcgagaggacaatccctcgtggcagcccttcgctaccgagaacccagccttcgaggagtactacaaggagcagcaaattgtttctgaggaagagtgggatagcttcatgagcatgctccggaagccattacctgccacttttaggattaatgcgagctgtcaattttttcaagatatctgctcgcaattggaaaacgacttcaggaaatcattagagactgaggtgaccgatgatcatgaagaagatgctattcggcctttgccttggtacccgggtaatcttgcatggcatttgaacttttctcgaatgcagctgaggagaaatcaggcacttgagagttttcatgaattcttgaagcgagagaacgaagttggcaacataactaggcaagaggctgttagtatggtcccaccactgtttctgaacgtgcaacctgatcatcatattcttgatatgtgtgccgctccaggatctaaaactttccagttacttgagatgattcaccagtcaacgaagcctggactgcttccaaatgccctggtggtagctaatgatgttgatgtgcaaagatgcaatcttcttattcaccaaaccaagagaatgtgcacagctaacctgattgtgacaaatcacgaagcacaaaactttcctgtggcgatgggactgtccgtaaggctcctgatatgtggaggaagtggaatgctggtatggggaacggacttcatcacctgcaagtggaaattgctatgcgtggtatgagcttgctcaaagtgggtgggaggatggtttattcgacatgttcaatgaaccctgttgaaaacgaaggcgttgttgctgagattttgcggagatgtggggactctgttgaacttcttgatgtttctaatgaactacctgaattagcccgtcgtcctggacttagcacctggaaggtacgggatagagggtcttggtttggtgttcatgaagatgtacctcgctacaggaagcatgtgatatcagcaagtatgtttccttctgggaaaggcagcaaagatagtggtacggggagcagcagcgttgaggtcaacacagatgtagctgatgcagacatgaaggattcaacagacatgggagagggagaacaagaaacaactgtaacaattgatgacagcaataatggtgacaatctgaaaaccgaagagggaactaaagttgattgcgagtctggtgaagtcacaactagtagtagttataaaaagttaaattctacttccatccgtacggaacattcagattacccactgcatcgctgtatgagaattgttcctcatgaccagaacagtggggcatttttcattgcagtccttcataaactctctcccctgaatgagaaccaggtggtagatggtgtcagaattgaccagaatatctcaaaagacaagactgagaaacttgagaaggatttagtatcacataaggcatcatctgaagaaaatactgtgcatcagcaagtgattgataatgcaaatgttctggatggagaacagaatagagacagggataacaaaagttcagaagataagagctcagaggattctaaggtcaatgttaatgaggcagcaaagggtcaagcaggaacaagggataggaggaggcagcaaaaccaaggcaggtggagaggggttgaccctgtgatattttttaaagatgaagtgacagtcaaaagcattgtatctttctatggtatcacagattcatttccacttgaaggtcatctggtgactagaaaccctgatactagtcatgttaagagaatatactatgtgtcaaaatctgttcaagatgttttggagctcaacataaaaattggcgaaaggctaaagatcacctcactgggcctaaagatttttgaaaggcagtcttcaaaggaaggctccccatgcacatttcggttgtcatcagagggattgccgctcctgcttccatacatcacaaaacagattctatatgcatctgcaattgacttccaacatcttttacagtacaggactattaagtttcctgatttcgtggatgcaaaatttggtgaggaagcttcagctttgcttccaggttgctgtgttgtagttttacgtgaagggcatcaggatataggatccatagctacagatccctcggccattgccattgtttgctggaaaggaaagaccaatttgtgcgtcatggtttctccgctagatggtaaagaattgcttgagaggatttctttgcgccatgggctcaaaatccccaaaggggataaagagaaacccagccaggagattgctggatcagacgagctgcttgattgtgccactgaggtggacgatcaagagtctcttcctgaaagcaaagcatctgacatcgaaatttcagatgctaaggaggctgagtagcttttgttttatgtcactacgcatattacacaggaggtagctgtatcctcgagatggctattagcttttttaagtcacttcggttgccaagggagagagatgatagcccaccacatgggaatgacagactcaaaacaccatctggtaatcgttcacggtgacacagaatctatagacttgtaacttcttggttttatttcttcgagaggatgtattgcatcgattttaatttgttgcactcaacacagaatctagtaaagattgagaaaaacattttttttgagatatctctgtgtaggttcactacgaatgctgaaatctgacattttccgaggctatctagttactatgctatatgcct

SEQ ID NO: 66132 - DNA, 2772 bp, Zea Mays
ctcgcacccaacccgcatccgcattcctcgccgcgccgccgctctaaacctcagagcctcaaaccgtcagaactcagaagtaaacccctcctagtctgtcgtctctcttcgcacgccgccaccgagaggacgaaggagcgcgcacgcgcgtgacagagtggtaagatgggaggcgggcggaagcgcgggcgcacgcagcgccgccacttcaagcagggccgcgagaacgtctggaagcacaaccctcagcgtcctcccgccggcgaaggaggagaggcgcgagaggacaatccctcgtggcagcccttcgctaccgagaacccagccttcgaggagtactacaaggagcagcaaattgtttctgaggaagagtgggatagcttcatgagcatgctccggaagccattacctgccacttttaggattaatgcgagctgtcaattttttcaagatatctgctcgcaattggaaaacgacttcaggaaatcattagagactgaggtgaccgatgatcatgaagaagatgctattcggcctttgccttggtacccgggtaatcttgcatggcatttgaacttttctcgaatgcagctgaggagaaatcaggcacttgagaggtatgagcttgctcaaagtgggtgggaggatggtttattcgacatgttcaatgaaccctgttgaaaacgaaggcgttgttgctgaggtacgggatagagggtcttggtttggtgttcatgaagatgtacctcgctacaggaagcatgtgatatcagcaagtatgtttccttctgggaaaggcagcaaagatagtggtacggggagcagcagcgttgaggtcaacacagatgtagctgatgcagacatgaaggattcaacagacatgggagagggagaacaagaaacaactgtaacaattgatgacagcaataatggtgacaatctgaaaaccgaagagggaactaaagttgattgcgagtctggtgaagtcacaactagtagtagttataaaaagttaaattctacttccatccgtacggaacattcagattacccactgcatcgctgtatgagaattgttcctcatgaccagaacagtggggcatttttcattgcagtccttcataaactctctcccctgaatggtaatattgttccactttcatttatcctgcatatcgctgttcatgacattaaactcacatacattacagttctggtttctacttcctagtgctgaagtatggtaaatatccatcttttcagagaaccaggtggtagatggtgtcagaattgaccagaatatctcaaaagacaagactgagaaacttgagaaggatttagtatcacataaggcatcatctgaagaaaatactgtgcatcagcaagtgattgataatgcaaatgttctggatggagaacagaatagagacagggataacaaaagttcagaagataagagctcagaggattctaaggtcaatgttaatgaggcagcaaagggtcaagcaggaacaagggataggaggaggcagcaaaaccaaggcaggtggagaggggttgaccctgtgatattttttaaagatgaagtgacagtcaaaagcattgtatctttctatggtatcacagattcatttccacttgaaggtcatctggtgactagaaaccctgatactagtcatgttaagagaatatactatgtgtcaaaatctgttcaagatgttttggagctcaacataaaaattggcgaaaggctaaagatcacctcactgggcctaaagatttttgtaggtctccaattaatctctgttatttatcaacctaaactattatcagaaggcattttttatttaacacagtggttctcatatacctttgcactctttcaggaaaggcagtcttcaaaggaaggctccccatgcacatttcggttgtcatcagagggattgccgctcctgcttccatacatcacaaaacagattctatatgcatctgcaattgacttccaacatcttttacagtacaggactattaagtttcctgatttcgtggatgcaaaatttggtgaggaagcttcagctttgcttccaggttgctgtgttgtagttttacgtgaagggcatcaggatataggatccatagctacagatccctcggccattgccattgtttgctggaaaggaaagaccaatttgtgcgtcatggtttctccgctagatggtaaagaattgcttgagaggatttctttgcgccatgggctcaaaatccccaaaggggataaagagaaacccagccaggagattgctggatcagacgagctgcttgattgtgccactgaggtggacgatcaagagtctcttcctgaaagcaaagcatctgacatcgaaatttcagatgctaaggaggctgagtagcttttgttttatgtcactacgcatattacacaggaggtagctgtatcctcgagatggctattagcttttttaagtcacttcggttgccaagggagagagatgatagcccaccacatgggaatgacagactcaaaacaccatctggtaatcgttcacggtgacacagaatctatagacttgtaacttcttggttttatttcttcgagaggatgtattgcatcgattttaatttgttgcactcaacacagaatctagtaaagattgagaaaaacattttttttgagatatctctgtgtaggttcactacgaatgctgaaatctgacattttccgaggctatctagttactatgctatatgcct

SEQ ID NO: 66133 - DNA, 2786 bp, Zea Mays
cgaggaagcactttgcttaataaccaatattggacaccacactcttgattacttctgcatagaagtctgtcaattttttcaagatatctgctcgcaattggaaaacgacttcaggaaatcattagagactgaggtgaccgatgatcatgaagaagatgctattcggcctttgccttggtacccgggtaatcttgcatggcatttgaacttttctcgaatgcagctgaggagaaatcaggcacttgagagttttcatgaattcttgaagcgagagaacgaagttggcaacataactaggcaagaggctgttagtatggtcccaccactgtttctgaacgtgcaacctgatcatcatattcttgatatgtgtgccgctccaggatctaaaactttccagttacttgagatgattcaccagtcaacgaagcctggactgcttccaaatgccctggtggtagctaatgatgttgatgtgcaaagatgcaatcttcttattcaccaaaccaagagaatgtgcacagctaacctgattgtgacaaatcacgaagcacaaaactttcctggttgtaatcttgcaaagttctgttcaaaaatgtgtatggatgaggcaaaggtgcagaggttggagtttgatcgcgttctttgtgacgtgccttgtagtggcgatgggactgtccgtaaggctcctgatatgtggaggaagtggaatgctggtatggggaacggacttcatcacctgcaagtggaaattgctatgcgtggtatgagcttgctcaaagtgggtgggaggatggtttattcgacatgttcaatgaaccctgttgaaaacgaaggcgttgttgctgagattttgcggagatgtggggactctgttgaacttcttgatgtttctaatgaactacctgaattagcccgtcgtcctggacttagcacctggaaggtacgggatagagggtcttggtttggtgttcatgaagatgtacctcgctacaggaagcatgtgatatcagcaagtatgtttccttctgggaaaggcagcaaagatagtggtacggggagcagcagcgttgaggtcaacacagatgtagctgatgcagacatgaaggattcaacagacatgggagagggagaacaagaaacaactgtaacaattgatgacagcaataatggtgacaatctgaaaaccgaagagggaactaaagttgattgcgagtctggtgaagtcacaactagtagtagttataaaaagttaaattctacttccatccgtacggaacattcagattacccactgcatcgctgtatgagaattgttcctcatgaccagaacagtggggcatttttcattgcagtccttcataaactctctcccctgaatgagaaccaggtggtagatggtgtcagaattgaccagaatatctcaaaagacaagactgagaaacttgagaaggatttagtatcacataaggcatcatctgaagaaaatactgtgcatcagcaagtgattgataatgcaaatgttctggatggagaacagaatagagacagggataacaaaagttcagaagataagagctcagaggattctaaggtcaatgttaatgaggcagcaaagggtcaagcaggaacaagggataggaggaggcagcaaaaccaaggcaggtggagaggggttgaccctgtgatattttttaaagatgaagtgacagtcaaaagcattgtatctttctatggtatcacagattcatttccacttgaaggtcatctggtgactagaaaccctgatactagtcatgttaagagaatatactatgtgtcaaaatctgttcaagatgttttggagctcaacataaaaattggcgaaaggctaaagatcacctcactgggcctaaagatttttgaaaggcagtcttcaaaggaaggctccccatgcacatttcggttgtcatcagagggattgccgctcctgcttccatacatcacaaaacagattctatatgcatctgcaattgacttccaacatcttttacagtacaggactattaagtttcctgatttcgtggatgcaaaatttggtgaggaagcttcagctttgcttccaggttgctgtgttgtagttttacgtgaagggcatcaggatataggatccatagctacagatccctcggccattgccattgtttgctggaaaggaaagaccaatttgtgcgtcatggtttctccgctagatggtaaagaattgcttgagaggatttctttgcgccatgggctcaaaatccccaaaggggataaagagaaacccagccaggagattgctggatcagacgagctgcttgattgtgccactgaggtggacgatcaagagtctcttcctgaaagcaaagcatctgacatcgaaatttcagatgctaaggaggctgagtagcttttgttttatgtcactacgcatattacacaggaggtagctgtatcctcgagatggctattagcttttttaagtcacttcggttgccaagggagagagatgatagcccaccacatgggaatgacagactcaaaacaccatctggtaatcgttcacggtgacacagaatctatagacttgtaacttcttggttttatttcttcgagaggatgtattgcatcgattttaatttgttgcactcaacacagaatctagtaaagattgagaaaaacattttttttgagatatctctgtgtaggttcactacgaatgctgaaatctgacattttccgaggctatctagttactatgctatatgcct

SEQ ID NO: 66134 - DNA, 2527 bp, Zea Mays
atggcgtccgggcagaagcagcagcagcacctccctaacgtgccgagatggacgccgagcccgccgcggcgccaggcccgcggagacgcgcacgacgaagaggacgcggagtcggcgctgggagcgtcgtcgtccatgcgcagcaccgacgaagcatcgttccccttcggcagcggccgcgcgcgctcgttcccgttcccgctgactcagccctcgctggagatcagcgtggtggcggcggcgaacgggacagccggtagcggcggcggcggcgccgatggccccgtggcccgcgagaagtcgctgcgccgggccgacgaaggcgtggtggtatcctgggaggacctgtgggtgtcggcggccggcggtaataagggcggccgcgtgcccatcctctgcggcctcaacgggtacgcgcgccccggcgaggtgctcgccatcatgggcccgtccggctgcggcaagtccacgcttctagatgctttggcagggaggctgggttctaacgtgagccagaagggagacattctgatcaacggcctgaggcagaagctagcctacgggacatctgcgtacgttacgcaggaggacgtgctgatgacgacgctgacggtgcgcgaggcggtgcactactcggcgcagctgcagctgccgagcgcgatggcggcgcccgccaagcgcgagcgcgcggaggagacgctgcgggagatggggctggaggccgcggcggacacgcgcatcggcgggtggatgcacaagggcatcagcggcgggcagcgccgccgcgtgagcatctgcatggagatcctcacccgccccgcgctgctgttcctggacgagcccaccagcggcctcgacagcgccgcgtcctaccacgtggtcagccgcatcgcgcgcctggcgaggcgcgagggcatgaccgtggtcgccgccgtgcaccagcccagcaccgaggtgtacggcctcttccacggcctctgcctcctcgcctacggcaggaccgtcttcttcggcgccgccgccgagaccaaccagttctttgctctgagtggattcccctgtccatcactgatgaacccttcggaccacttcctgaggaccatcaacaaggacttcgacaaggatatcgaagaaggcctgaacggagagaccaaaatgaccactgccgaagcaatcgacacgctggtgaactcgtacaaagcctcggcctacatggagaaagtgacgaggcagatagccgacacgcgggaagctggaggggcggtggtgaagaaggaatggcaggcaagtttcctgacgcagtccttggtgctcaccaagaggtccttcgtgaacatgtacagggacctgggctactactggctgcgcttcgccatttacatcatgctgtgcctctgcgtcggcaccgttttctacgacgtcggccacagctacggatccatcctggcccgtggctccctgctcaatttcgtcgccgctttcctcaccttcatggccatcggcggcttcccgtcgttcgtcgaggacatgaagatcttcgggcgggagaggctgaacgggcactacggcgcggcgccgttcacgatcgccaacacggtgtccgcggcgccgtacctggcgctcatctccgtggtgccgggcgccatagcctactacctggtcggcctccagagcagcttcggccacttcgcctacttcgcgctggtgctcttcacgaccatgatggtcgtcgaggggctcatgatgatcgtggccagcgccgtgcccgacttcctcatgggcatcatcaccggcggcggcatccagggcgtcatgatgctcaacggcggcttcttccgcctccccgacgacctgcccaagcccgtctggcgctaccccatgtactacatcgcgttccacaagtacgccaaccagggcctgtacaagaacgagttcctgggcctcaccttccccagcaaccaggcgggcggcagtgccactgccgccaccctctccggcggccagatcttgacggacttctggcaggtggagatggggtacagcaagtgggtcgacctcgccatcctgtgcgggatggtcgtgctctacaggatgctcttcttggctatagtcaagctcactgagaaggtgaagcccatgatcaagggattcaggttcaggaacaccgcgcagtccgtgcacgtagtcgacagaggctccggcagtccatgaatgatgaatccacgacacagccgatcgacgacaaagcccatgaagaggcaacgcgcggtacttgtcaaccgtagatgtgcgatatgtatagccagcgaagagccagcagtgcaataatggatatgcaagcgaagtacgtgcaatattgtcactgtcggaatatggttctttgtcaggtgcaatgaatatgtttgtgacactcggcaaaatagtctgttccgatattatgtcattatgttctcattgacaacgaggacatatatttaagcttgcgtaaggctactttaaggtcttgttcgtttgtgtcggattggtg

SEQ ID NO: 66135 - DNA, 1625 bp, Zea Mays
atgaggcgagagtccaaggccacatggactacaggtggaaatacctggaacactgcattgcaagcaaatgttctccccgctgcctttggtagcaacagaaggtcaaggagtgagaacaagaaagccttctttgaagttgggttgttgaggtgctctgaagaacttactggggacaatgctgaagagtgcaacagtaatgaatctgggtggacgatgtacctgggctccccagtgaacagtgatgatctcaaagccaatggcagcaaatggagtaatgttggcagtggctgtagcaatggtagaagcaaaaacgacaacatggattatgatgatggagactatgattcattagcttctgatgcttccacaggaccagctcaagtgaaggtgcttaatggcaaggaaaagaaaattcatgagaaaagagacaattccatagaagaacaagatagcgatgagcaagacgaacaaaccaagctccctaacaactgtgacaaaaaggcaggcaagatgaagaaggaagagaagaccaccagaaggagccacaacaagagacgtagttcctgttcttcacgaacaagcttctttaggtgcataccaaaagaagaaataagatagatgtacaacatgcaagtgatcttgtctttgttcaattaaatgcaagattgcttagcaaaaaagagagaagcaagactaaaaatgtcgatgtacttctacctaatgttgcttctaatgttcaagactggccggttgaaggatgtgacgatattgatgaagaaaatgaagctatgcaactttgtagaagttcaagagttagagaacttcatgaagatggttttgagtctgatagtgaatgtgaagacatcaaaatacaggatgaggatgttgagtttgaatcagaccatgatgaagtgctcccaacagatgattatgagcaagacgatgaagattgatgatggctagttgtctatattttatatcctaattattacaatgcacattgacactacaatttggtcgattagtgcctaccgattaatttctgattaatccctgataaccgattaatcgctcatgtccagcttgccgattaaattccgatatccgatatattgaaccttggttggtaggcatgtactggactagttgtgggaggaggttgataaggttaagggtgttgttctgtacactgctgttctgccagagcaaaatataccattgtctagatccatggcgacaatccatgtccctcgtcatgttcagttcttttgagaattgagatgtacaagtcttttgagagttataatattttattttatgaacttattgtccagatccatgttctagtcatgttcagttcattgtccaactaggtccatattctcgtaatctaatgctttattcatacatttgtcatgcatgtattaacagtaagatgtatgtacatctatgtaaagctggaactgtgattgacaacctaatacaactgaacaggaaaagaacagagagattaaccgaacaccatttggacagagagtgagaatggggaagaaaggatttaatactcggttcgagtgacaagggagggatccactcagtccctctctggattggttccacttggg

SEQ ID NO: 66136 - DNA, 1980 bp, Zea Mays
tggaaagcaataaatataagatatacatgagaaaataatgacatctccaaataaaattgatattgtctgataatgacatctccaaataaaattgatattgcctgataatgacatctccaaataaaattgatattgtctgaaatgtggactatgcaaaagggcctctagctgagttggttaggtggtctgagtagcagtcctcaggtcctgggggttcgactccctgtgggagcgaatttcagactatggtttctcgacctgagaaggtattcttcttaatataatgcccggaggctatcttaacacccgcaggtcgagttttttttttaatgtggactatgaagtcaagtttttgatacaagtagaagtacttaaatttatcttgtaaaagtgatgatgtattatagttccattgttttgttgacatatagataatgtagtagccagacatgcacatttgagactaacaatgttttaagaaagtaaaatgaaccatagttagagggcataatagcaatattacaggtatatttcaactttgcatagtggcttttgagaagagtaggtaaaaataatcttaacgttgcagtattcttaatattaattggacagactaattcactttagggccttgtttggttaggccattcccaactggaatcatggccccatccacggggatgatcctagagcggattcaatcccagcccaccgtgaaagtggtgttcggttagctgaaccgaggattatgcttggcctattccaggagattcccctcccaccctggcctggtttcgacctaatccgcatgagtcacagaacaactcccccatggaggtgagagcatatgtccttgcattgctgcagagggctcgcgacggcccaagcacttcaagggacacgtcggctacaagcgccacagggaagcgtcgccacggaggcaaggtgcataccaaaagaagaaataagatagatgtacaacatgcaagtgatcttgtctttgttcaattaaatgcaagattgcttagcaaaaaagagagaagcaagactaaaaatgtcgatgtacttctacctaatgttgcttctaatgttcaagactggccggttgaaggatgtgacgatattgatgaagaaaatgaagctatgcaactttgtagaagttcaagagttagagaacttcatgaagatggttttgagtctgatagtgaatgtgaagacatcaaaatacaggatgaggatgttgagtttgaatcagaccatgatgaagtgctcccaacagatgattatgagcaagacgatgaagattgatgatggctagttgtctatattttatatcctaattattacaatgcacattgacactacaatttggtcgattagtgcctaccgattaatttctgattaatccctgataaccgattaatcgctcatgtccagcttgccgattaaattccgatatccgatatattgaaccttggttggtaggcatgtactggactagttgtgggaggaggttgataaggttaagggtgttgttctgtacactgctgttctgccagagcaaaatataccattgtctagatccatggcgacaatccatgtccctcgtcatgttcagttcttttgagaattgagatgtacaagtcttttgagagttataatattttattttatgaacttattgtccagatccatgttctagtcatgttcagttcattgtccaactaggtccatattctcgtaatctaatgctttattcatacatttgtcatgcatgtattaacagtaagatgtatgtacatctatgtaaagctggaactgtgattgacaacctaatacaactgaacaggaaaagaacagagagattaaccgaacaccatttggacagagagtgagaatggggaagaaaggatttaatactcggttcgagtgacaagggagggatccactcagtccctctctggattggttccacttggg

SEQ ID NO: 66137 - DNA, 2217 bp, Zea Mays
gtgccgtgcgttctcggcgagtcggctctcctgccggccgggcgcgacccagtggccgcgtggcgcgcgccgtgctctcccgctccacgcacacgcttcgctgccagagcaatgccgccccctactgtccccttcttcctcacctctactacgctcgccaccaccgcgaagaaaccgcagccgcaatcgccgttatgcgatgcgcaagcccaggccgccgctgcctccctggcctcggcggcgtctgcttcgtacgccgcgcgcatgcggctcaacccgcacctcgcgctccgcctgttcgaccacctgctccgctcgggcgctgacccggaccccgcggcgtacgagctcgctttcgcgtcctgcgcgcgcgccagggaccgtgctacggccgcgcagcttcacgctcacgccgccaagcgcgggctcgtcgcctcgcaccgccgcgtgcgctgcaggctcgtccacgcctacgccgtttgcgggatgctcccccacgcgcgcagggtgttcgacggcggcaccgacaacgacatggtcgcctggaactgcctgctgcgcgggtacgcgcaggagggtggggacgaggacttgctccgcgatttctttgccaggatgccgtcccgggacagcgtctcatggaacacagtcctttcatggtgcgtcgtgaatggggagtatgatgaggcaatcgcagtgttccgggagatgcttgcgagccaggagtgtcagcctgatcgggtgacattagtgagcgttgtctctgcaattgcatacttgggggcacttgcacacggtctttgggcccatgcgtatgtcttcaggaaatgtattgaagttgaggagaaactgagctcagcattgataaacatgtactcaaagtgtgggttcattgagggtgcagtttatgtgtttgacaatgttggaggaaagaggagcttggatacttggaatgcaatgttagctggttttacggcgaatggttacagtgagagagctctggagctcttcaccaggatggagtcaacaaggctgatgcctaacaagattacttttaacactgtactgaatgcttgtagccacggggggttagttgaggaaggtatgaagtattttcagagaatgtctagattttatgggattgaacctgacattgcacattatggttgcatggtggatctgttctgccgtgcagggatgtttgagaaagctgaggagataattcagacaatgccgatggagccagatgcttccatgttgaaggccctattgggtgcttgcagaactcataagaacttagagttgggaaagaaggttggccacaggcttattgaggctgccgcaaatgatcacgccgggtatgtgttgttatccaacatatatgcactagatggcaactggggaggagtgcataaggtgagaaagcttatgttggatcgtggcgtgctgaagacccctgggagcagttcagtggaacttaatggtgtaattcatgagttcatttctggagacaaaagccactcgaggaagagggatatatataagatgctagggggatgctcttgtgatgatcgtcaggttttgaaggtttagcattagagctttgtttgagcgcgggaaaaaaaggaacctcgtttgaagctgtggagcaggaggacagagtctgtctgcacagggagcagagcagggtgcgatgaacgaatccgatgacgaagaagatcttatctccatacatataacatgggctgtgtgtgtgtgtgttttttcttcttctctttttgctcttcaccttttagatacacactaacccgaaagagacgattgccagctaatcccgcgccaggcattgttccattagtttactcggagtagttttggctgttatttcttggagctgttttgcttgcagggaatcctctggcctcaccagcaccgaattggcccggcccgttgccttgccgacaaagatcaacacgacaagtctcatctcatccatacgaacattgcgttttttttattatttttttcagtatacgtttcatctctctatctctatctctctctgatgaagagtgatcagtcccctgctgccagcaaactctgaggagctggctgagctgagctgagatcatccaggtccggtcctggcgcaggcgcattcgatgtgatgcgaacgcgaggtacacatgaatatgcacggcaatgattggggaggag

SEQ ID NO: 66138 - DNA, 2501 bp, Zea Mays
gtgccgtgcgttctcggcgagtcggctctcctgccggccgggcgcgacccagtggccgcgtggcgcgcgccgtgctctcccgctccacgcacacgcttcgctgccagagcaatgccgccccctactgtccccttcttcctcacctctactacgctcgccaccaccgcgaagaaaccgcagccgcaatcgccgttatgcgatgcgcaagcccaggccgccgctgcctccctggcctcggcggcgtctgcttcgtacgccgcgcgcatgcggctcaacccgcacctcgcgctccgcctgttcgaccacctgctccgctcgggcgctgacccggaccccgcggcgtacgagctcgctttcgcgtcctgcgcgcgcgccagggaccgtgctacggccgcgcagcttcacgctcacgccgccaagcgcgggctcgtcgcctcgcaccgccgcgtgcgctgcaggctcgtccacgcctacgccgtttgcgggatgctcccccacgcgcgcagggtgttcgacggcggcaccgacaacgacatggtcgcctggaactgcctgctgcgcgggtacgcgcaggagggtggggacgaggacttgctccgcgatttctttgccaggatgccgtcccgggacagcgtctcatggaacacagtcctttcatggtgcgtcgtgaatggggagtatgatgaggcaatcgcagtgttccgggagatgcttgcgagccaggagtgtcagcctgatcgggtgacattagtgagcgttgtctctgcaattgcatacttgggggcacttgcacacggtctttgggcccatgcgtatgtcttcaggaaatgtattgaagttgaggagaaactgagctcagcattgataaacatgtactcaaagtgtgggttcattgagggtgcagtttatgtgtttgacaatgttggaggaaagaggagcttggatacttggaatgcaatgttagctggttttacggcgaatggttacagtgagagagctctggagctcttcaccaggatggagtcaacaaggctgatgcctaacaagattacttttaacactgtactgaatgcttgtagccacggggggttagttgaggaaggtatgaagtattttcagagaatgtctagattttatgggattgaacctgacattgcacattatggttgcatggtggatctgttctgccgtgcagggatgtttgagaaagctgaggagataattcagacaatgccgatggagccagatgcttccatgttgaaggccctattgggtgcttgcagaactcataagaacttagagttgggaaagaaggttggccacaggcttattgaggctgccgcaaatgatcacgccgggtatgtgttgttatccaacatatatgcactagatggcaactggggaggagtgcataaggtgagaaagcttatgttggatcgtggcgtgctgaagacccctgggagcagttcagtggaacttaatggtgtaattcatgagttcatttctggagacaaaagccactcgaggaagagggatatatataagatgctaggtgagatttgtcaacaacttaaaagttcaggatacactcctgacacttcacaagtgctgctagatattgacgatgaagatgtgaaagagagctcactagctctacatagtgagaaactcgcaatagcctttggactgatcagcactgctcctggcacgcctattagggtagtaaataacctccggatctgcggagattgtcataatgccataaaacttataagcaagatttatgggaggtgcataattgttagggatgcaaatcggtttcatcatttcagaaaagggtcttgttcttgcggggattactggttttgaaggtttagcattagagctttgtttgagcgcgggaaaaaaaggaacctcgtttgaagctgtggagcaggaggacagagtctgtctgcacagggagcagagcagggtgcgatgaacgaatccgatgacgaagaagatcttatctccatacatataacatgggctgtgtgtgtgtgtgttttttcttcttctctttttgctcttcaccttttagatacacactaacccgaaagagacgattgccagctaatcccgcgccaggcattgttccattagtttactcggagtagttttggctgttatttcttggagctgttttgcttgcagggaatcctctggcctcaccagcaccgaattggcccggcccgttgccttgccgacaaagatcaacacgacaagtctcatctcatccatacgaacattgcgttttttttattatttttttcagtatacgtttcatctctctatctctatctctctctgatgaagagtgatcagtcccctgctgccagcaaactctgaggagctggctgagctgagctgagatcatccaggtccggtcctggcgcaggcgcattcgatgtgatgcgaacgcgaggtacacatgaatatgcacggcaatgattggggaggag

SEQ ID NO: 66139 - DNA, 2438 bp, Zea Mays
ctggctgcgtggccgtggctaggaatctagtagcaaggcttgttatccacgtcgcccggggtggtccgcggagcttgccttgaggtcgtgttcgtatccttttgccgtccttagtttagcatttctcccgagattcggttccggtctgctttccgtgaccgctttagggaggatggagcagcttagcgagggtcggtaatggcaggcaggcaggcagctgctgtgctgaaggaaaggtaaagtttaagcgggcagggaataacccagtaacttgcaggccacttctcggcggtgtgcattggattggaggagccgtggagattttttatcaggcaagcgaagcgatggacatgaacgagagcggcgagaaagggatggagggcaacgcgtcctccggcatcccggtggactggcagacccaattcagcgccgccgccttctcgtgcgcgccgccgcagcagcagcaggttcccatgatggactccgccttcgcgtccgccggcctgtgggcgtccacctcccaggccatggcgctctccgacgcgggcggcaggtcggccgcgcgggccggcttcttggcgccggtccccggtttcctcccgcagggcctcgcccatttccccgtggactccggcttcatcgagcgcgccgcgcgggcttcctgcttcggcggcggcggcggcggcggggtgatggctgccttcggcgcagcagctgatcatcaacccatgaacagcgcgttcagtggatcctcggaggcgctgctggaccaccagaggacgaaggacggcagcgacaagggcgagccggagctcggccggaacggccacgacggggttctgagctcggaggcggctgctgcgggggactgctcgtccaaggggacgtccgactccaagaagaggagaaggcctaacgaggtgatgggaggcgatcaggtccagtcgtcgaacctgcccgccgactcagcgaacgagagcgtgcacagcaaggacaaaggcgaggagagcagcctggcaacaaccaccaccggacccggcaagtcgaaaggaaagggggcgagagagacctccgagtcccagaaggaagactacattcatgtccgagctcggcgcggacaggcaaccaacagccacagcctagcagaaaggttgaggagggagaagattagcgagaggatgaagctgctgcaggacctcgttcctggctgcagcaaagtcactgggaaggcggtgatgcttgacgagatcatcaactatgtccagtccctgcaaagacaagtcgagttcttatcaatgaagctcgcaacggtaaacccaaggctcgacctcaacatagaagggcttctatcgaaagatcttctccgcttccctggcgttccttcgtcttcccttggattctccccggaaatgatgcacccacagctgcagctctcgcagccaggcctgatccagggcggcgctgccggcatggccaatccggacgtgttcaggagaatcatgcaggcacagttaagcgcaaaggacgggtctcagatgccgccccacgcattgaatggggcattcagtgacgtcgcgcagcagcagatggcgtacccgtcgtcccaggacctgagcatcgggccgtcgcaggacgggtttcaaatgtgactgaacatgcccagctgcacatactagtaaaagatgcaaaaaaagggcttcttccatctgaggagtatctgatcggcgaacgtgcgggcgcgcagggggccgcgtatagctgcctgctggtgccgggagcagcagcgcctgctcagcgcgacgccttgaaccgcgtcgacccacggctgtgcctgtgctgctgcatcggtcaggtttttttatcgtgttcagaaggaactgaggaaaagctcgtggcgctggcctgtggcgttgcctggatagatggctggaaattctgtctgtttcggcggtcgcgtgcattcatggcatggcgcgcagtgcagtaacagtgggctgcgtgttggcacttggcacagcgaccaaatgagctgctgcaggatgtgatgcaacgcgaggagccttgttttgttagtagtttccaatgctttttttttgtttttgtttgcataatagctaagggtgcaagaaaacactcataaatttgggggtggggggcggcggtccggcgatgtctatgttgaaacatcatacatttggcaaatttctccttgcgccacaaatcgaaaggaggatagatggatgctacgacgtacgatcatgctcgcggcgagaagatcgttcgtcggccatcgcaggctgtctgtgaggcctaacaaacggtagggtgcacgatcgacggactactgggaggagatgtgctgtgccgtgtgcccgtgcatgtcacgtctactgtctagagatacagagatgtgtccttctctggcttcgacttgcgac

SEQ ID NO: 66140 - DNA, 1975 bp, Zea Mays
ggtggtccgcggagcttgccttgaggtcgtgttcgtatccttttgccgtccttagtttagcatttctcccgagattcggttccggtctgctttccgtgaccgctttagggaggatggagcagcttagcgagggtcggtaatggcaggcaggcaggcagctgctgtgctgaaggaaaggtaaagtttaagcgggcagggaataacccagtaacttgcaggccacttctcggcggtgtgcattggattggaggagccgtggagattttttatcagcgcgttcagtggatcctcggaggcgctgctggaccaccagaggacgaaggacggcagcgacaagggcgagccggagctcggccggaacggccacgacggggttctgagctcggaggcggctgctgcgggggactgctcgtccaaggggacgtccgactccaagaagaggagaaggcctaacgaggtgatgggaggcgatcaggtccagtcgtcgaacctgcccgccgactcagcgaacgagagcgtgcacagcaaggacaaaggcgaggagagcagcctggcaacaaccaccaccggacccggcaagtcgaaaggaaagggggcgagagagacctccgagtcccagaaggaagactacattcatgtccgagctcggcgcggacaggcaaccaacagccacagcctagcagaaaggttgaggagggagaagattagcgagaggatgaagctgctgcaggacctcgttcctggctgcagcaaagtcactgggaaggcggtgatgcttgacgagatcatcaactatgtccagtccctgcaaagacaagtcgagttcttatcaatgaagctcgcaacggtaaacccaaggctcgacctcaacatagaagggcttctatcgaaagatcttctccgcttccctggcgttccttcgtcttcccttggattctccccggaaatgatgcacccacagctgcagctctcgcagccaggcctgatccagggcggcgctgccggcatggccaatccggacgtgttcaggagaatcatgcaggcacagttaagcgcaaaggacgggtctcagatgccgccccacgcattgaatggggcattcagtgacgtcgcgcagcagcagatggcgtacccgtcgtcccaggacctgagcatcgggccgtcgcaggacgggtttcaaatgtgactgaacatgcccagctgcacatactagtaaaagatgcaaaaaaagggcttcttccatctgaggagtatctgatcggcgaacgtgcgggcgcgcagggggccgcgtatagctgcctgctggtgccgggagcagcagcgcctgctcagcgcgacgccttgaaccgcgtcgacccacggctgtgcctgtgctgctgcatcggtcaggtttttttatcgtgttcagaaggaactgaggaaaagctcgtggcgctggcctgtggcgttgcctggatagatggctggaaattctgtctgtttcggcggtcgcgtgcattcatggcatggcgcgcagtgcagtaacagtgggctgcgtgttggcacttggcacagcgaccaaatgagctgctgcaggatgtgatgcaacgcgaggagccttgttttgttagtagtttccaatgctttttttttgtttttgtttgcataatagctaagggtgcaagaaaacactcataaatttgggggtggggggcggcggtccggcgatgtctatgttgaaacatcatacatttggcaaatttctccttgcgccacaaatcgaaaggaggatagatggatgctacgacgtacgatcatgctcgcggcgagaagatcgttcgtcggccatcgcaggctgtctgtgaggcctaacaaacggtagggtgcacgatcgacggactactgggaggagatgtgctgtgccgtgtgcccgtgcatgtcacgtctactgtctagagatacagagatgtgtccttctctggcttcgacttgcgac

SEQ ID NO: 66141 - DNA, 985 bp, Zea Mays
  misc_feature (985)..(985): n is a, c, g, or t
caagcatctgcaagggcccgagcgcaagaccgtgagcctataaggtggcggggaggggtctcgttaaccgcggttatcacaataacccgactctcggacccacgacgagttaagcccggagggaaaaaggacaaatcacacaaaggcacagggaatcgcgccaccgtgggacgcgtacggcgcaccgcccgcccgccggatctgcgccggcgacgcgcccggacgtcggatctacgccgccgcaggaggggggaggcggcgctgtggccgttctctgcccgcgagcgcccggatccgtcccgccggtgacttcatctccgctaatccaacggataggcaaaactctaatctttgtcaaccatcaagaggtggtgaaaacatcttctcttctccaaagactgctgactgcaagttgcaaaagtttgtcttcagcttgctgtgttctttcttccctctctggcggagtacacgagaagtttgtagatataggcactaggcagctcctttcagctcttctatgtccagggatttggactgtcctgttcagacacagatggctgtggcagtcctggaccggagcttcagcagtgaatatcctggaggcagcagaactgaggggaggcaactgagctggaagagagtctttgtgcaaactgacaatggttctgtccttggcattgagctggagagaggagaaaatgtgcaaactgtgaaaaagaagctgcagatagctctcaatgtgcccactgatgagagttcattgacctttggtgacctggttctgaatgatgatcttagcagcattcgcaatgactcaccgttgcttctcaaaaggaatcagattcaccgaagcaattccacaccttgcctctcccctactggccaggatgtttggcaaagagaccggagtggacccattgaaatacttggctgttcaagcccttcatctcggatgaagcagattgcgaaggatgtcataaggccn

SEQ ID NO: 66142 - DNA, 969 bp, Zea Mays
  misc_feature (969)..(969): n is a, c, g, or t
ggttatcacaataacccgactctcggacccacgacgagttaagcccggagggaaaaaggacaaatcacacaaaggcacagggaatcgcgccaccgtgggacgcgtacggcgcaccgcccgcccgccggatctgcgccggcgacgcgcccggacgtcggatctacgccgccgcaggaggggggaggcggcgctgtggccgttctctgcccgcgagcgcccggatccgtcccgccggtgacttcatctccgctaatccaacggataggcaaaactctaatctttgtcaaccatcaagtatatatatatatcaatcaaaatggtcctgtgatatcgagcttcagttgatgcagaggtggtgaaaacatcttctcttctccaaagactgctgactgcaagttgcaaaagtttgtcttcagcttgctgtgttctttcttccctctctggcggagtacacgagaagtttgtagatataggcactaggcagctcctttcagctcttctatgtccagggatttggactgtcctgttcagacacagatggctgtggcagtcctggaccggagcttcagcagtgaatatcctggaggcagcagaactgaggggaggcaactgagctggaagagagtctttgtgcaaactgacaatggttctgtccttggcattgagctggagagaggagaaaatgtgcaaactgtgaaaaagaagctgcagatagctctcaatgtgcccactgatgagagttcattgacctttggtgacctggttctgaatgatgatcttagcagcattcgcaatgactcaccgttgcttctcaaaaggaatcagattcaccgaagcaattccacaccttgcctctcccctactggccaggatgtttggcaaagagaccggagtggacccattgaaatacttggctgttcaagcccttcatctcggatgaagcagattgcgaaggatgtcataaggccn

SEQ ID NO: 66143 - DNA, 3286 bp, Zea Mays
  misc_feature (3286)..(3286): n is a, c, g, or t
ggttatcacaataacccgactctcggacccacgacgagttaagcccggagggaaaaaggacaaatcacacaaaggcacagggaatcgcgccaccgtgggacgcgtacggcgcaccgcccgcccgccggatctgcgccggcgacgcgcccggacgtcggatctacgccgccgcaggaggggggaggcggcgctgtggccgttctctgcccgcgagcgcccggatccgtcccgccggtgacttcatctccgctaatccaacggataggcaaaactctaatctttgtcaaccatcaagactgtagagactatgaacaacactcattgtcttcttctcaattgaataagggagctgctacatataattgcattccaaggaaaaaaaacaatagtaagggcataagctgtcattctcttttatccatccatatatcttatccttgatcacattttgattccactacccaaattattccccttgagaatcaattatcttctaatgcttccaatttgcattacgtacatccatgccgctctattgactgcaaggactccttgcattctcttttaaaactgacttaggttgattgaaactatggagtagcccaatgtcattagtaattatagtcttaacctttcacttcatgcaacggcatcataaaaaggaataacatagcccatgtggaatgtaaaagttcacagattcttgatacaacttttcttaagatatggttccattcttgctgtagtcattattaaattgcatctaagaataattaggcgtatcttttgcaaatccttatattctagagattagctcagtaactgaacagatgctagcgggtatgagcagtaattcatgttcttgattgctcggttaatgtcaaattgatttatcaggagtcctcaatgtcctggttttgtgtagttcagatttagcaagagtgaattaagattcgtagatgtactagcagagtggagaggctgtttgcagtaattacttgctagagcaaaactacaatgccacaccttccacgccacgaccacccgctccacccttagtttcactgctggccttggccttggccttggcctttgtcgctgccatccttgtgctgatgttgctggtcctaacccttgccctgggtaccctcggcttgctgctggcccttctccccgcatgtgccgccaagctgcagcttctggagctgaacgcccaatccatgcttctcgccacacagccacaccggcttcctagccttgtggagcttcttcatgacggtttctggatccatgagcccgaacacgatgaccttgccctcttctagaactaccggcatccgtaaatttatgttgcttacaacggcggagcacactacagcgaagagagtgctcgctattcgcaattgcaagataacacacttcgtgctacaaccaacctgaggtgtgcccaccaaatgcgacactgacatgccactgtcattacgaatctattggccatagggctcgtcctctccatgctggtggccacaggggtctggtcctcagtgtcaccgccgtccacagtcccacatcacgcggccacatcgtctggaagtaccaatgtgtagtcgtcgaccgatgacagatgcagcgtcgaagtcaaggaaacatccatgctgtccacgaacgcgcacacaatactagtttcttatcaaacctgtaggtgtaggattactcgtggagtgtttctcacttgtgtgaaaccgtgtgagctatttgaacaattcgatctggtcagcgaagggaaaacattttttttaaaaaaaaatctgtggggggttggatttgttcctagcattctgtggacttaaatcagttgaactttggagtccttgtttttgtttagcttgtcaccgtcaattaatcctacttcatttctggtcgcatgcaaaatctgcctaactaatcctaaatatttctggtcgcatgcaaaatccgcactgatcccaatcactggattgtattacaaacctatgtgattctgatgagatttggtcaccttgtaccaaaacaagcggaaatggttgtttttccttaagagaagctatttttttttacattttagtgagaataatacacgtgtatgcttacacgtgtgttgttataaatcctgctcgattgattctactctctgtccgagattgagatctaagctttagtgacatttctagttataatggtcttatcaccagtggttttgaaatgtagtcagaagcttgcaacactcaaatatgatcttctacttattctggtcaacagttgttaataggtttattgccttatcggggatagacttgtgaaaccatgctacctcactctggcaaaggactgtaacttagtcctttgcaatggaatgaacaaagaaaagatccaaagaatattgtgtttatggaagcaacttgataggttctgttacatgctaggctgctagctaatccatttgtaccagacatctgtaatcgctccatatttttttgtatttcctagatttgtctagaatcttacatttatcattgcatgaacgttcattttgtgttatatagtattcatttatatttttccttctcccagtatatatatatatatcaatcaaaatggtcctgtgatatcgagcttcagttgatgcagaggtggtgaaaacatcttctcttctccaaagactgctgactgcaagttgcaaaagtttgtcttcagcttgctgtgttctttcttccctctctggcggagtacacgagaagtttgtagatataggcactaggcagctcctttcagctcttctatgtccagggatttggactgtcctgttcagacacagatggctgtggcagtcctggaccggagcttcagcagtgaatatcctggaggcagcagaactgaggggaggcaactgagctggaagagagtctttgtgcaaactgacaatggttctgtccttggcattgagctggagagaggagaaaatgtgcaaactgtgaaaaagaagctgcagatagctctcaatgtgcccactgatgagagttcattgacctttggtgacctggttctgaatgatgatcttagcagcattcgcaatgactcaccgttgcttctcaaaaggaatcagattcaccgaagcaattccacaccttgcctctcccctactggccaggatgtttggcaaagagaccggagtggacccattgaaatacttggctgttcaagcccttcatctcggatgaagcagattgcgaaggatgtcataaggccn

SEQ ID NO: 66144 - DNA, 1394 bp, Zea Mays
ggctgtcaggcatcaccgcgtcagctactcaggctagggcgttgggctgccatcctgctggtttaactccacgccgcctgcacctgccaggcaggggcgctaggttgccatccctccaggaaccgatcagccgagtagttgctgcctcgctggtcaggttgctgtctggctatttacttttattgatggaatcggctgtggaaggaaaggggaggactgcaagtgatggaactgattcagaaagtaattcgtttgacaagagggatgatatgtctgaagatgaactggtagtgcttggtggaaaaattgatgattcagtggacaatgtcaatattgatgaatctgaggacaacagaagtaaacaaggggtcaagagaaggcgcaaaagggtgaagatgaaggctacagctgaaactgaaaggagcaaaaaggcaaaatctaaagtttgggatgcctttactaaggtgactgtgccggatacgacagagaaggggaagatgatatcaaaggcaaaatgtaactattgtaagaagctatattcttacatacaaggatcaacaacatctcatttgtcaaggcacatgagaatttgtgccgtgtatttgaagcatgtggcaaagcagcagaatcaatctcttctaaattttgctccatcaacagcaggtgaatctggatctggccttcctactatcacttctccaaaagattataaccatgagaaagtaaaaaaactaattgctaagatgataatagttcatgagtatccatttaggatggttgagcatacttggtttaacattgtcatgaggtatttgaatccttcatatgagtttattggtaggaagactataagagctgaatgtttaaagatctatgagtctgaaaaagaatcactagcaaaagtccttaaaggtgttgagtatatttccctaaccactgatttgtggacatccaatcaaacattatcctatatgtgtttggttgcacactacatagatagtgattggaagatgcaatgtcgtgtcctgaatttttttgaattggaccccccacacaaagggcctgttataggacaagcagtatatgaatgtgttgctggctggaaaatagaagataaaattgttttccatgactttagataatgcctcaaacaatgatggtgctattcgaggtttgagggccagattttcagctagacaaggaagtgcttttgttgcaaaatatttccatatcagatgttgtgcacacataactattcttgatccaaggtataaaatgagatttattgagtggtgcttcaataagatatttgatgaacatcaagttgtgtttgaattagaagatgttcgtagtgagttagaaaaactttatggggattttgaggtgcagcatag

SEQ ID NO: 66145 - DNA, 1452 bp, Zea Mays
gtcaggcatcaccgcgtcagctactcaggctagggcgttgggctgccatcctgctggtttaactccacgccgcctgcacctgccaggcaggggcgctaggttgccatccctccaggaaccgatcagccgagtagttgctgcctcgctggtcaggttagtgatctgaaaatctgaagttcatcctccaagcttcagtccgcctgtcaggtactcaggttgctgtctggctatttacttttattgatggaatcggctgtggaaggaaaggggaggactgcaagtgatggaactgattcagaaagtaattcgtttgacaagagggatgatatgtctgaagatgaactggtagtgcttggtggaaaaattgatgattcagtggacaatgtcaatattgatgaatctgaggacaacagaagtaaacaaggggtcaagagaaggcgcaaaagggtgaagatgaaggctacagctgaaactgaaaggagcaaaaaggcaaaatctaaagtttgggatgcctttactaaggtgactgtgccggatacgacagagaaggggaagatgatatcaaaggcaaaatgtaactattgtaagaagctatattcttacatacaaggatcaacaacatctcatttgtcaaggcacatgagaatttgtgccgtgtatttgaagcatgtggcaaagcagcagaatcaatctcttctaaattttgctccatcaacagcaggtgaatctggatctggccttcctactatcacttctccaaaagattataaccatgagaaagtaaaaaaactaattgctaagatgataatagttcatgagtatccatttaggatggttgagcatacttggtttaacattgtcatgaggtatttgaatccttcatatgagtttattggtaggaagactataagagctgaatgtttaaagatctatgagtctgaaaaagaatcactagcaaaagtccttaaaggtgttgagtatatttccctaaccactgatttgtggacatccaatcaaacattatcctatatgtgtttggttgcacactacatagatagtgattggaagatgcaatgtcgtgtcctgaatttttttgaattggaccccccacacaaagggcctgttataggacaagcagtatatgaatgtgttgctggctggaaaatagaagataaaattgttttccatgactttagataatgcctcaaacaatgatggtgctattcgaggtttgagggccagattttcagctagacaaggaagtgcttttgttgcaaaatatttccatatcagatgttgtgcacacataactattcttgatccaaggtataaaatgagatttattgagtggtgcttcaataagatatttgatgaacatcaagttgtgtttgaattagaagatgttcgtagtgagttagaaaaactttatggggattttgaggtgcagcatag

SEQ ID NO: 66146 - DNA, 1394 bp, Zea Mays
tcaggcatcaccgcgtcagctactcaggtcaggctagggcgttgggctgccatcctgctggtttaactccacgccgcctgcacctgccaggcaggggcgctaggttgccatccctccaggaaccgatcagccgagtagttgctgcctcgctggtcaggttgctgtctggctatttacttttattgatggaatcggctgtggaaggaaaggggaggactgcaagtgatggaactgattcagaaagtaattcgtttgacaagagggatgatatgtctgaagatgaactggtagtgcttggtggaaaaattgatgattcagtggacaatgtcaatattgatgaatctgaggacaacagaagtaaacaaggggtcaagagaaggcgcaaaagggtgaagatgaaggctacagctgaaactgaaaggagcaaaaaggcaaaatctaaagtttgggatgcctttactaaggtgactgtgccggatacgacagagaaggggaagatgatatcaaaggcaaaatgtaactattgtaagaagctatattcttacatacaaggatcaacaacatctcatttgtcaaggcacatgagaatttgtgccgtgtatttgaagcatgtggcaaagcagcagaatcaatctcttctaaattttgctccatcaacagcaggtgaatctggatctggccttcctactatcacttctccaaaagattataaccatgagaaagtaaaaaaactaattgctaagatgataatagttcatgagtatccatttaggatggttgagcatacttggtttaacattgtcatgaggtatttgaatccttcatatgagtttattggtaggaagactataagagctgaatgtttaaagatctatgagtctgaaaaagaatcactagcaaaagtccttaaaggtgttgagtatatttccctaaccactgatttgtggacatccaatcaaacattatcctatatgtgtttggttgcacactacatagatagtgattggaagatgcaatgtcgtgtcctgaatttttttgaattggaccccccacacaaagggcctgttataggacaagcagtatatgaatgtgttgctggctggaaaatagaagataaaattgttttccatgactttagataatgcctcaaacaatgatggtgctattcgaggtttgagggccagattttcagctagacaaggaagtgcttttgttgcaaaatatttccatatcagatgttgtgcacacataactattcttgatccaaggtataaaatgagatttattgagtggtgcttcaataagatatttgatgaacatcaagttgtgtttgaattagaagatgttcgtagtgagttagaaaaactttatggggattttgaggtgcagcatag

SEQ ID NO: 66147 - DNA, 428 bp, Zea Mays
gctggatccgaggaacacatgatggaagcatgatatatgtggaagaagatgatgaagacaatgttgagaacattatgttcccaaaaagcttggtggaaagcaactaaatttggaagaattggatggagacaagacaagctaagctaaggagacgtcaagagtcaagactcaagagaagatgcatcatagatcatactactgctgctgcttgagaatatactgctttattgagaacattatgttgagaacattatgttttgagaacattatgttttgagctgaatatactgctactgatttccagtgctgaatatatactactctttgttgaatatatataattatatactactctttctagtgctgatttctaatactctttgttgagaacattatgctttgagctgaatatactgctgctgatttcc

SEQ ID NO: 66148 - DNA, 695 bp, Zea Mays
cacaccctaacgacataaaaacgaatctagccataattaccaagtgcacacctcgcattactagtatttctaacttaatcgtatatgtatacgaaatgtcttattttacgatcataaaaccgataataaaaatagtgaatcggctcaccacatcacaactcgatttggtagttgtctgacgacggccttcagctgaagtcctcgatcgcacatctgacgagcgtgaccgacgagctaaggctgaggcgaagcttgacgacgagatcgaataggggatggtgagcaagaggcagcgaccaaagaccgaagcacatagcacggcggacatacttagccacggcgaggccgatcgacgagggagaacaagaaacatgacagtgagtcgatgagctaaagattgggagcgacagccggtgaggagcttatctccaaagagccgcgcgagggaagctaaaaattaatctgacagtggttccgcggtaaacaatggccgggtctgaggggccagcaattacttgaacatggttgacggcgaggtcgacgacataattgggaattaaagctgagcgaagaaaattcgcgcgcgtgactagatggaattgggaagccacggcgctagaggaacttcatggcacgcaaacaccagagaactcgacggcgatgcgtgagcaaggagacacgcgcgggcaggaaaa

SEQ ID NO: 66149 - DNA, 414 bp, Zea Mays
atggtcaagcgcctagggagccggacgcgccatggctggagctggagcttcggtcggctggaaggggaagcacgacgcgcggcactgggaaaaactgagccggccgaccggacctgggaccaggtggcttcggccagggaacaggcgcgccggcaggggaaggccaggagcgagcgagctggggagagagagcgagctgcagggaggagggagatccaggcaccgagcgtggaattccggcgagctgctcggcagccatgggagggggaatccgagctgaagctcgcgacgcagggagccagcgtgcgcaggaaccgaacagggacgcagggggaggaagaaggagacgcggttgcccaggaagacggctgggctgaggaagaagataggggcgagcgtcggctggatttttga

SEQ ID NO: 66150 - DNA, 2381 bp, Zea Mays
gtccacgtcgccgcccaccccctcccctcaaatctgaaatccaatcgactcattaaccccggagctcggcagagagagagcatcggcacggcgcggtggttgattaaccagaaccagaagccagcacgtgcgcgccggggctggtccgccgcctgggtctgcgtacatatgcgtctgtctgagcgggcgccgcgaaggaaactgacggggggctttgcttggcgtataaagcgtctcgcgagcgcctaccggcagccatagctggtgagtagtagtagtatactggaggaggaggaggaggaggagagggagaagacgaagcgaagccagggcaaggtcgtcggagccggagagggaggaaggtggagaacctctacctgcgtcacgtgacaactgtctcctgacccacaggagcggcggactccctctgctcgccgcgcgcggcctgttccggttcggtcggcggccgacggccggcggcggaggcagcaggaagctactgtaccaaccggcccaagagaattgcgggtccagaggcagtgatggcggggcgctacgattgacgtgctacgattatgggcatccaagggaacaaggcggcgacgcacgagcacgacttcctctcgctgtacgccgccgccgccgccaaggacgctcctctcctgctacacgactccaaggcgccgcctccttctcaaggtaatttcctcttgaagacgcacgacttcctgcagccgttggatcagaagccgggagcgccgccggagccgtcgccgctgcccgcttccgccgcggagagcaggcaccagccgcagcagcaggtcgtcgtcgcgaaccagcacgcgctgcccctgcccggcggcgtcggcaccttcagcatcagccccgcgcccgtgtccgtcgcgctgccggcggccgtcgtcaagtcggagccgccgttcgtgctctggggccagcctgccgcgacgctccatccgggcgcgcgagatttgacagtaagggtggaccggaagggtgggagctgcagcgatggtggtacggatcagcggccaaacacaccgcggtcaaaacactcggccacagagcagcgcagacgcagcaagatcaatgataggtttcagatacttagggagctgttgccacacagtgatcaaaagagagacaaagcaacatttctcttggaggttattgaatatatacggtttttgcaagagaaggtgcaaaaatatgaggcaacatttccagaatggaaccaagaaaatgcaaagatgcttccatggagtaaaggccaaatctcaggagattccccgcctgacccttcacatttcatgagaaatggatcctcccctggatctaatttcactgggaaacttgatgataatcacaacatagtgacatctgcagctgcatcaggggcacaggatcaggtagaaaccgaccacatggctagcggatgctacagatcagcagaaactacggcgaattttacaaataatgctatgtctcagtcccaacctcaatggactggtccgtcccctgtggatgactctgcagtgaacagtgagacgcttaacaaccagcagttggtgattgatgaaggaacaatcagagtgtccagtaactattcccaagagttgcttaactcgttgactcatgcccttcaaagctcaggtgtagatttgtcccaagccaacatctctgtgcagatcaacatgggaaagcgtgccgccaagagacccgctgctggtgtatccagcaactccaaggaaccagctgatccggcatctagcaacgaattagggcatcagttgacgctgtcgggtgccggtgccgactgcctctctcacgcaacaaagcggcataaacggagcaacagctgatggccgctctccctcacctcgctccccgaccgacggacggacggatgacggattggtgacattcttcttttccctcccagccaacggggaggctcgtggattggctggctggctgtacattgtgtgctgtgcttggtgacaagctgagacctccggcgtattctttgattcgatcacccccgcgcccgccatcccattgtttacgtagagaagaggaaccgtggagcttttcatcgcggattgtgaagccgctcttgtacacaggcttccattcaatgtgagaagcttccccctccttgacacatctccgtgttgtagacctgtagccacctgtaagatatgtgatgatgcccaacaatcaactctgccagaccactggctagtcgagttgttgggttactttatgtacggtgttctgttatgctgggagtgtaattgccccgccgtctcagtgaactgttcgtcagttgtgtgcttgtttgtccaacggtttactatgtg

SEQ ID NO: 66151 - DNA, 6574 bp, Zea Mays
cagccatcgagaccgtcggagtcgaccacaagcggtgacctcaccgcgtcccccacaagccacagatcttgtcgtcccattcctcactccagcctcggtcgccctcctgcccgattcaaaattttcgagcctttcaccaccgtcccactcctacacccgcttaccgttgctggccctcttccacctccatgcccaaaccctaagccccgcagcgacctccggagagccgagccggtcagccatggagcatctgttcatgcaggctttcgagagcagggaccgggtggccgcgcaggtgcagcagcaggccgacttctactcccagaccctcgcctccagcctcctcgccgccggtcaccagcccccggaatggctcatcccttccaccaccctgccccaagagctgaatggcaaaccaattgttctgactggaagacagatcacaacaccagctatcaataggaccgtctttctgcctctagctattcctagcactctgtccacaaaatcaggggatccaaatggatatgatggctacccaaacactaattgcactgctatgggtactaaccaacatgaagaggagcatcaagagcagtcttcacttgcccaggagcttactgagtcttgcactgcagacaaaatgttttcaaggattcagcgttccaggacaaggcaaatgcatattgaagatcgtgtgcatggacaggatcaagctgcaaagagcggaagctgtgatgggatgcataggtctaaccttaagactgtggggtcaaacagagctgctgcatcatctttgatgccgtgtgatgatgtcccaaaccttgctgcaacaacatcagatccaggccagggtagtggtttttgtgccattcaagggaagtcaattgacttcttgaagtgcaacaacaatcctgaagaccaaggagttaagttagatggtttcccgccgttgattgtggagaacaaaattatctgttctgatagcgatatcggggtcagtaacaactgttctattagagattcactgggtgcgccacttccagatttctctaagccaaacactgcagatagtgtatgcctatgccaccgaattcctgaaactcacttactggttgagccaaaaatacttcaatttgatgttgctgaatcagtttgtatgaatccttccagtgaacaaacaggtcagcagcaggaatctagtctgaaaagtaaccatcttgatcttgcttttacaaatccttcaagtgaagacccatcttctaccagttctcagggacctcattctatgggaaggttgttgcttaatcatgttaagtcaagaaatttgaaccctgacagtgaaccagtggagcagcaccacaaatatacttcagaatgtggccatcctgatcttactagtatgcattctccaaataagaaaccatctctgacgtgtcctgttgaagcaccgaattctatgggtgaaccattacttcataaggatacagaacatattcctgaaaccaattctttgggaagagcatactccaagttcagccaaccacttaaaatagatacatcaaacagtaatgaaaccaattgttctgtggtcaactcactgcttgataatgatacattgcaggccactgaggatactgacaaactgaaatctcatgtctcacctccatacagtggacctttgcagctacctacccaactagctgatgcaaggtttggggctcatacatcaccaggaatactaccgaacagtttgttaggggtggatgggtgtaatcacctttcaaatttgcaaaaaaatgacacaaatagccgttgctcccgatacaggtctgctgtaagcctagagctgcttccacctcaaaattttatttccactgatgcttgtcaatcaaggctcttgtcttatagaacacaaagtaatgacaaacattccagttctgttgcttctgctatgaatgcctctaaatctgcagatagtaagttacctcaggaacagtatttattggtcagaccatctttggaatttaatggaagtatttcagatgcggaaactcccttgggccgttctcctctgggcatgcaaaatgaaatgctccaagcagacccagtatatgactcagccaattgctctccaggaattttgggtgatgatgctcatgtcagcaaagcctatggtggttctgctgataacagaaagaacatatctgtggttccgaaagttggccccatcagttcatctagaatcagagatatgcaaataacagaaaagaatgtggtcgcttcatcagaaaaaaacaatggaaaactgcaagaaggaaaagcacaagagacccctcatcctaaggatgatgtgcaagtaaatgctgattcatgcacagctgaaaacattgagaaaatgaagtctccatgtacgtcagaatcatgtgaggagaacaacaagcaccaggaggatagaggacatgctcagaagaagtcagctgcagatgtcgtccagatcaatgggggtatgtcatccaaaagaaaacgaatgaagtgccaagacattgcatttcccagttctcaagacacaaatccattatttccgaaccaccaagatggcattggcacccatgtcgtaattgcagaaaaaatctcaatggaaatacaaccttctgatccttacatcctaagaagtacaggatttgatgacttcatgcttctcaaatctgagacaaagaatgatgcagtgaaccacagtatttcagttgcaagtgatgttcaacaaaacgagagttcttctcccaagctaagaaataggttcagcctagctgaggttgctctctgtaactcgtctagagcaaaggctttatcacctaattttagttgtgatatcagcagcaggaatgtagctgaagaaatggacctccaaaactatcaagcacagttacaaaatacttttgatgttgctacaagttctattatgcctagcagatctgatatttctcttgatagtgtggagctctgcagtcaagaggaaaatacttacttaaaaggagagggtttaagtgtttctaattccaatgtggaacattcacggatggctcctcagatggatgaaatattgtctcagagtgtgatactgaatccagcaaattatctcagcactgattcaacaaatatattcctgaattatgccttggatcaacatggtaaacatgcaccttctccagttaagaaattaagttatggctctggcgtagaagctgataggaaatttagaagtgaagatctaacaggatgtttgctatatgatggtactacctcaaggaaaaaggatagtgactctgtgaaatttaatgatgcaatgccacaatttgagagctttgatttttctcttccattggatagctcaactactgaagaaaaggcatttgggagtgttcatgattccatacaatttggtacatttaattcagatcccgctaataaacatgagatgagtgcagtaagtggcatgtatcagctattggcaactatgtcagggaaagctacaaactgcttgtttaatgatgatgaaaggcaacccggtgaaagtattgatggtagtgtaacagatatttttggttcaagtggattgggacataagggttctttcattactcctgattttgcagcgtcatgttcttcaaatgctgcgaacaaaaaggataatggtgaaaatccattgaccccttctgttgaaaagtattgtctggggaaactttcagaaaaaaatggatctgtttcggagcatatgggttcgattcctgagcttttatgcttccgaattgatgaagacaatgacattgcagaaggaaatgattaccgagagatattacctagatccataggcaaccaggagcaatcaggaaggaaagcacttcaggatatcactggactatgtcaaagcattgggaattctgcctcttattcgataggtatgagtatggatacaggtgacacagacatgactgtagaaacttgcagcagtgaactcaatcatcatccagatctcaggaatgatggtgataacaagaagcctaaagaaagttgtggttctttattaaaaaaaggagggaaaatgtctcgctcccttcataacagattaagcaagacagaaacaaggcacatgaatgaagcaaatcctggaaagcgttctaagcctagtaatattgttgctaatgtggcatcttttatacctcttgtgaagccaaaggtgcaaccaacagcatgtgtgaaaaaagatgttagagtgaaagcacttgagacagctgaagctgcaaaacgtcttgaagaaaagaaacgaagtgaacgtgaaatgcgcaaagcagcagcaaaactagagcgtgagaaactgaagcaagagaaagagttaaagcaaaaagaggaagaggaacagaagaagaaaagaggtgctgatgtggcaacaaggaagaggcagagggatgaggaggaaaggagggagaaggagagaaaaaggaaatgcattgaagaagctcgaaaacaacagaagcgacctattgaaagaaaacatgccaacattaacaatgctcatccagaaggtcatgataataaggagctgcagcagaattcggctgaagcggtgaaaggcccagtaaaatttgatgaaatgacaggtcttggaggaaatgccactaacagtaacaatgaaatggttgtgattaccgatgagaggcctgcaatttctggacctaattgtcaggaaaatatcccaaacagtattgaggagtcatacataatgactccatataaagattctgatgatgatgatgatgaggatttcgaacatatagaacattcaaggcgtaggaggaaattggttccttcatgggctcggggagagaacttggagaaaatcttgttatccaattatgttttggaccctaggaaaatctttgcacgaaaacgctcctctgatctctctgaaatttgtcctgcccacataccgcaacgtggtttcagatgagtttctttcctagttcgaaaataggtcccagatgagcttgcattgactgaactcttggttgtacgctgctgcctttcgtcaggcagtttgtgtataagctggtttcactagtttcatatatgtaagaacaacattcttgtaccgttaggcaactgcggcaacgatcgtacgttgttgtacatagtttcgattagttcaccaaggcttttgattcgacgcactccgtgcaaggagatataagctgttggttgacaagagtatttatcttgtctgagcactgtgctcaaaggagcagccatggttgttaaggtgtttctgtgtaacatcatgtaatgccatgatggagtaacttgtacacatggaaacgataaagatcggctatttttaacgcaaagaaatgacgcatcggattgtttaaacgatttggatcaatcatgcaaagttttctttgaataatgtggctggacattatgtacgaagaaaaaggaacgcggatcaaatagaggcaaagaacacggagcaaccatatgccacgagaatgttgcgtagaagaatggcacagtatttcccctgaagttaattatgtccgcgtggtgttcgtgcggcctgggctagccggctgggactgaggaacgcagcacgcagaatatctggtgtcggttgcaaaacgaacatgagacctatagtgacggttgagtccaggtcgcggcgcgtgccgtaggcatagtcggcggccgcattgtggcgagcgggtcgacgacgacgaagcctttgaggatggcaagtcgcacgtcgctcgtcacaatgatcgccgtggagcccggcgccacggacgcctgaactggtgggagtagaggcagagacagcggtgcccctccccgtgtgccgctccttactgctggcctcgtggagcttgtcttgatccttcgccccgccggcgactgtgccacaggtccacctgcagccgcaagtatattgcacatgaaacatccgcataacccacgagaagaagctagctgcactgcatgcgttgcatggccccccgagagatcacggttcggtggcctgtgggcgatgacagtgagagcagagagcacacggccctcgcagaagcgaggcttttcctcgctggtgctgggttgtgctctctctcttctgtcatcgctcccgaggtccactcgaccgctctctccatccctgcccgggcccccccgccggcgtcggccctccccctttgccacggaccctgcaccgagaggaaaacccaataagccatccatatctgccacgccagacgccacaccatcgtgcatgcgatgggactatgggaggagcgccactgcaccagcagatggccacacgcctgaatcatcagagaagtgtgggtggacggaggagtttgcttagcttcgccagttcgccgggagggagagaaacagcgtgaccatggacgacgagactccgatgctcgcccgccgctggcttgtggtgcgtgcttgcgaggagacggtgtgtgtgtgtgtgtgtgagagagagagagagagagagagagagagagagagagag

SEQ ID NO: 66152 - DNA, 6762 bp, Zea Mays
aaaattttcgagcctttcaccaccgtcccactcctacacccgcttaccgttgctggccctcttccacctccatgcccaaaccctaagccccgcagcgacctccggagagccgagccggtcagccatggagcatctgttcatgcaggctttcgagagcagggaccgggtggccgcgcaggtgcagcagcaggccgacttctactcccagaccctcgcctccagcctcctcgccgccggtcaccagcccccggaatggctcatcccttccaccaccctgccccaagagctgaatggcaaaccaattgttctgactggaagacagatcacaacaccagctatcaataggaccgtctttctgcctctagctattcctagcactctgtccacaaaatcaggggatccaaatggatatgatggctacccaaacactaattgcactgctatgggtactaaccaacatgaagaggagcatcaagagcagtcttcacttgcccaggagcttactgagtcttgcactgcagacaaaatgttttcaaggattcagcgttccaggacaaggcaaatgcatattgaagatcgtgtgcatggacaggatcaagctgcaaagagcggaagctgtgatgggatgcataggtctaaccttaagactgtggggtcaaacagagctgctgcatcatctttgatgccgtgtgatgatgtcccaaaccttgctgcaacaacatcagatccaggccagggtagtggtttttgtgccattcaagggaagtcaattgacttcttgaagtgcaacaacaatcctgaagaccaaggagttaagttagatggtttcccgccgttgattgtggagaacaaaattatctgttctgatagcgatatcggggtcagtaacaactgttctattagagattcactgggtgcgccacttccagatttctctaagccaaacactgcagatagtgtatgcctatgccaccgaattcctgaaactcacttactggttgagccaaaaatacttcaatttgatgttgctgaatcagtttgtatgaatccttccagtgaacaaacaggtcagcagcaggaatctagtctgaaaagtaaccatcttgatcttgcttttacaaatccttcaagtgaagacccatcttctaccagttctcagggacctcattctatgggaaggttgttgcttaatcatgttaagtcaagaaatttgaaccctgacagtgaaccagtggagcagcaccacaaatatacttcagaatgtggccatcctgatcttactagtatgcattctccaaataagaaaccatctctgacgtgtcctgttgaagcaccgaattctatgggtgaaccattacttcataaggatacagaacatattcctgaaaccaattctttgggaagagcatactccaagttcagccaaccacttaaaatagatacatcaaacagtaatgaaaccaattgttctgtggtcaactcactgcttgataatgatacattgcaggccactgaggatactgacaaactgaaatctcatgtctcacctccatacagtggacctttgcagctacctacccaactagctgatgcaaggtttggggctcatacatcaccaggaatactaccgaacagtttgttaggggtggatgggtgtaatcacctttcaaatttgcaaaaaaatgacacaaatagccgttgctcccgatacaggtctgctgtaagcctagagctgcttccacctcaaaattttatttccactgatgcttgtcaatcaaggctcttgtcttatagaacacaaagtaatgacaaacattccagttctgttgcttctgctatgaatgcctctaaatctgcagatagtaagttacctcaggaacagtatttattggtcagaccatctttggaatttaatggaagtatttcagatgcggaaactcccttgggccgttctcctctgggcatgcaaaatgaaatgctccaagcagacccagtatatgactcagccaattgctctccaggaattttgggtgatgatgctcatgtcagcaaagcctatggtggttctgctgataacagaaagaacatatctgtggttccgaaagttggccccatcagttcatctagaatcagagatatgcaaataacagaaaagaatgtggtcgcttcatcagaaaaaaacaatggaaaactgcaagaaggaaaagcacaagagacccctcatcctaaggatgatgtgcaagtaaatgctgattcatgcacagctgaaaacattgagaaaatgaagtctccatgtacgtcagaatcatgtgaggagaacaacaagcaccaggaggatagaggacatgctcagaagaagtcagctgcagatgtcgtccagatcaatgggggtatgtcatccaaaagaaaacgaatgaagtgccaagacattgcatttcccagttctcaagacacaaatccattatttccgaaccaccaagatggcattggcacccatgtcgtaattgcagaaaaaatctcaatggaaatacaaccttctgatccttacatcctaagaagtacaggatttgatgacttcatgcttctcaaatctgagacaaagaatgatgcagtgaaccacagtatttcagttgcaagtgatgttcaacaaaacgagagttcttctcccaagctaagaaataggttcagcctagctgaggttgctctctgtaactcgtctagagcaaaggctttatcacctaattttagttgtgatatcagcagcaggaatgtagctgaagaaatggacctccaaaactatcaagcacagttacaaaatacttttgatgttgctacaagttctattatgcctagcagatctgatatttctcttgatagtgtggagctctgcagtcaagaggaaaatacttacttaaaaggagagggtttaagtgtttctaattccaatgtggaacattcacggatggctcctcagatggatgaaatattgtctcagagtgtgatactgaatccagcaaattatctcagcactgattcaacaaatatattcctgaattatgccttggatcaacatggtaaacatgcaccttctccagttaagaaattaagttatggctctggcgtagaagctgataggaaatttagaagtgaagatctaacaggatgtttgctatatgatggtactacctcaaggaaaaaggatagtgactctgtgaaatttaatgatgcaatgccacaatttgagagctttgatttttctcttccattggatagctcaactactgaagaaaaggcatttgggagtgttcatgattccatacaatttggtacatttaattcagatcccgctaataaacatgagatgagtgcagtaagtggcatgtatcagctattggcaactatgtcagggaaagctacaaactgcttgtttaatgatgatgaaaggcaacccggtgaaagtattgatggtagtgtaacagatatttttggttcaagtggattgggacataagggttctttcattactcctgattttgcagcgtcatgttcttcaaatgctgcgaacaaaaaggataatggtgaaaatccattgaccccttctgttgaaaagtattgtctggggaaactttcagaaaaaaatggatctgtttcggagcatatgggttcgattcctgagcttttatgcttccgaattgatgaagacaatgacattgcagaaggaaatgattaccgagagatattacctagatccataggcaaccaggagcaatcaggaaggaaagcacttcaggatatcactggactatgtcaaagcattgggaattctgcctcttattcgataggtatgagtatggatacaggtgacacagacatgactgtagaaacttgcagcagtgaactcaatcatcatccagatctcaggaatgatggtgataacaagaagcctaaagaaagttgtggttctttattaaaaaaaggagggaaaatgtctcgctcccttcataacagattaagcaagacagaaacaaggcacatgaatgaagcaaatcctggaaagcgttctaagcctagtaatattgttgctaatgtggcatcttttatacctcttgtgaagccaaaggtgcaaccaacagcatgtgtgaaaaaagatgttagagtgaaagcacttgagacagctgaagctgcaaaacgtcttgaagaaaagaaacgaagtgaacgtgaaatgcgcaaagcagcagcaaaactagagcgtgagaaactgaagcaagagaaagagttaaagcaaaaagaggaagaggaacagaagaagaaaagaggtgctgatgtggcaacaaggaagaggcagagggatgaggaggaaaggagggagaaggagagaaaaaggaaatgcattgaagaagctcgaaaacaacagaagcgacctattgaaagaaaacatgccaacattaacaatgctcatccagaaggtcatgataataaggagctgcagcagaattcggctgaagcggtgaaaggcccagtaaaatttgatgaaatgacaggtcttggaggaaatgccactaacagtaacaatgaaatggttgtgattaccgatgagaggcctgcaatttctggacctaattgtcaggaaaatatcccaaacagtattgaggagtcatacataatgactccatataaagattctgatgatgatgatgatgaggatttcgaacatatagaacattcaaggcgtaggaggaaattggttccttcatgggctcggtatgtgtctaccttacagttccagaatctcttaataacatagttgctgttctttacatatgttatgttgatgtgaatatgtgatgccgtatggcaaagctcaggagccacaaccacaacgtgagggtgggggggtcataggatgagttagttcgcataattgatgattaatgattatgggatgcaagatgcaacagagaaactcaaggcatctcagtcatgcccatttctcattttattacttgattttccctcattgtcccctgagagattactgatgacacggtctcttctctgatttgcaggggagagaacttggagaaaatcttgttatccaattatgttttggaccctaggaaaatctttgcacgaaaacgctcctctgatctctctgaaatttgtcctgcccacataccgcaacgtggtttcagatgagtttctttcctagttcgaaaataggtcccagatgagcttgcattgactgaactcttggttgtacgctgctgcctttcgtcaggcagtttgtgtataagctggtttcactagtttcatatatgtaagaacaacattcttgtaccgttaggcaactgcggcaacgatcgtacgttgttgtacatagtttcgattagttcaccaaggcttttgattcgacgcactccgtgcaaggagatataagctgttggttgacaagagtatttatcttgtctgagcactgtgctcaaaggagcagccatggttgttaaggtgtttctgtgtaacatcatgtaatgccatgatggagtaacttgtacacatggaaacgataaagatcggctatttttaacgcaaagaaatgacgcatcggattgtttaaacgatttggatcaatcatgcaaagttttctttgaataatgtggctggacattatgtacgaagaaaaaggaacgcggatcaaatagaggcaaagaacacggagcaaccatatgccacgagaatgttgcgtagaagaatggcacagtatttcccctgaagttaattatgtccgcgtggtgttcgtgcggcctgggctagccggctgggactgaggaacgcagcacgcagaatatctggtgtcggttgcaaaacgaacatgagacctatagtgacggttgagtccaggtcgcggcgcgtgccgtaggcatagtcggcggccgcattgtggcgagcgggtcgacgacgacgaagcctttgaggatggcaagtcgcacgtcgctcgtcacaatgatcgccgtggagcccggcgccacggacgcctgaactggtgggagtagaggcagagacagcggtgcccctccccgtgtgccgctccttactgctggcctcgtggagcttgtcttgatccttcgccccgccggcgactgtgccacaggtccacctgcagccgcaagtatattgcacatgaaacatccgcataacccacgagaagaagctagctgcactgcatgcgttgcatggccccccgagagatcacggttcggtggcctgtgggcgatgacagtgagagcagagagcacacggccctcgcagaagcgaggcttttcctcgctggtgctgggttgtgctctctctcttctgtcatcgctcccgaggtccactcgaccgctctctccatccctgcccgggcccccccgccggcgtcggccctccccctttgccacggaccctgcaccgagaggaaaacccaataagccatccatatctgccacgccagacgccacaccatcgtgcatgcgatgggactatgggaggagcgccactgcaccagcagatggccacacgcctgaatcatcagagaagtgtgggtggacggaggagtttgcttagcttcgccagttcgccgggagggagagaaacagcgtgaccatggacgacgagactccgatgctcgcccgccgctggcttgtggtgcgtgcttgcgaggagacggtgtgtgtgtgtgtgtgtgagagagagagagagagagagagagagagagagagagag

SEQ ID NO: 66153 - DNA, 6429 bp, Zea Mays
ccaccgtcccactcctacacccgcttaccgttgctggccctcttccacctccatgcccaaaccctaagccccgcagcgacctccggagagccgagccggtcagccatggagcatctgttcatgcaggctttcgagagcagggaccgggtggccgcgcaggtgcagcagcaggccgacttctactcccagaccctcgcctccagcctcctcgccgccggtcaccagcccccggaatggctcatcccttccaccaccctgccccaagagctgaatggcaaaccaattgttctgactggaagacagatcacaacaccagctatcaataggaccgtctttctgcctctagctattcctagcactctgtccacaaaatcaggggatccaaatggatatgatggctacccaaacactaattgcactgctatgggtactaaccaacatgaagaggagcatcaagagcagtcttcacttgcccaggagcttactgagtcttgcactgcagacaaaatgttttcaaggattcagcgttccaggacaaggcaaatgcatattgaagatcgtgtgcatggacaggatcaagctgcaaagagcggaagctgtgatgggatgcataggtctaaccttaagactgtggggtcaaacagagctgctgcatcatctttgatgccgtgtgatgatgtcccaaaccttgctgcaacaacatcagatccaggccagggtagtggtttttgtgccattcaagggaagtcaattgacttcttgaagtgcaacaacaatcctgaagaccaaggagttaagttagatggtttcccgccgttgattgtggagaacaaaattatctgttctgatagcgatatcggggtcagtaacaactgttctattagagattcactgggtgcgccacttccagatttctctaagccaaacactgcagatagtgtatgcctatgccaccgaattcctgaaactcacttactggttgagccaaaaatacttcaatttgatgttgctgaatcagtttgtatgaatccttccagtgaacaaacaggtcagcagcaggaatctagtctgaaaagtaaccatcttgatcttgcttttacaaatccttcaagtgaagacccatcttctaccagttctcagggacctcattctatgggaaggttgttgcttaatcatgttaagtcaagaaatttgaaccctgacagtgaaccagtggagcagcaccacaaatatacttcagaatgtggccatcctgatcttactagtatgcattctccaaataagaaaccatctctgacgtgtcctgttgaagcaccgaattctatgggtgaaccattacttcataaggatacagaacatattcctgaaaccaattctttgggaagagcatactccaagttcagccaaccacttaaaatagatacatcaaacagtaatgaaaccaattgttctgtggtcaactcactgcttgataatgatacattgcaggccactgaggatactgacaaactgaaatctcatgtctcacctccatacagtggacctttgcagctacctacccaactagctgatgcaaggtttggggctcatacatcaccaggaatactaccgaacagtttgttaggggtggatgggtgtaatcacctttcaaatttgcaaaaaaatgacacaaatagccgttgctcccgatacaggtctgctgtaagcctagagctgcttccacctcaaaattttatttccactgatgcttgtcaatcaaggctcttgtcttatagaacacaaagtaatgacaaacattccagttctgttgcttctgctatgaatgcctctaaatctgcagatagtaagttacctcaggaacagtatttattggtcagaccatctttggaatttaatggaagtatttcagatgcggaaactcccttgggccgttctcctctgggcatgcaaaatgaaatgctccaagcagacccagtatatgactcagccaattgctctccaggaattttgggtgatgatgctcatgtcagcaaagcctatggtggttctgctgataacagaaagaacatatctgtggttccgaaagttggccccatcagttcatctagaatcagagatatgcaaataacagaaaagaatgtggtcgcttcatcagaaaaaaacaatggaaaactgcaagaaggaaaagcacaagagacccctcatcctaaggatgatgtgcaagtaaatgctgattcatgcacagctgaaaacattgagaaaatgaagtctccatgtacgtcagaatcatgtgaggagaacaacaagcaccaggaggatagaggacatgctcagaagaagtcagctgcagatgtcgtccagatcaatgggggtatgtcatccaaaagaaaacgaatgaagtgccaagacattgcatttcccagttctcaagacacaaatccattatttccgaaccaccaagatggcattggcacccatgtcgtaattgcagaaaaaatctcaatggaaatacaaccttctgatccttacatcctaagaagtacaggatttgatgacttcatgcttctcaaatctgagacaaagaatgatgcagtgaaccacagtatttcagttgcaagtgatgttcaacaaaacgagagttcttctcccaagctaagaaataggttcagcctagctgaggttgctctctgtaactcgtctagagcaaaggctttatcacctaattttagttgtgatatcagcagcaggaatgtagctgaagaaatggacctccaaaactatcaagcacagttacaaaatacttttgatgttgctacaagttctattatgcctagcagatctgatatttctcttgatagtgtggagctctgcagtcaagaggaaaatacttacttaaaaggagagggtttaagtgtttctaattccaatgtggaacattcacggatggctcctcagatggatgaaatattgtctcagagtgtgatactgaatccagcaaattatctcagcactgattcaacaaatatattcctgaattatgccttggatcaacatggtaaacatgcaccttctccagttaagaaattaagttatggctctggcgtagaagctgataggaaatttagaagtgaagatctaacaggatgtttgctatatgatggtactacctcaaggaaaaaggatagtgactctgtgaaatttaatgatgcaatgccacaatttgagagctttgatttttctcttccattggatagctcaactactgaagaaaaggcatttgggagtgttcatgattccatacaatttggtacatttaattcagatcccgctaataaacatgagatgagtgcagtaagtggcatgtatcagctattggcaactatgtcagggaaagctacaaactgcttgtttaatgatgatgaaaggcaacccggtgaaagtattgatggtagtgtaacagatatttttggttcaagtggattgggacataagggttctttcattactcctgattttgcagcgtcatgttcttcaaatgctgcgaacaaaaaggataatggtgaaaatccattgaccccttctgttgaaaagtattgtctggggaaactttcagaaaaaaatggatctgtttcggagcatatgggttcgattcctgagcttttatgcttccgaattgatgaagacaatgacattgcagaaggaaatgattaccgagagatattacctagatccataggcaaccaggagcaatcaggaaggaaagcacttcaggatatcactggactatgtcaaagcattgggaattctgcctcttattcgataggtatgagtatggatacaggtgacacagacatgactgtagaaacttgcagcagtgaactcaatcatcatccagatctcaggaatgatggtgataacaagaagcctaaagaaagttgtggttctttattaaaaaaaggagggaaaatgtctcgctcccttcataacagattaagcaagacagaaacaaggcacatgaatgaagcaaatcctggaaagcgttctaagcctagtaatattgttgctaatgtggcatcttttatacctcttgtgaagccaaaggtgcaaccaacagcatgtgatgttagagtgaaagcacttgagacagctgaagctgcaaaacgtcttgaagaaaagaaacgaagtgaacgtgaaatgcgcaaagcagcagcaaaactagagcgtgagaaactgaagcaagagaaagagttaaagcaaaaagaggaagaggaacagaagaagaaaagaggtgctgatgtggcaacaaggaagaggcagagggatgaggaggaaaggagggagaaggagagaaaaaggaaatgcattgaagaagctcgaaaacaacagaagcgacctattgaaagaaaacatgccaacattaacaatgctcatccagaaggtcatgataataaggagctgcagcagaattcggctgaagcggtgaaaggcccagtaaaatttgatgaaatgacaggtcttggaggaaatgccactaacagtaacaatgaaatggttgtgattaccgatgagaggcctgcaatttctggacctaattgtcaggaaaatatcccaaacagtattgaggagtcatacataatgactccatataaagattctgatgatgatgatgatgaggatttcgaacatatagaacattcaaggcgtaggaggaaattggttccttcatgggctcggggagagaacttggagaaaatcttgttatccaattatgttttggaccctaggaaaatctttgcacgaaaacgctcctctgatctctctgaaatttgtcctgcccacataccgcaacgtggtttcagatgagtttctttcctagttcgaaaataggtcccagatgagcttgcattgactgaactcttggttgtacgctgctgcctttcgtcaggcagtttgtgtataagctggtttcactagtttcatatatgtaagaacaacattcttgtaccgttaggcaactgcggcaacgatcgtacgttgttgtacatagtttcgattagttcaccaaggcttttgattcgacgcactccgtgcaaggagatataagctgttggttgacaagagtatttatcttgtctgagcactgtgctcaaaggagcagccatggttgttaaggtgtttctgtgtaacatcatgtaatgccatgatggagtaacttgtacacatggaaacgataaagatcggctatttttaacgcaaagaaatgacgcatcggattgtttaaacgatttggatcaatcatgcaaagttttctttgaataatgtggctggacattatgtacgaagaaaaaggaacgcggatcaaatagaggcaaagaacacggagcaaccatatgccacgagaatgttgcgtagaagaatggcacagtatttcccctgaagttaattatgtccgcgtggtgttcgtgcggcctgggctagccggctgggactgaggaacgcagcacgcagaatatctggtgtcggttgcaaaacgaacatgagacctatagtgacggttgagtccaggtcgcggcgcgtgccgtaggcatagtcggcggccgcattgtggcgagcgggtcgacgacgacgaagcctttgaggatggcaagtcgcacgtcgctcgtcacaatgatcgccgtggagcccggcgccacggacgcctgaactggtgggagtagaggcagagacagcggtgcccctccccgtgtgccgctccttactgctggcctcgtggagcttgtcttgatccttcgccccgccggcgactgtgccacaggtccacctgcagccgcaagtatattgcacatgaaacatccgcataacccacgagaagaagctagctgcactgcatgcgttgcatggccccccgagagatcacggttcggtggcctgtgggcgatgacagtgagagcagagagcacacggccctcgcagaagcgaggcttttcctcgctggtgctgggttgtgctctctctcttctgtcatcgctcccgaggtccactcgaccgctctctccatccctgcccgggcccccccgccggcgtcggccctccccctttgccacggaccctgcaccgagaggaaaacccaataagccatccatatctgccacgccagacgccacaccatcgtgcatgcgatgggactatgggaggagcgccactgcaccagcagatggccacacgcctgaatcatcagagaagtgtgggtggacggaggagtttgcttagcttcgccagttcgccgggagggagagaaacagcgtgaccatggacgacgagactccgatgctcgcccgccgctggcttgtggtgcgtgcttgcgaggagacggtgtgtgtgtgtgtgtgtgagagagagagagagagagagagagagagagagagagag

SEQ ID NO: 66154 - DNA, 267 bp, Zea Mays
tctttttttgttctatagatctgtgagagatcactgacacaatcgactggaggtccatcaggacccaacactccaaattttgtacatgtttttcagtgtttcccactgttttttttgttatttagtggtaacagcatggaggggccaacatccagcagttttgagaacatttagccagaggcttagcaggtttgtgatctgtgagagatcactgacacaatcgactggaggtccatcaggacccaacactccaaattttgtaagagc

SEQ ID NO: 66155 - DNA, 1880 bp, Zea Mays
aaatgcctcaagctgcggccacccgccgggaccagcctcgccgccgcgcgccaaaaccctaacccctcccggcgtccgcccctgccgcgtgacggccccagagatggggcgagacaagagccgtcgtctatacggcagccgccacttccggcagcggctggtgctggcgacgctcacctctaccgctgtcaccatcgaggacatccgctctggggacgcttcgccggggctccgcccttacgaggtctccctcctccgcctcctcgacaagatctcagaccatcacaccattgacctcaacgagacaggaacgaagctgaggtaccggccgggggtgattatagggggaaagggccttgagcacgactgcggggtgcaccggggtattggatactttcttgagccactcatactgcttggtctattttcgagggcccctatatcgattcggcttaaagcactttggtgttcctctggatggtttcgatctaaatattgacagccgtggatctcctcctcttggtggtggtgaggtgtttctccgggttcgcaatataaatagcacattgacggcagcaaattgggtagatgaaggtatggtgaagaggataaggggtgtttcgttctccactagagtatctccacagttggaaaaccgcatcatttatgctgcacgtggaatcttcaatcgtttcattcctgatgttcatatacacacggatcatagatctggttctgctggtgggaggtcaccaggctatggtgtatcgttagttgctgagaccactacgggatgcctgctctctgtagatgtcactgtgagttatcctagtgttgatgaaataaatgaagaatctgagaagcctgagctgacttctccggaggatcttggtgttcaagctgcatcaatgctactagaagaggtggctcaaggaggtgttgttgattctacacatcaggtctgggcttttatgcaagcattctatgtatttctgaattttgcctggtgttaagctcgatgatagctgtatatattgttatgggctcagtgaagcttagacaggagtacaggacagtgaagcattttgttcttttggactgtttgtgtctactacagacaagctgcaagttctacatggcatgtggataactagatatgatttttttcaacgatctactttctcttaaaaaatgttgtcctctcttggactgacagtgctgtacatttatgtttgcccatcttaaattgcttgttgtctatcctgatgatattccatgcataagttacagatgcttttgtttagtgattttatcttaaatgcttgcagggcctcctatttattctgtgtgctttatgcccaccggatgtatcaaaggttcgtgtgggacagttgactccatatggtatagagacacttcgaaacatcagagattttcttgacgtcaagttcatcatcaagcctgatcccaattcaaacaccgttactttaaaatgtgttggcgcgggagtgaagaatcttgctcggaagatttcataagcaacatgaccattaatctgatgaaggatccatgccacatcaagagactactatgagaccctatttgtaactgcaaacaacagtgtaggagtttcccttagctgttactgctgaaattctattcgaggtccatgatgtcttagacatcaccgatgtacatcagtattagaatggattgttctgatcatgatgccctgtattgtcgacacatttttgcatcacattgcttcactccaactatgccatgacatgctgatacatagaaatgaagaaaaggtgacaaacgtccagactaaatgtttgttttaccatgtgcattttgtttgatcaaattgtcctgtg

SEQ ID NO: 66156 - DNA, 1548 bp, Zea Mays
gctgcggccacccgccgggaccagcctcgccgccgcgcgccaaaaccctaacccctcccggcgtccgcccctgccgcgtgacggccccagagatggggcgagacaagagccgtcgtctatacggcagccgccacttccggcagcggctggtgctggcgacgctcacctctaccgctgtcaccatcgaggacatccgctctggggacgcttcgccggggctccgcccttacgaggtctccctcctccgcctcctcgacaagatctcagaccatcacaccattgacctcaacgagacaggaacgaagctgaggtaccggccgggggtgattatagggggaaagggccttgagcacgactgcggggtgcaccggggtattggatactttcttgagccactcatactgcttggtctattttcgagggcccctatatcgattcggcttaaaggatccttctgtggatactttccggacaacaaccttgcatatgctcaagcactttggtgttcctctggatggtttcgatctaaatattgacagccgtggatctcctcctcttggtggtggtgaggtgtttctccgggttcgcaatataaatagcacattgacggcagcaaattgggtagatgaaggtatggtgaagaggataaggggtgtttcgttctccactagagtatctccacagttggaaaaccgcatcatttatgctgcacgtggaatcttcaatcgtttcattcctgatgttcatatacacacggatcatagatctggttctgctggtgggaggtcaccaggctatggtgtatcgttagttgctgagaccactacgggatgcctgctctctgtagatgtcactgtgagttatcctagtgttgatgaaataaatgaagaatctgagaagcctgagctgacttctccggaggatcttggtgttcaagctgcatcaatgctactagaagaggtggctcaaggaggtgttgttgattctacacatcagggcctcctatttattctgtgtgctttatgcccaccggatgtatcaaaggttcgtgtgggacagttgactccatatggtatagagacacttcgaaacatcagagattttcttgacgtcaagttcatcatcaagcctgatcccaattcaaacaccgttactttaaaatgtgttggcgcgggagtgaagaatcttgctcggaagatttcataagcaacatgaccattaatctgatgaaggatccatgccacatcaagagactactatgagaccctatttgtaactgcaaacaacagtgtaggagtttcccttagctgttactgctgaaattctattcgaggtccatgatgtcttagacatcaccgatgtacatcagtattagaatggattgttctgatcatgatgccctgtattgtcgacacatttttgcatcacattgcttcactccaactatgccatgacatgctgatacatagaaatgaagaaaaggtgacaaacgtccagactaaatgtttgttttaccatgtgcattttgtttgatcaaattgtcctgtg

SEQ ID NO: 66157 - DNA, 2665 bp, Zea Mays
tgactggtcgaatgaccgccggctgactgactgactgattgattcgggtgtcattttccccaggtggggatgaccattcctgatctgttgcttgctttaatgcctccctccccatcactttccagatccagcccacctcttcccttcctcctcctcctcctcctcctcctcccccgcgtctttataaatctcccgctgccgcattcactggccaccggagttagtgcccccatgtcctgacgcggacgcgcggggagcacaccacatgccgacgtgctgtgctgttgcctcatatgatttcgatcaggagctggggattgccctgccactctgctgaaagttttggagaagttgtggtgtttccctgcctattagagtctgcgcttctgtgttcctgatcaactgctactacgcgattgttgtcttctcaatctgtctggccaagcatggctggccagacgtcaaaggcaaaggaagcaggaaaagatgacagagaagaacccggagctgaggcggcgaaagagaagttagtgccgtctcaccagcagcaagagtctccagcttctgtggtggacaaggattcttcaggtgtgtcttcagttcctggtgatgagtcaccggtcctagaaggggattctgttgagttgaaagtggaggaaaacttggatggtaatgggaataaggaaaataaaacgtcccagaagagcagtacaagtgatggctttgcttctgctaaagtgagtgatgggacaagtagtttgaggaagaccagtggtagtgtggccatgagtactcgggctgatttcactgagagtgggaagagcagcatgtgccgtgcgagcaccgccagtgacattagcgatgagagctcctgcagcagcatgagcagtgccaccacgaagccacacaaggggaatgattcaaggtgggaggctatccatgtggtgaagtccagggataaagttcttggactgaatcatttcaggctgcttaagaagttgggctctggtgatataggaagtgtgtacctatctgaattgagtggtacacggagttactttgccatgaaggttatggataagacttctttggcaagtcggaagaagctgcttcgagctcagaccgagcgggagatcctgcagtccctggaccatccatttctaccaaccctgtatactcactttgagacagataagttttcatgcttggttatggaattctgccctggaggggaccttcacactcttcgccaaaggcagcctggaaaatatttttcagagcaagcagcaaagttctacgtagctgaggtgctccttgcattggaatacctgcatatgcttgggattatataccgtgatctcaaaccagaaaatgtcctcgttcgggaagatggccacatcatgctgtcggacttcgatctatctcttcgctgttcagtgagcctaacggtgatcaagtccgcaaatcctggcctagatgcattgcagaggaacaatgcagcgtactgtgcccagcctgcttgcatcgaaccatcctgcattcagccctcctgtgtagctccaaccacttgctttggcccccggttcttctccaaatccaagtccaagtctaagtccaagcccaagaaggagaagtcgaagcctgatggtccaaaccaagagaacctcttcccggagctgattgctgagccaactgatgctcgctcgatgtcctttgttggcactcatgagtacttggccccagaaataataaaaggggagggccatggaagtgctgtggattggtggacctttggcatattcttgtacgagctgttgttcggcaagacccctttcaaaggttccggcaaccgggctacactcttcaacgtcgtgggccagcccttgaggttcccggagtccccgatagtgagcttctctgcgagggacatgataaggggattgctcgtcaaggacccgcagcaccggctcgggtacaagcgtggtgctaccgagataaagcagcaccctttcttcgagggcgtgaactgggctctcataaggtgcgcgagccctccggacataccaaagcccctcgagctcgagtgtcgcccaaagcaagtgccatcagcaaacggaaaggtcgcgccggtcgctaaccaaaagggcccagataattatctagagttcgaattcttctagttttttgttttgtttttgtttttgtgatttctgaactgcaagagtgcgtctgggctgatgctgtgaaagaaagtgaaagatgataacctactctaggcatgcgcttcgctggatttttttcttcttctgccattagactgtactacgctcgtttcaggatatccgagttatttttttttctctgttgaactgcttaactctaaggtgtactcaatccatcatgtatgttgcaattttcagaacctgcctatggtacttgaaatgtatttcagggctgtgttattgctattgtaactttgtaattgatgcctcctcttagaacatgtcttcctctacactacaaacgctgatatctgaacatggcattgctacttatctttattttattccattttagtctctaaatagctaaataccgaaacaaaaagtctaaaatagagttttaattttcatatttataaactaaaatagaataaaatagaggg

SEQ ID NO: 66158 - DNA, 2748 bp, Zea Mays
atacctgcctctcttcttttttttttcccggtggggagaaaagcgggggcagcgagttgtgcgccttgtgagcttgcagctgttccaggttgcaatgcctgtgctgctcgtgctttagtctaggctgccccctttttcttcccgttcgctttgggaacataaaagattttttctccctttctttgctaatctctctggcgctggcccacttcgcccccctatttttgtggggaatgccggggtgggggcttgtgatttttgagccctcgttctagtgcttggccttttggggagtgttgatgcggcgttatggggcgatggatctgttgtgaaacgcgagctcgtagcactagcactagcttgtccgggaccgggagcctgcgagatcaggagctggggattgccctgccactctgctgaaagttttggagaagttgtggtgtttccctgcctattagagtctgcgcttctgtgttcctgatcaactgctactacgcgattgttgtcttctcaatctgtctggccaagcatggctggccagacgtcaaaggcaaaggaagcaggaaaagatgacagagaagaacccggagctgaggcggcgaaagagaagttagtgccgtctcaccagcagcaagagtctccagcttctgtggtggacaaggattcttcaggtgtgtcttcagttcctggtgatgagtcaccggtcctagaaggggattctgttgagttgaaagtggaggaaaacttggatggtaatgggaataaggaaaataaaacgtcccagaagagcagtacaagtgatggctttgcttctgctaaagtgagtgatgggacaagtagtttgaggaagaccagtggtagtgtggccatgagtactcgggctgatttcactgagagtgggaagagcagcatgtgccgtgcgagcaccgccagtgacattagcgatgagagctcctgcagcagcatgagcagtgccaccacgaagccacacaaggggaatgattcaaggtgggaggctatccatgtggtgaagtccagggataaagttcttggactgaatcatttcaggctgcttaagaagttgggctctggtgatataggaagtgtgtacctatctgaattgagtggtacacggagttactttgccatgaaggttatggataagacttctttggcaagtcggaagaagctgcttcgagctcagaccgagcgggagatcctgcagtccctggaccatccatttctaccaaccctgtatactcactttgagacagataagttttcatgcttggttatggaattctgccctggaggggaccttcacactcttcgccaaaggcagcctggaaaatatttttcagagcaagcagcaaagttctacgtagctgaggtgctccttgcattggaatacctgcatatgcttgggattatataccgtgatctcaaaccagaaaatgtcctcgttcgggaagatggccacatcatgctgtcggacttcgatctatctcttcgctgttcagtgagcctaacggtgatcaagtccgcaaatcctggcctagatgcattgcagaggaacaatgcagcgtactgtgcccagcctgcttgcatcgaaccatcctgcattcagccctcctgtgtagctccaaccacttgctttggcccccggttcttctccaaatccaagtccaagtctaagtccaagcccaagaaggagaagtcgaagcctgatggtccaaaccaagagaacctcttcccggagctgattgctgagccaactgatgctcgctcgatgtcctttgttggcactcatgagtacttggccccagaaataataaaaggggagggccatggaagtgctgtggattggtggacctttggcatattcttgtacgagctgttgttcggcaagacccctttcaaaggttccggcaaccgggctacactcttcaacgtcgtgggccagcccttgaggttcccggagtccccgatagtgagcttctctgcgagggacatgataaggggattgctcgtcaaggacccgcagcaccggctcgggtacaagcgtggtgctaccgagataaagcagcaccctttcttcgagggcgtgaactgggctctcataaggtgcgcgagccctccggacataccaaagcccctcgagctcgagtgtcgcccaaagcaagtgccatcagcaaacggaaaggtcgcgccggtcgctaaccaaaagggcccagataattatctagagttcgaattcttctagttttttgttttgtttttgtttttgtgatttctgaactgcaagagtgcgtctgggctgatgctgtgaaagaaagtgaaagatgataacctactctaggcatgcgcttcgctggatttttttcttcttctgccattagactgtactacgctcgtttcaggatatccgagttatttttttttctctgttgaactgcttaactctaaggtgtactcaatccatcatgtatgttgcaattttcagaacctgcctatggtacttgaaatgtatttcagggctgtgttattgctattgtaactttgtaattgatgcctcctcttagaacatgtcttcctctacactacaaacgctgatatctgaacatggcattgctacttatctttattttattccattttagtctctaaatagctaaataccgaaacaaaaagtctaaaatagagttttaattttcatatttataaactaaaatagaataaaatagaggg

SEQ ID NO: 66159 - DNA, 2399 bp, Zea Mays
cttctctctctctctctctcttccacacacacacagatcaggagctggggattgccctgccactctgctgaaagttttggagaagttgtggtgtttccctgcctattagagtctgcgcttctgtgttcctgatcaactgctactacgcgattgttgtcttctcaatctgtctggccaagcatggctggccagacgtcaaaggcaaaggaagcaggaaaagatgacagagaagaacccggagctgaggcggcgaaagagaagttagtgccgtctcaccagcagcaagagtctccagcttctgtggtggacaaggattcttcaggtgtgtcttcagttcctggtgatgagtcaccggtcctagaaggggattctgttgagttgaaagtggaggaaaacttggatggtaatgggaataaggaaaataaaacgtcccagaagagcagtacaagtgatggctttgcttctgctaaagtgagtgatgggacaagtagtttgaggaagaccagtggtagtgtggccatgagtactcgggctgatttcactgagagtgggaagagcagcatgtgccgtgcgagcaccgccagtgacattagcgatgagagctcctgcagcagcatgagcagtgccaccacgaagccacacaaggggaatgattcaaggtgggaggctatccatgtggtgaagtccagggataaagttcttggactgaatcatttcaggctgcttaagaagttgggctctggtgatataggaagtgtgtacctatctgaattgagtggtacacggagttactttgccatgaaggttatggataagacttctttggcaagtcggaagaagctgcttcgagctcagaccgagcgggagatcctgcagtccctggaccatccatttctaccaaccctgtatactcactttgagacagataagttttcatgcttggttatggaattctgccctggaggggaccttcacactcttcgccaaaggcagcctggaaaatatttttcagagcaagcagcaaagttctacgtagctgaggtgctccttgcattggaatacctgcatatgcttgggattatataccgtgatctcaaaccagaaaatgtcctcgttcgggaagatggccacatcatgctgtcggacttcgatctatctcttcgctgttcagtgagcctaacggtgatcaagtccgcaaatcctggcctagatgcattgcagaggaacaatgcagcgtactgtgcccagcctgcttgcatcgaaccatcctgcattcagccctcctgtgtagctccaaccacttgctttggcccccggttcttctccaaatccaagtccaagtctaagtccaagcccaagaaggagaagtcgaagcctgatggtccaaaccaagagaacctcttcccggagctgattgctgagccaactgatgctcgctcgatgtcctttgttggcactcatgagtacttggccccagaaataataaaaggggagggccatggaagtgctgtggattggtggacctttggcatattcttgtacgagctgttgttcggcaagacccctttcaaaggttccggcaaccgggctacactcttcaacgtcgtgggccagcccttgaggttcccggagtccccgatagtgagcttctctgcgagggacatgataaggggattgctcgtcaaggacccgcagcaccggctcgggtacaagcgtggtgctaccgagataaagcagcaccctttcttcgagggcgtgaactgggctctcataaggtgcgcgagccctccggacataccaaagcccctcgagctcgagtgtcgcccaaagcaagtgccatcagcaaacggaaaggtcgcgccggtcgctaaccaaaagggcccagataattatctagagttcgaattcttctagttttttgttttgtttttgtttttgtgatttctgaactgcaagagtgcgtctgggctgatgctgtgaaagaaagtgaaagatgataacctactctaggcatgcgcttcgctggatttttttcttcttctgccattagactgtactacgctcgtttcaggatatccgagttatttttttttctctgttgaactgcttaactctaaggtgtactcaatccatcatgtatgttgcaattttcagaacctgcctatggtacttgaaatgtatttcagggctgtgttattgctattgtaactttgtaattgatgcctcctcttagaacatgtcttcctctacactacaaacgctgatatctgaacatggcattgctacttatctttattttattccattttagtctctaaatagctaaataccgaaacaaaaagtctaaaatagagttttaattttcatatttataaactaaaatagaataaaatagaggg

SEQ ID NO: 66160 - DNA, 1729 bp, Zea Mays
gcaaaactgcaaatgcgggcgaccaggcaacgaagacactcgggagtcgggtctcggggttccagttcgacgacgacccttgagtactacttgactcgagtccacaatgcttcgcctccagggacggcgcacgagcgcgcggatggctaacgacgtgggggtgtccacgccggatgtagggcacgaagcggcggcgctgagcggcgggacgggggatgaggagccattggtgtccaccgggacggaggagccgccggcaacggaggatggggtgccggcggaaatcgaggaagaggggaagggaccggcggcgccattggaggggtcaccggcggtgatcaccgtggaaggagaggaggaggtgaagtggctggggcattactcctctgcgcagaccattctcatcgtcggcgacggagacttctccttctctctggcgctggccaccgcattcgactccggtgccaacctcgtcgcgacgtccctcgacacctatgaggtcctgaagcgtaagtacagcaaagcggaggcaaatatagtgattctgaaaagattgggcgccacggttttgcatggtgttgatgcgaaacgaatgaggtttcacactgacttgaagaacagacggtttgatcgtattgtctttaattttcctcatggtggattcaaaggaaaagagaatgacttgcgtatgatcaacttgcacaaggagttggtgtgggtttttttccgcaatgcacgccaccttgttcggcaacttggtgaagtccatgttacccacaagtctggggaaccatacgacagctgggatcttgagcacctggcctctgagtcttcttttgctatgtttgacaaagttccttttcgaagggaagactatccaggttataatcaaaagagaggagatggtaagaggtgcgacaaaccttttgatcttggtgcatgttgcacattcaagttccaaatcagaaacttgaagaagcagaagcaaatgaataggaggtctcgtttaatcccaaaccttgtaggcagcaactttcatccaggccattcggtaactgacaggggggtatttcatccagttgcacctgttgaagcaaggtcttggcaccatttttctccgccagctcacacagagagcatgctgatgtctccacagccttacacagttaatcaatggcaacggtcaggttttccactgaactctgatggcattgtggctggaccttatttgcataaacaggagagttgccacccggtggtgagcatgccaggcccatggctgaatgatttgcccgctcaaggtggcattcctccacctctaccaatgagcagaatcccatctcctgatctccttgcacctcgggagcagccttggtatcagcagagaactattcttgatcacccaggagtcgatgactacttctttgcccgggaacaccaaatgagtctacagagggagtatgaaatgaagaggcaagtcattccattggaacatcgccgtagggacagggagtctgttgagaagctagagtggctgcacaggatgatcgcattgtatggtaggaagtgaaggatctttgggaggtgccagtatgaaggagctgggcctaccagtttcaggcttctataggactacaggcagttaagcatgcctgcttttgaagtggagctgtccgaagagagttcctgattagttgctcattctgcaatagagtatggcttacatttt

SEQ ID NO: 66161 - DNA, 2447 bp, Zea Mays
gaagccatgaaaatgtgttctagttaggacgtagctgatgcgggcccattcatggttactgcacgagagcagagtctcttttgtgattattatgcggtgaagcagtagcagcaccagctagctcgacaatctatagtgcactctctgccaaaacctgatgagctgagctagctgcgggtcggccatgagagaactctcatcagagctcagtgtttatgcatcagtggacctgaccattcattcttatcgctctgatgctcttctgcaaacaaaaaaaaataatgggcgcgcgcagcaagatcgatatgtctgagacgctgacacggccattagcctcaagcaccgcggttgtttatgcttggggagtactagaagctgatcggcgcgcggttcttcaacaaggggtacctggcgacggtggggcggcggcagcagcagcaggaggtgaacccggcgagcacgcgggacacggacgggcacggcacgcacacgctgtccacggcggcggggcggctcgtcccgggggccaacctcttcggctacggcaacggcacggccaagggcggggccccagcggcgcacgccgccgcgtacaaggtgtgctggcgccccgtgaacggcagcgagtgcttcgacgccgacatcatcgcggcgttcgacgccgccatccacgacggggtgcacgtgctctccgtgtccctgggcggctcgcccgccgactacttccgcgacggcctcgccatcgggtcgttccacgccgccaggcacggcgtcaccgtcgtctgctcggccggcaactccgggcccggcgccggcaccgtgtccaacaccgcgccgtggctgctcaccgtgggcgcgagcaccatggacagggagttccccgcgtacctggtcctcgacaacaacaagcggatcaaaggacaaagtctctcgcggacccgccttcctgccaacaagtactaccagctgatcagctcagaagaagcaaagggagccaatgcaacagtaacgcaagcgaagttgtgcatcggggggtcactggacaaggcgaaggtcaaagggaagatagtcgtgtgcgtccgtgggaagaacgcacgagtggagaaaggtgaggcggttcaccgggctggcggagctggcatggtgctggcgaacgatgaggctagcgggaacgaggtcatcgccgacgcacacgttctccctgccacgcacatcacctacgctgatggagttacgcttttggcctacctgaaagctacaaggttggcatccggctacatcaccgtcccgtacaccgcgctggacgcgaagcctgcgccgttcatggccgccttctcgtcgcagggccccaacaccgtcacgcctgagatcctcaagcctgatatcaccgcgccaggggtcagtatcctggcggcgttcaccggggaggcgggaccgaccgggctcgccttcgacgaccgccgtgtcctctttaacgccgagtccggcacctccatgtcgtgcccgcacgtcgccggcatcgccggactcctcaaggccgtccatcctgactggagccctgccgcgatcaagtcggcgatcatgacaaccggacaacatgaggaagccgatgagcaactcgtccttcctccgcgcgacgccgttcggctacggcgcggggcacgtgcagcccaaccgcgccgccgacccgggccttgtctacgacgccaacaccacggactacctcagcttcctctgcgcgctgggctacaactcctcggtgatcgccacgttcatggccggcgccggcgacggccacgaggtccacgcctgcccagcccgcctgaggccggaggacctcaactacccgtcagtcgcagtgccgcacctgtcccccaccggcggcgcgcacaccgtgacgaggagggtgaggaacgtcggccccggtggcgccacgtacgacgcgaaggtccacgagccgcgaggcgtggcggtggacgtgcggccaaggcggctcgagttcgccgcggcgggggaggagaagcagttcaccgtcacgttcagggccagggaagggttcttcctgccgggggagtacgtgtttggccggctggtgtggtcggacggacgcggcaggcaccgcgtgaggagccccttggtggcgagggtcgtgaacaccaagaagaagcacatttccatagcttgacgaactcgcttaggatctcatgcatggtgatgagctgagcagtgaagcctggccaaagaaggtttggcttcatgaacaatataatgatatactgacaaagtgacaacggaaacggatctgcagtggtctaaaagttcagagatttggttcattttctaacatgcggatgtggatttgaattctacaacgatccatgaaatttcacgagtttttgtttgtccattcaagagagatcattcttacggaagacttacgaaacggg

SEQ ID NO: 66162 - DNA, 2868 bp, Zea Mays
ccgccgcctccatgaaaaagcaccacaagtttctctttttcttccaccgctatatccatcgccgaacatccaagccctacacctcggcagctcaccgcgccgtccccatatccttcccctccagccccgcctcctccaccggccttcgcgaactcgacctccttcacgcgggcgagctcgcgccgaccccgcgcttatatcactccatcatcgctgcttgcgcacagttcaagaacctcgccggtgctcgtgccatccacgcgcacctgtcccgctcctgcctcgcgggcgatgctttcctcctcaactcgctcatacacatgtattgcaaatgcggcgccgtgtcggacgcgcgccacgtgttcgacaaaatgcccagccgggacgtggtctcatggacctacctcatcgcgggctatgcacagaactacatgccggcagaggccattgggcttctacccgacatgctcagggcgcggttcaggcccaacgggttcacgttcaccagcctcctcaaggccaccggcgcctgcggtggctgtagcattggggagcagatgcatgctctggctgtgaagtacaactgggatgaggatgtctatgtggggagtgcacttctggacatgtatgcacggtgtgaacaaatggacatggccattatggtgtttgaccgtctggtctcgaagaacgaggtgtcttggaatgccctgattgctgggtttgcaaggaaggccgatggagagaccacgttgatgaagtttgcagagatgcagaggaatggatttggggcgacacactttacgtactcgagcatgttctctgcatttgctcgtataggtgctcttgagcagggcagatgggtgcatgcacatttgattaagtctgggcagaaactaactgcctttgtggggaacactatgcttggcatgtatgcaaagtccgggagcatggttgatgctagaaaggtgtttgatcgtatggataagagggatctagttacttggaacacaatgctcactgcacttgcacagtatggtcttggaaaggaagcagtcgctcattttgaggaaattagaaaatgtggcatccagcttaatcagatcaccttcctttctgtcttgacagcctgtagtcatggaggcctggtgaaggagggcaagcactactttgacatgatgaaagactataatgtgcagcctgagatcgatcattatgtaaatggaatgatgctgctagagtgaggaagatgatgaaggcaactggtgtaaagaaggagcctgcatgcagttgggttcagatcgagaattcggtgcatatgtttgtggcagatgacgatacccatccgaaatcaggagacatatataggatgtgggaggagataaacatgagaattaaaaaagcaggatatgtccccaatacagctcatgtgcttctgcatataaatgagcaagagagggagacaaagttgaagtaccatagcgagaagattgcacttgcatttgcgttgatcaacatgcctgcaggggcatcaattcggatcatgaagaatattaggatatgtggggattgccattctgcattcaaatatgtctccaaagtattcaaaagagagattgttgtgagggacactaacaggttccaccatttcagcgaaggctcttgttcctgtggagattattggtgaatggtgattgtggattttggatgttggtgaattctcaggccctaaaaggctaaaaggaaaaacaaaacagtgaagtgggagctttgtaataacaactggatcaagcctttccttcggtagatcacaacagccatgcggctcggagaatttgtttccctctagatcatccacatgcatcaaattaaccttcaaccaggtgccgcagattgcattagatggtgttggactgtggatggaaagtaccaggcaaaatcagcttatgatgcacaattcaaggacatctttatttccttcaagtcaaacctaattttgaagacaagagctgaaaacaaatgtgaattctttgcctcttggactgtcatacaagagaagatcctcacagccgatggtttggcaattcgtggctagcctcatcaatcagtctgtgttctttgcaatggtccctagattacctttatgcctgcagtgcccttatgcataattgatctggtcacaagtcctagcctcggaacggattattctgcctcatacgtgtgcctgggatagctttccttctggtaattttctttcctagaatccattttgctgtgttgacataaaccagatagcttgtgagatgatatttgttcacgagaatgacacagtgagtgtagacataggtaataggttcatgattctttactggcggatgattttgctacagagtgtcccgttttgcatttcaggttatcctaagaaataccaatggctcggctgcatcctattgcatggagcagttcttgtcagttatagtgtatcaggaaaccggtgcttccacactatggttaaacgcctcaatcaatggcaacccttcctgtttgtttaactttaacctatatggaagagacgagtatacatgggggcattgttgtgaattgatgtggggtgtccggatatcatatgagaacccctctgagaaacaaaagatgcttcatctgcactgatgatggtaccagagagtactgtgatcagactttcaaacttgaggatggatcacatcctcctatatgataagcgttgtatgagtggggtgctgtacacgtgtactattctatggccttgaaggtgcaccctgcaaggggctaatatattgcttaccaccggcattatctgacgctctcttcagaggtttcttgagaacttct

SEQ ID NO: 66163 - DNA, 2929 bp, Zea Mays
ccgccgcctccatgaaaaagcaccacaagtttctctttttcttccaccgctatatccatcgccgaacatccaagccctacacctcggcagctcaccgcgccgtccccatatccttcccctccagccccgcctcctccaccggccttcgcgaactcgacctccttcacgcgggcgagctcgcgccgaccccgcgcttatatcactccatcatcgctgcttgcgcacagttcaagaacctcgccggtgctcgtgccatccacgcgcacctgtcccgctcctgcctcgcgggcgatgctttcctcctcaactcgctcatacacatgtattgcaaatgcggcgccgtgtcggacgcgcgccacgtgttcgacaaaatgcccagccgggacgtggtctcatggacctacctcatcgcgggctatgcacagaactacatgccggcagaggccattgggcttctacccgacatgctcagggcgcggttcaggcccaacgggttcacgttcaccagcctcctcaaggccaccggcgcctgcggtggctgtagcattggggagcagatgcatgctctggctgtgaagtacaactgggatgaggatgtctatgtggggagtgcacttctggacatgtatgcacggtgtgaacaaatggacatggccattatggtgtttgaccgtctggtctcgaagaacgaggtgtcttggaatgccctgattgctgggtttgcaaggaaggccgatggagagaccacgttgatgaagtttgcagagatgcagaggaatggatttggggcgacacactttacgtactcgagcatgttctctgcatttgctcgtataggtgctcttgagcagggcagatgggtgcatgcacatttgattaagtctgggcagaaactaactgcctttgtggggaacactatgcttggcatgtatgcaaagtccgggagcatggttgatgctagaaaggtgtttgatcgtatggataagagggatctagttacttggaacacaatgctcactgcacttgcacagtatggtcttggaaaggaagcagtcgctcattttgaggaaattagaaaatgtggcatccagcttaatcagatcaccttcctttctgtcttgacagcctgtagtcatggaggcctggtgaaggagggcaagcactactttgacatgatgaaagactataatgtgcagcctgagatcgatcattatgtaagctttgttgatcttcttggtcgagctggcttattgaaagaagctctgatctttgtgtttaaaatgcccatggaaccaacagctgctgtttggggagccttgcttggggcttgcagaatgcataagaatgctaaaatggggcaatatgcagctgatcatgtctttgaacttgatccagatgatactggtccacctgtgctgttgtataacatatacgcttctacaggtaaatggaatgatgctgctagagtgaggaagatgatgaaggcaactggtgtaaagaaggagcctgcatgcagttgggttcagatcgagaattcggtgcatatgtttgtggcagatgacgatacccatccgaaatcaggagacatatataggatgtgggaggagataaacatgagaattaaaaaagcaggatatgtccccaatacagctcatgtgcttctgcatataaatgagcaagagagggagacaaagttgaagtaccatagcgagaagattgcacttgcatttgcgttgatcaacatgcctgcaggggcatcaattcggatcatgaagaatattaggatatgtggggattgccattctgcattcaaatatgtctccaaagtattcaaaagagagattgttgtgagggacactaacaggttccaccatttcagcgaaggctcttgttcctgtggagattattggtgaatggtgattgtggattttggatgttggtgaattctcaggccctaaaaggctaaaaggaaaaacaaaacagtgaagtgggagctttgtaataacaactggatcaagcctttccttcggtagatcacaacagccatgcggctcggagaatttgtttccctctagatcatccacatgcatcaaattaaccttcaaccaggtgccgcagattgcattagatggtgttggactgtggatggaaagtaccaggcaaaatcagcttatgatgcacaattcaaggacatctttatttccttcaagtcaaacctaattttgaagacaagagctgaaaacaaatgtgaattctttgcctcttggactgtcatacaagagaagatcctcacagccgatggtttggcaattcgtggctagcctcatcaatcagtctgtgttctttgcaatggtccctagattacctttatgcctgcagtgcccttatgcataattgatctggtcacaagtcctagcctcggaacggattattctgcctcatacgtgtgcctgggatagctttccttctggttatcctaagaaataccaatggctcggctgcatcctattgcatggagcagttcttgtcagttatagtgtatcaggaaaccggtgcttccacactatggttaaacgcctcaatcaatggcaacccttcctgtttgtttaactttaacctatatggaagagacgagtatacatgggggcattgttgtgaattgatgtggggtgtccggatatcatatgagaacccctctgagaaacaaaagatgcttcatctgcactgatgatggtaccagagagtactgtgatcagactttcaaacttgaggatggatcacatcctcctatatgataagcgttgtatgagtggggtgctgtacacgtgtactattctatggccttgaaggtgcaccctgcaaggggctaatatattgcttaccaccggcattatctgacgctctcttcagaggtttcttgagaacttct

SEQ ID NO: 66164 - DNA, 766 bp, Zea Mays
agactagctggcaggcatcgcagtggctcgggcgggcgtcgtcgcacgtacacgcgctcgatcaaggagcataccgctgcactagcgacattggtctcctggtcgttcggtctgttcgtttctggcgttgggctaatatataggcccggccagccgagcgtgagccttggtgtggcgtgcgtgcaaaacgttagatcgcccgtcccgctgtccatgtcctccgtctaccgtctaccatcgacaccacctcgccaggcagcgcgcaaaacctctcccatccgatcctgctctccgctgtcttctcgaccgtacgagcggccgccggagcgcaatgcgaagcgcgcgagggaggaggagatccatgccgcgcccgcgcagccggacttccccttcgaggaggaggaggaggaggaggaggaggaggaggaggccgcggcgggggcgggcgaggcgtcgcggcggccaccgggggtgttccagttcccctggcagaagtgccgcggcgggctgggcgtgtccgccgctgggtcgtcacgggagctgcgcgacgtcttcttccgctccctcgtcgacgggggcgccgcggccatcggcgtgccgggggaccggctggtgtcgccgccgcccggcaggcgcgcgctcctcgagggcgtcgacgcgtggctcgccgcggccgccgacggcgaggtggacccggtctggcggtccgcgctcatggcccgctcgtcgaggatggacggacgtgggccctccccgcgcatgcttc

SEQ ID NO: 66165 - DNA, 1131 bp, Zea Mays
cgcacgctaagcaaagacaacagccacggttccgccccgtgacggcaccgttttcccgccgtggcggcgcgcgcggatgtggaattgtggatggatgatccaacgcccggcagacgactataaagggagaccgctataaaggcaacaggcgcagtgcttcacacccaccgcttccaccaccacaaccggacagggacacggcactagctcgtagaaggtcggccggccagccagagtcacagccgaaggtgaaagggagcggatatgggggcggatcgtttcctgagcgtggcggagggcggcctcggcggcgaggcgctctacttcgcggtcatcctgtggctgtccgtcatgtcgtggatcatcttcacctgggtcggcgacggcggggaggacgggaggcgggggaggaagcgccggggcagccgcggcagcccggtgttcgtcggcgcgtcggggatctgcgacggcaccgggcccgagtgcagcggcgggtacggcatctgcggcacctgcctcgactagcctgctctgctactagtaagtttgtgtgagcgtcaaaagcgcggccatgtttgtagctgtagcgtctacatgtcgtcgtcgatgcgtggcctcgatggagaagctggcgttgctctggtgatatgatgagagcagagcagctcccctgtgtgaagacaataagagggaggagcctactcatcagcctacttccatcttgcttattaggctgctcaaactgagttgtcgttagctcttttttttatttctccttcctttaaagtttgatctcgatcctctgtaaatttaagctgcagaagaaccaaatacatgtctcgaacagtactatgtgagacgagatccttcttcgtccgcgaggtaggcaatctgcagtggttagtgggaagtctcaagacggctttcggcaagcaagccaaagcttatctcgcttcctcaccacaaaagccactgttggagcaggctgcacaggaaacgttaagcatcagttaggccctgttcggatggtgattacattggttatcgtttacacctataataagtggtttttgagttgtatattcttatatcttatgcacaagaataaatggtgaacatatagtttgggaa

SEQ ID NO: 66166 - DNA, 2802 bp, Zea Mays
ccgcaatccatctaatcctaattctattgagttggttccataaaaccatattgttcttcgaaacccaccactatatgctactaaaaacaataagaaaattctagtaacacatgcatcatatattttatatattcacatgtataaactaacaggcaatatacggttcacatgtggttttgtggctattgtccaaaaaacaagcttttaatgcgtcctgacttagcagagagattgaggatggaagttgcttgatgtgtgctgagaaacagacaatgtacaagggtggacacactttgttcgttatttcagcttgcaataacttttaagtcagaaacatatataatatgctaaacgtccattatactaattcggaagtacattcaggcactttcacaactatctatgactcgtagtacacttgtaattgtgtaagcgaaaacactctattgttcagactgttttagacctcgtttggtttgagggactaaagattagtccctctattttagtcctcatttagtccctaaattgccaaagtgtgggactaaaactgggactaaactgttttagtctctagtccctcaaggggtgactaaaagagactaaaccatataaattccacttttgcccctcctttatttcagctgcacttatggtgggagaatgctaaggggtattttaatccccttataattcatttaatgtgttttgaatagttttagtccctagaaccaaacatgataggactaaactttagtctcctaactaaactttagtccctagactaaaggaaccaaacgggaccttagagtacagtgatgactctggatgtaacaattcgataaaaagagtgataaaaacgatcacacaaattacagcccttacctcggcattcttttatcactccacctctgaagggcacgtgcagtggctttcaacttaagagtcaggaaggggcaggagctaccaccacccgatgcccacgcttcctagactacttcctggaatccctccaattttggccaaaaagactaaaaatgaaaccttttttaccatagcagttgcttttggaagaatggaatcttgtcatcaatgtcccgaagcccatagacaccggataaccactaaggttggccatttgactgctggaattggacagaataagagcccactctgttatgccctgttgcttgcacatgccttttccaggctaaaagaataccaccgctagccccaaaggaaggtaaaaagaggaattcttcaaaagtcactccaagaatagcaaagatagttcctctagaaatattttgtatgttggtttcttgcaggcatacaatgtctgctccaacggaatcaacgaaagttcgtacagattgttgcttggatggagaattcaaaccccggacattccatataaatattttctttggatggttacaaaatttacccatcagatttagaatccaaagatattcttatcggacaactgcagaatgagttactgggtagttataggtcccttgagctacaaacagtggagagttgggaagctttgatatttcttactgttgtactgggaaaatttcatgagtcctgctcatttgttgatactgctaaactgaatatgcagcatcattgtcaagaaattgaaaataaattggttctgccaagagacatttagaagaacaatcttgcattattatccagtctctagctgaacagaaacagtcaagaaatttgaagaattttatggaacagctcaaagctcgcactgcttctgaaatttcagaaaaaggtaaacagatgtccattatgcaggatagagtttattatctgaatgtgtttgtgtctgatggcacacaggaataccccctccattctttctggaaaaaaacatgtggcgccattgtgtaactgtggttttgaggatatatgtagcttcatacccagtgttgttattacctaggtatctcctagcaagcacttctgttccaaaaagggtctggtagtgacagtgttgttattacccagttctacacaaaattagaggagaaacataaagctttggaagcagagaaggacgaggctgaggccaggaaaaaggtaagaagaacttgcttctgaattctgacatctatcttagaagcaaccaactgtaggtcaggtcacttgagttttctatattcttcttttgattggttttgtaaattttgctttgaaaataatagcaataagagcagtattcaaattgagttgtttctgggaccactcaactactaagggcaaaattgagttcatgaatgaagaaattgagttcatgaatgaagaaatttgtctaccgcttctccagatagggatttctttactgttagttggccaaacccattatagccaatcaatatatgctaccattctacacatgtatatgtgctaataactatatatatatatgcatgattaagttgagttttagttggtttttctttctttgcattggactattatgtttccgatgataagtttttaatacagtttcctacgatattctccatactttttctttttattgtatacttggaatcacatgagctaatcttatttccactacaaatgtagtgcgtacatcccactctagaaataattgttagttgcttatcaattaggctcccgtcctttgcattgctcatatacattgggcgagggcacaccaggttattgagtttgatctgtgttaggatttctaattgatgtgaccattggtattacttgtgatacatatagcacatatataccactgtagta

SEQ ID NO: 66167 - DNA, 1624 bp, Zea Mays
gtgattagcgagcgatagcaggtggctaatagagagccccagtccagtcccccatggcgtccgtgacgcggcgcgctctgtcccgtggctgctgcctcgcggctgtgctcgcgctagcagttgtcgcgtcagtggcggcggaggacgagaccaccagcgggccgagctggcacgtcgtcagcgtcaccgccatgctgccgagcgcggactgcacgcctgcgagagcggcatcaaactcgtcggccctcagtgtggtgcaccggcacggcccatgctcgccgctgctggcacggggcggcgagccgtctcacgcggagatcctagacagggaccaggacagggtcgactcaatccaccgcatgaccgctggcccgtggacggccggccagtccagcgcctccaagggcgtgtccctgccggcgcacaggggcctccgcctcggcacggccaattacatcgtctcggttggcctcgggacgcccaggagggacctgttggtggtgttcgacaccggcagcgacctctcgtgggtgcagtgcaagccgtgcaacaactgctacaagcagcacgacccgctcttcgacccgtcgcagtcgacgacctactccgccgtgccctgcggcgcgcaggagtgcctcgactcggggacctgctcgtcgggcaagtgccggtacgaggtcgtctacggcgacatgtcgcagacggacggcaacctcgcgcgcgacacgctgacgctgggcccgtcgtccgaccagctccagggcttcgtcttcgggtgcggcgacgacgacaccggtctgttcggaagggccgacgggctgttcggcctcggccgcgacagggtgtcgctggcctcgcaggcggccgccaggtacggcgcggggttctcctactgcctgccctcgtcgtggcgcgccgaggggtacctgtccctcgggagcgccgccgcgccgccccacgcccagttcacggcgatggtgacgcgcagcgacaccccgtccttctactaccttgacctggtcggcatcaaggtggccggacggacggtcagggtggccccggccgtgttcaaggcgcccggcaccgtgatcgactcgggcacagtcatcacccgtctcccttcccgcgcctactccgcgctccggtcctccttcgcgggcttcatgcgcaggtacaagagggcgcccgcgctgtccatcctggacacgtgctacgacttcaccggccggaccaaggtgcagatcccgtcggtggcgctgctcttcgacggcggcgccaccctgaacctcggcttcggcggtgtgctgtacgtggcgaacaggtcgcaggcgtgcctggcgttcgcgtccaacggcgacgacacgtccgtcggcatcctcgggaacatgcagcagaagacgttcgccgtggtctacgacttggccaaccagaagatcgggttcggcgccaagggctgcagctgagagtagtagtcatcaaccatgcgtggcgagcatgaggacgcccattggtgattcgatacacggtccatagttccatacaagttgatagggcaagtcgatgatgatcacggcctgtaattccacgatgaatgaaatggaaataaagatgatcaatacccgga

SEQ ID NO: 66168 - DNA, 2131 bp, Zea Mays
cccgtctcccctccactcgtctctccgttcggccgtgtccagtctccagtccgcaacggaaggagaggaggcgtcgagggaaaatcgcgccaaccgggccgaacgaatcgtcggaaggccggggaggaggtctagaaggtgtgggaatggcgacggggcttgccttggcggcggcgcctcatgttgcttcggtcacgggatcggggacagtggaggagcaggcggcgggggtcggcatcttgcttcagatatcaatgctcgtgctctcgttcgtgctcgggcatatcctgcgccgccgaaagttctactacatccccgaggccagcggctcactcctgatcgggatgattgttggagggcttgctaacatatcaaacactcagaaaagcatcaggagatggtttaattttcgggaggacttcttccttctctttttactgcctccaattatattccagtccggattcagcttagcaccaaaaccattcttttcgaacttcgatgctatcataacatttgcaatcctgggaaccttcattgcctccattgttacaggtcttttagtctaccttggtggattactatacattgtctacaggctcccactggtggagtgtatgatgtttggtgctcttgtatcagcaactgatcctgtgacagttttgtctatatttcaggagcttggcactgatacaaatctatatgcactggtttttggagaatccgttttaaatgacgctgtagcgatatccttgtacaggtctatggcatctatgaggacgcaccattctggaaaaaactttttccttgtaattctgaggtttcttgaaaattttgttggatcaatgtcatcaggcattggtgttggactaatttccgctctcctcttcaagtatgcagcactgggcgttgagaaccttcacaatctggagagttgcttgtttgtgcttttcccatacttctcgtacatgctagcagaaggcattggtctatctggcattatttctattctcttcacgggtattgtgatgaagagatacacattctctaacttatcagatgattctcagcgttttacagctcgcttttttcaccttctttcttcactagcagaagctttcgtgttcatatacatgggatttgatattgcgatagaacgtcaaagctggtcacatattggattcatatttttctcaattatcttcatactagttgcaagggctgcaaatgtcttctcttgtgcatacatactgaatttggcacgacctccacattgccaaatacctaggcaatatcagcaggctctttggtatagtgggcttagaggagctatggcttttgccctcgctcttcagtctgttcatgatcttccggatggacatggcgagacaatttttactgctaccacatctattgttgttctaactgtactccttattggtggctcaactggaacaatgcttgaggccctacaggtagttggggacagcaaccgttattgccaactgtatgaggagagttctaatggcaacgacactggttacacgggacaaaattatgatgaaggagcatccacttcaagcaaattcagatctaaacttagagatctaaggagaagcacctcgtctttcgctttactggacagaaattaccttactcctattttcacttcgcaaaacggcgactgcaatgataacactacagaaagtcccaatgaagaattgacgatattcagaggacctggggatttggaggtacatgattgatgactgcagatatgaagtgcttatcttccatgaatctacacgatactccttgtaccttcctcggcgacccaaagtggaaagtgcaaccagacattcggccatagcattgccatattattaatctataaacattagttagctaggatagttcaacgtaagtctttgtacgtagaatataggtgtaatttatcagccttgaaattctgttctgatccgtttcagaaactttgtgcgtacggacgcatctgccttcttgtgcacctgcaacactcgtaggttccttgaaatgccttcttgtgcacctgcaacagtgcaggttcctccaaattgaactcgcccagatttccggatcgtgccgattgccg

SEQ ID NO: 66169 - DNA, 2276 bp, Zea Mays
cccgtctcccctccactcgtctctccgttcggccgtgtccagtctccagtccgcaacggaaggagaggaggcgtcgagggaaaatcgcgccaaccgggccgaacgaatcgtcggaaggccggggaggaggtctagaaggtgtgggaatggcgacggggcttgccttggcggcggcgcctcatgttgcttcggtcacgggatcggggacagtggaggagcaggcggcgggggtcggcatcttgcttcagatatcaatgctcgtgctctcgttcgtgctcgggcatatcctgcgccgccgaaagttctactacatccccgaggccagcggctcactcctgatcgggatgattgttggagggcttgctaacatatcaaacactcagaaaagcatcaggagatggtttaattttcgggaggacttcttccttctctttttactgcctccaattatattatatccttgattgtattctgcttttatttcttattggttcttgtagaattgttcatgttttacttgactgcatcttacccagtccggattcagcttagcaccaaaaccattcttttcgaacttcgatgctatcataacatttgcaatcctgggaaccttcattgcctccattgttacaggtcttttagtctaccttggtggattactatacattgtctacaggctcccactggtggagtgtatgatgtttggtgctcttgtatcagcaactgatcctgtgacagttttgtctatatttcaggagcttggcactgatacaaatctatatgcactggtttttggagaatccgttttaaatgacgctgtagcgatatccttgtacaggtctatggcatctatgaggacgcaccattctggaaaaaactttttccttgtaattctgaggtttcttgaaaattttgttggatcaatgtcatcaggcattggtgttggactaatttccgctctcctcttcaagtatgcagcactgggcgttgagaaccttcacaatctggagagttgcttgtttgtgcttttcccatacttctcgtacatgctagcagaaggcattggtctatctggcattatttctattctcttcacgggtattgtgatgaagagatacacattctctaacttatcagatgattctcagcgttttacagctcgcttttttcaccttctttcttcactagcagaagctttcgtgttcatatacatgggatttgatattgcgatagaacgtcaaagctggtcacatattggattcatatttttctcaattatcttcatactagttgcaagggctgcaaatgtcttctcttgtgcatacatactgaatttggcacgacctccacattgccaaatacctaggcaatatcagcaggctctttggtatagtgggcttagaggagctatggcttttgccctcgctcttcagtctgttcatgatcttccggatggacatggcgagacaatttttactgctaccacatctattgttgttctaactgtaggttgctgggtgtaattcttcccacattatatcaaaatgaaactagaatatttgtatggtactccttattggtggctcaactggaacaatgcttgaggccctacaggtagttggggacagcaaccgttattgccaactgtatgagctgcaggagagttctaatggcaacgacactggttacacgggacaaaattatgatgaaggagcatccacttcaagcaaattcagatctaaacttagagatctaaggagaagcacctcgtctttcgctttactggacagaaattaccttactcctattttcacttcgcaaaacggcgactgcaatgataacactacagaaagtcccaatgaagaattgacgatattcagaggacctggggatttggaggtacatgattgatgactgcagatatgaagtgcttatcttccatgaatctacacgatactccttgtaccttcctcggcgacccaaagtggaaagtgcaaccagacattcggccatagcattgccatattattaatctataaacattagttagctaggatagttcaacgtaagtctttgtacgtagaatataggtgtaatttatcagccttgaaattctgttctgatccgtttcagaaactttgtgcgtacggacgcatctgccttcttgtgcacctgcaacactcgtaggttccttgaaatgccttcttgtgcacctgcaacagtgcaggttcctccaaattgaactcgcccagatttccggatcgtgccgattgccg

SEQ ID NO: 66170 - DNA, 2082 bp, Zea Mays
cccgtctcccctccactcgtctctccgttcggccgtgtccagtctccagtccgcaacggaaggagaggaggcgtcgagggaaaatcgcgccaaccgggccgaacgaatcgtcggaaggccggggaggaggtctagaaggtgtgggaatggcgacggggcttgccttggcggcggcgcctcatgttgcttcggtcacgggatcggggacagtggaggagcaggcggcgggggtcggcatcttgcttcagatatcaatgctcgtgctctcgttcgtgctcgggcatatcctgcgccgccgaaagttctactacatccccgaggccagcggctcactcctgatcgaaaccattcttttcgaacttcgatgctatcataacatttgcaatcctgggaaccttcattgcctccattgttacaggtcttttagtctaccttggtggattactatacattgtctacaggctcccactggtggagtgtatgatgtttggtgctcttgtatcagcaactgatcctgtgacagttttgtctatatttcaggagcttggcactgatacaaatctatatgcactggtttttggagaatccgttttaaatgacgctgtagcgatatccttgtacaggtctatggcatctatgaggacgcaccattctggaaaaaactttttccttgtaattctgaggtttcttgaaaattttgttggatcaatgtcatcaggcattggtgttggactaatttccgctctcctcttcaagtatgcagcactgggcgttgagaagtgagtaaaaagttggcacttgtagtttgtctgaaatattggagcccatcacatacacaactattttttcgaccattttcagccttcacaatctggagagttgcttgtttgtgcttttcccatacttctcgtacatgctagcagaaggcattggtctatctggcattatttctattctcttcacgggtattgtgatgaagagatacacattctctaacttatcagatgattctcagcgttttacagctcgcttttttcaccttctttcttcactagcagaagctttcgtgttcatatacatgggatttgatattgcgatagaacgtcaaagctggtcacatattggattcatatttttctcaattatcttcatactagttgcaagggctgcaaatgtcttctcttgtgcatacatactgaatttggcacgacctccacattgccaaatacctaggcaatatcagcaggctctttggtatagtgggcttagaggagctatggcttttgccctcgctcttcagtctgttcatgatcttccggatggacatggcgagacaatttttactgctaccacatctattgttgttctaactgtactccttattggtggctcaactggaacaatgcttgaggccctacaggtagttggggacagcaaccgttattgccaactgtatgagctgcaggagagttctaatggcaacgacactggttacacgggacaaaattatgatgaaggagcatccacttcaagcaaattcagatctaaacttagagatctaaggagaagcacctcgtctttcgctttactggacagaaattaccttactcctattttcacttcgcaaaacggcgactgcaatgataacactacagaaagtcccaatgaagaattgacgatattcagaggacctggggatttggaggtacatgattgatgactgcagatatgaagtgcttatcttccatgaatctacacgatactccttgtaccttcctcggcgacccaaagtggaaagtgcaaccagacattcggccatagcattgccatattattaatctataaacattagttagctaggatagttcaacgtaagtctttgtacgtagaatataggtgtaatttatcagccttgaaattctgttctgatccgtttcagaaactttgtgcgtacggacgcatctgccttcttgtgcacctgcaacactcgtaggttccttgaaatgccttcttgtgcacctgcaacagtgcaggttcctccaaattgaactcgcccagatttccggatcgtgccgattgccg

SEQ ID NO: 66171 - DNA, 4877 bp, Zea Mays
gtctcccctccactcgtctctccgttcggccgtgtccagtctccagtccgcaacggaaggagaggaggcgtcgagggaaaatcgcgccaaccgggccgaacgaatcgtcggaaggccggggaggaggtctagaaggtgtgggaatggcgacggggcttgccttggcggcggcgcctcatgttgcttcggtcacgggatcggggacagtggaggagcaggcggcgggggtcggcatcttgcttcagatatcaatgctcgtgctctcgttcgtgctcgggcatatcctgcgccgccgaaagttctactacatccccgaggccagcggctcactcctgatcgggatgattgttggagggcttgctaacatatcaaacactcagaaaagcatcaggagatggtttaattttcgggaggacttcttccttctctttttactgcctccaattatattccagtccggattcagcttagcaccaaaaccattcttttcgaacttcgatgctatcataacatttgcaatcctgggaaccttcattgcctccattgttacaggtcttttagtctaccttggtggattactatacattgtctacaggctcccactggtggagtgtatgatgtttggtgctcttgtatcagcaactgatcctgtgacagttttgtctatatttcaggagcttggcactgatacaaatctatatgcactggtttttggagaatccgttttaaatgacgctgtagcgatatccttgtacaggtctatggcatctatgaggacgcaccattctggaaaaaactttttccttgtaattctgaggtttcttgaaaattttgttggatcaatgtcatcaggcattggtgttggactaatttccgctctcctcttcaagtatgcagcactgggcgttgagaaccttcacaatctggagagttgcttgtttgtgcttttcccatacttctcgtacatgctagcagaaggcattggtctatctggcattatttctattctcttcacgggtattgtaagttcaactccaataatttgccatatatcttgttttaggatttataagctaaaatttgttactgtattcataaaatgcttctatgtatcttatgagttttggtgctgtatatacaagagttgtaaaggatctttatgtgaaagtgaggaaataaagagggtgtgtgctgatgctacatcttactatcctcatctcttattttttttctcgaacacgcaagagcactgtacatcattatattaagagaaagaaagcaaaaataattacaaggaggccatgcggagcaaggccggacagaaaaataaaaaccacccaacacgggaccaaaaaaggagaaaggaagaaataactacttcgatccaggtgcccaaagggcttcagcgatactaagcctgccaaggtgctttgccccagccataacccaacagcctaattcattaaggaaacaatgctgcgccttggaaatagaaggtgaatccctctcaaaaacagccatgtttctttgcaaccaagggcatcaggctccaaggatgatagtgcaattaaggcctttccttttatccttgatgaccctgcaattcatgtctcgccatcattctgcaaaggaagaggcagaagaggagggagcaagatgccccaaaccatagggggagagaatactaaaccaaaattgcctggcaaaaacgcaggaggttaagatgtgttgcactgtttcctgggcttggtcacatgaagggcaaacagcagggtgaggcagccccctcttttgcaatctatcggcagtccaaactctgtcccgaattgccagccataagaagaacttgcatttggggtgcccaagacttccacaacctcttccaaggttcaaacgctatagaacctgcgaagagggccttataagaggatttagccgaatagatacctgaggtttcatgcctccaagagtgtatatcatccccatccttcagaaccacctcattaaccatatcccacataaggtattgttgtaaaccaaccaaagataggggaggtttgaaatccctcacccaagagctgttatcaagggcctgagccattgtcctagtgtacacgactttcttatgcaccttccgataaacttctaaagcgacctaaaaaacggagcacccctctaaccagcgatcagaccaaaacaacgtgtttgcaccatttcccacagctgtaactactgagatgtcaacaaactttctggcctgcggttgtatgggaagatccagacccctccatgacctgctagcatcagtcttctgcaaccatagccacctagcttgcagagcccatccctgtaatttaaggttaggtattccaagccctctgaggtttagaggccttgttaccacctcctagggcaccaaacaactgtcacccttcacatccttccttcccttccaaaggaaaccccttctaaccttgtcaattgctttgatcacccatctcgggacactcatggcaataaggagataaaccagaatggcaaagagcacaaaacgaaccaccgcagttctacctgccaagttaaggagggaggccttccaaaaagggaaacgatccgctatcttttcaacccaaatcatgagggtattctttgacagtttttgatggatttgggcagccccaaataggtgcagggaaaggttgcaacagcacattgcagcaaggaacaactttcctggacaacctgatcttcacaagcaatcggaatgaaataactctttctttgaagtgaaagatcttggagctcttcgatattttcttgggattgagattgattggtcgtcaaagtgaattgtcctatctcaaagaaatataccctttatatattgacagaaacatgtatgcttgggtgttgtccatatagttcccctactgatagagaccaccaaacttgtgcccaattaggtgatccagccaacaaagaaacatatcaaagattggttggacgattgatatacttatgtcatacaaggcctgatatctcctatgcagtgagtgtggtgagcaggtatatgaagattatggttcaaaaagaatggccacttggactttgaaggatattgtgatgcagattgggcgaatagcatagatgataggtctacatcttgatattgtgtatttgtaggaagaaatctcgtctcatagcgaagtaacaagcaagaagcaaattcgtagtggctcggtctactgcagaggctgagtacagggcaatagtgttgagcctatgtgagatgatgtagttaaaggtctcgctaggtgagttacgggtgttgaggaatgagactgatgtttcactgtgacaacattgcggcgatcaatattacaagcaatactgttcaattttatcacacaaagcatgtggagcttgataggttcttcattaaggagaagctagtagggtcttaaggctagagtacattaagtctcgtagccagctagctgactgcttcacaaaagatctaggtcctaaagagaagtcaagttgtaacaagatggacatgagaaatatttttggcctatcttgagagggagtgttggtataaatacaagagttctaaatgaccattatgtggaagtgaggaaataaagagtgtgtgtgtgctgggggatgcaacacaccaaaaaaacccaaacctcaataaatttgtagccgcaaacttcaagttcgtcaacctaaattgcttactaaaagaatttttacttccaggtgatgaagagatacacattctctaacttatcagatgattctcagcgttttacagctcgcttttttcaccttctttcttcactagcagaagctttcgtgttcatatacatgggatttgatattgcgatagaacgtcaaagctggtcacatattggattcatatttttctcaattatcttcatactagttgcaagggctgcaaatgtcttctcttgtgcatacatactgaatttggcacgacctccacattgccaaatacctaggcaatatcagcaggctctttggtatagtgggcttagaggagctatggcttttgccctcgctcttcagtctgttcatgatcttccggatggacatggcgagacaatttttactgctaccacatctattgttgttctaactgtactccttattggtggctcaactggaacaatgcttgaggccctacaggtagttggggacagcaaccgttattgccaactgtatgagctgcaggagagttctaatggcaacgacactggttacacgggacaaaattatgatgaaggagcatccacttcaagcaaattcagatctaaacttagagatctaaggagaagcacctcgtctttcgctttactggacagaaattaccttactcctattttcacttcgcaaaacggcgactgcaatgataacactacagaaagtcccaatgaagaattgacgatattcagaggacctggggatttggaggtacatgattgatgactgcagatatgaagtgcttatcttccatgaatctacacgatactccttgtaccttcctcggcgacccaaagtggaaagtgcaaccagacattcggccatagcattgccatattattaatctataaacattagttagctaggatagttcaacgtaagtctttgtacgtagaatataggtgtaatttatcagccttgaaattctgttctgatccgtttcagaaactttgtgcgtacggacgcatctgccttcttgtgcacctgcaacactcgtaggttccttgaaatgccttcttgtgcacctgcaacagtgcaggttcctccaaattgaactcgcccagatttccggatcgtgccgattgccg

SEQ ID NO: 66172 - DNA, 2416 bp, Zea Mays
ctcccctccactcgtctctccgttcggccgtgtccagtctccagtccgcaacggaaggagaggaggcgtcgagggaaaatcgcgccaaccgggccgaacgaatcgtcggaaggccggggaggaggtctagaaggtgtgggaatggcgacggggcttgccttggcggcggcgcctcatgttgcttcggtcacgggatcggggacagtggaggagcaggcggcgggggtcggcatcttgcttcagatatcaatgctcgtgctctcgttcgtgctcgggcatatcctgcgccgccgaaagttctactacatccccgaggccagcggctcactcctgatcgggatgattgttggagggcttgctaacatatcaaacactcagaaaagcatcaggagatggtttaattttcgggaggacttcttccttctctttttactgcctccaattatattccagtccggattcagcttagcaccaaaaccattcttttcgaacttcgatgctatcataacatttgcaatcctgggaaccttcattgcctccattgttacaggtcttttagtctaccttggtggattactatacattgtctacaggctcccactggtggagtgtatgatgtttggtgctcttgtatcagcaactgatcctgtgacagttttgtctatatttcaggagcttggcactgatacaaatctatatgcactggtttttggagaatccgttttaaatgacgctgtagcgatatccttgtacaggtctatggcatctatgaggacgcaccattctggaaaaaactttttccttgtaattctgaggtttcttgaaaattttgttggatcaatgtcatcaggcattggtgttggactaatttccgctctcatatcctttaatctaactttacttcataaaaatgaacatgattaaccttgaaagctatgatggtggtttggcttcttttatagtaagtcttgttcagccatggggattttttagtgcagacaagctgaagtttacccgaaaagggctgacagctatgtacactgcaaaatctgcactagactagatcttaaacgttttccccaaaattctgcaactcccattttcaagaaaacctttttgcaccaggactacatagatgtgtttttgtacttttgtcaagtcatgtctcaactttgccactccttaattcggtcaaacctcttcaagtatgcagcactgggcgttgagaagtgagtaaaaagttggcacttgtagtttgtctgaaatattggagcccatcacatacacaactattttttcgaccattttcagccttcacaatctggagagttgcttgtttgtgcttttcccatacttctcgtacatgctagcagaaggcattggtctatctggcattatttctattctcttcacgggtattgtgatgaagagatacacattctctaacttatcagatgattctcagcgttttacagctcgcttttttcaccttctttcttcactagcagaagctttcgtgttcatatacatgggatttgatattgcgatagaacgtcaaagctggtcacatattggattcatatttttctcaattatcttcatactagttgcaagggctgcaaatgtcttctcttgtgcatacatactgaatttggcacgacctccacattgccaaatacctaggcaatatcagcaggctctttggtatagtggtactccttattggtggctcaactggaacaatgcttgaggccctacaggtagttggggacagcaaccgttattgccaactgtatgaggagagttctaatggcaacgacactggttacacgggacaaaattatgatgaaggagcatccacttcaagcaaattcagatctaaacttagagatctaaggagaagcacctcgtctttcgctttactggacagaaattaccttactcctattttcacttcgcaaaacggcgactgcaatgataacactacagaaagtcccaatgaagaattgacgatattcagaggacctggggatttggaggtacatgattgatgactgcagatatgaagtgcttatcttccatgaatctacacgatactccttgtaccttcctcggcgacccaaagtggaaagtgcaaccagacattcggccatagcattgccatattattaatctataaacattagttagctaggatagttcaacgtaagtctttgtacgtagaatataggtgtaatttatcagccttgaaattctgttctgatccgtttcagaaactttgtgcgtacggacgcatctgccttcttgtgcacctgcaacactcgtaggttccttgaaatgccttcttgtgcacctgcaacagtgcaggttcctccaaattgaactcgcccagatttccggatcgtgccgattgccg

SEQ ID NO: 66173 - DNA, 2042 bp, Zea Mays
ctcgtctctccgttcggccgtgtccagtctccagtccgcaacggaaggagaggaggcgtcgagggaaaatcgcgccaaccgggccgaacgaatcgtcggaaggccggggaggaggtctagaaggtgtgggaatggcgacggggcttgccttggcggcggcgcctcatgttgcttcggtcacgggatcggggacagtggaggagcaggcggcgggggtcggcatcttgcttcagatatcaatgctcgtgctctcgttcgtgctcgggcatatcctgcgccgccgaaagttctactacatccccgaggccagcggctcactcctgatcgaattgttcatgttttacttgactgcatcttacccagtccggattcagcttagcaccaaaaccattcttttcgaacttcgatgctatcataacatttgcaatcctgggaaccttcattgcctccattgttacaggtcttttagtctaccttggtggattactatacattgtctacaggctcccactggtggagtgtatgatgtttggtgctcttgtatcagcaactgatcctgtgacagttttgtctatatttcaggagcttggcactgatacaaatctatatgcactggtttttggagaatccgttttaaatgacgctgtagcgatatccttgtacaggtctatggcatctatgaggacgcaccattctggaaaaaactttttccttgtaattctgaggtttcttgaaaattttgttggatcaatgtcatcaggcattggtgttggactaatttccgctctcctcttcaagtatgcagcactgggcgttgagaaccttcacaatctggagagttgcttgtttgtgcttttcccatacttctcgtacatgctagcagaaggcattggtctatctggcattatttctattctcttcacgggtattgtgatgaagagatacacattctctaacttatcagatgattctcagcgttttacagctcgcttttttcaccttctttcttcactagcagaagctttcgtgttcatatacatgggatttgatattgcgatagaacgtcaaagctggtcacatattggattcatatttttctcaattatcttcatactagttgcaagggctgcaaatgtcttctcttgtgcatacatactgaatttggcacgacctccacattgccaaatacctaggcaatatcagcaggctctttggtatagtgggcttagaggagctatggcttttgccctcgctcttcagtctgttcatgatcttccggatggacatggcgagacaatttttactgctaccacatctattgttgttctaactgtactccttattggtggctcaactggaacaatgcttgaggccctacaggtagttggggacagcaaccgttattgccaactgtatgagctgcaggagagttctaatggcaacgacactggttacacgggacaaaattatgatgaaggagcatccacttcaagcaaattcagatctaaacttagagatctaaggagaagcacctcgtctttcgctttactggacagaaattaccttactcctattttcacttcgcaaaacggcgactgcaatgataacactacagaaagtcccaatgaagaattgacgatattcagaggacctggggatttggaggtacatgattgatgactgcagatatgaagtgcttatcttccatgaatctacacgatactccttgtaccttcctcggcgacccaaagtggaaagtgcaaccagacattcggccatagcattgccatattattaatctataaacattagttagctaggatagttcaacgtaagtctttgtacgtagaatataggtgtaatttatcagccttgaaattctgttctgatccgtttcagaaactttgtgcgtacggacgcatctgccttcttgtgcacctgcaacactcgtaggttccttgaaatgccttcttgtgcacctgcaacagtgcaggttcctccaaattgaactcgcccagatttccggatcgtgccgattgccg

SEQ ID NO: 66174 - DNA, 2317 bp, Zea Mays
ctcgtctctccgttcggccgtgtccagtctccagtccgcaacggaaggagaggaggcgtcgagggaaaatcgcgccaaccgggccgaacgaatcgtcggaaggccggggaggaggtctagaaggtgtgggaatggcgacggggcttgccttggcggcggcgcctcatgttgcttcggtcacgggatcggggacagtggaggagcaggcggcgggggtcggcatcttgcttcagatatcaatgctcgtgctctcgttcgtgctcgggcatatcctgcgccgccgaaagttctactacatccccgaggccagcggctcactcctgatcgggatgattgttggagggcttgctaacatatcaaacactcagaaaagcatcagaattgttcatgttttacttgactgcatcttacccagtccggattcagcttagcaccaaaaccattcttttcgaacttcgatgctatcataacatttgcaatcctgggaaccttcattgcctccattgttacaggtcttttagtctaccttggtggattactatacattgtctacaggctcccactggtggagtgtatgatgtttggtgctcttgtatcagcaactgatcctgtgacagttttgtctatatttcaggagcttggcactgatacaaatctatatgcactggtttttggagaatccgttttaaatgacgctgtagcgatatccttgtacaggtctatggcatctatgaggacgcaccattctggaaaaaactttttccttgtaattctgaggtttcttgaaaattttgttggatcaatgtcatcaggcattggtgttggactaatttccgctctcctcttcaagtatgcagcactgggcgttgagaaccttcacaatctggagagttgcttgtttgtgcttttcccatacttctcgtacatgctagcagaaggcattggtctatctggcattatttctattctcttcacgggtattgtgatgaagagatacacattctctaacttatcagatgattctcagcgttttacagctcgcttttttcaccttctttcttcactagcagaagctttcgtgttcatatacatgggatttgatattgcgatagaacgtcaaagctggtcacatattggattcatatttttctcaattatcttcatactagttgcaagggctgcaaatgtcttctcttgtgcatacatactgaatttggcacgacctccacattgccaaatacctaggcaatatcagcaggctctttggtatagtgggcttagaggagctatggcttttgccctcgctcttcagtctgttcatgatcttccggatggacatggcgagacaatttttactgctaccacatctattgttgttctaactgtaggttgctgggtgtaattcttcccacattatatcaaaatgaaactagaatatttgtatggtaatgatttggatagtacgcctatgatttttgttatcctacatcagaaggccttgcttgagtattctacttgatttgaattgaatttattcttgtggagttcctttcaaaattcctgcgaagaacctccagataggcataaataacgcttgcatggcaatgttcaaggtactccttattggtggctcaactggaacaatgcttgaggccctacaggtagttggggacagcaaccgttattgccaactgtatgaggagagttctaatggcaacgacactggttacacgggacaaaattatgatgaaggagcatccacttcaagcaaattcagatctaaacttagagatctaaggagaagcacctcgtctttcgctttactggacagaaattaccttactcctattttcacttcgcaaaacggcgactgcaatgataacactacagaaagtcccaatgaagaattgacgatattcagaggacctggggatttggaggtacatgattgatgactgcagatatgaagtgcttatcttccatgaatctacacgatactccttgtaccttcctcggcgacccaaagtggaaagtgcaaccagacattcggccatagcattgccatattattaatctataaacattagttagctaggatagttcaacgtaagtctttgtacgtagaatataggtgtaatttatcagccttgaaattctgttctgatccgtttcagaaactttgtgcgtacggacgcatctgccttcttgtgcacctgcaacactcgtaggttccttgaaatgccttcttgtgcacctgcaacagtgcaggttcctccaaattgaactcgcccagatttccggatcgtgccgattgccg

SEQ ID NO: 66175 - DNA, 2423 bp, Zea Mays
ctcgtctctccgttcggccgtgtccagtctccagtccgcaacggaaggagaggaggcgtcgagggaaaatcgcgccaaccgggccgaacgaatcgtcggaaggccggggaggaggtctagaaggtgtgggaatggcgacggggcttgccttggcggcggcgcctcatgttgcttcggtcacgggatcggggacagtggaggagcaggcggcgggggtcggcatcttgcttcagatatcaatgctcgtgctctcgttcgtgctcgggcatatcctgcgccgccgaaagttctactacatccccgaggccagcggctcactcctgatcgggatgattgttggagggcttgctaacatatcaaacactcagaaaagcatcaggagatggtttaattttcgggaggacttcttccttctctttttactgcctccaattatattatatccttgattgtattctgcttttatttcttattggttcttgtagaattgttcatgttttacttgactgcatcttacccagtccggattcagcttagcaccaaaaccattcttttcgaacttcgatgctatcataacatttgcaatcctgggaaccttcattgcctccattgttacaggtcttttagtctaccttggtggattactatacattgtctacaggctcccactggtggagtgtatgatgtttggtgctcttgtatcagcaactgatcctgtgacagttttgtctatatttcaggagcttggcactgatacaaatctatatgcactggtttttggagaatccgttttaaatgacgctgtagcgatatccttgtacaggtctatggcatctatgaggacgcaccattctggaaaaaactttttccttgtaattctgaggtttcttgaaaattttgttggatcaatgtcatcaggcattggtgttggactaatttccgctctcctcttcaagtatgcagcactgggcgttgagaaccttcacaatctggagagttgcttgtttgtgcttttcccatacttctcgtacatgctagcagaaggcattggtctatctggcattatttctattctcttcacgggtattgtgatgaagagatacacattctctaacttatcagatgattctcagcgttttacagctcgcttttttcaccttctttcttcactagcagaagctttcgtgttcatatacatgggatttgatattgcgatagaacgtcaaagctggtcacatattggattcatatttttctcaattatcttcatactagttgcaagggctgcaaatgtcttctcttgtgcatacatactgaatttggcacgacctccacattgccaaatacctaggcaatatcagcaggctctttggtatagtgggcttagaggagctatggcttttgccctcgctcttcagtctgttcatgatcttccggatggacatggcgagacaatttttactgctaccacatctattgttgttctaactgtaggttgctgggtgtaattcttcccacattatatcaaaatgaaactagaatatttgtatggtaatgatttggatagtacgcctatgatttttgttatcctacatcagaaggccttgcttgagtattctacttgatttgaattgaatttattcttgtggagttcctttcaaaattcctgcgaagaacctccagataggcataaataacgcttgcatggcaatgttcaaggtactccttattggtggctcaactggaacaatgcttgaggccctacaggtagttggggacagcaaccgttattgccaactgtatgaggagagttctaatggcaacgacactggttacacgggacaaaattatgatgaaggagcatccacttcaagcaaattcagatctaaacttagagatctaaggagaagcacctcgtctttcgctttactggacagaaattaccttactcctattttcacttcgcaaaacggcgactgcaatgataacactacagaaagtcccaatgaagaattgacgatattcagaggacctggggatttggaggtacatgattgatgactgcagatatgaagtgcttatcttccatgaatctacacgatactccttgtaccttcctcggcgacccaaagtggaaagtgcaaccagacattcggccatagcattgccatattattaatctataaacattagttagctaggatagttcaacgtaagtctttgtacgtagaatataggtgtaatttatcagccttgaaattctgttctgatccgtttcagaaactttgtgcgtacggacgcatctgccttcttgtgcacctgcaacactcgtaggttccttgaaatgccttcttgtgcacctgcaacagtgcaggttcctccaaattgaactcgcccagatttccggatcgtgccgattgccg

SEQ ID NO: 66176 - DNA, 2425 bp, Zea Mays
ccatgtcgaaccttccggaagcgcaaatgataccctccactcctccagcagcgaggcccatccgcccatgccgaacctcccggaagcgcaaatggcactccagcaccagcgaacgagtctgggtctatgtcgaactttctagaagcgcggcgccaaataaataccccactacctcaatcctcgctgcccctctcgattcggaaaacctccaaggctccaaccctagccgcgatccgacaacgcctccatccctagccgactgctgcaagcttcagagctcaagagtcagggcgccatggcgacagagacggagaccttcgcctttcaggctgagatcaaccagctgctctcactcatcatcaacaccttctattccaacaaggagatcttcctccgggagctcatttccaactcttccgatgcgttggacaaaatcaggttcgagagcctcactgacaagagcaagctcgatgcgcagccggagctgttcatccacattgtaccagacaaggcttcgaacacgctctccatcatcgacagcggcatcggcatgaccaagtccgaccttgtcaacaacctcggtaccatcgccagttcggtgtcggtttctactctgcctacctcgtcgccgagagggtcgtcgtgaccaccaagcataacgatgacgagcagtacgtgtgggaatcccaggcgggcgggtcgttcactgttactcgtgacacgtctggggagcagcttggcaggggtactaagattacacttttcctcaaggaagatcagttagaataccttgaggagcgtcgcctcaaggatttggtcaagaagcactctgagttcatcagctaccccatctccctgtggaccgaaaagacaacggagaaggagatttctgatgatgaagatgaggaagagaagaaagacgctgaggagggaaaggttgaggatgttgacgaggagaaggaagagaaagaaaaaaagaaaaagaagatcaaggaggtttctcacgagtggtcattgatcaacaagcagaagcccatctggatgaggaagccagaagagatcacaaaggaagaatatgctgccttctacaaaagcttgacaaatgactgggaggagcatctggctgtgaagcacttctctgtggagggtcagctggagttcaaggctgttctctttgttcctaagagggccccatttgatctcttcgacacaaggaagaagcaaaacaacatcaagctctatgtgcgcagggtgtttatcatggacaactgtgaggaactgatccctgagtggctgagttttgttaagggtattgttgactctgaggaccttcccctcaatatctcccgtgagactcttcagcagaacaagatcctgaaggtgatccggaagaaccttgtgaagaagtgtgttgagctcttctttgagattgctgaaaacaaggaggactacaacaagttttatgaggctttctccaagaacctcaagcttggcatccatgaggactcgcagaacaggggcaagattgctgagcttctgagataccactccacgaagagcggtgatgagctgaccagcctcaaggattatgtgacgaggatgaaggagggacagaacgacatctactatatcactggtgagagcaagaaggcagtggagaactcccctttcctggagaagctgaagaagaggggctacgaggtcctgtacatggttgatgccattgatgagtatgctgttggtcagctcaaggatttgagggtctgtgcaagatcatcaaggaggttctgggcgacaaggttgagaaggttgtggtgtctgaccgtgttcaaaaagactatggaaatcaacccggagaacccaatcatggatgagctccgtaagcgcgccgaggctgacaagaatgacaagtcagtcaaggatcttgtgatgttgctgttcgagacagctctcctgacctccggcttcagcctggatgaccccaacacctttggcacccggatccatcgcatgctaaagctcggtctgagcatcgatgaggacaagtctgctgaggccgaagctgagatgcctccgctggaggatgacgccggcgaaagcaagatggaggaggtcgactaagcttcggatcactgtcgtttatccctaattacatatgataagctaaatcttgactactgtttgaggttttccgcacgttaacggttctcctgccggccaggcaatgagtttgctgtagctatatggtactctgttttacagtttgttcttgttatctgtaatcctactagtatagtacatgttctacatgtcgttttgcctgagttccggtgtttggtttcattagtccgtgtcacatcatcgtaatgtttgaatgtcaatttgagtatttaatagtctaaagaataaacaactacacaaaaaa

SEQ ID NO: 66177 - DNA, 2567 bp, Zea Mays
cttccggaagcgcaaatgataccctccactcctccagcagcgaggcccatccgcccatgccgaacctcccggaagcgcaaatggcactccagcaccagcgaacgagtctgggtctatgtcgaactttctagaagcgcggcgccaaataaataccccactacctcaatcctcgctgcccctctcgattcggaaaacctccaaggctccaaccctagccgcgatccgacaacgcctccatccctagccgactgctgcaagcttcagagctcaagagtcagggcgccatggcgacagagacggagaccttcgcctttcaggctgagatcaaccagctgctctcactcatcatcaacaccttctattccaacaaggagatcttcctccgggagctcatttccaactcttccgatccggagctgttcatccacattgtaccagacaaggcttcgaacacgctctccatcatcgacagcggcatcggcatgaccaagtccgaccttgtcaacaacctcggtaccatcgccagttcggtgtcggtttctactctgcctacctcgtcgccgagagggtcgtcgtgaccaccaagcataacgatgacgagcagtacgtgtgggaatcccaggcgggcgggtcgttcactgttactcgtgacacgtctggggagcagcttggcaggggtactaagattacacttttcctcaaggaagatcagttagaataccttgaggagcgtcgcctcaaggatttggtcaagaagcactctgagttcatcagctaccccatctccctgtggaccgaaaagacaacggagaaggagatttctgatgatgaagatgaggaagagaagaaagacgctgaggagggaaaggttgaggatgttgacgaggagaaggaagagaaagaaaaaaagaaaaagaagatcaaggaggtttctcacgagtggtcattgatcaacaagcagaagcccatctggatgaggaagccagaagagatcacaaaggaagaatatgctgccttctacaaaagcttgacaaatgactgggaggagcatctggctgtgaagcacttctctgtggagggtcagctggagttcaaggctgttctctttgttcctaagagggccccatttgatctcttcgacacaaggaagaagcaaaacaacatcaagctctatgtgcgcagggtgtttatcatggacaactgtgaggaactgatccctgagtggctgagttttgttaagggtattgttgactctgaggaccttcccctcaatatctcccgtgagactcttcagcagaacaagatcctgaaggtgatccggaagaaccttgtgaagaagtgtgttgagctcttctttgagattgctgaaaacaaggaggactacaacaagttttatgaggctttctccaagaacctcaagcttggcatccatgaggactcgcagaacaggggcaagattgctgagcttctgagataccactccacgaagagcggtgatgagctgaccagcctcaaggattatgtgacgaggatgaaggagggacagaacgacatctactatatcactggtgagagcaagaaggcagtggagaactcccctttcctggagaagctgaagaagaggggctacgaggtcctgtacatggttgatgccattgatgagtatgctgttggtcagctcaaggagtttgagggcaagaagcttgtctcggccaccaaggagggtctgaagcttgatgagaccgaggatgagaagaagaggaaggaggagctgaaggagaagtttgagggtctgtgcaagatcatcaaggaggttctgggcgacaaggttgagaaggttgtggtgtctgaccgtgttgtggactcaccgtgctgccttgtcactggtgagtatggctggacagccaacatggagaggatcatgaaggcgcaggccctgagggactctagcatgtcggggtacatgtcgagcaaaaagactatggaaatcaacccggagaacccaatcatggatgagctccgtaagcgcgccgaggctgacaagaatgacaagtcagtcaaggatcttgtgatgttgctgttcgagacagctctcctgacctccggcttcagcctggatgaccccaacacctttggcacccggatccatcgcatgctaaagctcggtctgagcatcgatgaggacaagtctgctgaggccgaagctgagatgcctccgctggaggatgacgccggcgaaagcaagatggaggaggtcgactaagcttcggatcactgtcgtttatccctaattacatatgataagctaaatcttgactactgtttgaggttttccgcacgttaacggttctcctgccggccaggcaatgagtttgctgtagctatatggtactctgttttacagtttgttcttgttatctgtaatcctactagtatagtacatgttctacatgtcgttttgcctgagttccggtgtttggtttcattagtccgtgtcacatcatcgtaatgtttgaatgtcaatttgagtatttaatagtctaaagaataaacaactacacaaaaaa

SEQ ID NO: 66178 - DNA, 1894 bp, Zea Mays
ttactgttgtgcctgatgttatctactagtcctaagatgttagaataccttgaggagcgtcgcctcaaggatttggtcaagaagcactctgagttcatcagctaccccatctccctgtggaccgaaaagacaacggagaaggagatttctgatgatgaagatgaggaagagaagaaagacgctgaggagggaaaggttgaggatgttgacgaggagaaggaagagaaagaaaaaaagaaaaagaagatcaaggaggtttctcacgagtggtcattgatcaacaagcagaagcccatctggatgaggaagccagaagagatcacaaaggaagaatatgctgccttctacaaaagcttgacaaatgactgggaggagcatctggctgtgaagcacttctctgtggagggtcagctggagttcaaggctgttctctttgttcctaagagggccccatttgatctcttcgacacaaggaagaagcaaaacaacatcaagctctatgtgcgcagggtgtttatcatggacaactgtgaggaactgatccctgagtggctgagttttgttaagggtattgttgactctgaggaccttcccctcaatatctcccgtgagactcttcagcagaacaagatcctgaaggtgatccggaagaaccttgtgaagaagtgtgttgagctcttctttgagattgctgaaaacaaggaggactacaacaagttttatgaggctttctccaagaacctcaagcttggcatccatgaggactcgcagaacaggggcaagattgctgagcttctgagataccactccacgaagagcggtgatgagctgaccagcctcaaggattatgtgacgaggatgaaggagggacagaacgacatctactatatcactggtgagagcaagaaggcagtggagaactcccctttcctggagaagctgaagaagaggggctacgaggtcctgtacatggttgatgccattgatgagtatgctgttggtcagctcaaggagtttgagggcaagaagcttgtctcggccaccaaggagggtctgaagcttgatgagaccgaggatgagaagaagaggaaggaggagctgaaggagaagtttgagggtctgtgcaagatcatcaaggaggttctgggcgacaaggttgagaaggttgtggtgtctgaccgtgttgtggactcaccgtgctgccttgtcactggtgagtatggctggacagccaacatggagaggatcatgaaggcgcaggccctgagggactctagcatgtcggggtacatgtcgagcaaaaagactatggaaatcaacccggagaacccaatcatggatgagctccgtaagcgcgccgaggctgacaagaatgacaagtcagtcaaggatcttgtgatgttgctgttcgagacagctctcctgacctccggcttcagcctggatgaccccaacacctttggcacccggatccatcgcatgctaaagctcggtctgagcatcgatgaggacaagtctgctgaggccgaagctgagatgcctccgctggaggatgacgccggcgaaagcaagatggaggaggtcgactaagcttcggatcactgtcgtttatccctaattacatatgataagctaaatcttgactactgtttgaggttttccgcacgttaacggttctcctgccggccaggcaatgagtttgctgtagctatatggtactctgttttacagtttgttcttgttatctgtaatcctactagtatagtacatgttctacatgtcgttttgcctgagttccggtgtttggtttcattagtccgtgtcacatcatcgtaatgtttgaatgtcaatttgagtatttaatagtctaaagaataaacaactacacaaaaaa

SEQ ID NO: 66179 - DNA, 95 bp, Zea Mays
ggagatatcctatgggttccctgcgtcacttggacttccaatacagatacaatcgcaatatgctagacacatgaaacgacaaactttcatagttg

SEQ ID NO: 66180 - DNA, 687 bp, Zea Mays
ggcctgtcccggtttgacatgaacaaggtttgtcataatctaagtggacgataatttagttaagttacttattttccaatgctcaattgtactaagcaaatgtgcatgccctacctataaatatgtatttaggagagcactgccacgaatgctcaaggcatacagttccatctagcatccacgataggaggggaaaaagatgggctcacagagctgtggttcttgctatgtgagatccatcgtggacaggatgaagcccaggtgcctggaagggaagccgcgtcgccgtgagaccaacacggtcaggaccaggagcagggcagaagcaaggcaaggcactcttgaagacatcctgtattctccacagagcatcgatggcgatgcacctggggcgccatctcctcggaggcattctccgaaggtctgcccacttaacatggactgcgcttacgaaaacaactctccaaacgtcagggagagcttctccattgatcggatgtccctgagaagccagaacagcattgtcaggagggttagcttcaggttgcctgacgaatctgatgtcttcatcatcccggcgcgcaaagatcctgatgagtactccactgatgatgagtccacagaggatgtaagtgaagaagttgatccaaagaaactagtcaagacggctagaagaaatgagtgaca

SEQ ID NO: 66181 - DNA, 1431 bp, Zea Mays
atttcacaactggttcaccctgtttgtttgtgacacacgaaattctcaggtcccggtcccgggtccaggcacccttctcgctcggttgctcgggagctttccccttcctgttcctgaagcttccgacatccgaccgcctcctcctcctcgttctactcgccgccccttctagaatcatccagaggcgtgccggtgaagcgcgagagcggtgaggcatggcgatgcagacgggggtcgcgacctccaaggtcctcatcctcgtcggtgcagggatgacgggctcgatcctgctgcggaatggccgcttatctgatgtgttgggagaactccaggagattatgaagggtgtaaatcaaggaacttcttcgggtccctatgacattgcacttattcaagctcagattcggaatttagcgcaagaagtcagagatttgacattgtcaaagcccattaccatactgaatggcaaatctgactcgggaggcagtttatcatcctacatactgccagcagcagcagttggagcaatgggttattgctacatgtggtggaaggggttgtctctctcagatgtcatgtttgtcacaaaacacaacatggcaaatgctgttcagagcatgtcaaagcagttggagcaagtttcatcagcactagctgcaacaaaaagacatctaactcaacggcttgagaatttggatggcaaaatggatgaacaagtagaggtctccaaagctattagaaatgaggtcaatgatgttaaagatgacctgtctcaaattggatttgatgtcgaatcaattcagaaaatggttgctggattggagggaaagatcgagttacttgagaacaaacaggacgtggctaatactggtatctggtatctctgccaagtagcaggcggtttaaaagatggaataaacaccaggtttttccaggaaaccagtgagaagctgaagctctcacattcagctcaacctgaaaacaagccagtgaaggggcttgaatttttttcggaaagcaccatggaacagaaagtagctgactccaaaccaattgcggtgacagtcgacgctgagaagcctgagaaaaccgctgctgtaatgggcaccacagtgcacaggtctatcaggttctcatatcggaaggcaggccttgctttgtgatcaaatcctctccgcttgagatgcacgtggccttcctggttgctttgtgtgatggtcagaaaacatagaagaataacctgcaactggagtgacagaatttcttttccccgcagtagacaggtgtgcgttatttggttggaattatctccagtccactatcaattttttttccttggattttgattcattttatgtttcgatttgttgccttatatactgtaaagtcattggaaagaataaataaaacacgaatgttttttgtcaaatt

SEQ ID NO: 66182 - DNA, 1159 bp, Zea Mays
ctgatacatatcatacagattttgatggagattatgaagggtgtaaatcaaggaacttcttcgggtccctatgacattgcacttattcaagctcagattcggaatttagcgcaagaagtcagagatttgacattgtcaaagcccattaccatactgaatggcaaatctgactcgggaggcagtttatcatcctacatactgccagcagcagcagttggagcaatgggttattgctacatgtggtggaaggggttgtctctctcagatgtcatgtttgtcacaaaacacaacatggcaaatgctgttcagagcatgtcaaagcagttggagcaagtttcatcagcactagctgcaacaaaaagacatctaactcaacggcttgagaatttggatggcaaaatggatgaacaagtagaggtctccaaagctattagaaatgaggtcaatgatgttaaagatgacctgtctcaaattggatttgatgtcgaatcaattcagaaaatggttgctggattggagggaaagatcgagttacttgagaacaaacaggacgtggctaatactggtatctggtatctctgccaagtagcaggcggtttaaaagatggaataaacaccaggtttttccaggaaaccagtgagaagctgaagctctcacattcagctcaacctgaaaacaagccagtgaaggggcttgaatttttttcggaaagcaccatggaacagaaagtagctgactccaaaccaattgcggtgacagtcgacgctgagaagcctgagaaaaccgctgctgtaatgggcaccacagtgcacaggtctatcaggttctcatatcggaaggcaggccttgctttgtgatcaaatcctctccgcttgagatgcacgtggccttcctggttgctttttcttttttggcaacaaccttcctggttgctttgtgtgatggtcagaaaacatagaagaataacctgcaactggagtgacagaatttcttttccccgcagtagacaggtgtgcgttatttggttggaattatctccagtccactatcaattttttttccttggattttgattcattttatgtttcgatttgttgccttatatactgtaaagtcattggaaagaataaataaaacacgaatgttttttgtcaaatt

SEQ ID NO: 66183 - DNA, 742 bp, Zea Mays
catgggcccaaagacgccgcagaggtcaatgatgttaaagatgacctgtctcaaattggatttgatgtcgaatcaattcagaaaatggttgctggattggagggaaagatcgagttacttgagaacaaacaggacgtggctaatactggtatctggtatctctgccaagtagcaggcggtttaaaagatggaataaacaccaggtttttccaggaaaccagtgagaagctgaagctctcacattcagctcaacctgaaaacaagccagtgaaggggcttgaatttttttcggaaagcaccatggaacagaaagtagctgactccaaaccaattgcggtgacagtcgacgctgagaagcctgagaaaaccgctgctgtaatgggcaccacagtgcacaggtctatcaggttctcatatcggaaggcaggccttgctttgtgatcaaatcctctccgcttgagatgcacgtggccttcctggttgctttttcttttttggcaacaaccttcctggttgctttgtgtgatggtcagaaaacatagaagaataacctgcaactggagtgacagaatttcttttccccgcagtagacaggtgtgcgttatttggttggaattatctccagtccactatcaattttttttccttggattttgattcattttatgtttcgatttgttgccttatatactgtaaagtcattggaaagaataaataaaacacgaatgttttttgtcaaatt

SEQ ID NO: 66184 - DNA, 1872 bp, Zea Mays
agaagcggtagcggactagcagtgaaaacttcttctcgtattcattcgttcaatcatccgtccatcaaaaaatgatggaaattatgacagtaatgtaacgtgacgtaaaaaaagtactccagctcgatcctaacggtatgcctacattatgtccaaaagaatgactccagcaacccattcaagacgaaatcaagtgtggggggcaggggaagcacgaacaccacacatggcaagaacggacccacaaccacaagtctcctcaccactggagaatcaagcagcctgctgcggcggcgagcagcaaggaactggcaacgccgacggcgcccgtgtcgcgcgcggcgctggtggagtcacccttgccgcccgtcagcccgccggccttgccggccgccgggccgggggcgtcggacgcgccgggctccggggcgggcgcgggcaccggcgccagcggcgggtccttgctgaagagctgcatgggcaggagcaccttgttgagcgcgtagacggcgacgggcctggtggcgtacacgctgctggcgatcttgggcctggaccacatggactgcacgtagatgctgcccatgtcgtcggtgaggttgagcgtgtagggcgacccggcgaaggtgttcaccgggttgagcgagctcaggttcttgaactcggccagggagtagaacttgggcaacgcgtggtacagcagcagcgtcttcagctggtcggcggtgaggttggagaaggtggactgcttcagcgccgagaacgccgagtccttgggcacgaacacggtgatgcccaccttggtgttgttggcctgcccctggaaggtctcgatcacgttgctcttctccaggtagttgaggaacgtgtggaacgggcccgccacgctcaggagctccgcgaggtccacgtagtgcggcgccggcgccggtgccggggtcggcggcagcgacatgggcgccggcgccggcgggctgctcttctgacccaatgccggggcgaagaggacggccagtacagccgcggcaagaataattgctgccttggactccatcattgcagcgtctgtctcgcgcacctgatcctctctactaccttctctgatgcaagcccctgccctgacgagatcacgcacgaagtatatgtagttagccgatttgatctggttgatcgatcaaggctgagagttcttcataattaaaagggaaaagtttggtggttgtgtctcgttgtaaaaaaacatatagttcgtttctcttgatcaaagtatctaaaaatttatgctgatatttgtgcgttcagatcaatagtatttaattggaatcgtgtcattactgatctattactcaggagcatgtattattacattttggtaaccgattcactcgctgtcactaggggggaaaaagtgtcaattaattcggatacaagctagatggatcattgaatctgctagcttattttaaaaaagggggcaaagaaagaaaaaaaagagaggaactttcagatctcaagccaacactaaaagtgaaaagaaccaaccaaccgcctagatcctttactaaaaaatacagctacctagacgagcactctctcatgttctagcctacagggtcttcgcttcgacttaaagctgaagaactaccaccaccatgtgctagatgacataaaaactctcatgttcccgagatgtagcaacacggcgacaagttacacaagcatcagtgcaccacaatgcatgtagagagagagagagagtcggtaactctcaagctgtcaattgcgttgcaaaatgcaggagaagaagaggaaatccgagggaggagaagcaaacctgatggagcagagcagggaagaggggacggaggaagg

SEQ ID NO: 66185 - DNA, 1144 bp, Zea Mays
caaccagttgctgtgagtaggttttgaatcaattccaaatttggaggtttggtttcaaaggcctaaggacattgttcgtaaacttcagtcaggcgatcttgaccttggtgttgtgggttttgacatagttagtgaatatggaaacggcaatgaggatttagtggtcgttcatgatgctcttgagtttggacattgtcgtttgtcccttgcggtacctaaggaaggcatttttgagaacatacatactatggaagatttgctaaagatgactgaatggacagaagaaaggccactacgtgttgttactggatttggatatctaggcaataagttcttaagagagaaaggttttaagcatgttcgttttttatctgccgatggagctcttgagtcatatcctcctatgggtatggctgatgctattgtggatctcgtgagtagcggaacgaccttgcgtgagaataacctaaaggaaattgatggtggagtagttctggaaagccaggccactcttgtagcaagtaggaaatctctgcacaagcgtaaaggtgtgctggaggttactcatgagttgcttgaaagattagaagctcacctaagagcaactgcagaattaatgggcccgactgtaagtcctgtctatcgcagacgtgatggaaaagttgatgtggaatactatgccattaatgtggttgttccacagaagttgctttacaaatctatccaacaactgagatcaattggtggcagtggagtcttggtaacaaagctgacctacatattcgacgaggagacgccaaggtggcgcaatctcctctcggagctggggttgtaacttgggcgcatggtcaacttcgggtctcttctacaagttcccatatgtactgcaccacattcgtttgtcagtaccgaagcatgtaaacccatatgcagaagtgagaccgtgtggtatctgttttgtacctcttcgcttcaggaaattttggcctgtatcttgaccatctgagatgtattgatagagttgggtaatgctgttgggcgtatgtgtatttcttgtgcggttgtgcctgacttctcttgccggggcactgaataatcggccatgtttgaataaagaaagccggtatggttctcattcatgacc

SEQ ID NO: 66186 - DNA, 565 bp, Zea Mays
atcactatctatgattgtaacagtactttgaaatatcaagggcccgactgtaagtcctgtctatcgcagacgtgatggaaaagttgatgtggaatactatgccattaatgtggttgttccacagaagttgctttacaaatctatccaacaactgagatcaattggtggcagtggagtcttggtaacaaagctgacctacatattcgacgaggagacgccaaggtggcgcaatctcctctcggagctggggttgtaacttgggcgcatggtcaacttcgggtctcttctacaagttcccatatgtactgcaccacattcgtttgtcagtaccgaagcatgtaaacccatatgcagaagtgagaccgtgtggtatctgttttgtacctcttcgcttcaggaaattttggcctgtatcttgaccatctgagatgtattgatagagttgggtaatgctgttgggcgtatgtgtatttcttgtgcggttgtgcctgacttctcttgccggggcactgaataatcggccatgtttgaataaagaaagccggtatggttctcattcatgacc

SEQ ID NO: 66187 - DNA, 1379 bp, Zea Mays
acccttcccatgtgtcacgcatgagggtgactcatggccaccttttggttgcactgcgtggcatgttcatgtgtgtacctgtacagctcctcaagattcccagtcatgatcatgatacgagcgacagatcaaggggccggggatttaacaaaagagagagagagagagaaaaaaaaaacccacccggcagactgcgcttagcccttgcgttctccccgttctggcctcgccgcgcccggtcctctcctcttctatatatagcgtcccgggtctcacggcatttgcctcacacaaccaagctcgatcgatctcactctcagctggtcgctcactcttgcagctccacccttcactcagtcttaggctcttagctctaggctctagctagccgcgccactccttcgtgtagccatcagccttctcatcgccaccaatggccactgccgaggtccagaccccgaccgtcgtggcggccgaggaagcgcccgtggtggagaccccgccgccggccgtcgtgcccgaggagtctgcccccgccgaggccgaggccgaggccgaggctgaggccgctgctcctgctggtgccgaggagcccgcggcggccgatccggccgccgaggctgaggctgctgctcctgctggtcccgaggagactcccgcggccgagcaggaggcagccgccgaggaggaggctgctgctgctcctcctgctggtgccgaggagcccgccgcggccgagccggtcgccgaggcagaggctgctgctcccgaggagctcgccgcggacgagccggaggctcctgctcctgctggtccccaggagccggccgccgaggcggaggaggttgctgctcctgaggagcccgagaaggccagcgagtgaggccgtgcgcacgcagcggcggcggccagggcccaggggatcggcgtgcgcgcgtggcggggtagtcgctcgcgcgcgtacatggcagtatgacacgggattttgctgttcagtacgctacggttattactggcgtctctctctgtgtgtgtgtgtgtctcgtacgtagcccggtacgtagctagcagtgactgtcgcgtggacgtgtccggtgcgggctgcgagtgacgtgggctaaataaagtgtgcgtcgggtggtaatggtggtggggcccggtgtcagtggcgcggtgccccatgcctgccgctgctgcagcttgttgtgtcttgtgttggttggttcctgttctttctgtctatctattctcatgcatggcagtttgggtatggtatgggtcgtcttctttggttacgttccctgcattctgtttgtgtcattgtgtgatgatacgatcttctttatataataatagagccagtcgttcatcagcaaacc

SEQ ID NO: 66188 - DNA, 964 bp, Zea Mays
cgtcgccttgcatcccctgcgtgcggcgcattcagcgcaaaaaggcattgcttgcttggttcacattcatccccaatgacatctcagcgggacccgggcgccgtgacgcacgaggacttcgagggccaccgtggcaccatcaaggccggcgacgtgcagtggatgacggccggccgcggcatcgtgcactccgagatgcccgccggccccggcacgtccaggggcctgcagctctgggtcaacctctcctccgccaacaaaatggtcgagcccgggtaccaggagatccagagcaaggacatcgcgtgcacgtccgacggcgacggcggcgtcacggtgcgcgtgatcgccggccacgccatgggcgtgcgctcgccggtgcgcacgcgcacgccgaccatgtacctggacttcacggtgcgcccgcgcggcgcggtgcggcagcccgtgcgcgcgtcctggaacgccttcgcctacgtgctggagggcgagggcgtgttcggcgccgagcggtgcgcgcccgtcggcgcccaccacctgctgctgctcggccacggcgacggcctcgaggtctggaacaagttgcccgaccgcccgctccgcttcctgctcgtcgccggcgagcccatcggggagcccgtcgcgcagctcggccccttcgtcatgaacaccgaggaggagatcgacatgaccgtcaacgacttcgagtgctacgccaatgggttcgagaaggcccgccactggaagtcgcaggcgatgctggcgcttggcgtagagtagggcgagacatgagcacaggatcaccaaagaaaacgaatagatttttttttgcttcttttttccccattattatcgttccggtttgttgcgttcaattttaacccccaacattggatcgctttgtgtacatatctgccgtaaattatttttttatcaataacgaaattaccagctgttcataaaa

SEQ ID NO: 66189 - DNA, 1540 bp, Zea Mays
cttccggtaacttcggcctccggcctccgccgttatataaatagtgccgagctctcacccccacatgttttaaactgctacgcctacaacacgcctccccagtcaacacagctcagctcagctcggctagcgagctcctcgctcggctctactagctagtgtgttgggacttgggagctaggcggggttgattgcgattgggggaggcgggagtaggtgatgtacggcgcgccgttgcccaaggacctgaacctgccagcagccctgccgcagccgaccaggacgccaccgcagcagcagatgggctccccgggactgctgcggtacaggtcagcgccgagcacgctgctcggcgaggtgatgtgtggtggtgatcaggacttccccgcggctggcggcgcagggcacggaccaccggaccacgccgccgcggacaacgtcctcgcgcgctttctcgccgggcaccactccgagacccgcgactgcaagcctccccgccccgccgccgccgctcacttcatggacgaagctgccgtcgcgtccatggccgcctcacagcagcagcagctcatgtaccagtcgcagcaggagcagcagatggccgccatggaggggctgtaccgcaacgtcagctccggcggcacggagcacggtgcagccgttggcgctggtaacaacagcctgatccgccagagcagctcccccgccggcttcctcaaccacttgaacatggacaacgggtacgggagcatgctccgggtgggcatgggcggcggcgggttcaggaacggcgtcagcgacgcgcggctcaaggggcagctgagcttctcgtcccggcaggggtcggtgatgtcgcagatctcggaggtgggcagcgaggagctcgacggaggcggcggcagcggcagccccgaggcggccggcagcaacgccagcggcgcggcgcgtgggtacagcggcatcccggggtacccgatgggcggcctcgcgtccggcgcctggccggacgaggcgtcgccgtcgccgacgtccggcgcgaagcgcccccgcgactccggccccgcgctgcagcagccgctggcgccgcagctcagcctgcccagcggaaagaacaagggcggcagggcggcctcggcggagatggcggcgatcgagaagttcctccagttccaggacgccgtcccctgcaagatccgcgccaagcgcgggtgcgccacccacccgcgcagcatcgccgagcgggtgaggaggacgaagatcagcgagcggatacggaagctgcaggagctcgtgcccaacatggaaaagcaaaccaacactgccgacatgctggatctggccgtggactacatcaaggatcttcagaagcaggtcaaggtactgaacgacggccgcgccagctgcacctgctccgccggcgagctgcagggccagttcacccgttaaaaaggagccgcgccacctttttctcaggggggccagttcagctcgcatagttgcgttacgttacatgttgagacctcgcaagagaagagccaag

SEQ ID NO: 66190 - DNA, 1722 bp, Zea Mays
atgttttaaactgctacgcctacaacacgcctccccagtcaacacagctcagctcagctcggctagcgagctcctcgctcggctctactagctagtgtgttgggacttgggagctaggcggggttgattgcgattgggggaggcgggagtaggtgatgtacggcgcgccgttgcccaaggacctgaacctgccagcagccctgccgcagccgaccaggacgccaccgcagcagcagatgggctccccgggactgctgcggtacaggtcagcgccgagcacgctgctcggcgaggtgatgtgtggtggtgatcaggacttccccgcggctggcggcgcagggcacggaccaccggaccacgccgccgcggacaacgtcctcgcgcgctttctcgccgggcaccactccgagacccgcgactgcaagcctccccgccccgccgccgccgctcacttcatggacgaagctgccgtcgcgtccatggccgcctcacagcagcagcagctcatgtaccagtcgcagcaggagcagcagatggccgccatggaggggctgtaccgcaacgtcagctccggcggcacggagcacggtgcagccgttggcgctggtaacaacagcctgatccgccagagcagctcccccgccggcttcctcaaccacttgaacatggacaacgggtacgggagcatgctccgggtgggcatgggcggcggcgggttcaggaacggcgtcagcgacgcgcggctcaaggggcagctgagcttctcgtcccggcaggggtcggtgatgtcgcagatctcggaggtgggcagcgaggagctcgacggaggcggcggcagcggcagccccgaggcggccggcagcaacgccagcggcgcggcgcgtgggtacagcggcatcccggggtacccgatgggcggcctcgcgtccggcgcctggccggacgaggcgtcgccgtcgccgacgtccggcgcgaagcgcccccgcgactccggccccgcgctgcagcagccgctggcgccgcagctcagcctgcccagcggaaagaacaagggcggcagggcggcctcggcggagatggcggcgatcgagaagttcctccagttccaggacgccgtcccctgcaagatccgcgccaagcgcgggtgaggaggacgaagatcagcgagcggatacggaagctgcaggagctcgtgcccaacatggaaaagcaaaccaacactgccgacatgctggatctggccgtggactacatcaaggatcttcagaagcaggtcaaggtactgaacgacggccgcgccagctgcacctgctccgccggcgagctgcagggccagttcacccgttaaaaaggagccgcgccacctttttctcaggggggccagttcagctcgcatagttgcgttacgttacatggtgaggactgatcgaggaggtatatattggaattgagacgatagtagctagtctgtacatgcaacaagttcattagcaggcagagtaggcctcgcatgttagtgatagctgcgtcagttaatgtacgtttagattgcacatgtattcatcttgatttacatgtgttagagtagtttagtgtggattttagtttaaatttcacattaatccacttcaacatacattaaccgatgtgggtatatatgaccatctaattagaatctttatatacacatgtatttactcaatccacatgattagcctgtcc

SEQ ID NO: 66191 - DNA, 3800 bp, Zea Mays
gccagccgaacacgcccggaagctgcgcgccactgggcgctgattgccacgcgattggtctggttcgtccaccctgacggcaaattgcccgcccgcccctttctttaaacctcccgcagcgaggcagcgtgcagcgaagaaagagaggggctctcatgcgatccgccagcgcccgtggagcgtggaccggagcgaagagagtacgagcagaggagaccgaggaaatctcgggacgtgcccgctgccgaccgatcgggggctcgaacccggcgcgtccgagatccacgagcggaatctatccaggctcacactcactgcctcaggtgtgtcacgggcggcacccgggggcgcgtccccggccgccgtccatccactcgacaaaaagcaaccgagacgagggcggtcctttctccgggctctggtaggggaggggaaggggaggagcagagccgggagccatggcggagccgggcgacgggagtaggcggcggcgggaggcggaggcgccggtggtggcgctggagtgcgtggcggggagctccaaggcggaggagtggggaggcggcgcgggcgtcgtgcaggagggggacgtggtggaggccgtccgcgtcggccgcggctccggcggcgggggcgccgcggccgcgctggagctcgaggcgccattcaagggcgggcgcgccgggctgcacaaggcgctgcacgcggcgttcaagcgcggggacacctccgtggaggtgcgcgtgcggggcggcaggcagctgcaggcctgcatcgtgccgcaccacgccagtcccggcgccggcggcggaggggtcaggaagcagtacgtcctgcggtcgctgcacgaccccaactacttgctcggattcgtcgaccgcctcgagagcgagtgcctcgtcttacaaggtagaacgaacgctgggtgggatcgtgctcttctcctaatgctgctagcaatcaactagcccaggcggtggcgccgtggctgctctgcttgactgcttcaacgaagcacacgtctgatgctccgcaccgacaaacttcttgttagatctaaaatttaaattggactgagaatattctcataaactgatctttcagtgcattgttccaggcgttgttttcctttatttataaatactgaatatgcgctgtttttttgtctccttgtgcctcaccgagagaaatgtgagcaggtcattgccatcagtgtcagattcgcagctacataacaaaagctaaaacgtagcaaaaggatacaggtatacgtgaactacggagaacaaaagctaaagacgtttccgaaacagtgccaagtgcgttgctgtcattggaaataggaacgaggagcacaagagtcgcgtcagccttgagcaaggcgcagctccaggatggctatgtcgcgtacccatgggacaagaagatgcgcgacacgctgcacacgcccaactccagctgctacctctcgatgcttgtcctgcccaaggctctggacagcaatgcctgtcactacgagtccttcgacgacaccgtggcgcgtgccaatgcatggttctactcttcgcaggccgccgggatacccatcgacttcatgaatgtgcagagcgaagctcttctcaccaagatatctggagagacagcgtccgcgtctgtgaattcgagctcattatctgatctgtcgaacgtcactaatgcgacgctctacggttttgaagattaccatggagtggatattggtgtggtaaaggcagcacggctttggtacagctgcgtaggaggagaattgctgctggaaatcccacttgaagaaggtgacacaaggcttggctttgctatcagccgaactgaagagggctttatctacatatcatctgtagtggaagatgacaaggaaagcgaggcaccatctacgcggtctgggctctgtgatctgttcaaccgggccaaggaggcgtcgaaactgctgatcatctcgagggtgtccaatgagaaggtcctaccttggatgatctccagttcaggggcagtccgctgcttcgacaccatctccctcagccagaaactctccttgcaccgcctcgcagtgcgccccatccagctgcatctacttgcctgggagaagccttctgctcccaacccagcagagagggccgtgcgttccccaaagctcaccatgccttcaacgctgctccctcacctacagcaaaaccttgtggagaccatagaaggcggagtagatgctgaagaggagtacgtggggaatttgtcgtttcggatcgatgatatctcatttgagagcagctgggtgtgattccaggtttcaattttgtcatacaggcggctgatgtgcatacatatgttttcatcttgtctagttctctagggcggtaatgctcagttctgtgcttcagaaaatgcagatgctggcttcaaaatgttcagaatatttcttgttttctagccgaatcagggatggataacatctgaaaagtatcttgtaatggaacatttttgttgatcataacataacaaaggagtgatccaaacatgttggtcaaagaaagctcaggcttcacttcgttagttgtttactccaaatctacagcaaacatgcggttcagcacctcaagtttcttgacctttggctcaaaacaaaaaaagaaaaatgttacacgagtgagttgacaccacactagctgttggtcaaagagacacaattatgctgccgatcttgttttgaggaccctgcacttgagcactctatcttgcacgtaaaaccccggcgtcaccattatcttcacttgacaaggactctgcaccggctgcctgtcatgcaggatgtcttccatgtacagctcatcaaatgcgcggccgtcttggacgcgcaggatcgtcagcggcgggccgaaggagaaggccagcaggtggagcagccagacgcacttggcggcgacgaagaagcactgaagcaactgctcgggccacggccgggaccaggcaagcgtcgccacgacgacgctcatcttccggtcgcagaaacggctgaagtcctcgctgtagtacttggtgcccttccgcagaacctcgttccagctaaggttgcgcagcgccacgaaggctgcgaagctctgccggctgtcttccgccgggtcgaggcacctcggcgagccgttccgctggaacgcggggttctcgaagtcctggaacatgacctggttcatgatcgcctcaagatggtacagcacggccttcgagcagtgtttgctgacgctgccgctgctgagcgcgagctggtacgggcgaaggagcaggttcagcttgtcggacaggccgtcactggactcttcgttcacctgctggatcagcgccttgcagagctgcttcacagagagccgcgcctccgacgcgatctgcaagaagccttccaccatcacctcgtggctcaccggcatcgagagctctcggctgggttcgatcgatttcgtcggtctccgggagacggacggcgagttggtggcctgccgcagtgccttcttgagctccgagcagtacgcttccacgctcaccagcttggtggccagctcccccagcgacgacctcacctcggcagcttcgtgcagggcggcgtcccggtgcgcgttggcctccgcgagctctttcttgagggactccatagatagcgccccccactcggtcagcagctgcggcatgttgccgcgctcgatggccgtcggcgacgtcatctccggtggcttggctttctttctcgacttggggaagagccacgagaggatctg

SEQ ID NO: 66192 - DNA, 3722 bp, Zea Mays
gccagccgaacacgcccggaagctgcgcgccactgggcgctgattgccacgcgattggtctggttcgtccaccctgacggcaaattgcccgcccgcccctttctttaaacctcccgcagcgaggcagcgtgcagcgaagaaagagaggggctctcatgcgatccgccagcgcccgtggagcgtggaccggagcgaagagagtacgagcagaggagaccgaggaaatctcgggacgtgcccgctgccgaccgatcgggggctcgaacccggcgcgtccgagatccacgagcggaatctatccaggctcacactcactgcctcaggtgtgtcacgggcggcacccgggggcgcgtccccggccgccgtccatccactcgacaaaaagcaaccgagacgagggcggtcctttctccgggctctggtaggggaggggaaggggaggagcagagccgggagccatggcggagccgggcgacgggagtaggcggcggcgggaggcggaggcgccggtggtggcgctggagtgcgtggcggggagctccaaggcggaggagtggggaggcggcgcgggcgtcgtgcaggagggggacgtggtggaggccgtccgcgtcggccgcggctccggcggcgggggcgccgcggccgcgctggagctcgaggcgccattcaagggcgggcgcgccgggctgcacaaggcgctgcacgcggcgttcaagcgcggggacacctccgtggaggtgcgcgtgcggggcggcaggcagctgcaggcctgcatcgtgccgcaccacgccagtcccggcgccggcggcggaggggtcaggaagcagtacgtcctgcggtcgctgcacgaccccaactacttgctcggattcgtcgaccgcctcgagagcgagtgcctcgtcttacaaggtagaacgaacgctgggtgggatcgtgctcttctcctaatgctgctagcaatcaactagcccaggcggtggcgccgtggctgctctgcttgactgcttcaacgaagcacacgtctgatgctccgcaccgacaaacttcttgttagatctaaaatttaaattggactgagaatattctcataaactgatctttcagtgcattgttccaggcgttgttttcctttatttataaatactgaatatgcgctgtttttttgtctccttgtgcctcaccgagagaaatgtgagcaggtcattgccatcagtgtcagattcgcagctacataacaaaagctaaaacgtagcaaaaggatacaggaacgaggagcacaagagtcgcgtcagccttgagcaaggcgcagctccaggatggctatgtcgcgtacccatgggacaagaagatgcgcgacacgctgcacacgcccaactccagctgctacctctcgatgcttgtcctgcccaaggctctggacagcaatgcctgtcactacgagtccttcgacgacaccgtggcgcgtgccaatgcatggttctactcttcgcaggccgccgggatacccatcgacttcatgaatgtgcagagcgaagctcttctcaccaagatatctggagagacagcgtccgcgtctgtgaattcgagctcattatctgatctgtcgaacgtcactaatgcgacgctctacggttttgaagattaccatggagtggatattggtgtggtaaaggcagcacggctttggtacagctgcgtaggaggagaattgctgctggaaatcccacttgaagaaggtgacacaaggcttggctttgctatcagccgaactgaagagggctttatctacatatcatctgtagtggaagatgacaaggaaagcgaggcaccatctacgcggtctgggctctgtgatctgttcaaccgggccaaggaggcgtcgaaactgctgatcatctcgagggtgtccaatgagaaggtcctaccttggatgatctccagttcaggggcagtccgctgcttcgacaccatctccctcagccagaaactctccttgcaccgcctcgcagtgcgccccatccagctgcatctacttgcctgggagaagccttctgctcccaacccagcagagagggccgtgcgttccccaaagctcaccatgccttcaacgctgctccctcacctacagcaaaaccttgtggagaccatagaaggcggagtagatgctgaagaggagtacgtggggaatttgtcgtttcggatcgatgatatctcatttgagagcagctgggtgtgattccaggtttcaattttgtcatacaggcggctgatgtgcatacatatgttttcatcttgtctagttctctagggcggtaatgctcagttctgtgcttcagaaaatgcagatgctggcttcaaaatgttcagaatatttcttgttttctagccgaatcagggatggataacatctgaaaagtatcttgtaatggaacatttttgttgatcataacataacaaaggagtgatccaaacatgttggtcaaagaaagctcaggcttcacttcgttagttgtttactccaaatctacagcaaacatgcggttcagcacctcaagtttcttgacctttggctcaaaacaaaaaaagaaaaatgttacacgagtgagttgacaccacactagctgttggtcaaagagacacaattatgctgccgatcttgttttgaggaccctgcacttgagcactctatcttgcacgtaaaaccccggcgtcaccattatcttcacttgacaaggactctgcaccggctgcctgtcatgcaggatgtcttccatgtacagctcatcaaatgcgcggccgtcttggacgcgcaggatcgtcagcggcgggccgaaggagaaggccagcaggtggagcagccagacgcacttggcggcgacgaagaagcactgaagcaactgctcgggccacggccgggaccaggcaagcgtcgccacgacgacgctcatcttccggtcgcagaaacggctgaagtcctcgctgtagtacttggtgcccttccgcagaacctcgttccagctaaggttgcgcagcgccacgaaggctgcgaagctctgccggctgtcttccgccgggtcgaggcacctcggcgagccgttccgctggaacgcggggttctcgaagtcctggaacatgacctggttcatgatcgcctcaagatggtacagcacggccttcgagcagtgtttgctgacgctgccgctgctgagcgcgagctggtacgggcgaaggagcaggttcagcttgtcggacaggccgtcactggactcttcgttcacctgctggatcagcgccttgcagagctgcttcacagagagccgcgcctccgacgcgatctgcaagaagccttccaccatcacctcgtggctcaccggcatcgagagctctcggctgggttcgatcgatttcgtcggtctccgggagacggacggcgagttggtggcctgccgcagtgccttcttgagctccgagcagtacgcttccacgctcaccagcttggtggccagctcccccagcgacgacctcacctcggcagcttcgtgcagggcggcgtcccggtgcgcgttggcctccgcgagctctttcttgagggactccatagatagcgccccccactcggtcagcagctgcggcatgttgccgcgctcgatggccgtcggcgacgtcatctccggtggcttggctttctttctcgacttggggaagagccacgagaggatctg

SEQ ID NO: 66193 - DNA, 3776 bp, Zea Mays
gccagccgaacacgcccggaagctgcgcgccactgggcgctgattgccacgcgattggtctggttcgtccaccctgacggcaaattgcccgcccgcccctttctttaaacctcccgcagcgaggcagcgtgcagcgaagaaagagaggggctctcatgcgatccgccagcgcccgtggagcgtggaccggagcgaagagagtacgagcagaggagaccgaggaaatctcgggacgtgcccgctgccgaccgatcgggggctcgaacccggcgcgtccgagatccacgagcggaatctatccaggctcacactcactgcctcaggtgtgtcacgggcggcacccgggggcgcgtccccggccgccgtccatccactcgacaaaaagcaaccgagacgagggcggtcctttctccgggctctggtaggggaggggaaggggaggagcagagccgggagccatggcggagccgggcgacgggagtaggcggcggcgggaggcggaggcgccggtggtggcgctggagtgcgtggcggggagctccaaggcggaggagtggggaggcggcgcgggcgtcgtgcaggagggggacgtggtggaggccgtccgcgtcggccgcggctccggcggcgggggcgccgcggccgcgctggagctcgaggcgccattcaagggcgggcgcgccgggctgcacaaggcgctgcacgcggcgttcaagcgcggggacacctccgtggaggtgcgcgtgcggggcggcaggcagctgcaggcctgcatcgtgccgcaccacgccagtcccggcgccggcggcggaggggtcaggaagcagtacgtcctgcggtcgctgcacgaccccaactacttgctcggattcgtcgaccgcctcgagagcgagtgcctcgtcttacaaggtagaacgaacgctgggtgggatcgtgctcttctcctaatgctgctagcaatcaactagcccaggcggtggcgccgtggctgctctgcttgactgcttcaacgaagcacacgtctgatgctccgcaccgacaaacttcttgttagatctaaaatttaaattggactgagaatattctcataaactgatctttcagtgcattgttccaggcgttgttttcctttatttataaatactgaatatgcgctgtttttttgtctccttgtgcctcaccgagagaaatgtgagcaggtcattgccatcagtgtcagattcgcagctacataacaaaagctaaaacgtagcaaaaggatacaggtatacgtgaactacggagaacaaaagctaaagacgtttccgaaacagtgccaagaacgaggagcacaagagtcgcgtcagccttgagcaaggcgcagctccaggatggctatgtcgcgtacccatgggacaagaagatgcgcgacacgctgcacacgcccaactccagctgctacctctcgatgcttgtcctgcccaaggctctggacagcaatgcctgtcactacgagtccttcgacgacaccgtggcgcgtgccaatgcatggttctactcttcgcaggccgccgggatacccatcgacttcatgaatgtgcagagcgaagctcttctcaccaagatatctggagagacagcgtccgcgtctgtgaattcgagctcattatctgatctgtcgaacgtcactaatgcgacgctctacggttttgaagattaccatggagtggatattggtgtggtaaaggcagcacggctttggtacagctgcgtaggaggagaattgctgctggaaatcccacttgaagaaggtgacacaaggcttggctttgctatcagccgaactgaagagggctttatctacatatcatctgtagtggaagatgacaaggaaagcgaggcaccatctacgcggtctgggctctgtgatctgttcaaccgggccaaggaggcgtcgaaactgctgatcatctcgagggtgtccaatgagaaggtcctaccttggatgatctccagttcaggggcagtccgctgcttcgacaccatctccctcagccagaaactctccttgcaccgcctcgcagtgcgccccatccagctgcatctacttgcctgggagaagccttctgctcccaacccagcagagagggccgtgcgttccccaaagctcaccatgccttcaacgctgctccctcacctacagcaaaaccttgtggagaccatagaaggcggagtagatgctgaagaggagtacgtggggaatttgtcgtttcggatcgatgatatctcatttgagagcagctgggtgtgattccaggtttcaattttgtcatacaggcggctgatgtgcatacatatgttttcatcttgtctagttctctagggcggtaatgctcagttctgtgcttcagaaaatgcagatgctggcttcaaaatgttcagaatatttcttgttttctagccgaatcagggatggataacatctgaaaagtatcttgtaatggaacatttttgttgatcataacataacaaaggagtgatccaaacatgttggtcaaagaaagctcaggcttcacttcgttagttgtttactccaaatctacagcaaacatgcggttcagcacctcaagtttcttgacctttggctcaaaacaaaaaaagaaaaatgttacacgagtgagttgacaccacactagctgttggtcaaagagacacaattatgctgccgatcttgttttgaggaccctgcacttgagcactctatcttgcacgtaaaaccccggcgtcaccattatcttcacttgacaaggactctgcaccggctgcctgtcatgcaggatgtcttccatgtacagctcatcaaatgcgcggccgtcttggacgcgcaggatcgtcagcggcgggccgaaggagaaggccagcaggtggagcagccagacgcacttggcggcgacgaagaagcactgaagcaactgctcgggccacggccgggaccaggcaagcgtcgccacgacgacgctcatcttccggtcgcagaaacggctgaagtcctcgctgtagtacttggtgcccttccgcagaacctcgttccagctaaggttgcgcagcgccacgaaggctgcgaagctctgccggctgtcttccgccgggtcgaggcacctcggcgagccgttccgctggaacgcggggttctcgaagtcctggaacatgacctggttcatgatcgcctcaagatggtacagcacggccttcgagcagtgtttgctgacgctgccgctgctgagcgcgagctggtacgggcgaaggagcaggttcagcttgtcggacaggccgtcactggactcttcgttcacctgctggatcagcgccttgcagagctgcttcacagagagccgcgcctccgacgcgatctgcaagaagccttccaccatcacctcgtggctcaccggcatcgagagctctcggctgggttcgatcgatttcgtcggtctccgggagacggacggcgagttggtggcctgccgcagtgccttcttgagctccgagcagtacgcttccacgctcaccagcttggtggccagctcccccagcgacgacctcacctcggcagcttcgtgcagggcggcgtcccggtgcgcgttggcctccgcgagctctttcttgagggactccatagatagcgccccccactcggtcagcagctgcggcatgttgccgcgctcgatggccgtcggcgacgtcatctccggtggcttggctttctttctcgacttggggaagagccacgagaggatctg

SEQ ID NO: 66194 - DNA, 3489 bp, Zea Mays
ctttctttaaacctcccgcagcgaggcagcgtgcagcgaagaaagagaggggctctcatgcgatccgccagcgcccgtggagcgtggaccggagcgaagagagtacgagcagaggagaccgaggaaatctcgggacgtgcccgctgccgaccgatcgggggctcgaacccggcgcgtccgagatccacgagcggaatctatccaggctcacactcactgcctcaggtgtgtcacgggcggcacccgggggcgcgtccccggccgccgtccatccactcgacaaaaagcaaccgagacgagggcggtcctttctccgggctctggtaggggaggggaaggggaggagcagagccgggagccatggcggagccgggcgacgggagtaggcggcggcgggaggcggaggcgccggtggtggcgctggagtgcgtggcggggagctccaaggcggaggagtggggaggcggcgcgggcgtcgtgcaggagggggacgtggtggaggccgtccgcgtcggccgcggctccggcggcgggggcgccgcggccgcgctggagctcgaggcgccattcaagggcgggcgcgccgggctgcacaaggcgctgcacgcggcgttcaagcgcggggacacctccgtggaggtgcgcgtgcggggcggcaggcagctgcaggcctgcatcgtgccgcaccacgccagtcccggcgccggcggcggaggggtcaggaagcagtacgtcctgcggtcgctgcacgaccccaactacttgctcggattcgtcgaccgcctcgagagcgagtgcctcgtcttacaaggaacgaggagcacaagagtcgcgtcagccttgagcaaggcgcagctccaggatggctatgtcgcgtacccatgggacaagaagatgcgcgacacgctgcacacgcccaactccagctgctacctctcgatgcttgtcctgcccaaggctctggacagcaatgcctgtcactacgagtccttcgacgacaccgtggcgcgtgccaatgcatggttctactcttcgcaggccgccgggatacccatcgacttcatgaatgtgcagagcgaagctcttctcaccaaggtgcagacacaggctctctaattcagacatctcacagcgtaggttggcagttactacttactacagtgagacttcagctagttttaatcttctgacagtgtttagataactaagataagaaactgggcagtgagtttgttcaaatcctccgacaccgtttcgtgtttgagagattctactcacagttctgtcttggcactgtgacactctgaaacatgcagatatctggagagacagcgtccgcgtctgtgaattcgagctcattatctgatctgtcgaacgtcactaatgcgacgctctacggttttgaagattaccatggagtggatattggtgtggtaaaggcagcacggctttggtacagctgcgtaggaggagaattgctgctggaaatcccacttgaagaaggtgacacaaggcttggctttgctatcagccgaactgaagagggctttatctacatatcatctgtagtggaagatgacaaggaaagcgaggcaccatctacgcggtctgggctctgtgatctgttcaaccgggccaaggaggcgtcgaaactgctgatcatctcgagggtgtccaatgagaaggtcctaccttggatgatctccagttcaggggcagtccgctgcttcgacaccatctccctcagccagaaactctccttgcaccgcctcgcagtgcgccccatccagctgcatctacttgcctgggagaagccttctgctcccaacccagcagagagggccgtgcgttccccaaagctcaccatgccttcaacgctgctccctcacctacagcaaaaccttgtggagaccatagaaggcggagtagatgctgaagaggagtacgtggggaatttgtcgtttcggatcgatgatatctcatttgagagcagctgggtgtgattccaggtttcaattttgtcatacaggcggctgatgtgcatacatatgttttcatcttgtctagttctctagggcggtaatgctcagttctgtgcttcagaaaatgcagatgctggcttcaaaatgttcagaatatttcttgttttctagccgaatcagggatggataacatctgaaaagtatcttgtaatggaacatttttgttgatcataacataacaaaggagtgatccaaacatgttggtcaaagaaagctcaggcttcacttcgttagttgtttactccaaatctacagcaaacatgcggttcagcacctcaagtttcttgacctttggctcaaaacaaaaaaagaaaaatgttacacgagtgagttgacaccacactagctgttggtcaaagagacacaattatgctgccgatcttgttttgaggaccctgcacttgagcactctatcttgcacgtaaaaccccggcgtcaccattatcttcacttgacaaggactctgcaccggctgcctgtcatgcaggatgtcttccatgtacagctcatcaaatgcgcggccgtcttggacgcgcaggatcgtcagcggcgggccgaaggagaaggccagcaggtggagcagccagacgcacttggcggcgacgaagaagcactgaagcaactgctcgggccacggccgggaccaggcaagcgtcgccacgacgacgctcatcttccggtcgcagaaacggctgaagtcctcgctgtagtacttggtgcccttccgcagaacctcgttccagctaaggttgcgcagcgccacgaaggctgcgaagctctgccggctgtcttccgccgggtcgaggcacctcggcgagccgttccgctggaacgcggggttctcgaagtcctggaacatgacctggttcatgatcgcctcaagatggtacagcacggccttcgagcagtgtttgctgacgctgccgctgctgagcgcgagctggtacgggcgaaggagcaggttcagcttgtcggacaggccgtcactggactcttcgttcacctgctggatcagcgccttgcagagctgcttcacagagagccgcgcctccgacgcgatctgcaagaagccttccaccatcacctcgtggctcaccggcatcgagagctctcggctgggttcgatcgatttcgtcggtctccgggagacggacggcgagttggtggcctgccgcagtgccttcttgagctccgagcagtacgcttccacgctcaccagcttggtggccagctcccccagcgacgacctcacctcggcagcttcgtgcagggcggcgtcccggtgcgcgttggcctccgcgagctctttcttgagggactccatagatagcgccccccactcggtcagcagctgcggcatgttgccgcgctcgatggccgtcggcgacgtcatctccggtggcttggctttctttctcgacttggggaagagccacgagaggatctg

SEQ ID NO: 66195 - DNA, 3126 bp, Zea Mays
gctctcatgcgatccgccagcgcccgtggagcgtggaccggagcgaagagagtacgagcagaggagaccgaggaaatctcgggacgtgcccgctgccgaccgatcgggggctcgaacccggcgcgtccgagatccacgagcggaatctatccaggctcacactcactgcctcaggtgtgtcacgggcggcacccgggggcgcgtccccggccgccgtccatccactcgacaaaaagcaaccgagacgagggcggtcctttctccgggctctggtaggggaggggaaggggaggagcagagccgggagccatggcggagccgggcgacgggagtaggcggcggcgggaggcggaggcgccggtggtggcgctggagtgcgtggcggggagctccaaggcggaggagtggggaggcggcgcgggcgtcgtgcaggagggggacgtggtggaggccgtccgcgtcggccgcggctccggcggcgggggcgccgcggccgcgctggagctcgaggcgccattcaagggcgggcgcgccgggctgcacaaggcgctgcacgcggcgttcaagcgcggggacacctccgtggaggtgcgcgtgcggggcggcaggcagctgcaggcctgcatcgtgccgcaccacgccagtcccggcgccggcggcggaggggtcaggaagcagtacgtcctgcggtcgctgcacgaccccaactacttgctcggattcgtcgaccgcctcgagagcgagtgcctcgtcttacaaggaacgaggagcacaagagtcgcgtcagccttgagcaaggcgcagctccaggatggctatgtcgcgtacccatgggacaagaagatgcgcgacacgctgcacacgcccaactccagctgctacctctcgatgcttgtcctgcccaaggctctggacagcaatgcctgtcactacgagtccttcgacgacaccgtggcgcgtgccaatgcatggttctactcttcgcaggccgccgggatacccatcgacttcatgaatgtgcagagcgaagctcttctcaccaagattaccatggagtggatattggtgtggtaaaggcagcacggctttggtacagctgcgtaggaggagaattgctgctggaaatcccacttgaagaaggtgacacaaggcttggctttgctatcagccgaactgaagagggctttatctacatatcatctgtagtggaagatgacaaggaaagcgaggcaccatctacgcggtctgggctctgtgatctgttcaaccgggccaaggaggcgtcgaaactgctgatcatctcgagggtgtccaatgagaaggtcctaccttggatgatctccagttcaggggcagtccgctgcttcgacaccatctccctcagccagaaactctccttgcaccgcctcgcagtgcgccccatccagctgcatctacttgcctgggagaagccttctgctcccaacccagcagagagggccgtgcgttccccaaagctcaccatgccttcaacgctgctccctcacctacagcaaaaccttgtggagaccatagaaggcggagtagatgctgaagaggagtacgtggggaatttgtcgtttcggatcgatgatatctcatttgagagcagctgggtgtgattccaggtttcaattttgtcatacaggcggctgatgtgcatacatatgttttcatcttgtctagttctctagggcggtaatgctcagttctgtgcttcagaaaatgcagatgctggcttcaaaatgttcagaatatttcttgttttctagccgaatcagggatggataacatctgaaaagtatcttgtaatggaacatttttgttgatcataacataacaaaggagtgatccaaacatgttggtcaaagaaagctcaggcttcacttcgttagttgtttactccaaatctacagcaaacatgcggttcagcacctcaagtttcttgacctttggctcaaaacaaaaaaagaaaaatgttacacgagtgagttgacaccacactagctgttggtcaaagagacacaattatgctgccgatcttgttttgaggaccctgcacttgagcactctatcttgcacgtaaaaccccggcgtcaccattatcttcacttgacaaggactctgcaccggctgcctgtcatgcaggatgtcttccatgtacagctcatcaaatgcgcggccgtcttggacgcgcaggatcgtcagcggcgggccgaaggagaaggccagcaggtggagcagccagacgcacttggcggcgacgaagaagcactgaagcaactgctcgggccacggccgggaccaggcaagcgtcgccacgacgacgctcatcttccggtcgcagaaacggctgaagtcctcgctgtagtacttggtgcccttccgcagaacctcgttccagctaaggttgcgcagcgccacgaaggctgcgaagctctgccggctgtcttccgccgggtcgaggcacctcggcgagccgttccgctggaacgcggggttctcgaagtcctggaacatgacctggttcatgatcgcctcaagatggtacagcacggccttcgagcagtgtttgctgacgctgccgctgctgagcgcgagctggtacgggcgaaggagcaggttcagcttgtcggacaggccgtcactggactcttcgttcacctgctggatcagcgccttgcagagctgcttcacagagagccgcgcctccgacgcgatctgcaagaagccttccaccatcacctcgtggctcaccggcatcgagagctctcggctgggttcgatcgatttcgtcggtctccgggagacggacggcgagttggtggcctgccgcagtgccttcttgagctccgagcagtacgcttccacgctcaccagcttggtggccagctcccccagcgacgacctcacctcggcagcttcgtgcagggcggcgtcccggtgcgcgttggcctccgcgagctctttcttgagggactccatagatagcgccccccactcggtcagcagctgcggcatgttgccgcgctcgatggccgtcggcgacgtcatctccggtggcttggctttctttctcgacttggggaagagccacgagaggatctg

SEQ ID NO: 66196 - DNA, 3164 bp, Zea Mays
tccgccagcgcccgtggagcgtggaccggagcgaagagagtacgagcagaggagaccgaggaaatctcgggacgtgcccgctgccgaccgatcgggggctcgaacccggcgcgtccgagatccacgagcggaatctatccaggctcacactcactgcctcaggtgtgtcacgggcggcacccgggggcgcgtccccggccgccgtccatccactcgacaaaaagcaaccgagacgagggcggtcctttctccgggctctggtaggggaggggaaggggaggagcagagccgggagccatggcggagccgggcgacgggagtaggcggcggcgggaggcggaggcgccggtggtggcgctggagtgcgtggcggggagctccaaggcggaggagtggggaggcggcgcgggcgtcgtgcaggagggggacgtggtggaggccgtccgcgtcggccgcggctccggcggcgggggcgccgcggccgcgctggagctcgaggcgccattcaagggcgggcgcgccgggctgcacaaggcgctgcacgcggcgttcaagcgcggggacacctccgtggaggtgcgcgtgcggggcggcaggcagctgcaggcctgcatcgtgccgcaccacgccagtcccggcgccggcggcggaggggtcaggaagcagtacgtcctgcggtcgctgcacgaccccaactacttgctcggattcgtcgaccgcctcgagagcgagtgcctcgtcttacaaggaacgaggagcacaagagtcgcgtcagccttgagcaaggcgcagctccaggatggctatgtcgcgtacccatgggacaagaagatgcgcgacacgctgcacacgcccaactccagctgctacctctcgatgcttgtcctgcccaaggctctggacagcaatgcctgtcactacgagtccttcgacgacaccgtggcgcgtgccaatgcatggttctactcttcgcaggccgccgggatacccatcgacttcatgaatgtgcagagcgaagctcttctcaccaagatatctggagagacagcgtccgcgtctgtgaattcgagctcattatctgatctgtcgaacgtcactaatgcgacgctctacggttttgaagattaccatggagtggatattggtgtggtaaaggcagcacggctttggtacagctgcgtaggaggagaattgctgctggaaatcccacttgaagaagggctttatctacatatcatctgtagtggaagatgacaaggaaagcgaggcaccatctacgcggtctgggctctgtgatctgttcaaccgggccaaggaggcgtcgaaactgctgatcatctcgagggtgtccaatgagaaggtcctaccttggatgatctccagttcaggggcagtccgctgcttcgacaccatctccctcagccagaaactctccttgcaccgcctcgcagtgcgccccatccagctgcatctacttgcctgggagaagccttctgctcccaacccagcagagagggccgtgcgttccccaaagctcaccatgccttcaacgctgctccctcacctacagcaaaaccttgtggagaccatagaaggcggagtagatgctgaagaggagtacgtggggaatttgtcgtttcggatcgatgatatctcatttgagagcagctgggtgtgattccaggtttcaattttgtcatacaggcggctgatgtgcatacatatgttttcatcttgtctagttctctagggcggtaatgctcagttctgtgcttcagaaaatgcagatgctggcttcaaaatgttcagaatatttcttgttttctagccgaatcagggatggataacatctgaaaagtatcttgtaatggaacatttttgttgatcataacataacaaaggagtgatccaaacatgttggtcaaagaaagctcaggcttcacttcgttagttgtttactccaaatctacagcaaacatgcggttcagcacctcaagtttcttgacctttggctcaaaacaaaaaaagaaaaatgttacacgagtgagttgacaccacactagctgttggtcaaagagacacaattatgctgccgatcttgttttgaggaccctgcacttgagcactctatcttgcacgtaaaaccccggcgtcaccattatcttcacttgacaaggactctgcaccggctgcctgtcatgcaggatgtcttccatgtacagctcatcaaatgcgcggccgtcttggacgcgcaggatcgtcagcggcgggccgaaggagaaggccagcaggtggagcagccagacgcacttggcggcgacgaagaagcactgaagcaactgctcgggccacggccgggaccaggcaagcgtcgccacgacgacgctcatcttccggtcgcagaaacggctgaagtcctcgctgtagtacttggtgcccttccgcagaacctcgttccagctaaggttgcgcagcgccacgaaggctgcgaagctctgccggctgtcttccgccgggtcgaggcacctcggcgagccgttccgctggaacgcggggttctcgaagtcctggaacatgacctggttcatgatcgcctcaagatggtacagcacggccttcgagcagtgtttgctgacgctgccgctgctgagcgcgagctggtacgggcgaaggagcaggttcagcttgtcggacaggccgtcactggactcttcgttcacctgctggatcagcgccttgcagagctgcttcacagagagccgcgcctccgacgcgatctgcaagaagccttccaccatcacctcgtggctcaccggcatcgagagctctcggctgggttcgatcgatttcgtcggtctccgggagacggacggcgagttggtggcctgccgcagtgccttcttgagctccgagcagtacgcttccacgctcaccagcttggtggccagctcccccagcgacgacctcacctcggcagcttcgtgcagggcggcgtcccggtgcgcgttggcctccgcgagctctttcttgagggactccatagatagcgccccccactcggtcagcagctgcggcatgttgccgcgctcgatggccgtcggcgacgtcatctccggtggcttggctttctttctcgacttggggaagagccacgagaggatctg

SEQ ID NO: 66197 - DNA, 1770 bp, Zea Mays
ggctacgaaataaaacacatcctccttcctttacttctcccgttcgtcccccgtgctctttctccctctcgtggcgctgggcgaccgcctacgcaggccaggcgccgtcgccctaagctacgccaggttcccgggtcttggtcggtcccttcaccggcgaagagcacccaccagacgcgccggtgcctggatccggaggaagtgctgcgggtttcggcggttcgtctctctcgttgtttccggcggggttatgaaggcggtgggatacaacctctacgatagcagcgggactgatgacgatctccctccagcacaaaatagaggattgagaggacgggttttcagtgggaatggccgagcatctgctggggcatttccttacatgagggcaaataatgatttggagagtgaaatacatcgagttgagcaagatgcatatactggtgttcttagggcatttaaagtgcaatctgatgcaatatcctgggaaaaagagagcttgattactgaactcaggaaagaactgagggtttctgatgaggagcatagggagctattaaataaagtcaatgaagatgggagcatccgtcaaatgagggagttaagacaggcaggtggaatcccaagtggtctgcatcgtggcaacagggttttatatgatgcagaacctgggcccactaccaagaggcaaagggcatctcattcgattccttcgcaatctgcaggcctccagtcccctatgatgccctcccactcagtttcatctgcaaaatggggtcctttgtcagcaagaggcaagaaggcgaagatggtgaattaaaatttgcctggctgattatcacattgccattaattattcagttgaagattgataaacactccttaaacagatggcacctgaagatataagatgggaatttgatggacatctttcaaatcatgatggctggggcccttctggccctatgctgaagaggcacatgaccaacaacggtgctatggcaggttcaatcaggggaagaggaaggttatcgataaatgagcctataaaagactatgctccacctcaaaatgacatcaataggaattttgattatattgacataccaaatactgaaagtgttgttactgaggtggagagggtgttggccaatccaaatatgcctgaaatcgagaaggcaaggaaactgctgaaagatcaggagcagtcattacttgatgcaattgccagacttgatgaagcatctgatagcgatagtggtaactgatatggctatggaagaccgaaggggttctgctggggtcctggggaatggaacggcattgctacttagttgttggaattggaagattaacatgcatctgtgtatcacctacctcgaccacagaacaaacaaaccacattatggcaaaaaaattgacatgccagaaaatggtgcctggaaactgttgatgcctgaaatgggatttgctggctacacaaaattgagcgcacgaggagcagggatatgcaaatgtcagaactgtttgaatggtgtttcctatgtagcgtagtaaaagtagcttaaatgttctagatgattagcacggatcacttagcattcctgattcagtataggtagatgtctaactctagcataatatccaacttggttgttcttgtactctaatgtgaaaaaggacgttgttcactcttttcatgttggctgcttggctaggactttgttgtgcacgcttttcatttatgctgctggacgtatcttattaact

SEQ ID NO: 66198 - DNA, 1328 bp, Zea Mays
aaaacacatcctccttcctttacttctcccgttcgtcccccgtgctctttctccctctcgtggcgctgggcgaccgcctacgcaggccaggcgccgtcgccctaagctacgccaggttcccgggtcttggtcggtcccttcaccggcgaagagcacccaccagacgcgccggtgcctggatccggaggaagtgctgcgggtttcggcggttcgtctctctcgttgtttccggcggggttatgaaggcggtgggatacaacctctacgatagcagcgggactgatgacgatctccctccagcacaaaatagaggattgagaggacgggttttcagtgggaatggccgagcatctgctggggcatttccttacatgagggcaaataatgatttggagagtgaaatacatcgagttgagcaagatgcatatactggtgttcttagggcatttaaagtgcaatctgatgcaatatcctgggaaaaagagagcttgattactgaactcaggaaagaactgagggtttctgatgaggagcatagggagctattaaataaagtcaatgaagatgggagcatccgtcaaatgagggagttaagacaggcaggtggaatcccaagtggtctgcatcgtggcaacagggttttatatgatgcagaacctgggcccactaccaagaggcaaagggcatctcattcgattccttcgcaatctgcaggcctccagtcccctatgatgccctcccactcagtttcatctgcaaaatggggtcctttgtcagcaagaggcaagaaggcgaagatggtgaattaaaatttgcctggctgattatcacattgccattaattattcagttgaagattgataaacactccttaaacagatggcacctgaagatataagatgggaatttgatggacatctttcaaatcatgatggctggggcccttctggccctatgctgaagaggcacatgaccaacaacggtgctatggcaggttcaatcaggggaagaggaaggttatcgataaatgagcctataaaagactatgctccacctcaaaatgacatcaataggaattttgattatattgacataccaaatactgaaagtgttgttactgaggtggagagggtgttggccaatccaaatatgcctgaaatcgagaaggcaaggaaactgctgaaagatcaggagcagtcattacttgatgcaattgccagacttgatgaagcatctgatagcgatagtggtaactgcggggatgggacagtagaagtgtggagcgacgcatcaggcttccctctacggccgcctccacatcagcttcc

SEQ ID NO: 66199 - DNA, 1754 bp, Zea Mays
catcctccttcctttacttctcccgttcgtcccccgtgctctttctccctctcgtggcgctgggcgaccgcctacgcaggccaggcgccgtcgccctaagctacgccaggttcccgggtcttggtcggtcccttcaccggcgaagagcacccaccagacgcgccggtgcctggatccggaggaagtgctgcgggtttcggcggttcgtctctctcgttgtttccggcggggttatgaaggcggtgggatacaacctctacgatagcagcgggactgatgacgatctccctccagcacaaaatagaggattgagaggacgggttttcagtgggaatggccgagcatctgctggggcatttccttacatgagggcaaataatgatttggagagtgaaatacatcgagttgagcaagatgcatatactggtgttcttagggcatttaaagtgcaatctgatgcaatatcctgggaaaaagagagcttgattactgaactcaggaaagaactgagggtttctgatgaggagcatagggagctattaaataaagtcaatgaagatgggagcatccgtcaaatgagggagttaagacaggcaggtggaatcccaagtggtctgcatcgtggcaacagggttttatatgatgcagaacctgggcccactaccaagaggcaaagggcatctcattcgattccttcgcaatctgcaggcctccagtcccctatgatgccctcccactcagtttcatctgcaaaatggggtcctttgtcagcaagaggcaagaaggcgaagatgggtgaattaaaatttgcctggctgattatcacattgccattaattattcagttgaagattgataaacactccttaaacagatggcacctgaagatataagatgggaatttgatggacatctttcaaatcatgatggctggggcccttctggccctatgctgaagaggcacatgaccaacaacggtgctatggcaggttcaatcaggggaagaggaaggttatcgataaatgagcctataaaagactatgctccacctcaaaatgacatcaataggaattttgattatattgacataccaaatactgaaagtgttgttactgaggtggagagggtgttggccaatccaaatatgcctgaaatcgagaaggcaaggaaactgctgaaagatcaggagcagtcattacttgatgcaattgccagacttgatgaagcatctgatagcgatagtggtaactgatatggctatggaagaccgaaggggttctgctggggtcctggggaatggaacggcattgctacttagttgttggaattggaagattaacatgcatctgtgtatcacctacctcgaccacagaacaaacaaaccacattatggcaaaaaaattgacatgccagaaaatggtgcctggaaactgttgatgcctgaaatgggatttgctggctacacaaaattgagcgcacgaggagcagggatatgcaaatgtcagaactgtttgaatggtgtttcctatgtagcgtagtaaaagtagcttaaatgttctagatgattagcacggatcacttagcattcctgattcagtataggtagatgtctaactctagcataatatccaacttggttgttcttgtactctaatgtgaaaaaggacgttgttcactcttttcatgttggctgcttggctaggactttgttgtgcacgcttttcatttatgctgctggacgtatcttattaact

SEQ ID NO: 66200 - DNA, 1541 bp, Zea Mays
tttacttctcccgttcgtcccccgtgctctttctccctctcgtggcgctgggcgaccgcctacgcaggccaggcgccgtcgccctaagctacgccaggttcccgggtcttggtcggtcccttcaccggcgaagagcacccaccagacgcgccggtgcctggatccggaggaagtgctgcgggtttcggcggttcgtctctctcgttgtttccggcggggttatgaaggcggtgggatacaacctctacgatagcagcggaaaaagagagcttgattactgaactcaggaaagaactgagggtttctgatgaggagcatagggagctattaaataaagtcaatgaagatgggagcatccgtcaaatgagggagttaagacaggcaggtggaatcccaagtggtctgcatcgtggcaacagggttttatatgatgcagaacctgggcccactaccaagaggcaaagggcatctcattcgattccttcgcaatctgcaggcctccagtcccctatgatgccctcccactcagtttcatctgcaaaatggggtcctttgtcagcaagaggcaagaaggcgaagatggtgaattaaaatttgcctggctgattatcacattgccattaattattcagttgaagattgataaacactccttaaacagatggcacctgaagatataagatgggaatttgatggacatctttcaaatcatgatggctggggcccttctggccctatgctgaagaggcacatgaccaacaacggtgctatggcaggttcaatcaggggaagaggaaggttatcgataaatgagcctataaaagactatgctccacctcaaaatgacatcaataggaattttgattatattgacataccaaatactgaaagtgttgttactgaggtggagagggtgttggccaatccaaatatgcctgaaatcgagaaggcaaggaaactgctgaaagatcaggagcagtcattacttgatgcaattgccagacttgatgaagcatctgatagcgatagtggtaactgatatggctatggaagaccgaaggggttctgctggggtcctggggaatggaacggcattgctacttagttgttggaattggaagattaacatgcatctgtgtatcacctacctcgaccacagaacaaacaaaccacattatggcaaaaaaattgacatgccagaaaatggtgcctggaaactgttgatgcctgaaatgggatttgctggctacacaaaattgagcgcacgaggagcagggatatgcaaatgtcagaactgtttgaatggtgtttcctatgtagcgtagtaaaagtagcttaaatgttctagatgattagcacggatcacttagcattcctgattcagtataggtagatgtctaactctagcataatatccaacttggttgttcttgtactctaatgtgaaaaaggacgttgttcactcttttcatgttggctgcttggctaggactttgttgtgcacgcttttcatttatgctgctggacgtatcttattaact

SEQ ID NO: 66201 - DNA, 1933 bp, Zea Mays
tttacttctcccgttcgtcccccgtgctctttctccctctcgtggcgctgggcgaccgcctacgcaggccaggcgccgtcgccctaagctacgccaggttcccgggtcttggtcggtcccttcaccggcgaagagcacccaccagacgcgccggtgcctggatccggaggaagtgctgcgggtttcggcggttcgtctctctcgttgtttccggcggggttatgaaggcggtgggatacaacctctacgatagcagcgggactgatgacgatctccctccagcacaaaatagaggattgagaggacgggttttcagtgggaatggccgagcatctgctggggcatttccttacatgagggcaaataatgatttggagagtgaaatacatcgagttgagcaagatgcatatactggtgttcttagggcatttaaagtgcaatctgatgcaatatcctgggaaaaagagagcttgattactgaactcaggaaagaactgagggtttctgatgaggagcatagggagctattaaataaagtcaatgaagatgggagcatccgtcaaatgagggagttaagacaggcaggtggaatcccaagtggtctgcatcgtggcaacagggttttatatgatgcagaacctgggcccactaccaagaggcaaagggcatctcattcgattccttcgcaatctgcaggcctccagtcccctatgatgccctcccactcagtttcatctgcaaaatggggtcctttgtcagcaagaggcaagaaggcgaagatgcccattcctttggtgctaccatctgtggatccaagttcgttaataaaccataaagtttatacaaggtggccagaagacaacaacttctatgaggccaccataacaaaatataatgctgtgacgggtgagcatgaactcgtctatgacatgggcacacaagccgagacttgggaatgggttaggctttgtgatgtgaattaaaatttgcctggctgattatcacattgccattaattattcagttgaagattgataaacactccttaaacagatggcacctgaagatataagatgggaatttgatggacatctttcaaatcatgatggctggggcccttctggccctatgctgaagaggcacatgaccaacaacggtgctatggcaggttcaatcaggggaagaggaaggttatcgataaatgagcctataaaagactatgctccacctcaaaatgacatcaataggaattttgattatattgacataccaaatactgaaagtgttgttactgaggtggagagggtgttggccaatccaaatatgcctgaaatcgagaaggcaaggaaactgctgaaagatcaggagcagtcattacttgatgcaattgccagacttgatgaagcatctgatagcgatagtggtaactgatatggctatggaagaccgaaggggttctgctggggtcctggggaatggaacggcattgctacttagttgttggaattggaagattaacatgcatctgtgtatcacctacctcgaccacagaacaaacaaaccacattatggcaaaaaaattgacatgccagaaaatggtgcctggaaactgttgatgcctgaaatgggatttgctggctacacaaaattgagcgcacgaggagcagggatatgcaaatgtcagaactgtttgaatggtgtttcctatgtagcgtagtaaaagtagcttaaatgttctagatgattagcacggatcacttagcattcctgattcagtataggtagatgtctaactctagcataatatccaacttggttgttcttgtactctaatgtgaaaaaggacgttgttcactcttttcatgttggctgcttggctaggactttgttgtgcacgcttttcatttatgctgctggacgtatcttattaact

SEQ ID NO: 66202 - DNA, 1731 bp, Zea Mays
tttacttctcccgttcgtcccccgtgctctttctccctctcgtggcgctgggcgaccgcctacgcaggccaggcgccgtcgccctaagctacgccaggttcccgggtcttggtcggtcccttcaccggcgaagagcacccaccagacgcgccggtgcctggatccggaggaagtgctgcgggtttcggcggttcgtctctctcgttgtttccggcggggttatgaaggcggtgggatacaacctctacgatagcagcgggactgatgacgatctccctccagcacaaaatagaggattgagaggacgggttttcagtgggaatggccgagcatctgctggggcatttccttacatgagggcaaataatgatttggagagtgaaatacatcgagttgagcaagatgcatatactggtgttcttagggcatttaaagtgcaatctgatgcaatatcctgggaaaaagagagcttgattactgaactcaggaaagaactgagggtttctgatgaggagcatagggagctattaaataaagtcaatgaagatgggagcatccgtcaaatgagggagttaagacaggcaggtggaatcccaagtggtctgcatcgtggcaacagggttttatatgatgcagaacctgggcccactaccaagaggcaaagggcatctcattcgattccttcgcaatctgcaggcctccagtcccctatgatgccctcccactcagtttcatctgcaaaatggggtcctttgtcagcaagaggcaagaaggcgaagatgggtgagcatgaactcgtctatgacatgggcacacaagccgagacttgggaatgggttaggctttgtgatatggcacctgaagatataagatgggaatttgatggacatctttcaaatcatgatggctggggcccttctggccctatgctgaagaggcacatgaccaacaacggtgctatggcaggttcaatcaggggaagaggaaggttatcgataaatgagcctataaaagactatgctccacctcaaaatgacatcaataggaattttgattatattgacataccaaatactgaaagtgttgttactgaggtggagagggtgttggccaatccaaatatgcctgaaatcgagaaggcaaggaaactgctgaaagatcaggagcagtcattacttgatgcaattgccagacttgatgaagcatctgatagcgatagtggtaactgatatggctatggaagaccgaaggggttctgctggggtcctggggaatggaacggcattgctacttagttgttggaattggaagattaacatgcatctgtgtatcacctacctcgaccacagaacaaacaaaccacattatggcaaaaaaattgacatgccagaaaatggtgcctggaaactgttgatgcctgaaatgggatttgctggctacacaaaattgagcgcacgaggagcagggatatgcaaatgtcagaactgtttgaatggtgtttcctatgtagcgtagtaaaagtagcttaaatgttctagatgattagcacggatcacttagcattcctgattcagtataggtagatgtctaactctagcataatatccaacttggttgttcttgtactctaatgtgaaaaaggacgttgttcactcttttcatgttggctgcttggctaggactttgttgtgcacgcttttcatttatgctgctggacgtatcttattaact

SEQ ID NO: 66203 - DNA, 1857 bp, Zea Mays
tttacttctcccgttcgtcccccgtgctctttctccctctcgtggcgctgggcgaccgcctacgcaggccaggcgccgtcgccctaagctacgccaggttcccgggtcttggtcggtcccttcaccggcgaagagcacccaccagacgcgccggtgcctggatccggaggaagtgctgcgggtttcggcggttcgtctctctcgttgtttccggcggggttatgaaggcggtgggatacaacctctacgatagcagcgggactgatgacgatctccctccagcacaaaatagaggattgagaggacgggttttcagtgggaatggccgagcatctgctggggcatttccttacatgagggcaaataatgatttggagagtgaaatacatcgagttgagcaagatgcatatactggtgttcttagggcatttaaagtgcaatctgatgcaatatcctgggaaaaagagagcttgattactgaactcaggaaagaactgagggtttctgatgaggagcatagggagctattaaataaagtcaatgaagatgggagcatccgtcaaatgagggagttaagacaggcaggtggaatcccaagtggtctgcatcgtggcaacagggttttatatgatgcagaacctgggcccactaccaagaggcaaagggcatctcattcgattccttcgcaatctgcaggcctccagtcccctatgatgccctcccactcagtttcatctgcaaaatggggtcctttgtcagcaagaggcaagaaggcgaagatgcccattcctttggtgctaccatctgtggatccaagttcgttaataaaccataaagtttatacaaggtggccagaagacaacaacttctatgaggccaccataacaaaatataatgctgtgacgggtgagcatgaactcgtctatgacatgggcacacaagccgagacttgggaatgggttaggctttgtgatatggcacctgaagatataagatgggaatttgatggacatctttcaaatcatgatggctggggcccttctggccctatgctgaagaggcacatgaccaacaacggtgctatggcaggttcaatcaggggaagaggaaggttatcgataaatgagcctataaaagactatgctccacctcaaaatgacatcaataggaattttgattatattgacataccaaatactgaaagtgttgttactgaggtggagagggtgttggccaatccaaatatgcctgaaatcgagaaggcaaggaaactgctgaaagatcaggagcagtcattacttgatgcaattgccagacttgatgaagcatctgatagcgatagtggtaactgaagatatggctatggaagaccgaaggggttctgctggggtcctggggaatggaacggcattgctacttagttgttggaattggaagattaacatgcatctgtgtatcacctacctcgaccacagaacaaacaaaccacattatggcaaaaaaattgacatgccagaaaatggtgcctggaaactgttgatgcctgaaatgggatttgctggctacacaaaattgagcgcacgaggagcagggatatgcaaatgtcagaactgtttgaatggtgtttcctatgtagcgtagtaaaagtagcttaaatgttctagatgattagcacggatcacttagcattcctgattcagtataggtagatgtctaactctagcataatatccaacttggttgttcttgtactctaatgtgaaaaaggacgttgttcactcttttcatgttggctgcttggctaggactttgttgtgcacgcttttcatttatgctgctggacgtatcttattaact

SEQ ID NO: 66204 - DNA, 1801 bp, Zea Mays
aagaaacaattttttcatacgattagattaactattgtttttatcaaaaaacctttgaatcaagtaagaaattataaggtcataggactatttgttattttgtaaatcagaatattttgaagcgcttcttcacaacctctacggtgctattggtcccaaccagaagtcatcctactcgggcaaaccgtacgcgcaaatcaggtactagcttctattcacatgtcacgccatttaacatttctaaggagagccgttaatgaaggccagggtgggagtcacgactatagtaattaccgaggcacctacctcgctgtcgttttcgcgtaaccggtccagcacgcaaccgagcttggccaagaccgcgtcgagcaggaaagtgagcggagaggacttggacgcctccgcctccgcctcctcctcttcagcgttcccgcttccacggcggcggcggcacaagctcgccgagctccgcacttcgctgctgtctttggaatcgaccgccgactcaacggacgcttcctgtttcgcaaccttctcctccttagacccgtcgcctagctggctgggatgtttgggcggcttcagatctgtggagttcgactccctgcatgagcacccgggctcctcgcttgagaggcgatcgtggtcgctcacagcctcgccggaggctctctgctcccgctccgctttcagccgtttcacttttgactgcagcgtcctgcgcgaatttaaaaaaaatgagattagcctcccattaaataaatccccaccgaacgatcatcatcaaacgagagatcgcatcgctcgacgtcgcgacggagctcggcgacgcgcagccgccggagctcgtccacccatccctcggcagcggaggcgtcgggatcctcctcggcctcctcgaccccgccgctgccgacggtggagaagcggcggtggaggtggcggaagcggaggcggcagctgtgcggcgtgaggcctggccgcgccgccacggggatccgtgtctgcacctccatggccaccgagtcccagctcgccgtgccgtgccgcgtcacggcgcacgccaggagcagctcctccagcgttccccagatctccccgctcttcccggctgccgccgtcgcctccgactccggcgacacgtcggtgccgtccgccatccttcctgcgttctcgtccgtgaggcagtggaggtgtggtggtcttaggctctcagccctggtccgttgccctcgtctccgttgctttcccccgtcgccttttgcttcctcggcccggattgatttttatcggtaaagaagatggcatggtggtcactggtcatggaaatcagccattcagccgcgccccgcgcgcaccctggcccaggggcttttctgtaaaaacatcggagtgggtccacctacggctatttcttgtgtaatgaccgtgttgtccctggtcagtggtcagctaccaccaggcaccagcttgctgtttgctagtacgtacgtgtgcgtgcgctcgttgtctggcaaagcacaatctacacgactgcactaggcaccggaataaaactgatcgtctgatggagctaaaccaagtccaaagcatccaaaattcaatcgatgggaataacatgatccggaaggtatattctgtgcaacacagattatgagaaaacatccgagagaagccgtctcaaattcagtagtcagataccgacatgctgcatcggggagtacacggcatcagttgcagacgacaataagcaaccacctgacaatgaacgattaacactgatagcaagagctacaatctt

SEQ ID NO: 66205 - DNA, 1311 bp, Zea Mays
gaagcatccaggcatccagcaaatccagcgggtccgtactcatctgcttcacctccgggctccggctacggcggcactcttctctggcaaccggaccacagaaacctctaggcgacgaatcgagcaggtagaggagtaatcaggcatccatggctgagcatcttgcgtccatctttggcacggagaaggaccgcgtgaactgccccttctacttcaagatcggcgcatgccgccacggcgaccggtgctcccgcctgcacaacaagccttccatctccccgacgctgctgctctgcaacatgtaccagcggccggacatgatcaccccgggcgtggacgcgcagggcaaccccatcgacccggagcggatccaggaggacttcgaggacttctacgaggacatcttcgtggagctgagcaagcacggcgagatcgagagcctccacgtctgcgacaacctcgcggaccacatgatcgggaacgtgtacgtggagttccgcgaggaggagcaggcggcccgcgccctgcaggcgctgcagggccgctactactcgggccgacccatcatcgccgagttctcgccggtgacggacttccgggaggccacctgccgccagttcgaggagcacagctgcaaccgcggcggatactgcaactttatgcacgtcaagcaggtcggccgggacctgcggcggaagctgtttggccacctgcatcgctccctccggagccacagccgaggcagccgcagcccgagcccataccgccgccgcggtagctcgtccaggtccagggaccgcgacgattaccacgactactactaccactactaccgtagtggcagtggcagccgcaggagcagcgagagacaccgcagccacgacagcgacgggagccgccgtcgacgcgggcggtcgaggagccggagccggagcccggtgagggaaggcagcgaggagcggagggcaaagattgagcagtggaaccgcgagcgggaggcagctcaggcagggtaaggccataaattgagcctgaaattggactgtgatctcttttgctgtggacgggttaccattaaacttgatttggatgtgctgatggaatctagttgctgtttgagtaaggcttaccgtggtgagtcggcggccagcgagtacgtccatccattgggcgttgagattgagcagtggaacccagaatgtgtgacggatacgatttcgagagtagtagaaagtattgacttccgtgcagacccgatcaaactgtagatcggaactcatcctctaaggctctaacacatttactattttg

SEQ ID NO: 66206 - DNA, 1345 bp, Zea Mays
gaagcatccaggcatccagcaaatccagcgggtccgtactcatctgcttcacctccgggctccggctacggcggcactcttctctggcaaccgatgttggatcttccgcttcaaatcgacgcataaaggatgcagattagttttgttttttctcccggaaattttcacatcccgaaacgactggaaattgaagaccacagaaacctctaggcgacgaatcgagcaggtagaggagtaatcaggcatccatggctgagcatcttgcgtccatctttggcacggagaaggaccgcgtgaactgccccttctacttcaagatcggcgcatgccgccacggcgaccggtgctcccgcctgcacaacaagccttccatctccccgacgctgctgctctgcaacatgtaccagcggccggacatgatcaccccgggcgtggacgcgcagggcaaccccatcgacccggagcggatccaggaggacttcgaggacttctacgaggacatcttcgtggagctgagcaagcacggcgagatcgagagcctccacgtctgcgacaacctcgcggaccacatgatcgggaacgtgtacgtggagttccgcgaggaggagcaggcggcccgcgccctgcaggcgctgcagggccgctactactcgggccgacccatcatcgccgagttctcgccggtgacggacttccgggaggccacctgccgccagttcgaggagcacagctgcaaccgcggcggatactgcaactttatgcacgtcaagcaggtcggccgggacctgcggcggaagctgtttggccacctgcatcgctccctccggagccacagccgaggcagccgcagcccgagcccataccgccgccgcggtagctcgtccaggtccagggaccgcgacgattaccacgactactactaccactactaccgtagtggcagtggcagccgcaggagcagcgagagacaccgcagccacgacagcgacgggagccgccgtcgacgcgggcggtcgaggagccggagccggagcccggtgagggaaggcagcgaggagcggagggcaaagattgagcagtggaaccgcgagcgggaggcagctcaggtgtaagcaagttccccttccctagttgccatgttggttgctgcagtgttattggccttgctagttgccatgttgctgttgctgaagcctgttatcatgtattgtggtgtggttcaggcagggtaaggccataaattgagcctgaaattggactgtgatctcttttgctgtggacgggttaccattaaacttgatttggatgtgctgatggaatctagttgctgtttgagaaaaaaaaa

SEQ ID NO: 66207 - DNA, 1907 bp, Zea Mays
attgtgttagccgatgtcactctgcttttagccttttgccaagtgccaacagccaggtcgaaaggacatctgaccggcagcaggcagacatccgtcgcccgccatggagtcctcatggctcctcctgctctcgtgccttccggccgtatgggtgcttgccgcggcggcggcggcggcggcggggcggagtcccggctgcgcgacgaggtgcggcgagatcgacgtcccgtacccgttcggcctggacccgcagtgcgcgatccacgcgggcttttggctcaactgcaccaccgtggatggcgccaccaagctgctcgacaagaactcggaggtgaccaagatctccgtggaggatggcaaggcctggttcaagaacttcatctcccggcagtgctacaaccaatcctcgggtgacatgttcgaaaacaacgcgtgggtcgactataccggcgagccctacgttctgtcggcagaggataataagatcatcgtcctcgggtgcaatagtatggcctacatgcagagcgactcttacataatcggctgcatgtcgacatgcgacggcccactgaagaacggctcatgctccggcaccgctggctgctgccaggcggagctcccgccgggcgtccagttttaccaaggcttcttcaactcgctgcacaacaccaccaagatatggaagcaaacaccctgcaactacatcaccgtgatggagagcgcggccttcagcttcagctccacctacctcacctcgacggtgttgtacgactccgacgacgggaggacgccggtcgtgatggagtggggaatcacacggcagaagtgcgaagaagccaaagccaacaagactgcgtacgcgtgtgtcagcgaccatagcgactgcgtctacagcgatgccgccggctaccgctgcaggtgctccggcggattcaaaggcaacccgtacgtcgtagatggatgcgcaggtactctttcgaggaacctactggtgtcgtttctggggactactccaaaagcgtgaggaggacaccataaggattaaagatgcttgcagggtgctggaagccaccacgatgcaaatcttcgcaatgcacggttggagctttagaaacaggctaactaatagctagttttccaggtcccaactgcgcttgggtttgtttgccgcttgtggcttctttcgttttttatgtcagtacttgtggttgttggacggctgtcatctttgatgtaggccgggaaccctttttcccattatctaaaaaaacttctgagtttgttcccctcacaatttattccgtgacccaaaatttgacaaccaaagttacaattcttttaaccctcacagcaaactaagattcggaagcaagtaaggttcccctcacatgcagaagtagaggcttggtgcaggttcaacctacatcttggcttcctttgtattcagcttgcggagtctggtttccaccactaactgctgacagcgctgccaccaccaccctgtgtccctgttgcatgtgctctccaatctttgaaacagctttgtttgctgcttccagcttctgcttgatcttgtccagatcctcctcagccatggctgccctcagatcagagacagcagactcgatctccttggtgacttcagcagggaccttgtccttgtactcgctgacactcttctcaatggtgtagatcgtggtgtctgcagagttcttaagatcgctaggggacttcctttcctgatccttctgagcatgtaactcagcctccttcaccatcttttcgatttcaaactccgacaaactcccagaagaatttatggtgatttcttgttctttgcccgtggctttgtccttagctgacgtgtcttcgacttgttgccaaccaaattgtaaacatggttgcaa

SEQ ID NO: 66208 - DNA, 221 bp, Zea Mays
gaaaaaccaatactacaatcaaattttcaccatgattgcaactgatcaatctcctatatcgtcacatgacagatcgacggaagagatggggaaggcggcagggacgcccggccacagcctggagaagccatgcctttttcagagcgctcaacgctgtgtccaagaccgtttccttggttcccagccagatccatcagcttctgacatgttaacgatccacg

SEQ ID NO: 66209 - DNA, 481 bp, Zea Mays
ctttgatcgggttcagatcgttcaccaccggcttggtggtttgtaacatttgctacaagggctctgtcagagcggtgccgtctgcctggtaattctatttctcttaatgaagtacttgccaaggatggtggtggtgaaaaaaacagcttggttttgcaagcgtgaatatcttccaaggatgaaaaaatccactagcacatttccttcagttcttcaacagttagagcatatatgggcacaaaggacaaaacattgggaggctggaattgcattaattgagaagtggtattatcttactagaacaaaacacgctgatccaaatgccaattcatagtaccatgattctctaccaatacaagcttagtttgtgtactccatcaatctgtgcagatacagtactacataatctgatgataagcattggtgtcaagcaagcaaggacttgcctcaggatcaacaatcttatcttcaggcaccgccg

SEQ ID NO: 66210 - DNA, 2527 bp, Zea Mays
gccagccgagggcgaggccagcacggttggggcccaacgaaccatggtgggcccagcctgtcaacgagtccgctgaggtcacggtaaccggcggcgaagctatatgaggtcgcccgggtcgagatcgatctctcctcccaaatcaaatccccaaaccccgggccactgctccgctcctcctccttgccgccgtgcggttgagcgccgacgagcaagcccgacgccaccctatggctatggaggtccgccgcagggttccgccgccgcacgggagcgccccacggcgccagcaggcgaccggcggcgaggggcagcgggtgcgtgtgcaggcgggggacgcgctgccgctgccgatccggcacacgaacctcatcttctcggcgctgttcgccgcgtcgctggtgtacctgatgcggcggtggcgggagaagatccgctcctccacgccgctccacgtggtctccctcgccgagatcttcgccatctgcggcctcgtggcgtcgctcatctacctcctcagcttcttcgggatcgccttcgtgcagtccgtcgtctccaacagcgacgacgaggaggacttcatcatcgactcccgccacggacaggcgcgggcgccgccgccgcccgcgccggcggccccgtgtgcgctgctggggagccccgccgccgcgccggagaaaatgccggaggaggacgaggagatcgtggccgcggtcgtggcagggaagatcccgtcctacgtgctggagactaggctgggagattgccgccgggccgccgggatcaggcgggaggcgctgcgcaggatcaccgggagggagatggacgggctcccgctcgatgggttcgactacgcgtccatcctcggccagtgctgcgagctgccggtggggttcgtgcagcttcccgtgggcgtcgccggcccgctccttctcgacggccgccggctctacgtaccaatggccaccaccgagggctgcctcgtcgccagcaccaaccgcggatgcaaggcaattgccgagtccggtggggcctccagcgtcgtgctcaaggacgggatgacgcgagccccggccgtccggttcccatctgcacgccgcgccgccgagctcaaggcctttttggaggacccagcgaactttgacaccctggctatggtgtttaacaggtcgagcagatttggaaggctgcagggagtgaagtgtgcgattgcagggaggaacctttacatgaggttcagctgcagcacaggggatgccatggggatgaacatggtctccaaaggtgtacagaacgtgctggactacctccaggctgacttccctgatatggatgtcatcagcatatcagctgctgtgaactggatcgatggccgtgggaagtcggtggtttgcgaggcggtaatcaaggaagaagttgtgaaaaaggttctcaagacaaacgtacaggctctcgtagaattgaacgtgatcaagaaccttgccggttcagctgttgctggagctcttgggggtttcaatgcccatgcaagtaacattgtggcagccatcttcattgctactggtcaggaccctgcacagaacgtggagagttcccagtgcatcaccatgttggaagctataaatgatggcaaagatctccacatctctgttactatgccatctattgaggttggcacagttggtggaggcacgcagctggcctcacaatctgcctgcttggacctgcttggcgtcaaaggtgccaacagggaatctccggggtccaacgcgaggctcttggccacggtggttgcgggtgcggtcctagctggggagctgtcccttatctctgcgcaggccgctggccatctggtcaagagccacatgaaatacaacagatccagcaaggatatgtccaagacccttgcagaggaaacagacaaacccaagaaatgctgaataatatcaagtagttgttctatagccctttgggagaaaaggagcagaaagggtcgtacaggatgactttcttgcggcatgctcaggtggaaaggggggaaaaagaccttcaggcgaaaagagataattcagtcgccttgtcatatttaccaggcggtgagacctgttgtggatcctggagtatgacctatttaatttgttgatgttgttgttatagttcctctaccgtacttgaccccgtttgcatcttgttttgaccgtcccatgggcattggagaatctgaccatgggttttgtcccaagcttgcatcacactggggggacctctgctttgcggcggccccgtctcagaaaaaaaaattgcgctggtaactgccgggtactgtgtatttcagctttgaaacttttatccaatgcttttgagtcgaagagtcagtggactcgatgatgtggttgtaaagaaaaaaaaatgcttttgtgtggaagagtcagtggagtcgatgacgtggttgtaaagaaaaggtgtgcttcagaacaagagtacatcacgttgcctctctgctttctctgtagcgtgttcgtctcaa

SEQ ID NO: 66211 - DNA, 1293 bp, Zea Mays
attttccaatatcacagttacgaagtggcgtagcacaattaattaatgatatgagagagataggaagaatagaaggtgcagttttttgggtaacttctgttctgacaagaagtcagctgctgtgaactggatcgatggccgtgggaagtcggtggtttgcgaggcggtaatcaaggaagaagttgtgaaaaaggttctcaagacaaacgtacaggctctcgtagaattgaacgtgatcaagaaccttgccggttcagctgttgctggagctcttgggggtttcaatgcccatgcaagtaacattgtggcagccatcttcattgctactggtcaggaccctgcacagaacgtggagagttcccagtgcatcaccatgttggaagctataaatgatggcaaagatctccacatctctgttactatgccatctattgaggttggcacagttggtggaggcacgcagctggcctcacaatctgcctgcttggacctgcttggcgtcaaaggtgccaacagggaatctccggggtccaacgcgaggctcttggccacggtggttgcgggtgcggtcctagctggggagctgtcccttatctctgcgcaggccgctggccatctggtcaagagccacatgaaatacaacagatccagcaaggatatgtccaagacccttgcagaggaaacagacaaacccaagaaatgctgaataatatcaagtagttgttctatagccctttgggagaaaaggagcagaaagggtcgtacaggatgactttcttgcggcatgctcaggtggaaaggggggaaaaagaccttcaggcgaaaagagataattcagtcgccttgtcatatttaccaggcggtgagacctgttgtggatcctggagtatgacctatttaatttgttgatgttgttgttatagttcctctaccgtacttgaccccgtttgcatcttgttttgaccgtcccatgggcattggagaatctgaccatgggttttgtcccaagcttgcatcacactggggggacctctgctttgcggcggccccgtctcagaaaaaaaaattgcgctggtaactgccgggtactgtgtatttcagctttgaaacttttatccaatgcttttgagtcgaagagtcagtggactcgatgatgtggttgtaaagaaaaaaaaatgcttttgtgtggaagagtcagtggagtcgatgacgtggttgtaaagaaaaggtgtgcttcagaacaagagtacatcacgttgcctctctgctttctctgtagcgtgttcgtctcaa

SEQ ID NO: 66212 - DNA, 4950 bp, Zea Mays
cttgacctgagtacggtcccaatcccaacttccccaggcctccaaaaatctcacggcgacgacgtcacccgagccccgagcctgacgcagcaggagacgccggccgtttcgagaccgagactgtcggtggtgtggctcgtgctgtgccgtacccgtatccaaactaattccgtggccgcggtcgctactatcccggacgcgggattctacggcaagcttatcgtagcgcgaatataaatccagatcccatctgggttaaaggcctaaaaatcgcgtcctcgaaaacctctagtctagttccgaaagcgcgcacacaacgactacaggagaagacacgcgcgacggccacggccaggtagagacagatccatctctcacctcgccccaccgccctcgccgatcggggtccgccgacccccagatcgcttcttcgcttcggtaggtggccgagtgtacgcgtacgaggagcctcccggatcccgcctcgccgtcgtctgatcggggcgcgatccgcggggaaacagcaatgacggcggaggggacggcgtgcaacggcgccggcgaggcgccgaaggcggaattcgtgcccgagaaggtggtcaccgcgtcgctggaggagaaggcggccggggagcgcgagggcgaggacgtcggcgggccttttgtggtcgtgaacggcggcgattctgacgggcactccgaccgtggctcagatctgggcaaggcgtccggcgaggagtcgtcgtccgaggaggaggacgtgcccggctccaatgtagctccggacttggccgtgggcggagatcacgggtccgcccgaggggaagtgagtgctcagggtgcggcactcggtgcttcgtcggcggacggcagtggtcgtgcttccgacggcgctgagggtggcgcggatgagggcaaaggcgaaccaagttccgattttgatgctgaagcggcgccgcaggaggacgttggtgaagaggacggtggggcagctgctctggcgtccagcgggtgcgaacctgccatcaccggtgctgattctgaggcggcaccagctgtggatgatgaggttgaaggcaaggagggcacggtggatggaagtgctgttgctgatgtcgctgaagcggtggtgcatcaggaagttagcacagagcatgatgatgccctaacgcttcccaagtcttctgcttccatggagtccgaggttattagagaggataacaaagaacagagcaccgctgatattgtggggccacatgagcagggtacatgtggggcaagtgctttggtggagaatgagcatctttgtgctgacatgagggctgattcatttgtagctgttactgagcctgacagtcaagaggattatgctgtggagtcctgcatgcgcgatgatgtcctaatttgtaccgagtctggttctgccgacatcgagtctgaggttaatggaaaggatagcaaacaagaacagagcaatgctgatgtcgtggaggtcatagggcagggtgtagttagggcagatgcgctgatggcaaatgggcatctttgtgccgacatccaagcagattcttctgaagctgctactaagcctgataacattgctaatgagagcaaactgactgaagttgcagaatcaggagaggatgctgctgccagtggagaactggatgccatcgatgcatcatcacaaaccaatgggcatatttatgttgcctcgggtgctgattcttttataattgcttctgagtccaagtctcattcctttgagacggatggacaagaaactgatcagcaagaagaggaagttccacaaactgaagctgaactattggatggagtgctaaaaccaactgaaaggaactgtgcacgcagtgttgaggaactcataggagaggaagttgacacagatgggcatcccagtgtagacggtacagctgatgcttctggggagcaagaagccaagcccatgcaggtagaaggtgaggccacatgtggtattctcgaatttgaagaagtggataaggatggtgaggatagtttgtgtaatgactgcatggttggtgttgtttcctctaatgaggaaacagagcttcctatgaaggaaagaacagatgaagctgtccccagtgttaatgttggcgagtcagagcaagtaactgaggatacaagccaagatatcatgcagggtggattggccaggggagtttttataggcacaatttttgttaagccagtatcagatcctcatgttgaatcaagcctcgtacataaagtcaaggcagaagttcatttagttgatgaaatcacagcagcagatttgaaagctgaaaatatggtcgaagtgaaaagaacagatcgtgaagttgacgaaatagaggtaaaagcgccaggtactcacgaaattgggaattcttcagaagtagaaccgaaggaagagtttgagatggaggttgatgatgctgtttcattgcatgaagctgcagcttctgcatcagaaaatggttctgaagaaaaatctagcaacattgctgttgatcaagttgaacctgtcaacctgaatgtagatgaactcgcggtagatgatgatcaacccagttttaatccaggttatggatctgctaaatcttctgatgtggccgaaacaaaaaatgtggaagcacaagtgacagaacagaagggcaatgcacaccatgcttcaggtgagtggcatggagatcatacgcaagtcattggaccacagaggatctacataattaaagttccaaaatttgccggtgatgatctctgggataagatccaggctgcacaggctcacttagaccaactgacccaggaaagagacgcaattaaccgccgtaggcaaaaacaaaaggctatatgtgatgaatacagggagaagtttgaggcagcacgtcaagaagagcgggaagcaagggctgcccatggagataagaagaatgatttaaacagtgtgcgctcagtattagagaaattgcaccaagcaaattcagttgaagaacttgatgagcttattgcaaagaaagagaggattatgcaacatgagaccatttctttgaaagaagaaaagcttttaattaaagagattaatgaattaaaatcccaacggaagcagctgtccgccaccatgggctcaaaggctgaaatcaatgaggcatttgaccaaaaagatcacattcatgagcggcataaggtgttaaagaaggattctgatgttttattcagcaacctgaaagtcctagaggagaacacaagaaagattcaaaaatcttttgctgatgaaagaacagctctcagaaaattaacagaggaacaccgagcagctaatgaaatacgtcaaaaggcctacagcgattggactgagcttagatcagagcccagcaagaagaatgaatactttttcaagtacagggacgcccgaaatgcagcagaaaatttcagagccaatggagatataaatggacttatatcacactgtaatagtcagattgagagagttatggaaatatggaacaaaaacgaggacttccgcaagcagtatgttgaatcgaacaaggttagcacactaaagagattagggacccatgacggacgaaaacttggccctggtgaggatcctccggtcattccaagccgaagaccaagcaacatttgtccattgtctgcctcaagcccggaaatgatcaccttagcttcaacaccagcacctgtattggctgctgcagctgcagtcccttccaaagagaactcctttcctgctttggcagcccctcagaccagtaagcgcgccaaatcaaaagcatctggtagctctgcccagattaagaacaaatctgttatagtatcagaggaagaagatttggaacagactttaaaggagaaggctcatcaattggagttagctaggaaggcagaggagttagataggaaggcagaggagttggcgcggaaggaggaggaactaagaaaagagagggatgcagctgaaaaggagcggcttaggatggagcagaaggctaaggctaaggaggctgaggagaggaagaggcggaaagcagagaaggacaaggaaagagccgagttcaaagcacgcaaggaagctgaggagagagagaagaagaaagcaaagagagacaaaaagaaaggcgcagcaccagcagattcgagcgccattggtgacagccatgctgctgcttcggctacagcagatactgacagtaatgcatcagacaacccaagggaagctgacgtttctcaaccagcggtggctcccaggaggccggctagaccagcggcggcaatcaagcaactgaacaggttgcagcccatgccagcgcccctgcgtaacaggggcaggaggaaactgcggcagtacatcctgatcgcagcggcggtgctaacggtgctggcgctgttcgtggcaggcaactacattcccaggctgaggtcgcactcctaattttatcgttaggaaaggagtgccagttctgtcgcggtgaacctggtggtggttctacctagaggattcttcttttttcgactgttcgggttggtttgtatttagcttcccttattataggtttgtgataaaagttattaccggatggtggtgaaatattcgttagaacatgataataatgactatagattcttttttgtacataggtctctggtgctaaccttagcgtatatgatatttaatcatattctatggcgttggctgtctccggtgtgaacgatgtcgttcactatgttcggcagagacgagttgaatgtatcttctgcgcgctgcgtacaacccagaagagacgagagagagtatgtttaggatttagagtatgttagttgttaggtttagggtttagagttagggtttagggtttttttttgattatttttgtaccgacaaccaatcacctaaggccagcaagc

SEQ ID NO: 66213 - DNA, 4855 bp, Zea Mays
ctgtgccgtacccgtatccaaactaattccgtggccgcggtcgctactatcccggacgcgggattctacggcaagcttatcgtagcgcgaatataaatccagatcccatctgggttaaaggcctaaaaatcgcgtcctcgaaaacctctagtctagttccgaaagcgcgcacacaacgactacaggagaagacacgcgcgacggccacggccaggtagagacagatccatctctcacctcgccccaccgccctcgccgatcggggtccgccgacccccagatcgcttcttcgcttcggtaggtggccgagtgtacgcgtacgaggagcctcccggatcccgcctcgccgtcgtctgtaagatcttctcgcacatctcgatctctctattggagctttgggtttcgtctgtctgtctgtctgtctctctctttgcgaggtttgggttttgtgtcgtggagcggtggaggtgccgtgggagcctttggttaatccagggatcggggcgcgatccgcggggaaacagcaatgacggcggaggggacggcgtgcaacggcgccggcgaggcgccgaaggcggaattcgtgcccgagaaggtggtcaccgcgtcgctggaggagaaggcggccggggagcgcgagggcgaggacgtcggcgggccttttgtggtcgtgaacggcggcgattctgacgggcactccgaccgtggctcagatctgggcaaggcgtccggcgaggagtcgtcgtccgaggaggaggacgtgcccggctccaatgtagctccggacttggccgtgggcggagatcacgggtccgcccgaggggaagtgagtgctcagggtgcggcactcggtgcttcgtcggcggacggcagtggtcgtgcttccgacggcgctgagggtggcgcggatgagggcaaaggcgaaccaagttccgattttgatgctgaagcggcgccgcaggaggacgttggtgaagaggacggtggggcagctgctctggcgtccagcgggtgcgaacctgccatcaccggtgctgattctgaggcggcaccagctgtggatgatgaggttgaaggcaaggagggcacggtggatggaagtgctgttgctgatgtcgctgaagcggtggtgcatcaggaagttagcacagagcatgatgatgccctaacgcttcccaagtcttctgcttccatggagtccgaggttattagagaggataacaaagaacagagcaccgctgatattgtggggccacatgagcagggtacatgtggggcaagtgctttggtggagaatgagcatctttgtgctgacatgagggctgattcatttgtagctgttactgagcctgacagtcaagaggattatgctgtggagtcctgcatgcgcgatgatgtcctaatttgtaccgagtctggttctgccgacatcgagtctgaggttaatggaaaggatagcaaacaagaacagagcaatgctgatgtcgtggaggtcatagggcagggtgtagttagggcagatgcgctgatggcaaatgggcatctttgtgccgacatccaagcagattcttctgaagctgctactaagcctgataacattgctaatgagagcaaactgactgaagttgcagaatcaggagaggatgctgctgccagtggagaactggatgccatcgatgcatcatcacaaaccaatgggcatatttatgttgcctcgggtgctgattcttttataattgcttctgagtccaagtctcattcctttgagacggatggacaagaaactgatcagcaagaagaggaagttccacaaactgaagctgaactattggatggagtgctaaaaccaactgaaaggaactgtgcacgcagtgttgaggaactcataggagaggaagttgacacagatgggcatcccagtgtagacggtacagctgatgcttctggggagcaagaagccaagcccatgcaggtagaaggtgaggccacatgtggtattctcgaatttgaagaagtggataaggatggtgaggatagtttgtgtaatgactgcatggttggtgttgtttcctctaatgaggaaacagagcttcctatgaaggaaagaacagatgaagctgtccccagtgttaatgttggcgagtcagagcaagtaactgaggatacaagccaagatatcatgcagggtggattggccaggggagtttttataggcacaatttttgttaagccagtatcagatcctcatgttgaatcaagcctcgtacataaagtcaaggcagaagttcatttagttgatgaaatcacagcagcagatttgaaagctgaaaatatggtcgaagtgaaaagaacagatcgtgaagttgacgaaatagaggtaaaagcgccaggtactcacgaaattgggaattcttcagaagtagaaccgaaggaagagtttgagatggaggttgatgatgctgtttcattgcatgaagctgcagcttctgcatcagaaaatggttctgaagaaaaatctagcaacattgctgttgatcaagttgaacctgtcaacctgaatgtagatgaactcgcggtagatgatgatcaacccagttttaatccaggttatggatctgctaaatcttctgatgtggccgaaacaaaaaatgtggaagcacaagtgacagaacagaagggcaatgcacaccatgcttcagatccaggctgcacaggctcacttagaccaactgacccaggaaagagacgcaattaaccgccgtaggcaaaaacaaaaggctatatgtgatgaatacagggagaagtttgaggcagcacgtcaagaagagcgggaagcaagggctgcccatggagataagaagaatgatttaaacagtgtgcgctcagtattagagaaattgcaccaagcaaattcagttgaagaacttgatgagcttattgcaaagaaagagaggattatgcaacatgagaccatttctttgaaagaagaaaagcttttaattaaagagattaatgaattaaaatcccaacggaagcagctgtccgccaccatgggctcaaaggctgaaatcaatgaggcatttgaccaaaaagatcacattcatgagcggcataaggtgttaaagaaggattctgatgttttattcagcaacctgaaagtcctagaggagaacacaagaaagattcaaaaatcttttgctgatgaaagaacagctctcagaaaattaacagaggaacaccgagcagctaatgaaatacgtcaaaaggcctacagcgattggactgagcttagatcagagcccagcaagaagaatgaatactttttcaagtacagggacgcccgaaatgcagcagaaaatttcagagccaatggagatataaatggacttatatcacactgtaatagtcagattgagagagttatggaaatatggaacaaaaacgaggacttccgcaagcagtatgttgaatcgaacaaggttagcacactaaagagattagggacccatgacggacgaaaacttggccctggtgaggatcctccggtcattccaagccgaagaccaagcaacatttgtccattgtctgcctcaagcccggaaatgatcaccttagcttcaacaccagcacctgtattggctgctgcagctgcagtcccttccaaagagaactcctttcctgctttggcagcccctcagaccagtaagcgcgccaaatcaaaagcatctggtagctctgcccagattaagaacaaatctgttatagtatcagaggaagaagatttggaacagactttaaaggagaaggctcatcaattggagttagctaggaaggcagaggagttagataggaaggcagaggagttggcgcggaaggaggaggaactaagaaaagagagggatgcagctgaaaaggagcggcttaggatggagcagaaggctaaggctaaggaggctgaggagaggaagaggcggaaagcagagaaggacaaggaaagagccgagttcaaagcacgcaaggaagctgaggagagagagaagaagaaagcaaagagagacaaaaagaaaggcgcagcaccagcagattcgagcgccattggtgacagccatgctgctgcttcggctacagcagatactgacagtaatgcatcagacaacccaagggaagctgacgtttctcaaccagcggtggctcccaggaggccggctagaccagcggcggcaatcaagcaactgaacaggttgcagcccatgccagcgcccctgcgtaacaggggcaggaggaaactgcggcagtacatcctgatcgcagcggcggtgctaacggtgctggcgctgttcgtggcaggcaactacattcccaggctgaggtcgcactcctaattttatcgttaggaaaggagtgccagttctgtcgcggtgaacctggtggtggttctacctagaggattcttcttttttcgactgttcgggttggtttgtatttagcttcccttattataggtttgtgataaaagttattaccggatggtggtgaaatattcgttagaacatgataataatgactatagattcttttttgtacataggtctctggtgctaaccttagcgtatatgatatttaatcatattctatggcgttggctgtctccggtgtgaacgatgtcgttcactatgttcggcagagacgagttgaatgtatcttctgcgcgctgcgtacaacccagaagagacgagagagagtatgtttaggatttagagtatgttagttgttaggtttagggtttagagttagggtttagggtttttttttgattatttttgtaccgacaaccaatcacctaaggccagcaagc

SEQ ID NO: 66214 - DNA, 2611 bp, Zea Mays
agcagcagatttgaaagctgaaaatatggtcgaagtgaaaagaacagatcgtgaagttgacgaaatagaggtaaaagcgccaggtactcacgaaattgggaattcttcagaagtagaaccgaaggaagagtttgagatggaggttgatgatgctgtttcattgcatgaagctgcagcttctgcatcagaaaatggttctgaagaaaaatctagcaacattgctgttgatcaagttgaacctgtcaacctgaatgtagatgaactcgcggtagatgatgatcaacccagttttaatccaggttatggatctgctaaatcttctgatgtggccgaaacaaaaaatgtggaagcacaagtgacagaacagaagggcaatgcacaccatgcttcaggtgagtggcatggagatcatacgcaagtcattggaccacagaggatctacataattaaagttccaaaatttgccggtgatgatctctgggataagatccaggctgcacaggctcacttagaccaactgacccaggaaagagacgcaattaaccgccgtaggcaaaaacaaaaggctatatgtgatgaatacagggagaagtttgaggcagcacgtcaagaagagcgggaagcaagggctgcccatggagataagaagaatgatttaaacagtgtgcgctcagtattagagaaattgcaccaagcaaattcagttgaagaacttgatgagcttattgcaaagaaagagaggattatgcaacatgagaccatttctttgaaagaagaaaagcttttaattaaagagattaatgaattaaaatcccaacggaagcagctgtccgccaccatgggctcaaaggctgaaatcaatgaggcatttgaccaaaaagatcacattcatgagcggcataagcaacctgaaagtcctagaggagaacacaagaaagattcaaaaatcttttgctgatgaaagaacagctctcagaaaattaacagaggaacaccgagcagctaatgaaatacgtcaaaaggcctacagcgattggactgagcttagatcagagcccagcaagaagaatgaatactttttcaagtacagggacgcccgaaatgcagcagaaaatttcagagccaatggagatataaatggacttatatcacactgtaatagtcagattgagagagttatggaaatatggaacaaaaacgaggacttccgcaagcagtatgttgaatcgaacaaggttagcacactaaagagattagggacccatgacggacgaaaacttggccctggtgaggatcctccggtcattccaagccgaagaccaagcaacatttgtccattgtctgcctcaagcccggaaatgatcaccttagcttcaacaccagcacctgtattggctgctgcagctgcagtcccttccaaagagaactcctttcctgctttggcagcccctcagaccagtaagcgcgccaaatcaaaagcatctggtagctctgcccagattaagaacaaatctgttatagtatcagaggaagaagatttggaacagactttaaaggagaaggctcatcaattggagttagctaggaaggcagaggagttagataggaaggcagaggagttggcgcggaaggaggaggaactaagaaaagagagggatgcagctgaaaaggagcggcttaggatggagcagaaggctaaggctaaggaggctgaggagaggaagaggcggaaagcagagaaggacaaggaaagagccgagttcaaagcacgcaaggaagctgaggagagagagaagaagaaagcaaagagagacaaaaagaaaggcgcagcaccagcagattcgagcgccattggtgacagccatgctgctgcttcggctacagcagatactgacagtaatgcatcagacaacccaagggaagctgacgtttctcaaccagcggtggctcccaggaggccggctagaccagcggcggcaatcaagcaactgaacaggttgcagcccatgccagcgcccctgcgtaacaggggcaggaggaaactgcggcagtacatcctgatcgcagcggcggtgctaacggtgctggcgctgttcgtggcaggcaactacattcccaggctgaggtcgcactcctaattttatcgttaggaaaggagtgccagttctgtcgcggtgaacctggtggtggttctacctagaggattcttcttttttcgactgttcgggttggtttgtatttagcttcccttattataggtttgtgataaaagttattaccggatggtggtgaaatattcgttagaacatgataataatgactatagattcttttttgtacataggtctctggtgctaaccttagcgtatatgatatttaatcatattctatggcgttggctgtctccggtgtgaacgatgtcgttcactatgttcggcagagacgagttgaatgtatcttctgcgcgctgcgtacaacccagaagagacgagagagagtatgtttaggatttagagtatgttagttgttaggtttagggtttagagttagggtttagggtttttttttgattatttttgtaccgacaaccaatcacctaaggccagcaagc

SEQ ID NO: 66215 - DNA, 1602 bp, Zea Mays
cacttgcccggaccggcgcgaccaccaagagtccaaccgagatcaacatcaacctactagcaaagcagccagactgacaccgaccgatccacaggaacaaggcagacacatcgcgaggaagaaatgggcgccgcgtgcgtctccttctcgcgctcgccgcaggcgtcgccggctgcagagccgtcccagcgagcggcggcggccacggtcaaggttgtgaacctggacggctccatggcgcgcctcgcggtcgcagggacggtcgtcacggcgcgcgaggcgctggcagcgggcggccgcgccaccggacgctgccgccgccgccgctcttcctctgcagcgccgacgagctgggcttcgacgcgcccccgcgcgcgctggccgcggacgaggcgctccagccggggcagctctacctcgtgctgcccgactccgcgctgcgccggccgctgaccgccaaggacatggccgcgctcgccgttaaggccgccacggcgctcgcggccgaggcgggtctcgccgccggcctgtcgccggggcgcgacagccgaggcgggacgccggcgggcaagaggccgcggcggcagtcggcagcgcgagtggctcctcttctagtcgccgtgagcaaggagagcagcccgcctccgcctggcgatggtgctgctcggaagaacgacgtgcaccgtgggtacgcagcgcgtcctgcgggtcaagacggtggacgcgcagcggggaagacgaggaagggagctagctacagagcccgcggttctcgccatcgtgccgtcgtgcagaggctaagcgctatctcggaggacggcgagtgatccgtatatcgggctatcggctcagctgtccttatcctcgctgctgcagggtcggcgcgataaacgatgaatcaagttttgatcaagggccggataacacgatgattcgatgaatcgctgcagaatcaactcccggtttctaagccgtgagtgcgaattcggtaaaggcctacctagtcgaatcatatagctggaactaaaagagattccaattgctgattaaacatgttgagtttgtgatccaaattctgaagaaggcgaccaagttggcgagcgaagcggaggcccgtcgctttaaagcaaggctagttgcaaaaggttttagtcagattccatgaattgattactctgatgtctattctcctgttgtcaagcatagttcaattcgtacctttcttagtcttgttgctgtacatgactatgagcttgaacagttagatgtgaaaactgctttcttacatggtgatttggaggaggacatttatatggaccagccagaggggttcattgttcctggaaaagaagactatgtgtgcaggttgaagaagtccttatatggtctgaaacaatctctcagacaatggtataagaggtttgattcattttatgctttctaagggctttcagaggtctcaatatgatagttgtgtttatctaaaatttgttaatggatcacctacatatttgctgctatatgttgatgatatgttgattgctgccaagagcatgaaggaaatcactgctttaaaggtgtcccgcggcccagggacgcctg

SEQ ID NO: 66216 - DNA, 2987 bp, Zea Mays
ggggagagggtcacgggaaggagcaaggcgccaccagccgaccagcgttggactgctcttggtgcaaggcaccgtcggttcggtttgaccacccgccgccagggctggctggctcactcaacccgagccgcgttgcgtctgctccacagaaagttccacgaacaagagaaccaacgtacacagagcgtactggtaaatggcagagcctaatgctgtgtaggtgaatcggtgattgaccaagaatggtgatcttcttggtcatgaaccctggcaacgctacttcccccaaagcagcaacatgagaagccagtaaccaaatcccacctgccctccctgctcccccacctaacaatactccatgatccatccatccatcctcacatatcctttgccacaaatacaaaacaagatttggtgcctgcctgcctgcctgcttgtgacgctgctactgatccggccagattatctgctgctactgatacatacagccagactatccgctgttatcattaccactaccagtggtgattagattgcagtggttgatttggggggagatggagtaggccgctagcctttccctgttcctccggttaaagaattaacagcggtgggacaacgaggattgatgcccactgtccgattaattgattcctctttcttcctcctccctcccttttaatacccgcccttgctttccctgcccgtcttttccattcccatttgttttggcggcggcggcggctgccgcgccaccagctttcctgtgcctctttcgcctcgcgggctatttctcctcctcctacctctcggcctcgtccttatacgagcgccattgtgaattttcgagcagcagctagctagcctgtcgtctcctccctcttgttcttggctactgatcctgttctgtcggcgatatccaagaaaacaaagacttggtctttttcctctgcgtgagcgagctgagtgagggagctcacttcttcgaacagccggagcctggagcagcagttgagctcccccggagaaagctgagccacggcgcctttgttgctctccgccgcacatggacagacagctcgctcttcccggcagtaacagctcaaggttctaggtctcggtcggcgatggagagggagtcgaggtcaagggtgctctcggagacggcgtcctgcgccggcacgccgaggtcggttcagtcgacttgcagtctccagcgccggtactcttcacggagcattctgaagccacatgatggcgcactggacatgtcgccacggttctcctactgcaagcctgccgccgacagagagaagatgttcaacagaagacactccctgaatttaccagagcaattgccaggtcattactccagaaaagcaacagaacggacccaaaaggctagctcaaagtctgttgcagatttggttggggagatcgcagcgctcgagcaggaagtcatacgcaaggaactgcacctgctcgctctctacagaagagcgtttgatcaatacgtatctgaatcctgcagcttcacaagcgagcaggtggaccaagaatttctgaaaagcatcgacgagggcgcgctacgtctgagggacataaagcgctccgcggcgttcgacctgccgacgacgaccatctcaggctctgaggagcaggaggaggcaccaccagaggcaaaggcaggcgcgaggcattccagcctcgtcaacttcctgagcgcctccatctcggagtacgtgcccaagatctcgtgcaagctgtcggaggacatcctgggctgcatcgccgccgtctactgcaagctctcgggcgcggagggggagtgctgcgtggcttcgccgagcccttcggtctcgtcttggagcaccttctctccgaggcgccggaacgatagctggagccctcggtctcggtgcaacaacttcgatagctggagcccgcggccgtgtggagtcgagaaggagagcggtgagcagagcccaggcgtgatgatggtcgtcgttccgaggatacgcgtcgacgctgacacgtttgagtacgcgtcgaagatgctcgagactaccaggtctctgatacagcgcctggagaaagtcgacccggtgaagatgacgcacgaggagcagctctgcttttggatcaatatccacaatgctctggtcatgcatgcttttctggcctatggtctgcacgacaagcgcatgaagagcacggacatgattctgaaggctgcgtataatgttggcggccaatcagtaaatgcgcagactattcagaactcgattcttggatgccgccagtcccaccgtccatcattgtgggtccgcgcgctgttcacgccggcgaaaagatccgcggcgaggcacccgtatgcgctccagcacccagaacccgttgcgcatttcgcgctgtcgaccggagcgttttcggacccacctgtgcggctgtacacggcgaagaagatacagcagcagctggaggcggcgcggacggagttcatccggggcagcgtggcggtgcggaagcaggcgctgctgctgcccaaggtgctgcactgctacgcccgggacgccgcgctggagctgcggcacctggtggagctggtgtgcgagaccttgtcggacgcgcagcagaagcagctgcagctcggcctccggcggagggccgtcgacaagtgcgtcgagtggatgccgtacaagtcgtccttcagatacgttgtacatagggatctggctgacgactaggcgggagccagccacgtacggtttgctctgtgtgattgcttgcttggttggttggtttacaaagtgtacaagtagtgggggtgggggtgtacatgcatgcatgtaaatacaggtgtgcatgctcactacttttgagctagtgagctgtggctttgaaacactgtacattctctctttgtgggctttgcgttgaggaatttgggatttgagactgaatcttgatgctagtgccgtccagtg

SEQ ID NO: 66217 - DNA, 3147 bp, Zea Mays
cacgaacaagagaaccaacgtacacagagcgtactggtaaatggcagagcctaatgctgtgtaggtgaatcggtgattgaccaagaatggtgatcttcttggtcatgaaccctggcaacgctacttcccccaaagcagcaacatgagaagccagtaaccaaatcccacctgccctccctgctcccccacctaacaatactccatgatccatccatccatcctcacatatcctttgccacaaatacaaaacaagatttggtgcctgcctgcctgcctgcttgtgacgctgctactgatccggccagattatctgctgctactgatacatacagccagactatccgctgttatcattaccactaccagtggtgattagattgcagtggttgatttggggggagatggagtaggccgctagcctttccctgttcctccggttaaagaattaacagcggtgggacaacgaggattgatgcccactgtccgattaattgattcctctttcttcctcctccctcccttttaatacccgcccttgctttccctgcccgtcttttccattcccatttgttttggcggcggcggcggctgccgcgccaccagctttcctgtgcctctttcgcctcgcgggctatttctcctcctcctacctctcggcctcgtccttatacgagcgccattgtgaattttcgagcagcagctagctagcctgtcgtctcctccctcttgttcttggctactgatcctgttctgtcggcgatatccaagaaaacaaagacttggtctttttcctctgcgtgagcgagctgagtgagggagctcacttcttcgaacagccggagcctggagcagcagttgagctcccccggagaaagctgagccacggcgcctttgttgctctccgccgcacatggacagacagctcgctcttcccggcagtaacagctcaaggttctaggtctcggtcggcgatggagagggagtcgaggtcaagggtgctctcggagacggcgtcctgcgccggcacgccgaggtcggttcagtcgacttgcagtctccagcgccggtactcttcacggaggttagttcgcgcgctgtactttctctcgcacgcgccctctcagctctcaaacgctgtgaaacctgaatggagatttatttttttcctctcccgtcctctacacgcagcgattttttgcattgtttcagttcggcagcctattaacttcctgctgtacaattcaaccgtcctcttcacgccgcatcgaattcctttgggccacaagtacagtacccgctagctgtagtgtagtccactgcccggagaccatcctcatgaacaccggttgacaatggtgccaggctgccagcatgcatggatcgaactcacactggctcattctgaagccacatgatggcgcactggacatgtcgccacggttctcctactgcaagcctgccgccgacagagagaagatgttcaacagaagacactccctgaatttaccagagcaattgccaggtcattactccagaaaagcaacagaacggacccaaaaggctagctcaaagtctgttgcagatttggttggggagatcgcagcgctcgagcaggaagtcatacgcaaggaactgcacctgctcgctctctacagaagagcgtttgatcaatacgtatctgaatcctgcagcttcacaagcgagcaggtggaccaagaatttctgaaaagcatcgacgagggcgcgctacgtctgagggacataaagcgctccgcggcgttcgacctgccgacgacgaccatctcaggctctgaggagcaggaggaggcaccaccagaggcaaaggcaggcgcgaggcattccagcctcgtcaacttcctgagcgcctccatctcggagtacgtgcccaagatctcgtgcaagctgtcggaggacatcctgggctgcatcgccgccgtctactgcaagctctcgggcgcggagggggagtgctgcgtggcttcgccgagcccttcggtctcgtcttggagcaccttctctccgaggcgccggaacgatagctggagccctcggtctcggtgcaacaacttcgatagctggagcccgcggccgtgtggagtcgagaaggagagcggtgagcagagcccaggcgtgatgatggtcgtcgttccgaggatacgcgtcgacgctgacacgtttgagtacgcgtcgaagatgctcgagactaccaggtctctgatacagcgcctggagaaagtcgacccggtgaagatgacgcacgaggagcagctctgcttttggatcaatatccacaatgctctggtcatgcatgcttttctggcctatggtctgcacgacaagcgcatgaagagcacggacatgattctgaaggctgcgtataatgttggcggccaatcagtaaatgcgcagactattcagaactcgattcttggatgccgccagtcccaccgtccatcattgtgggtccgcgcgctgttcacgccggcgaaaagatccgcggcgaggcacccgtatgcgctccagcacccagaacccgttgcgcatttcgcgctgtcgaccggagcgttttcggacccacctgtgcggctgtacacggcgaagaagatacagcagcagctggaggcggcgcggacggagttcatccggggcagcgtggcggtgcggaagcaggcgctgctgctgcccaaggtgctgcactgctacgcccgggacgccgcgctggagctgcggcacctggtggagctggtgtgcgagaccttgtcggacgcgcagcagaagcagctgcagctcggcctccggcggagggccgtcgacaagtgcgtcgagtggatgccgtacaagtcgtccttcagatacgttgtacatagggatctggctgacgactaggcgggagccagccacgtacggtttgctctgtgtgattgcttgcttggttggttggtttacaaagtgtacaagtagtgggggtgggggtgtacatgcatgcatgtaaatacaggtgtgcatgctcactacttttgagctagtgagctgtggctttgaaacactgtacattctctctttgtgggctttgcgttgaggaatttgggatttgagactgaatcttgatgctagtgccgtccagtg

SEQ ID NO: 66218 - DNA, 2724 bp, Zea Mays
gtaaccaaatcccacctgccctccctgctcccccacctaacaatactccatgatccatccatccatcctcacatatcctttgccacaaatacaaaacaagatttggtgcctgcctgcctgcctgcttgtgacgctgctactgatccggccagattatctgctgctactgatacatacagccagactatccgctgttatcattaccactaccagtggtgattagattgcagtggttgatttggggggagatggagtaggccgctagcctttccctgttcctccggttaaagaattaacagcggtgggacaacgaggattgatgcccactgtccgattaattgattcctctttcttcctcctccctcccttttaatacccgcccttgctttccctgcccgtcttttccattcccatttgttttggcggcggcggcggctgccgcgccaccagctttcctgtgcctctttcgcctcgcgggctatttctcctcctcctacctctcggcctcgtccttatacgagcgccattgtgaattttcgagcagcagctagctagcctgtcgtctcctccctcttgttcttggctactgatcctgttctgtcggcgatatccaagaaaacaaagacttggtctttttcctctgcgtgagcgagctgagtgagggagctcacttcttcgaacagccggagcctggagcagcagttgagctcccccggagaaagctgagccacggcgcctttgttgctctccgccgcacatggacagacagctcgctcttcccggcagtaacagctcaaggttctaggtctcggtcggcgatggagagggagtcgaggtcaagggtgctctcggagacggcgtcctgcgccggcacgccgaggtcggttcagtcgacttgcagtctccagcgccggtactcttcacggagcattctgaagccacatgatggcgcactggacatgtcgccacggttctcctactgcaagcctgccgccgacagagagaagatgttcaacagaagacactccctgaatttaccagagcaattgccaggtcattactccagaaaagcaacagaacggacccaaaaggctagctcaaagtctgttgcagatttggttggggagatcgcagcgctcgagcaggaagtcatacgcaaggaactgcacctgctcgctctctacagaagagcgtttgatcaatacgtatctgaatcctgcagcttcacaagcgagcaggtggaccaagaatttctgaaaagcatcgacgagggcgcgctacgtctgagggacataaagcgctccgcggcgttcgacctgccgacgacgaccatctcaggctctgtcagtgctgcgcacggatcgttttcatccattctttaactgtttcgaggagcaggaggaggcaccaccagaggcaaaggcaggcgcgaggcattccagcctcgtcaacttcctgagcgcctccatctcggagtacgtgcccaagatctcgtgcaagctgtcggaggacatcctgggctgcatcgccgccgtctactgcaagctctcgggcgcggagggggagtgctgcgtggcttcgccgagcccttcggtctcgtcttggagcaccttctctccgaggcgccggaacgatagctggagccctcggtctcggtgcaacaacttcgatagctggagcccgcggccgtgtggagtcgagaaggagagcggtgagcagagcccaggcgtgatgatggtcgtcgttccgaggatacgcgtcgacgctgacacgtttgagtacgcgtcgaagatgctcgagactaccaggtctctgatacagcgcctggagaaagtcgacccggtgaagatgacgcacgaggagcagctctgcttttggatcaatatccacaatgctctggtcatgcatgcttttctggcctatggtctgcacgacaagcgcatgaagagcacggacatgattctgaaggctgcgtataatgttggcggccaatcagtaaatgcgcagactattcagaactcgattcttggatgccgccagtcccaccgtccatcattgtgggtccgcgcgctgttcacgccggcgaaaagatccgcggcgaggcacccgtatgcgctccagcacccagaacccgttgcgcatttcgcgctgtcgaccggagcgttttcggacccacctgtgcggctgtacacggcgaagaagatacagcagcagctggaggcggcgcggacggagttcatccggggcagcgtggcggtgcggaagcaggcgctgctgctgcccaaggtgctgcactgctacgcccgggacgccgcgctggagctgcggcacctggtggagctggtgtgcgagaccttgtcggacgcgcagcagaagcagctgcagctcggcctccggcggagggccgtcgacaagtgcgtcgagtggatgccgtacaagtcgtccttcagatacgttgtacatagggatctggctgacgactaggcgggagccagccacgtacggtttgctctgtgtgattgcttgcttggttggttggtttacaaagtgtacaagtagtgggggtgggggtgtacatgcatgcatgtaaatacaggtgtgcatgctcactacttttgagctagtgagctgtggctttgaaacactgtacattctctctttgtgggctttgcgttgaggaatttgggatttgagactgaatcttgatgctagtgccgtccagtg

SEQ ID NO: 66219 - DNA, 1973 bp, Zea Mays
ggtcccctcctctgttcgcaccgctctcgccgacccccactggcgacgcgctatggaggagagtacgcggccctcctggccaaccacacctgggacctggtgccgtgtccaccaggcaccaacgtggtcaccagcaagtggctatttcgccacaagcttacctcggacgactccctcgaccgctacaaggcccgttgggtccttcggggcttcacccaacgccccgaagtggactacgacgagaccttcaaccccgtcgtcaagttcgccactgtccgcactgtcctctccctcgccctctcccgggactgggtgatccatcagctcgacgtcaagaatgccttcatccacggcaccctgacagagactgtctactgtagccagcccaccgacttcgtcgacgaagcccgtccggatctggtctaccggctgaaccgctccctctacggcctcaagcaggcgccgcgggcctggtacagtcgcttcgcctcctacttggtctccattggcttcgtcgaggccaagtcggacatgtccctcttcatctaccgccgcggcgacgacactgtcttccttctgctctacgtcgacgacattgtgctcacggcatccaccgccgaccttctacagcgcacgaggcacgatcgtcgccctgaagcgggagttcgcgatgaaggacctggggcccttccaccacttccttggcatcaccgccgagcgctggccccagggtctcttcctccatcagcgccagtacgtcgtcgacatactggagcgggctagcatgtccgactgtaagccctgctccacgcctgtcgacactcaggcgaagctctcagaggacgacgggcccccggtcgccgatgcgacgtcctaccggagcctgaccggcgcgctccagtacctcaccttctccaggcctgacatcgcctacgtcgtccagcaggtgtgcctgcatatgcacactctgcgggagcctcatctcaccgctctcaaacagatcatgcgctaccttcgcggctccctcgactacggcctcctactccgaccatccccgacgtcggaactcgtggtctacaccgacgccgactgggctggctgtgcagacacgcgtcgatccacctccggttacgccgtcttcctaggcgccaacctcgtctcctgggcctataggtgtacattcgggccgcccggcccagcccggcccaagcccgaaaaggcccgacacgtttaatttcgggccggcccggcccagtattaatttcgggtcgtgccgtgccggcccacgggccgacccctcggcccacggcccggcccatatttcactaaacgtgtcgtgctttaaacgggtggcccgaaataaaaaacggcccgaaataaaaaaacggcccgaaatgcagggaggacgctggcgctcgcgctcggccgcagggacgctcgcgctggagctgggccgcacccgtaggaacgctcgtcgctcggacgcagggcgcagggccgcaccgccgcagggaagctcgcgctcggctgccgcgacgctcgcgctggagctggctgggccgcaccgcactcgcagggatgctcgtcgctcgcgctcggacgcagggcgcagggccgcaccgccgcagcccgcagggacgctcgcgctcgactgcagggagctgccggagtgctggagcctggagctggccgccttggaggctgagagcctgagacggcggccggatgggagtctccagtcgggaatcgggatcgatggcggcggattgggacacgggagaaaaacggcggccggtagcgacgtagggtttcactgtttcagcctttcaggataaaacgctcgcgctcggcggcccgtggacacacaggactgagtacaggagtggggcagtgggctgctatgaatttcgggccttttcgtgccagtaaacgggccaattcgggtctgattaaacgggccgggctcgtgcccg

SEQ ID NO: 66220 - DNA, 1577 bp, Zea Mays
cggagttagtgacgactgacgagtgaggcagcgagccgatcgagtgatcccggggcgaccaccgcgcgcgcggagtcctttctttcttggccgcgaccaaaagcgagctcctctgctgcttcattcgttcgtctacccgcgacgcccggcccgcacacagacagctccagagtccagacgcctgatcggaaagcaacgtcgttgcccccacctcgtcacgagtcagagagctacacaacaaccatcctgttcccgcccgcatacaggactctagctagctagctagcgttgttccgttgtggttgctctcgctctcgttcggtcgatcatggagtggagggacagcttcttggacctggcgctcatcccgctcagcctgctcctccccatggcgtaccacgcctggctgtggcgcgaggtccgcctccgcccgctgcgcacggccgtcggcatcaacgccgccacgcgccgcctctgggccatcggcatgatgaaggtacgcacgtacggcgcattgttttgtctgtggatttttttttggtttctttcatggtcaattggctgcatgatgctgctgcggtgcgtatgtgattgttaactgtaagcgcaggacaacgccaagaacgcggtgacggtggtgcagtcggtgcggaacgtcatcatggggtcgacgctgatggccacgacggcgatcctcttctgcacgggcgtggcggcggtgctgagcagcacctacaccatcaagaagccgctcagcgacaccgtgttcggcgcgcacggcgagtacatgatggcgctcaagtacgtggcgctcatgctgctcttcctcctcgccttcctctgccactccctcgccatctgcttcctcaaccaggccagcttcctcatcaacacctcggcctgcctcttctcctcctccgccgactccgacgccgccgtcctcggcctcccgctgccgcccaccagggactacatcggcgacgtcctggagcgcggcttcaccctcaacctcgtcggcaacaggctcttctacgccggggtgcccctcctgctctggatcttcggcccgctcctcgccttcctgtcctccatggtcatggtccccatactctacagcctcgacgtcgtcaacctcatgggccacagcggatgcgtcgtcgtcagcggcaaatctgcggagatgaacggcgggagcgagtgcgcgcgtgccgtctgaagctgccggacttgtgtcctcaacaaaccatatgcatgcgatccgtacatgtgattcggttgagactgttgccgcgcgcaacggcctgtgatgtgtcgagcaccaaggagacggcatgttgttcgtcgtcgtcgttctctcattcatgtggggttataggctagccgcgcgccgtcgtagctgatgctgatgtactaggaaaaccttcgttgcatggatgacacggaacccataccccacgcggttcagttgctttgctgctcttggtgctcgacaagttgacagtgtgtgccactacaacacatattccaagtcggctttatctcttcctgtccctttgtctagtttatcttgacatgtg

SEQ ID NO: 66221 - DNA, 622 bp, Zea Mays
gcagcaggtgcggtggaagtgaggtggtggtgtgtactggtgcagatatggtggtgggtggtggtggaagttggccatcggccgctgtcatagtcggtggcagtccaccatatccaggcatgccgtaggggcagtctggtggcggcgccatggccgatgttcctggtgtggattccaccgcggcaatgcgggaggacatggaggccatctgcgtggcgaagagccccagttggcgctggacttcagcaagggcggtggtgattgctgccaactccgacggctgggctgaagctgcagtttcagcttcagcagatcctggcatatctgataccaggttgttagaattaccccggctgcggaggttgtatgagtggctaatggttggagggttggaggaagaggtgtgagagattgccgtggtgacgcctgacctagggttcaggcgcagcaatggagttgagaacagtagggaggcaagactcaatctctttctttgattaatctttcctcattacaaactaaaggcatagagggcttatatattgccctggcctaacaagacttcctccttttaaggggatctaaacaaactacctttatttaaggaaaatctaaacaactc

SEQ ID NO: 66222 - DNA, 214 bp, Zea Mays
aaaatttgctttagagcttgttggtccaatggcaatgcttagagcttggagctggctatcattgtatgatgactctaatgctttcctcatagggagtgcaagtcgatcaagatacacttttccagaattatgatggcttgcagcgcaagaaacaggattcaagattgccggcagcactgggatatcatgtaacgatgagagagcactgaattca

SEQ ID NO: 66223 - DNA, 293 bp, Zea Mays
caagaattgaagatgagctcgtcatctgaaggtagcacctgctctcccttctctgattatctcccggtctcccttccctctattaccactggtagctcgtcatctgaaggtgcacctgcagacctctgtttgagcagtctatattattgcagaaattactgctagtctgctactaattatgcctatattattgcagaaatgcagtgcttatatagttaatatatagttatatacatatacatatgtccttaaatctataggacgaccagaggtcgaccaggaccgattagtcg

SEQ ID NO: 66224 - DNA, 479 bp, Zea Mays
aagggaagaaattgtttagtctcatgggccaaggtgtaaagaccttacatgtctggcggtcttggagtacatgatctggaaaggatgagttgggcactgcgtatccgctggttatggtttatgaaaactgatccctcaaaaccatggtttggtcttcctagcaagctcaagcgttcttccaaatggccataactgtaaatattgggaatggtatttcttccaaattctggacagacaattggttacaaggaaagagtgtggctgaccttgctccaaatctgatcctagtagtcccaaagggagtaattaagaggcgtacattgagccaggcattatccaacagaggctgggtggctgatatcaagggcgctctaacagttcaggttttgatagaattcctcaaagtctgggagcttgttgagggtatagttctacatcctaatgtcccagatcatttttcttggaagttttcatcttca

SEQ ID NO: 66225 - DNA, 820 bp, Zea Mays
atgaatagtacagattgcttttccaggtgtgtggagagacatgtgtattcctcctatgacgaattcctcaggctccatgaagatgagttccacgcatcaagaagtcaagattccaggaggcctaaaataggagaggagggcgcagcttgattcaatccatgtcaagtcagaggctgctgcgaggtttgcatatgcaggtagaatttagatggtttattcaatttcggttgcaatgcttctgacaacagttgtatcagtcctcttgttcagcttccataataatgtactaaacttcagtgtggtgtctatctcagtgtacctacactcagttggaaaacttcaaccacactgcaacaaggtttataaaaggtttgctatgaggaaaaacaaatttatgggctcaaacaaagtgtgatagtgaaagtcattttgcttccagcttaagaaccaagacaagaaaacagatatcaactgtgacgccacactcagaagcttgtttggtgggagggacaaggttgggatgctggagatctccaagcttttgagtcgtgacttcccgaaaatctccaagcttttgtggtccatggagccagggatggctctttggtaaaagacttcgttgtggatggcctcttttatggtccatgttaagtctcaagtcccactaggtggttaagcagaaaaatcttgtgatggcattaagactttcagactttgtttttgggtctgatgcatgtaaaaaggattcccagtgtttctgttgctcttgcgatcctgtgaggacacatatgagagaaatatttagtctgttgatggcaaa

SEQ ID NO: 66226 - DNA, 737 bp, Zea Mays
tattgaagtccattctgttggcatcgtcccatctcccttgaaccctttcgcccacaccacagcaccgctgccgaaggtgggaaagaaggcggcggcggaggcaccggcaccggcaccgcctaggaaaggaaaccgaggaaactacagccatggtggtacggatccgtctggcgcggttcgggtgccggaatcggcccttctaccgggtgatggccgccgatagccgctcccctcgagacggcaagcacctcgaggtcctcggctactataacccgctcccagggaaggatggaggcaagaggatgggcctgaaattcgaccgggtgaagtattggctgtcagttggggcacagccatcagatcctgtgcagagtattctctttcgtgccggacttctgccaccacctccattgctagctatggcacggaagggtgggccacgtgataggcgccccattcatccaatgactgggcgccctctggatctcgagggtgtcgcaattattgataattccaatgctcctgaaggcgatactgaagtgcctacagatgaggtggctcaataagccttttgtattagcatagcatatgtagcggtgctgcaaaagaaaacttgtttgatgtgcttgtggcaagactttgggtactcgtacaatgtggcaaacttttaaacagtgcagtgcagcatcctttcgcggtctggagtctcctgcgggagtcattggtcaaggtctcgg

SEQ ID NO: 66227 - DNA, 3807 bp, Zea Mays
atggcctcggggacggggagctcgccgccgccggcgcatgaggagcgggtgctggagggagagggcgcattcgagatatccagtaagaacacgtcgcacgatcacctgcgacggtggaggcaagctgctctggtgctcaatgcttctcgtcgttttagatacactctagacctggaaaggcaggaagagaaagagaacttaagaagaatgttacgatcacatgcacaagtgatacgagcagtatttgttttcaaggaggctggccagaagaacctaagagagtattgcactagcataaaaggtgatacgctctctcagagattttcagttgatctgaaaaaactcaaaatgctgaacagagaccatgacgctattatattccaggaggttggaggggttaaggggctttcagatttactaaagagtgacttagacagaggacttagtccagatgagagtgaattgatgcggaggagagatatttttggggcaaacacatatccacgcaaggaaagaagaagcatttggcattttgtatttgaagcctgtcaggatttaactcttgtaattctaatggtagctgctgctatatcattctcactgggcatggcaacagagggtgtaaaagatggatggtatgatggtggaagcatattttttgctgtcttccttgtgatattcgttacagcaaccagtgattatagacaatcacttcagtttcaacatctgaatgaggagaaacgaaacatacaagttgaggtcatcagaggtggtaagagattagtagcttcaatatttgaccttgttgttggtgatgtagttcccctcaaaatcggtgaccaagttcctgcagatggtatactgatatatggtcattctcttgcaattgatgaatcgagtatgacaggggaatccaaaattgttaataaggaccaaagggcccctttcttgatgtccggttgcaaggttgcagatggttatggctctatgctggtaactggtgtcggtatcaatactgaatggggtatgctgatggccaacctttcagaggatattggtgaagaaaccccgttacaggtacgcttgaatggtgttgctactcttattggtatagtgggtttgtcggttgctggtgctgtcctcgtcatcctctggctaaggtattttactggacataccaagaatccagatgggactacccaatttttggctggaacaacaggtgtaaaacagggatttatgggggcaattagaattttgacaattgctgtgactattgtagttgttgctgtgcctgaaggacttcctttagcagtaacattgactcttgcatattcaatgagaaagatgatgcgagacaaggctctggtgagacggctctcatcttgtgaaacaatgggatcagcaaccactatttgcagtgacaagactggaactcttaccatgaataagatgacagttgttgaagcatatttgggtggggaaaaaatggatacttatgataacgccagcacgatgtgcaccagtgtgacagctctattaattgaaggaattgcacagaacacaacagggactgtgtttatgccagaggatggaggagctgcggaaattactggctcaccaactgaaaaagcaattctttcttggggcctaatgattggtatggactttaaggatgtgagatcaaaatcttcggttcttcatgttgtcccattcaattcagagaagaaacgtggtggtgtggctctgcaagtgtcagatacagaggttcacattcattggaaaggggcagcggagctactattagcatcttgcagaagctggctttctactgatggttctattcagcaaatgaattccatcaagcataacgaattcaaggaacggattgatgacatggcaatgagttcattgcgttgtgtagcttttgcatattgcccctgggaacccaaaatggtcccaatggaatctctagataagtggaagttgcctgaggatgatctgactcttattgggatggtcgggataaaggatccttgtcgcccaggagtgaggaatgctgtgcaattatgcagtactgctggtgtaaaggtacgcatggtcacaggagataatgttgaaacagcgaaggccatcgctgtggaatgtggaatattagacgcaaaagatgctgcatcagaacctaatgtaatagaaggaaaagtcttccgcgagatgtctgaaactgcacgagaagatattgctgacaaaattacagtaatgggaaggtcttctccaaatgacaaacttttgcttgttcaatgtttaaaaagaaggggccatgttgtagctgttactggcgatggcacaaatgatgctcctgcattacatgaggctgatataggtctttcaatgggaatatcaggaacagaagttgccaaggaaagctcagacattataatcttggatgatgacttcacctctgtggtcaaggttgttcgatggggccggtctgtttatgcaaatattcaaaagtttatccagttccaacttactgttaatgttgctgccctagttataaatgtgattgctgctgtgtcctccggggatgttcctctgaatgctgttgagcttctttgggtgaatcttattatggacacactcggagctcttgcattagcaaccgaaccaccaacagacaacctaatgaagaggcatcccgtcggtcgaagggaacctcttgtgacaaacgttatgtggagaaacctttttatccaggcactgtaccagatagcagttcttctcatcttcaattttgatggcaaaaggattcttcgtttacagaatggaagttgggagcatgctgagaaaactaaaaatacctttgtctttaatgcatttgtcttttgccaaatcttcaatgagttcaatgctcgcaagcctgaagagaagaatgtcttcaagggagttgcaaacaaccacctttttgtggccatagtgggtgcaaccaccgtgcttcagattttgataatcgagttcctcgggaagttcttcgatactgctagacttgattggagactatggttgctgtcagtggctattggtgcagtgagttggcctctcgcctatcttgggaaattcatccccgtgcctgtcagacctttccagagctacttcaagcattgttcttgtcgtagaggaccacgccaagatgaagagcaaggcggcaagagctgaaacttggcaggtgcgcccgcaagtgcagcactgcagatcaaaggcgtctcttgaacaccgttctctgaagcatccacaggctgtgtcgctgagccacagactagattctcagcaggagcttcatctggagcgatagccagtgcgtgcattccctacattcccaacgatttcccagcgaatgatgcggggtgcactcactgcagattgcagaagatcgctgtgcccgtgctgccataccacccttctaattcctcgcaactttgttgaaaactgaacctacatctccaatgattttcaatcgaattgaaccattagaagacagtggcttggttgtgttgcgaactgcaggctttgtaccatgcatacacgagtaattacgtagcgttgtgtgcacgaagcggcatccgcttccacctcctaaactttttactaatgtttagtcacttactcacttttagtctctaaatggttaaatcagataacgaaataggccttctaaattttagtcctttagtcccttacactaaggtaagcgtgacttacacttttatatggtctttatacatgtacatgtgagccatcttggcccga

SEQ ID NO: 66228 - DNA, 930 bp, Zea Mays
tactattgcccccagggagcagggcgaaccctagccgccacccccttcttccacgtcccacggacagccatactcggcgaacaggacccgcagcactgtagcgccatctgttctcttgctttcagccgtcttggatggaaacatgacagaatgtacaaagaaaaagtttcaaagttatcacatttgcatcaaccggaagtatataaaaccttgcattggcctctcgcctatcttgggaaattcatccccgtgcctgtcagacctttccagagctacttcaagcattgttcttgtcgtagaggaccacgccaagatgaagagcaaggcggcaagagctgaaacttggcaggtgcgcccgcaagtgcagcactgcagatcaaaggcgtctcttgaacaccgttctctgaagcatccacaggctgtgtcgctgagccacagactagattctcagcaggagcttcatctggagcgatagccagtgcgtgcattccctacattcccaacgatttcccagcgaatgatgcggggtgcactcactgcagattgcagaagatcgctgtgcccgtgctgccataccacccttctaattcctcgcaactttgttgaaaactgaacctacatctccaatgattttcaatcgaattgaaccattagaagacagtggcttggttgtgttgcgaactgcaggctttgtaccatgcatacacgagtaattacgtagcgttgtgtgcacgaagcggcatccgcttccacctcctaaactttttactaatgtttagtcacttactcacttttagtctctaaatggttaaatcagataacgaaataggccttctaaattttagtcctttagtcccttacactaaggtaagcgtgacttacacttttatatggtctttatacatgtacatgtgagccatcttggcccga

SEQ ID NO: 66229 - DNA, 1627 bp, Zea Mays
cttctccatgccccgatctcaccccggctcctcgcctcacccatgggcgagcggttatttcccccatcgcgttcctgctcggcgcccacctccctgtgctccctgttccaagctcgccgttgaagctccctgcacgctgcccatcgcgaagtcccctgcgtcccgtccgggattttgccgcgtgttcatgcttaccgtctatccacgcgtcgtgcgtcgagctcgcgcgccgaatcgttttctagctcgccatgacgtccggtgtcctgcctgctttgctcacccgcgtcggctactcgctaatgctccaactcatcagttgacgttatcctatccgcgcccgcacgcgaccgtggtcgtgttcgtcgagttcgccaacgctttgttgccgattcgactgtcgtcgctgttgtatgctttgctgcgtgctcgtcgagtgttgtcggttgtacctcagcactcgtgcttgccgctggctcgcgttaacactcgcgcgcctgctcgttgttactgcgtcgcgctcgctctttgtccatcaggcttcacgcgtgctcgtgtttgtcgtcgagccgttgaacccgttttaccttgctcaacctcgtctttgcccttctggtggtcgtcgtcagttttgtgctggactacgctccattatctagccacactggctgtcgaccttgttggtcctccccgtgtcgaactagcaagctctgccatcgttactcagctacacacctccagctcgccaagtcccacgcagccgtgctgctccctcgtcatcgtctgttcctacttttccccgccctatgctgcctcgctttgatgtgtgtcatcatctttaatcccagtaactcttccgatacgcgtctcgtcatgtttcgcctcctcgtggtcagtcccatctgggtcatgggggtggaagatctcaacactgcttcatatggctgttttagatgctgtttgcggggtagagagagttattgtgataaatgattttcgccctctcgtcacgttcgcaatcctcgtcaatcgtcgctggtttgagagaaattaccggaagatatggagaagaaagtgaagccgcaccacaccgtcaggtgttcaacgacaagctcgagccaggatttatcagcattctcgcgagtagtgagtcacgtctgatgctggtacgtttattgactgtgtgatgtggaagacaacccaagtcgaccctaagcgcgggctaatccgtaagatgatgttgatggacgaaccggaagatggataatctgaacgagtgcgtgccaggacaaagaatggtcgtcaagtggacgtcacctaagaacactaacctagtgtttattccaagcaagccccggtgcatgcaacccgttccttgtgtttttaaataatttttgcacactttaagtctagtgaaatgtgcattaggttcataggagttgcttggaaaccctttgatgcattgccttccttgatatccatacctttgtagatacttctgatgaagtatcaaaatatgatttacaaaaatgcttatccttgcttagatcttgtggatagaggttatcttttgcattaaggcctagctcaggggttatcctgaggaaggagaacttctacctgcaag

SEQ ID NO: 66230 - DNA, 1458 bp, Zea Mays
cagcgcgttcctgctcggcgcccacctccctgtgctccctgttccaagctcgccgttgaagctccctgcacgctgtccatcgcgaagtcccctgtgtcccgttcgagattttgtcgcgtgtccctacttaccgtctatccacgcgtcatgcgtcgagctcgcgcgccgaatctttttctagctcgccgcgacgctcggtgtcctgcctgctttgctcacccgcgtcggctactccctgatgctccaactcgtcagttgtcgttatcctatccgtgcccgcacgcgaccgtggtcgtgttcgtcgagttcgccaaggctctgttgctaattcgactgtcgtcactgttgtatgcttcgctgcgtgctcgtcgagtgttgtcggttgtacctcagcactcgtgcttgccgctggctcgcgttaacactcgcgcgcctgctcgttgttattgcgtcgcgctcgctcttcgtccatcgggcttcacgcgtgctcgcgtttgtcgtcgagccgttgaacccgttttaccttgctcgacctcgtctttgcccttctggtggccgtcgtcagtttggtgctggactatgctccattatctagccacactggctgtcgaccttgttggtcctccccgtgtcgaactagcaagctctgccatcgttactcagctacacacctccagctcgccaagtcccacgcaaccgtgctgctccctcgtcgtcgtccgttcctacttttccccgtcctatgccgcctcgctttgatgcgtgtcgtcatctttaatcccagtaactcttccgatacgcgtcttgtcatgtttcacctcgtggtcagccccatctgggtcatgggggcggaagatctcaacactgcttcatatggctgttttagatgttgtttgcggggtagagaaagttattgtgataaatgattttcgccctctcatcacattcgcaatcctcgtcaatcatcgctggtttgagagaaattaccataagatatggagaagaaagtgaagccgcaccacaccgtcaggtgttcaacgacatgctcgagccaggatttatcagcattcttgtgagtagtgagtcatgtttgatgctggtacgtttattgactacgtgatgtggaagacaacccaagtcgactccaagcgtgggcgaatccgcaagatgatgttgatggacgaaccagaagatggataatctgaacgagtgcgtgccaggacaaaggatggtcgtcaagtggacgtcacctaacaacactaacctagtgtttattccaggcaagccgcggtgcatgcaaccccttccttgtgtttttaaataatttttgcacactttaagtctagtgaaatgtgcattatgttcataagagttgcttggaaaccctttgatgcattgccttccttgatatccatacctttgtagacacttatgatgaagtatcaaaatatgacttac

SEQ ID NO: 66231 - DNA, 1134 bp, Zea Mays
tcgactgtcgtcactgttgtatgcttcgctgcgtgctcgtcgagtgttgtcggttgtacctcagcactcgtgcttgccgctggctcgcgttaacactcgcgcgcctgctcgttgttattgcgtcgcgctcgctcttcgtccatcgggcttcacgcgtgctcgcgtttgtcgtcgagccgttgaacccgttttaccttgctcgacctcgtctttgcccttctggtggccgtcgtcagtttggtgctggactatgctccattatctagccacactggctgtcgaccttgttggtcctccccgtgtcgaactagcaagctctgccatcgttactcagctacacacctccagctcgccaagtcccacgcaaccgtgctgctccctcgtcgtcgtccgttcctacttttccccgtcctatgccgcctcgctttgatgcgtgtcgtcatctttaatcccagtaactcttccgatacgcgtcttgtcatgtttcacctcgtggtcagccccatctgggtcatgggggcggaagatctcaacactgcttcatatggctgttttagatgttgtttgcggggtagagaaagttattgtgataaatgattttcgccctctcatcacattcgcaatcctcgtcaatcatcgctggtttgagagaaattaccataagatatggagaagaaagtgaagccgcaccacaccgtcaggtgttcaacgacatgctcgagccaggatttatcagcattcttgtgagtagtgagtcatgtttgatgctggtaaggtacgtttattgactacgtgatgtggaagacaacccaagtcgactccaagcgtgggcgaatccgcaagatgatgttgatggacgaaccagaagatggataatctgaacgagtgcgtgccaggacaaaggatggtcgtcaagtggacgtcacctaacaacactaacctagtgtttattccaggcaagccgcggtgcatgcaaccccttccttgtgtttttaaataatttttgcacactttaagtctagtgaaatgtgcattatgttcataagagttgcttggaaaccctttgatgcattgccttccttgatatccatacctttgtagacacttatgatgaagtatcaaaatatgacttac

SEQ ID NO: 66232 - DNA, 1401 bp, Zea Mays
ctccgcccagagcttctgttcgatgccccctccttcaccacccgcctcgcaagtgcgcacgtgcgatgctggcgccgcgcagtcgcccacgcgcgggacggtgagtgagatggcgcgatacttccgcagcagcaacctcgcctctagggtcttcgagcgtcagctcatctccccgcgccctggcgctaccgttaacactattagacagttctatgaaaatttggtcccaagctatactatatatgacatagattgcccagattattcgtttcgcaagttcactgatgatgggaaatattttgtggcctttagccgaaaccatcaagatttgattgtataccgtccaatctggttgacatattcatgcaatgaagaatgtgatcctcatgagcttccgccaaaggcaaagaagtttgacagcttctttaagcagctttattcaattcctcttgcatctggcaatgagtatatttgcaaggactttttcctgtacatggaatgccatcgatttggtttatttgcaacatctactgcacaaagtaacgaatcaactgccactgagggtgcaatacatggggtgccattaattgagaaaataactttccatcttgtgaggctagaagatggtgtgatacttgatgaaaaggctttctgcaatgattttatcaatctggcacatagtattggtgcttacatgtatgaggaccttctttgtattgtttctttgcgataccaaacaatacatatcctacagatacgagattcaggcaaccttgttgaggtacgcagcattggtgcattctgccgggaagatgatgagctatttcttcactcacatgttcagactggttatgcgggttcctttcttcctggcataaagcaacggttgttgtcgtatattttttgcaagacgtggaatgaggttccagatcagactttgagggtccaacatctaaagaagttctattttcacttccaagattatgttgatcttatcatatggaaggtttctcggagtactgaccaaaacctagctttctttgccgtgtacaacatggagacaacggatatcgtttcacttcatcagaattcttcggaggagctctatgccttgtttgaacaattttatgaccattttcatgcaaacccacaagcttcatcacatggaaaatttatctcctctcattccaatgatattcatgctctggatcaacttcgggttataaaaaataaagcaagtagctcctcacagtttgtgaaaaagatgatgacgtcattaccttacacttgccaatcacagagtccatcaccgtactttgacctgtccctttttaggtatgatgagaagctctttgtcaggcaagggaggaacaacaattgtgggaaatggcaggagctaag

SEQ ID NO: 66233 - DNA, 1518 bp, Zea Mays
cgcccagagcttctgttcgatgccccctccttcaccacccgcctcgcaagtgcgcacgtgcgatgctggcgccgcgcagtcgcccacgcgcgggacggtgagtgagatggcgcgatacttccgcagcagcaacctcgcctctagggtcttcgagcgtcagctcatctccccgcgccctggcgctaccgttaacactattagacagttctatgaaaatttggtcccaagctatactatatatgacatagattgcccagattattcgtttcgcaagttcactgatgatgggaaatattttgtggcctttagccgaaaccatcaagatttgattgtataccgtccaatctggttgacatattcatgcaatgaagaatgtgatcctcatgagcttccgccaaaggcaaagaagtttgacagcttctttaagcagctttattcaattcctcttgcatctggcaatgagtatatttgcaaggactttttcctgtacatggaatgccatcgatttggtttatttgcaacatctactgcacaaagtaacgaatcaactgccactgagggtgcaatacatggggtgccattaattgagaaaataactttccatcttgtgaggctagaagatggtgtgatacttgatgaaaaggctttctgcaatgattttatcaatctggcacatagtattggtgcttacatgtatgaggaccttctttgtattgtttctttgcgataccaaacaatacatatcctacagatacgagattcaggcaaccttgttgaggtacgcagcattggtgcattctgccgggaagatgatgagctatttcttcactcacatgttcagactggttatgcgggttcctttcttcctggcataaagcaacggttgttgtcgtatattttttgcaagacgtggaatgaggttccagatcagactttgagggtccaacatctaaagaagttctattttcacttccaagattatgttgatcttatcatatggaaggtacagtttttggatcgccatcacctatttgtcaagttcggtagtgtggatggaggggtttctcggagtactgaccaaaacctagctttctttgccgtgtacaacatggagacaacggatatcgtttcacttcatcagaattcttcggaggagctctatgccttgtttgaacaattttatgaccattttcatgcaaacccacaagcttcatcacatggaaaatttatctcctctcattccaatgatattcatgctctggatcaacttcgggttataaaaaataaagcaagtagctcctcacaggaaagctgtgcatcatttaattagagaagaaaagatccaaaatggaccaaggtacagagcctaacaggcaaggtaaaaacacacgtacacacactatcctgcagccaaactacagcctccaccagaacagaggccatggcgggactacagggggactccacacccacaaaaattatgccatgttcatattaagtgcgacctctaggcctaag

SEQ ID NO: 66234 - DNA, 1336 bp, Zea Mays
cgcccagagcttctgttcgatgccccctccttcaccacccgcctcgcaagtgcgcacgtgcgatgctggcgccgcgcagtcgcccacgcgcgggacggtgagtgagatggcgcgatacttccgcagcagcaacctcgcctctagggtcttcgagcgtcagctcatctccccgcgccctggcgctaccgttaacactattagacagttctatgaaaatttggtcccaagctatactatatatgacatagattgcccagattattcgtttcgcaagttcactgatgatgggaaatattttgtggcctttagccgaaaccatcaagatttgattgtataccgtccaatctggttgacatattcatgcaatgaagaatgtgatcctcatgagcttccgccaaaggcaaagaagtttgacagcttctttaagcagctttattcaattcctcttgcatctggcaatgagtatatttgcaaggactttttcctgtacatggaatgccatcgatttggtttatttgcaacatctactgcacaaagtaacgaatcaactgccactgagggtgcaatacatggggtgccattaattgagaaaataactttccatcttgtgaggctagaagatggtgtgatacttgatgaaaaggctttctgcaatgattttatcaatctggcacatagtattggtgcttacatgtatgaggaccttctttgtattgtttctttgcgataccaaacaatacatatcctacagatacgagattcaggcaaccttgttgaggtacgcagcattggtgcattctgccgggaagatgatgagctatttcttcactcacatgttcagactggttatgcgggttcctttcttcctggcataaagcaacggttgttgtcgtatattttttgcaagacgtggaatgaggttccagatcagactttgagggtccaacatctaaagaagttctattttcacttccaagattatgttgatcttatcatatggaaggtacagtttttggatcgccatcacctatttgtcaagttcggtagtgtggatggaggggtttctcggagtactgaccaaaacctagctttctttgccgtgtacaacatggagacaacggatatcgtttcacttcatcagaattcttcggaggagctctatgccttgtttgaacaattttatgaccattttcatgcaaacccacaagcttcatcacatggaaaatttatctcctctcattccaatgatattcatgctctggatcaacttcgggttataaaaaataaagcaagtagctcctcacagctgattcatgttgagtgctgcactttatag

SEQ ID NO: 66235 - DNA, 1397 bp, Zea Mays
cgcccagagcttctgttcgatgccccctccttcaccacccgcctcgcaagtgcgcacgtgcgatgctggcgccgcgcagtcgcccacgcgcgggacggtgagtgagatggcgcgatacttccgcagcagcaacctcgcctctagggtcttcgagcgtcagctcatctccccgcgccctggcgctaccgttaacactattagacagttctatgaaaatttggtcccaagctatactatatatgacatagattgcccagattattcgtttcgcaagttcactgatgatgggaaatattttgtggcctttagccgaaaccatcaagatttgattgtataccgtccaatctggttgacatattcatgcaatgaagaatgtgatcctcatgagcttccgccaaaggcaaagaagtttgacagcttctttaagcagctttattcaattcctcttgcatctggcaatgagtatatttgcaaggactttttcctgtacatggaatgccatcgatttggtttatttgcaacatctactgcacaaagtaacgaatcaactgccactgagggtgcaatacatggggtgccattaattgagaaaataactttccatcttgtgaggctagaagatggtgtgatacttgatgaaaaggctttctgcaatgattttatcaatctggcacatagtattggtgcttacatgtatgaggaccttctttgtattgtttctttgcgataccaaacaatacatatcctacagatacgagattcaggcaaccttgttgaggtacgcagcattggtgcattctgccgggaagatgatgagctatttcttcactcacatgttcagactggttatgcgggttcctttcttcctggcataaagcaacggttgttgtcgtatattttttgcaagacgtggaatgaggttccagatcagactttgagggtccaacatctaaagaagttctattttcacttccaagattatgttgatcttatcatatggaaggtttctcggagtactgaccaaaacctagctttctttgccgtgtacaacatggagacaacggatatcgtttcacttcatcagaattcttcggaggagctctatgccttgtttgaacaattttatgaccattttcatgcaaacccacaagcttcatcacatggaaaatttatctcctctcattccaatgatattcatgctctggatcaacttcgggttataaaaaataaagcaagtagctcctcacagtttgtgaaaaagatgatgacgtcattaccttacacttgccaatcacagagtccatcaccgtactttgacctgtccctttttagggcacatgcgcctagggcactgccatgtatagagttctcttagtatagcaggtaggaataatggc

SEQ ID NO: 66236 - DNA, 1933 bp, Zea Mays
cgcccagagcttctgttcgatgccccctccttcaccacccgcctcgcaagtgcgcacgtgcgatgctggcgccgcgcagtcgcccacgcgcgggacggtgagtgagatggcgcgatacttccgcagcagcaacctcgcctctagggtcttcgagcgtcagctcatctccccgcgccctggcgctaccgttaacactattagacagttctatgaaaatttggtcccaagctatactatatatgacatagattgcccagattattcgtttcgcaagttcactgatgatgggaaatattttgtggcctttagccgaaaccatcaagatttgattgtataccgtccaatctggttgacatattcatgcaatgaagaatgtgatcctcatgagcttccgccaaaggcaaagaagtttgacagcttctttaagcagctttattcaattcctcttgcatctggcaatgagtatatttgcaaggactttttcctgtacatggaatgccatcgatttggtttatttgcaacatctactgcacaaagtaacgaatcaactgccactgagggtgcaatacatggggtgccattaattgagaaaataactttccatcttgtgaggctagaagatggtgtgatacttgatgaaaaggctttctgcaatgattttatcaatctggcacatagtattggtgcttacatgtatgaggaccttctttgtattgtttctttgcgataccaaacaatacatatcctacagatacgagattcaggcaaccttgttgaggtacgcagcattggtgcattctgccgggaagatgatgagctatttcttcactcacatgttcagactggttatgcgggttcctttcttcctggcataaagcaacggttgttgtcgtatattttttgcaagacgtggaatgaggttccagatcagactttgagggtccaacatctaaagaagttctattttcacttccaagattatgttgatcttatcatatggaaggtttctcggagtactgaccaaaacctagctttctttgccgtgtacaacatggagacaacggatatcgtttcacttcatcagaattcttcggaggagctctatgccttgtttgaacaattttatgaccattttcatgcaaacccacaagcttcatcacatggaaaatttatctcctctcattccaatgatattcatgctctggatcaacttcgggttataaaaaataaagcaagtagctcctcacagtttgtgaaaaagatgatgacgtcattaccttacacttgccaatcacagagtccatcaccgtactttgacctgtccctttttaggttcagattctggtgcttctgacagcagaataaaaagaatctcgtctttcttgtttcacccatttttcccgcttgcactttcgattcagcagacttatatgcagccaactgttctcaacatccatttcaggagatagaaaagtaggggataagatccattgtctggcggtgagaatggctagtttgatttctcttccaaaacaaagtacaaaatgcaaatgggctcaatattcatctattgatgtggcttcatgggctcatcagtcatcattgcggcttcacagtgttgatctatgctttcatatgcctagctcggagtgtcagatgtgcttgttattggatttgaggcataaggacacgtatattggatggcatggagttggtatattggatgcttcatgcttgaggcgagggtgatctaagctgcgaatttgttttcgaggatatataggaaatatagcattacaaatagttttgagttgtcatattatgatgaagtaactactatttactgaaactgttatgcaaagataataattatttttctgtgttcaatatattacaaaaaacttcataatctacaacctttgtttgtctaaac

SEQ ID NO: 66237 - DNA, 2043 bp, Zea Mays
cgcccagagcttctgttcgatgccccctccttcaccacccgcctcgcaagtgcgcacgtgcgatgctggcgccgcgcagtcgcccacgcgcgggacggtgagtgagatggcgcgatacttccgcagcagcaacctcgcctctagggtcttcgagcgtcagctcatctccccgcgccctggcgctaccgttaacactattagacagttctatgaaaatttggtcccaagctatactatatatgacatagattgcccagattattcgtttcgcaagttcactgatgatgggaaatattttgtggcctttagccgaaaccatcaagatttgattgtataccgtccaatctggttgacatattcatgcaatgaagaatgtgatcctcatgagcttccgccaaaggcaaagaagtttgacagcttctttaagcagctttattcaattcctcttgcatctggcaatgagtatatttgcaaggactttttcctgtacatggaatgccatcgatttggtttatttgcaacatctactgcacaaagtaacgaatcaactgccactgagggtgcaatacatggggtgccattaattgagaaaataactttccatcttgtgaggctagaagatggtgtgatacttgatgaaaaggctttctgcaatgattttatcaatctggcacatagtattggtgcttacatgtatgaggaccttctttgtattgtttctttgcgataccaaacaatacatatcctacagatacgagattcaggcaaccttgttgaggtacgcagcattggtgcattctgccgggaagatgatgagctatttcttcactcacatgttcagactggttatgcgggttcctttcttcctggcataaagcaacggttgttgtcgtatattttttgcaagacgtggaatgaggttccagatcagactttgagggtccaacatctaaagaagttctattttcacttccaagattatgttgatcttatcatatggaaggtttctcggagtactgaccaaaacctagctttctttgccgtgtacaacatggagacaacggatatcgtttcacttcatcagaattcttcggaggagctctatgccttgtttgaacaattttatgaccattttcatgcaaacccacaagcttcatcacatggaaaatttatctcctctcattccaatgatattcatgctctggatcaacttcgggttataaaaaataaagcaagtagctcctcacagtttgtgaaaaagatgatgacgtcattaccttacacttgccaatcacagagtccatcaccgtactttgacctgtccctttttaggtatgatgagaagctgatttcagcaattgatcggcatcgacattgcacagagcatccaataaaatttatatcagtgaggcaaaatgttgtcaaatttaagatcaagccaggttcagattctggtgcttctgacagcagaataaaaagaatctcgtctttcttgtttcacccatttttcccgcttgcactttcgattcagcagacttatatgcagccaactgttctcaacatccatttcaggagatagaaaagtaggggataagatccattgtctggcggtgagaatggctagtttgatttctcttccaaaacaaagtacaaaatgcaaatgggctcaatattcatctattgatgtggcttcatgggctcatcagtcatcattgcggcttcacagtgttgatctatgctttcatatgcctagctcggagtgtcagatgtgcttgttattggatttgaggcataaggacacgtatattggatggcatggagttggtatattggatgcttcatgcttgaggcgagggtgatctaagctgcgaatttgttttcgaggatatataggaaatatagcattacaaatagttttgagttgtcatattatgatgaagtaactactatttactgaaactgttatgcaaagataataattatttttctgtgttcaatatattacaaaaaacttcataatctacaacctttgtttgtctaaac
